United States Patent Application Publication US 2005/0228172 A9 - sequence listing, part 150

SEQ ID NO: 692002 - DNA, 922 bp, Homo sapiens
aatgtgtgaaaaatgcatgtattatacatacattcattatttttaaagatttgaagaaataccacaaatgttagcagtaatggggatcaaagattagggctatatttttctctttctacatttctttacattccactttttacaaatatgtgcataattttaatggctagaacaataaaagtactcgtttattgcaaagacagccaagtctccccttcccgggatttctgtctcttccacaccatgcctgccagcactacgttaacgctaggccctgatcagccttccccttgctccttccggtgccttctgagagctgaaattgtaaaatattaatcagatgttctgcttttagcacactaaaattctgagcagctatccagagagttggattgtgttatcaccggtacatttttctgttttgcctattttataatctgagcagtgtgtacaattcataacttcagcttagctgtgtagtctgttgacaattcccacaataatatcacttagctgctcttgtctttcatcctcacccacctctctcctgtgagctgcacttgtagatatttaaatagtcccctgaatgccttctttacktatgtccttactatgccactacactattctctccaaactatgactgatttattcatttattcagttattgaacttcaatacattttttattatagagtaccatgtgtaaggcactggaagcacaaagatacaaaaaaagtaaaatctccttgtcttaggtaagtatacaatctggtgggaagtcaaagaaacaagcaaacaatcacaatattctaacactattgtttcagtggagggctgtgtaaacatcagcctgagcactgaagccttccctaatggggagtcaggagaagctttgccactgaagtcagatttcaactga

SEQ ID NO: 692003 - DNA, 510 bp, Homo sapiens
aacctaataacactatcttcacaggctgtgttctgatgcataatgtgagcactgtgctggctacagaacctccaagcctggatttccagacttatcagagattctgtgagtcaccaccatatttcagcaaatcccctttctgcttyaattaataagagttggtttcttttgcttgtaacttaaaaccgtgactgatgctttcaggttctggaggaagtaagattttataattctcaaatcctgtaaggactaaactttcaacatcttcagttgaaacaacctttgttcattctcttcattacttcattgattttgttcattcagtcattcagtcatttagttgttcattcattcattcagcaactacttactgaacctttactctgtgccaattggcaaaaacagacatggtccctcctctcatgtacatgtagtttagtaggcaataatcacacaaataaatgtaaaggtgcaactgtgataactgttcaggaaagagccatattatag

SEQ ID NO: 692004 - DNA, 656 bp, Homo sapiens
gtctcacactggcatccgggctggagtgcagtagcatgatctcggctcactgcaacctccccctcccaggttcaagcgattctcctgcttcagcctcccaagtagctgggattacaggcacccgccatggcgtccagctaatttttttgtatttttagtagagacggggtttcattacgttggtcaggctggtctcaaactcctgaccttgtgatccactcgcctcagcctcccaaagtgctgggattacaggcatgagccaccgcgcctggcctagaaaaatcattttaaaactttcctaaatgggagacaattagatcatcatagcagatggcaggcaggaccagattgcagttctggacagagcagcttgtggaagctcacattgtgaattttagckgcagatcaactgcaagaacaaaccagcaaccctgagaggaccctccaaaggaagcagtctgctcctgcaggacctgggagataccccaaatactgtgagtgccccaactgcagaagtgggaaagggagaccctcctctcccaaacacacaacaaaaaaaaaagtccaggaccagatagattcacagtagaattctaccacacattcaaagaagaattggtaccaatccttttgatgctgttctacaagatagagga

SEQ ID NO: 692005 - DNA, 656 bp, Homo sapiens
gtctcacactggcatccgggctggagtgcagtagcatgatctcggctcactgcaacctccccctcccaggttcaagcgattctcctgcttcagcctcccaagtagctgggattacaggcacccgccatggcgtccagctaatttttttgtatttttagtagagacggggtttcattacgttggtcaggctggtctcaaactcctgaccttgtgatccactcgcctcagcctcccaaagtgctgggattacaggcatgagccaccgcgcctggcctagaaaaatcattttaaaactttcctaaatgggagacaattagatcatcatagcagatggcaggcaggaccagattgcagttctggacagagcagcttgtggaagctcacattgtgaattttagcggcagatcaactgcaagaacaaaccagcaamcctgagaggaccctccaaaggaagcagtctgctcctgcaggacctgggagataccccaaatactgtgagtgccccaactgcagaagtgggaaagggagaccctcctctcccaaacacacaacaaaaaaaaaagtccaggaccagatagattcacagtagaattctaccacacattcaaagaagaattggtaccaatccttttgatgctgttctacaagatagagga

SEQ ID NO: 692006 - DNA, 656 bp, Homo sapiens
gtctcacactggcatccgggctggagtgcagtagcatgatctcggctcactgcaacctccccctcccaggttcaagcgattctcctgcttcagcctcccaagtagctgggattacaggcacccgccatggcgtccagctaatttttttgtatttttagtagagacggggtttcattacgttggtcaggctggtctcaaactcctgaccttgtgatccactcgcctcagcctcccaaagtgctgggattacaggcatgagccaccgcgcctggcctagaaaaatcattttaaaactttcctaaatgggagacaattagatcatcatagcagatggcaggcaggaccagattgcagttctggacagagcagcttgtggaagctcacattgtgaattttagcggcagatcaactgcaagaacaaaccagcaaccctgagaggaccctccaaaggaagcagwctgctcctgcaggacctgggagataccccaaatactgtgagtgccccaactgcagaagtgggaaagggagaccctcctctcccaaacacacaacaaaaaaaaaagtccaggaccagatagattcacagtagaattctaccacacattcaaagaagaattggtaccaatccttttgatgctgttctacaagatagagga

SEQ ID NO: 692007 - DNA, 958 bp, Homo sapiens
atcaagctgtgaaatgaggttttagctgtgggtgtctcattgatgccagccgtgctcaggaggctctgtctctggagtgtctttaaaatcgtgcccctgcagtgtcccccataggcaagagcacacagcccagttgagatgggaactttttccttaaaagtttcctcagaaggttttatctttccttactatttttttttctatttcattcatcctattatcttaggaagccccattcagcagcagtgtcagtggctcaccaaaagcatgtcaaaattaataaaagcttcagggcagcaaaattgcctttttggcactgagggctggtggacacgtgtgtgtgtgtgtgtgcgcgcacatatgtgcatgtatgcatgtgagtgtgtgcatgcgcgtgtgtctgaaagagacagaatataaaaataagacttacagttttgcttttacaagacacctgaaaaatccaactagggtttaaaagaaaaaacagctcttaaatttaccttaaagaaatgcagctgatatacatcaaaataataatattcygtgagtctgcaccttaagcttgaatccagtgttgggttcatttgcttttttggaaaggaggatagtagaaaacccagtgttatccacaccacaaagcataaaaccaatgaagaactaagaattgtgggagtggaaagagttatgttggtccttcgagaaacaccctcttagtctaagctttgtaaactgacatccagagaagataaataatctatccagggccatgcagctgctaagaggaagagccagaaatagaacccaggtctccctggtcagtgctgtgtccattgccccacagtgcttttccatatcagtaaatacatatgtaactagatggagaacatgaaatgttcaccaggaatcctcttggggtcagcaggccatgcgttaggaagaaacagccaatgacaca

SEQ ID NO: 692008 - DNA, 1125 bp, Homo sapiens
acagcatcatttcttttttaatgttgttccaattattcctaaaataattagaatatggcttactgtattcttttagtaatcaatatttctttttggcaaaatattatgtgatttttttaaataagataatagcttccattacaacaaaatgactatttctcttaacatacttgaacttcatatgaagatggaaccagcaaaaggaggaatgcttttggcgatttattaacatttagtcagttagatttcacttacaagaagggcacctggcatcttccattagttatattatcacaattgcaagggctaagataatagtggcatataggagggaaaaaactaaaagagggatttactttaaaattagctcaagatgcatgaagtaaacaatttttaaaacccataagtagacagctagctaatagttattacattcaataatttagcatgatatgcatgacrattttgacctccaaaataatttagtgccttgagctgagattaaatgcagaacattaatttttccctctggttgtcaagccaaccaagagacccatcaaatccatttaaataaagcctgcatcatgtaataatattaaagggaataaaatattaatatgggcctgtggtagaacattggccaacagcgctgcagtgaggtgcctttaatttattaccctgacaatctgtcttgcactaaaactaggcgttaaagcaccatctaagaattatttttttgagctagaagatggacccatttaagaaaggtcacagttccttccactgcacagaatttttagtatctccaagcaaaagaagtcgagttccactttaattgtatgaacttgaagagataacaaagtacaaatgcccaaaacccattgtaatgaaaatgaaattttcaaagaaaagggtagacactaactcattacgtgaggcttgatgagctttcccccatagtaaaagtccatctaaatcaatgtattatttacatgccacatacaccaaccttcgtcagtgctcttctcccaaacacattctgatttttatctctgaataccatttttctggatcattttccaatgggtttgctaagttttaagtacatattcttaaatactttat

SEQ ID NO: 692009 - DNA, 1125 bp, Homo sapiens
acagcatcatttcttttttaatgttgttccaattattcctaaaataattagaatatggcttactgtattcttttagtaatcaatatttctttttggcaaaatattatgtgatttttttaaataagataatagcttccattacaacaaaatgactatttctcttaacatacttgaacttcatatgaagatggaaccagcaaaaggaggaatgcttttggcgatttattaacatttagtcagttagatttcacttacaagaagggcacctggcatcttccattagttatattatcacaattgcaagggctaagataatagtggcatataggagggaaaaaactaaaagagggatttactttaaaattagctcaagatgcatgaagtaaacaatttttaaaacccataagtagacagctagctaatagttattacattcaataatttagcatgatatgcatgacgattttgacctccaaaataatttagtgccttgagctgagattaaatgcagaacattaatttttccctctggttgtcaagccaaccaagagacccatcaaatccatttaaataaagcctgcatcatgtaataatattaaagggaataaaatattaatatgggcctgtggtagaacattggccaacagcgctgcagtgaggtgcctttaatttattaccctgacaatctgtcttgcactaaaactaggcgttaaagcaccatctaagaattwtttttttgagctagaagatggacccatttaagaaaggtcacagttccttccactgcacagaatttttagtatctccaagcaaaagaagtcgagttccactttaattgtatgaacttgaagagataacaaagtacaaatgcccaaaacccattgtaatgaaaatgaaattttcaaagaaaagggtagacactaactcattacgtgaggcttgatgagctttcccccatagtaaaagtccatctaaatcaatgtattatttacatgccacatacaccaaccttcgtcagtgctcttctcccaaacacattctgatttttatctctgaataccatttttctggatcattttccaatgggtttgctaagttttaagtacatattcttaaatactttat

SEQ ID NO: 692010 - DNA, 628 bp, Homo sapiens
ccagttcaaaattatarctatcaggttttcttagatgctcaaaatcatctaaacattattcttttaggcaagcaaatcataatcaaatcactcagaatcaatgaattgattggccgtatgaaggaccacctccataaaacagatatgcaaaaatatacatggaattccagtgggttcatgaactccactaagcttatttactaaccctgactagcggcttctgctttaaataatttttatcttattttattattttaccctcatgtgttttcatttgcattattttattgcaagcaatttataagtctttaagaaagaacaaaagcattcaacttaaattcaagtaagcaattttaatattttaggattttctcttatgataaacattacataaccttggaaacaaggttgagaatgtctgataacttatttttaaatctttattcctattcatagttatggttatttacaaagttatagtcgcagagacaaaatataaggttaaaatctctgaaagatctccttaatttgttttagtttccgttccaatttttaaggttccatattaacttcttgagtgtgaagcaaatagtgcaccatgttctttctcaaagtagccagtgagttg

SEQ ID NO: 692011 - DNA, 628 bp, Homo sapiens
ccagttcaaaattataactatcaggttttcttagatgctcaaaatcatctaaacattmttcttttaggcaagcaaatcataatcaaatcactcagaatcaatgaattgattggccgtatgaaggaccacctccataaaacagatatgcaaaaatatacatggaattccagtgggttcatgaactccactaagcttatttactaaccctgactagcggcttctgctttaaataatttttatcttattttattattttaccctcatgtgttttcatttgcattattttattgcaagcaatttataagtctttaagaaagaacaaaagcattcaacttaaattcaagtaagcaattttaatattttaggattttctcttatgataaacattacataaccttggaaacaaggttgagaatgtctgataacttatttttaaatctttattcctattcatagttatggttatttacaaagttatagtcgcagagacaaaatataaggttaaaatctctgaaagatctccttaatttgttttagtttccgttccaatttttaaggttccatattaacttcttgagtgtgaagcaaatagtgcaccatgttctttctcaaagtagccagtgagttg

SEQ ID NO: 692012 - DNA, 628 bp, Homo sapiens
ccagttcaaaattataactatcaggttttcttagatgctcaaaatcatctaaacattattcttttaggcaagcaaatcataatcaaatcactcagaatcaatgaattgattggccgtatgaaggaccacctccataaaacagatatgcaaaaatatacatggaattccagtgggttcatgaactccactaagcttatttactaaccctgactagcggcttctgctttaaataatttttatcttattttattattttaccctcatgtgttttcatttgcattattttattgcaagcaatttataagtctttaagaaagaacaaaagcattcaacttaaattcaagtaagcaattttaatattttaggattytctcttatgataaacattacataaccttggaaacaaggttgagaatgtctgataacttatttttaaatctttattcctattcatagttatggttatttacaaagttatagtcgcagagacaaaatataaggttaaaatctctgaaagatctccttaatttgttttagtttccgttccaatttttaaggttccatattaacttcttgagtgtgaagcaaatagtgcaccatgttctttctcaaagtagccagtgagttg

SEQ ID NO: 692013 - DNA, 661 bp, Homo sapiens
aaagattaagagtgcttaagaattcttagaaacgttcttctttaaagtacaatgcctttgggttttcagtaagattactgattgtgcttcgattaaactaaagtctcattagaaagttccaaaataaggcctaggaagactaatgaaaattcattccatttttaaaagctaagattgacagtaagtgtattgccagaatttgcaagggttttatattaattacaacatcaaggaagctggatttagaattgtccctgggagtctaccacattcaaaatccatcacacagggctgctgctcacagattacaattgttcttccccgggaggaaggagcggccatcctcggctgagctgtagctgctgtgagacagcagagaaawgtatgctcccaatcagaggatgaggtcagggaagacaggaagaggtccgatgtccaagcaatctgggaattggggtttttcatcgatgccaccatctcttcaacatcagtaaacaagcagaaccacgtgaagtgaatcgctggacatttactcccaggctttccttgttcagcagttacagattggagatgggaactcacaaaggacaagggtggatgttagaaatgctgagaccaatactcctaccctgaaagcagacaataggtcttgatatagccc

SEQ ID NO: 692014 - DNA, 2806 bp, Homo sapiens
caacctttgaaacatttccagaaacaatacagtccttcataacagtgtaggaatgaagctatctaattccctgtatcagccatcagaggtacaagtgacatgaaagtttaactggaatctttttttttccttatgtctcaatgcatactttgcacttttaattcagtattgtgtcaagttcatacatctaattcatggaaactacttataaaatatgaagacacattagcaactaagatttggttaatacacatttcaaatgttgttggatttctttggagtacaacaatacctaaatgttgcattatttaaccaatgttggggtgtgggtttgtgcacatagggttcccagcaggtaatttatctagtgatcatgtcctgatgaacacaagggccctattacaggcaaatcaaaagaggtaggactatgtcccaagtgttgcttctcttaccccaaggttgcccaatgcaatagttttcattctggtacatgcaaacatgtttcctctaaggtgcaatgccagaaacctagaggaaaatgtgtcttggttttatctgagaaaactggcaacaattcctttggaattgattccttttctttttattattttaaagagagaatagatggttattataccacttacgcagctaacagtttgtaggtcaagatgacctagagccaagaatgtgatattcattatgatacagcatgaaaaagagaaagttctgtttgtaaaggatttttttatgaagtcacaggcccaagggagatgagtacagaaagctatttagggtaccaagaataaattggatggccccctctctattcccttttttaatccccctaattatttattctgcaacttctcccccaacaagtatgtaagccacattagggccgggatttttgtttaatgtggcatccccagtgctggtatgtactctgtattaaaaatatattaatgaatgagtgaatgaatgaatgaatttcatctgaagaatgagccttccagacgaattccttgttaaaataagccagcacattgtctataaagcagcttccttgattaaggggcaaggtctcagtttaacgtgagataagagtttctgatttcagcatccagccaaatgatactgttctttggaaygcactctcttcttccctccactagtttttcttccctagcatttgttttggatctgtagttacagcattttctgctcagaattcaactgagggaaaaaaaaatgtgttttgagtaatactcactaaggtgaaaatctgaccatattttgagaaataaggggtttggaggctcaggacagaccatcccactgctgtcttagggacattgggctgctggagcctggcccaaagaaggtcttctgggaaatcaggactgagtctgggcaatgctagagtcagtgggtaaaatggctttggagtgtggcacacatagtaacgctctgtggaaccctccatattgacctgagcctggcctgatctatgagtcatctaaacctaacaaaaggcatctagaggacttggggttaaggccgagttattcttcaagtacacaattatggttgccagtaaaatgaatttcatgcttgaggtgatatttgtgggagaaaaaaaaaggaagattaaaaaggctgtgtcaaaatagtgttttgattagaccagaagcatcattctagaaaatgcaaaatagtaggaacgcaataaaacaaacaaacagacaaaacccaaacaaacaaaaaatgctttgggcatgcctttcaggaatgaacgatgaaccaaagtcataaatcatccccctctattccctatttttcaggtgttatgtttctctattttgtagactttcatgttctacattgtgaaaaaataactaatgcacaatcccatatatttaagcttgtatgattactaatatttgtcatctttttaatttgtagaggatatttaatttactcttttctggaatatatgataatcctgtgctttactttctcatgaaggagagagagtaaaacaataagcaccttggtttaaaaagaactaattagcaagtttccctccggttctccaggcttatggcaaataactttcttcctgacaactgaatgttacatcccaacctccattagtcttaatagaagtcatgcattctctcccacttgctgtgatataagaataatttttcttctgagtagaataatggttgtgaagtcatttaggtagtcacagaaaaaaatagccttttattgttgttgttgggttttctttgattccgggaatgaggctaagagaaaccttgttccattttaccgtaaatactattaatccagagatgagtccttagcatacagaaatgattgatttgcatttaaatgagtgaatattcagagtttctagactcagataaaacatcaaaattatccagtgaccttggctaaattttagagttaactacttaggtggcctaaacaaaagcttgtattttcagcacacctaccatatgaaaaaaaagactaaaagctaccttccaccatcctgatgtaaattagacaccgaaagtatacactttacctccactattattgatttattcatttctgacctcgttcccaagacagctcactcatttcctccaccaggtccaggaccaatatcttactttaagtaaaaagttttcactcagaaaagtctggttgactattgtatttgacaaagtagaaaatagagttatggtgctgttttaaaagaactggggaggtctgattcccaatctgcataata

SEQ ID NO: 692015 - DNA, 682 bp, Homo sapiens
  misc_feature 2, 3, 4, 5, 6, 7, 8, 9, 10, 11, 12, 13, 14, 15, 16, 17, 18,19, 20, 21, 22, 23, 24, 25, 26, 27, 28, 29, 30, 31, 32,33, 34, 35, 36, 37, 38, 39, 40, 41, 42, 43, 44, 45, 46,47, 48, 49, 50, 51, 52, 53, 54, 55, 56, 57, 58, 59, 60,61: n = A,T,C or G
  misc_feature 62, 63, 64, 65, 66, 67, 68, 69, 70, 71, 72, 73, 74, 75, 76,77, 78, 79, 80, 81, 82, 83, 84, 85, 86, 87, 88, 89, 90,91, 92, 93, 94, 95, 96, 97, 98, 99, 100, 101: n = A,T,C or G
annnnnnnnnnnnnnnnnnnnnnnnnnnnnnnnnnnnnnnnnnnnnnnnnnnnnnnnnnnnnnnnnnnnnnnnnnnnnnnnnnnnnnnnnnnnnnnnnnnnttgtatttgcccttttatttttattttttttgagacagagtgttgctctgtcacccaggctggagtgcaatggtgtgatctcagcttacgacaagttccgccctccaggatcacgccattctcctgcctcggcctcctgaatagctgggactactggcgcccaccaacatccctggctaattttgtttttgtatttttagtacagacggtgtttcactgtgttagccaggatggtttcagtctcctgaccttgtgatccacctgccttggcctcccaaagtactgggattacaagcgtgagccaccacacccagctgtatttgccttttatagatcctctttggtgaaatgtctcttcatgtcttttgccattttctttttgaattaactgatgagttttgagagttctttatatattctagatttatyttttgttgatatttgcaaatatttgcagtttttctttgctctctcctctgggtctctcacagaataaaaatttttaactgtgatgatgaaactaccatttttttccctcatttatgaatcatgcttttggtgtcattgaaaactctttacca

SEQ ID NO: 692016 - DNA, 849 bp, Homo sapiens
gtgctaaaccatattggaggcagaggtgaaatggaaaatcagggctgaccatgtcttttattatttcctgaaaatttttatattttgttaatcactgactttttgcattaattttgatttttgaaaacaatgcattaaaatattacttatcttgatgtctgtattttttggtggactttaaaattttgcaccctagccacggcactcacttacctcactcctcatcctagggctggttctgaaaagtacaatatatttatagttttttaaaggaaaaattaatatcttttgtggcttaagtttctcatttatgaatattatatttacttacatcttttatatcctgcaatgttttatatttttttccttgaaggtcttgcatacttaaaaaatgtatttcaagtaccttatgatagatatttcttgctcttttaagtgggttttattttttrttctttttataaaaggttatttttgcagctcatcgctgtatccatgcatcttcttcttccattatataaagaaatattgatgccatctgtgtatcagacattgttctaagtgctttgatatagcaataaagaaaactagtgagggaagaccaaaaataatcaaataagtcaataaaaagaaaaggtcaagtaataaaaagcattgtgaaaaagttaaaacaaggtgaactgacagaaaatgactaacggtgtggcaaagattgggttgtctgtgtaggtttcatataagttgagacctgaatgtcaagaaggaggtgcatatctgaaggtctaagaaacatgagataaactccacaggatatttgagtaatatcaagatgcaagttgggcatcttga

SEQ ID NO: 692017 - DNA, 643 bp, Homo sapiens
taaagagttgctttaaaagttataaacaaggccaggcgcggtggctcacgcctgtaatcccaacactttgggaggccgaggcaggcagatcacgaggtaggagatcgagaccatcctggctaacatggtgaaaccctgtccttactaaaaatacaaaaaaaaaaaaaattagccaggcgtggtggcggcacctgtagtcccagctactcgggagggtgaggcaggagagtggtgtgaacctgggaggcagagcttgcagtgagccgagataatgccactgcactccagcctgggcaacagagcaagactctgtctcaaaaaaaaaaaaaagttataaacatacttatacaccacacattttataaaaataaacacttgaataataataataataatayaataataaacacttggttgaataaagataatgcacgatgaaggtaatcagaatatcccaatgtattcttccactcaagattactgaaacctgttacaggttcacatcttcttatctgaaatacttggggccaaatgtatcatagaacttagaaattttcaagtatggccaggcacggtggctcatgcctgttaatcccagtgctttgggaggccaaggcaggtggatcacttgaggtcaggagtt

SEQ ID NO: 692018 - DNA, 668 bp, Homo sapiens
ctgcattattatctagatcagtgttttttcttttctttattccacaccaaacaaaggggggtcattattgagccatatgccttttaacagtttacctcagcttcccaaagatctggtcaaagctttaaagttcctgaagttactctgtagaagcctggttaaattcttagacaaggtaccatcttcctgtggagtctgtgggcagggtaggtccagagctgattttcacctggtatacaccactttagcgctactgattattacttttttttttttttttgagacatggtctcactccattkcccagactggagtgcagtggtatgatcaccattcgctgcaacctcgacgtcctggccttaggtgatcttcccacctcagagtcccaagtagttgggacccataggcatgtgcaatcccgcctggcgagtttttttgtattttttgtagagacgggatctctctatgttgcccaagctggtctcaaacttctgggctcaagagatcctcatgtctcggcctcccaaagtgctgatattacagcatgtttttattatgatcctggtagggagggcagtggatctattcttctagttttgtttatgatcattttatttttctgttttactttgtcactggatttagtattacattgagttaaccctggt

SEQ ID NO: 692019 - DNA, 668 bp, Homo sapiens
ctgcattattatctagatcagtgttttttcttttctttattccacaccaaacaaaggggggtcattattgagccatatgccttttaacagtttacctcagcttcccaaagatctggtcaaagctttaaagttcctgaagttactctgtagaagcctggttaaattcttagacaaggtaccatcttcctgtggagtctgtgggcagggtaggtccagagctgattttcacctggtatacaccactttagcgctactgattattacttttttttttttttttgagacatggtctcactccattgcccagactggagtgcagtggtatgatcaccattcgctgcaacctcgacgtcytggccttaggtgatcttcccacctcagagtcccaagtagttgggacccataggcatgtgcaatcccgcctggcgagtttttttgtattttttgtagagacgggatctctctatgttgcccaagctggtctcaaacttctgggctcaagagatcctcatgtctcggcctcccaaagtgctgatattacagcatgtttttattatgatcctggtagggagggcagtggatctattcttctagttttgtttatgatcattttatttttctgttttactttgtcactggatttagtattacattgagttaaccctggt

SEQ ID NO: 692020 - DNA, 787 bp, Homo sapiens
gtatcccatctctctgccagagttcctgaaggcaggccacagtagtcgcagtggggaaatggatgttttccaatacaaatgtaagtagacattaaaaatcaccaaacaattcaagaaagccagtacccagagaattaccaaattaaaacacagaactaactcctgagaaaatagaaaaacattagatggtgattttcagaagaaaaaaaggttatttttggaaagatgcatgagaatattgcattaattaaaaaaatactagatacaggccaggcgtggtagctcacacctgtaatcccagcactttggaaggctgatggtgggcagatcacgaggtcaggagatggagaccatcctggctaacatggtgaaaccccgtctctactaaaaatacagaaaattagtcaggtgtggtgatgagcgcctgtagtcccagctgcccgggaggctgaggcaggagaatggcgtgaacccaggagacggagcttgcagtgaggtgagatcgcgccgctgcactccagcctgggaggcacagcgagactccgactcaaaaaaaaacaaaaaaaaaaaactagctactttagaaatttagaatttactgattcatagaaaagacaatggctgaattcacaaaactaaaaaagcaagtttgcaatctggagaagtaagttaaagaatcacaaaagagcaaagagatcaaaagtatgaacaagaagccaggaaacctgaacactatttctaagggaagktggggctttttgtagggatgtggagttgctgggaaaga

SEQ ID NO: 692021 - DNA, 565 bp, Homo sapiens
ttcatttctgtcctttgagttttgaaaaattttgaatgataaaggtaccatcggccattgtttcaaaaaatgacatcaaartatgaaactaaattctgtctttttcatctcttatctataactactgaaaataaaagctcagtaaatgtgaatactctattattattatttttttttttctgagatggagtcttgctctgttgcccaggctagagtgcagtggcacgatctcggctcactgcaacctctgcttcccgggttcaagcaattctcctgcctcagcctcctgagtagctgggattacaggcgcccgccaccacgcctgggtaattttttgtatttttagtagagacagggtttcaccatcttggccaggctggtctcaaactactgaccttgtgatccacccgcctcggcctcctaaattgctgggattacaggcgtgagccaccgtgcccggccaatactctattttttttacatttattttaatttgtttacatttattttacatgtatttttacatttttactaaaataattttattcaagcattttaccttaaa

SEQ ID NO: 692022 - DNA, 581 bp, Homo sapiens
cattcattgttggatagtgatttttaaaacattaaaataagtggaacgattgctttgaatttatgaagaataacacatataattaatgacttttctatttgtattatacttgcttagatggttcaggcttagtaagaaagctattgatagtagaaaacaatgtgtatatgtaataataaagaaataacgtggattgttagtgaatagaaaatagtccttttggccaggtgtggtggctyatgcctgtaatcccagtactttggaaggccaaggcaggaggatcacttgagccaagcagttcgagaccagtctggttagcatagtgataccctgtctctacacaaaattaaagtaaaaaaattatctgggggtggtggcgcacacctgtggtcccagctacttgggaggctgaagtgggaggatcccttgagcccaagaggttgaggctgtagtgagccttgattgtaccactgcactccagcctgggtaacagagtgaaatcctgtctcagaaagaaagaatgaaaaaaagaaagaaagagagagagagagagagaaagaaagaaaggaaagaaagaaaga

SEQ ID NO: 692023 - DNA, 631 bp, Homo sapiens
catcagactgggatcttgcaggagaagaaactccacagatgatggatgaggcaatggtaatagagtgggttgtgccatggacaattgctgttcttagcaagatttagtaaatgttcttgaataaatatttctttattggttgtatgcctttagtacagattctggtgactttaaattcgtttttagaataatttatataagttaaaattctgattttcctggaaagaggatttgctatactccttactcccccaatctggatgtcctacctcttttagatgatttcttttaaggaaatcagtttatatgtacctcctgggacwttactagtagaaatgatgtaaccctagatatacttacttttcaaggttgggagacaagaatgacatttactcattatactgcaccagatatggttctaaataacttacattcaagctttcatatttactccttgaaataatgtttacttcactataccattgccttctttagtagccactgaaggtggcttcaacaactcagaacagttaacagtcatgtgtttaaattctaagctaagcattgtagttacaaagccttctgttaacattagaaaaaatttcacttaacagctctggcagccatacca

SEQ ID NO: 692024 - DNA, 1394 bp, Homo sapiens
cagatgggctatcatccaggctttgttccatttatagaacacaggcagagtagatttaacataatttttaggggtctcagaattttcagaatggtaaatgatcaataattttaatgtaaaatgatcagcccctaacaaaaaagtcagcctgtcctttgaagccagtccttgacttctcctctctagctatgaaagtcctagatatcatcttcttccaaaagaaagctattcagtctacatttaaaatcagttgttcagtgtagatattatcttaacaagataccacttcacaacctctaggaaggctatggttttcaaagttgttggatattaagcagggcttgtcttggtaaatttagagcatgaaataagttcacatgtaatgagtacccagatacttttgatgagaaaaccacaaattatcatctggagcaaggattgttgtgcaccataaaaatatataaacatacatatatatatatatatttataggtagcaaatatatatgatatatatcatatatatggaaatatatatatatatatwtttttttacttttcatagaaagaacatgaacttcagagttagccttgaaagcaattgatggctccaccatgatagatttgggacaaatcagttaaccttgctgatctctgtttcttccctctaagaaataaaaataataatactggcatggcagtggtgctattggggttgtatctaatactctatgtgaagtgcctagcaaactgtctgacatcatcactgctaaataagtgttaattttattatatcatattttcattgttatggcctattcactggtcccttgagagctgagggctgccgtttgcgatgggaactgagtctcagctaagacagcagtgagatccagcatagaagctgcgaggctcaagtatcgagcctgccctcagtccacccatatctcaactctcagaaacctggcaaccatggctcacccatctcaggaaggattctggaggatttccctttggtaaactgagtatgtcaacacacacacatactcacagtttggtaagtttatatatgtaccacaagacttctgagagtttactttcacatactataccaatacagtttaaacaatcacttgttttctctaccagaactcagtgaggttactttgaatttctgtttttaatgttatcaggtattaacttcttaattaaatgtccatttttttaaatgaagataccaaggtaacaaatactgtatatgtttgagatcaaatatcactgagctcaactattgataaacactgatgcagattcaactatccaacatacattgatgcttacttttttaagagtcttctgcaatcagattgtaacagtcttgggcaacagattgtg

SEQ ID NO: 692025 - DNA, 1141 bp, Homo sapiens
tctgtgtgtgtttaaaagtgcttgagagagtggccaataatgcttagaaaacaaaacataaaagccagtaattttggatcaagggtacaatgataacccttttttacattatataactcataacctcataactctcaataacttaatgaaggttacttgaaacacgaattcaaagttcttcaagttaaatacatagaaattctaagttaaggaagctaattctttaccaatatatttactaatttctctgctaacaaattttttaaattcaactcctttcttgtgggtttaatatttttcttccttaagaaatcagttaatggatctttttaatgtcaaagataaattcactctctcaatcttttctagtcttaaaatggccttaagtattacattattgactaataccttattgtaacaatctcagttgaccattattttcctccagtactttggatatatcaatcaatagtcttgtaccatatattattgcttaagagaagcctattatcaaatctatttccttattattagtactgtgaattagtcttaatagttaaaatgttctattttttgacattacacatttttactatgaggcatctggtgtgaatttgttttttttcttctcggaattcaatgtaattcttttatattaggaattatgtcttgttcaattttgagaattcttaggcattctatattcaaatatatagggacttttcattatatctttggtgcctcataattttattcacattttctatttttttatttctctgaattacattctgatccatttcttcagttttaacatttgtttcagttaatacttctagatctatatacggttcatcctttaaatgactaatttaggctattatttttttcaaaarctattcatcttaaagttccacttgattactgctcatatttcctgactgtttttcattctattcttgcttgtttctattttttctttagctatttgagcactttcaactatcttttacagtttattagttttacttatattgtaaattcccctctttatacaattgactgattctctctcattgtgggttgttgcacagtatatttgtaactttttactgtggtctcatcttcagaagattttctt

SEQ ID NO: 692026 - DNA, 1421 bp, Homo sapiens
ctaaatgattcatggtcctggacaaagcaccaactgcagccccttgtacatcttggctctgtacctgactgatctattaatcagaattttaactgggccttcaaagcatttttctttcatgtaagtcagagagcagatcgcagtggagacttcatgtaaatgatgccatcaacttgatgcgtggagccatccatgtctgaatctgtggccacaggaagttgttatttaccctaaaaaaagtaccccttctcctagatgtcttcactccttgaggctgtcttcactattagcagtatgattgccagttctatcttggtgctgagatgaccaaatggcagtcatcatttttatgtttgaagggaattttttttagataaaagaggaatactcttgatttacacatcttttaaaaacaacttttttaaggtgaatgtttgtttaaattctaaatgatagcctcaaagctgtttttagttgactgatagtaattaactacttgtataattgaaagcattcataaagacaactggctgattagaattcactgacctcataagaaaggaatatttttgaactctgttttagcctcagtaatatgagaaatccttaggccagagaaagaatcagcatttgttccttgtgtatattgatgattttatttttatgagacctaaattggaaataatgaatgtaaatattccaatgatcttatggaaggctgttttgaattgatattttaaatagtacaatgtttgagaaacttgagtactgcataagttccgtttaaaggatgtaattcttgtgactctccaatgttgacttaaatttattaaactagcaataaccttcttatacatacaacttattctaccactgtaaaacctaacaaagaattcaatcaaaaacaaaatcacaaaatcaataaagtgtatattgacattacttaaatgtgaaagaaaatgttgattatggaactaagtgggccactcacagtggaatcatggtatttacctaggcactaattttgtagagtgtggcatgctggtgttaatgtgttatgtgatcactagagcactgcaatgctgtttggtctcactggtgtgaatacatcatttattttgtctgcttctctgtttctcattggctcaggacataagggactggttggcctcaccttgatcatgagacacgcaaaactgattctcaaatcatgagcaaaaattggttataaggcaatcttcttaacattccagataactcagaatgtgtttatgttaatttttttagatcattgccaaaatgaagacaaaacattttaaaattctcataaagaacttttwaatttggaattaaaaagttttaattccaaattaaaaagttctagaagttctttatgagaatttaaaaatgctttgtcttca

SEQ ID NO: 692027 - DNA, 597 bp, Homo sapiens
gaagcacataaaaattgcagaactgtagagtatcttaaataaaatggccagtatggaaaaacaatgagtcaataaactagataaatagaaattatgtaatatgcataagaagtgtgaaaaggttgaaaaagtaaatagaacctctgaaatgtgtcagccattatcaatttgtaaaacataactataaattggaaactatgaagaaagaaaagagattatgagctcaagggatttatttacagaaacagtgtctaggctaggcgccgtggcttccgcctgtaatcccagcacttttgggcggccaaggcgggcagattacctgaggtcaggagttggagaccagcctgaccaacatggagaaaactcgtctctactaaaagtacaaaattagctgggtgtggtgcgcatgcctgtaatcccagctactcgggaggctgaggcaggagactcacttgaacccgggaggttgcsgtgagccaagcaatggcgattgcactccagcctgggcaacaatagcgaaactccatctcaaaaaaaaaaaaaaaaaaaggaaaaaagaaaagaaaaaagaaaaagaaacagtgtctaaaactttcc

SEQ ID NO: 692028 - DNA, 635 bp, Homo sapiens
ttatctgcactgattgtattactcctgaaaaagactacatttttagctttgaagtctagagtcctgatttagccaaagaagaggataagagaaacagcatttgtggggttttcatttacagaacaacctgacctgattttgaagctgagttagtgggagaagatatttttcaatctctgttaatacataccatttgtatgactagccattgtccccctaaaaatgaaactgacaaaaattttccaaagattaatagcagtcatccacacttatcttctcaatcaaaccaagcatctgagatagattcttttttwaaaaaaccaccattagcaagcctttatctcccacttctcaaatcagtcacttctctataaaataaaatgatttcctcaacaacaacccctgacattccttctttaaagaaagtttgtgacattaaaatgaattcaagtaaggaatcaaaatgggctataatattccttcaaatatgaaaatatactagcttttgagctagataataagatctttccaggaaacattgcattttacaagtagatagatacctttggtccttaatagttgcctttactacataaaggttttctatttctctttttaaaaaagtactactatat

SEQ ID NO: 692029 - DNA, 652 bp, Homo sapiens
aactctcatcagatagagaatctatccgctaactttctatctagtattatttccakgaagttacatcaatatcactcccaaaataaatccaggtggaagactaaatccaaagctagcagaaggaaagaaataataaagagcataattagagcataaatcaatcaaatagaaggttggagagcagtagaatgaaaaaatgtagattctttgaaagatcaagcctttcactatattgactgagcaaaagatggaagactaattattaaaataataaatgaaagcagagccattactaccaactttacagaaatacaaaaggattacaggagtatactgtgaacaactgtctagcaacaaattaggtgccctggatgaaatggatgaatcgctagaaagacacaaactaccaaagtggctcaagaagaaagagaaaatctgaatagacctataacctaggagattgaattagtaatcgaaagcgattaacaaagaaacatttatgaccaaatagctgcattaactggtgagtcaacctaacatttaaagaagaattaataccatttcttctcaaactcttctgacaaaatatatgaagaaggaatacttgctaattcattttttgataacagcattatccttataccaaagacaa

SEQ ID NO: 692030 - DNA, 652 bp, Homo sapiens
aactctcatcagatagagaatctatccgctaactttctatctagtattatttccaggaagttacatcaatatcactcccaaaataaatccaggtggaagactaaatccaaagctagcagaaggaaagaaataataaagagcataattagagcataaatcaatcaaatagaaggttggagagcagtagaatgaaaaaatgtagattctttgaaagatcaagcctttcactatattgactgagcaaaagatggaagactaattattaaaataataaatgaaagcagagccattactaccaactttacagaaatacaaaaggattayaggagtatactgtgaacaactgtctagcaacaaattaggtgccctggatgaaatggatgaatcgctagaaagacacaaactaccaaagtggctcaagaagaaagagaaaatctgaatagacctataacctaggagattgaattagtaatcgaaagcgattaacaaagaaacatttatgaccaaatagctgcattaactggtgagtcaacctaacatttaaagaagaattaataccatttcttctcaaactcttctgacaaaatatatgaagaaggaatacttgctaattcattttttgataacagcattatccttataccaaagacaa

SEQ ID NO: 692031 - DNA, 652 bp, Homo sapiens
aactctcatcagatagagaatctatccgctaactttctatctagtattatttccaggaagttacatcaatatcactcccaaaataaatccaggtggaagactaaatccaaagctagcagaaggaaagaaataataaagagcataattagagcataaatcaatcaaatagaaggttggagagcagtagaatgaaaaaatgtagattctttgaaagatcaagcctttcactatattgactgagcaaaagatggaagactaattattaaaataataaatgaaagcagagccattactaccaactttacagaaatacaaaaggattacaggagtatactgtgaacaactgtctagcaacaaattaggtgccctggatgaaatggatgaatcgctagaaagacacaaactaccaaagtggctcaagaagaaagagaaaatctgaatagacctataacctaggagattgaattagtaatcgaaagcgattaacaaagaaacattyatgaccaaatagctgcattaactggtgagtcaacctaacatttaaagaagaattaataccatttcttctcaaactcttctgacaaaatatatgaagaaggaatacttgctaattcattttttgataacagcattatccttataccaaagacaa

SEQ ID NO: 692032 - DNA, 652 bp, Homo sapiens
aactctcatcagatagagaatctatccgctaactttctatctagtattatttccaggaagttacatcaatatcactcccaaaataaatccaggtggaagactaaatccaaagctagcagaaggaaagaaataataaagagcataattagagcataaatcaatcaaatagaaggttggagagcagtagaatgaaaaaatgtagattctttgaaagatcaagcctttcactatattgactgagcaaaagatggaagactaattattaaaataataaatgaaagcagagccattactaccaactttacagaaatacaaaaggattacaggagtatactgtgaacaactgtctagcaacaaattaggtgccctggatgaaatggatgaatcgctagaaagacacaaactaccaaagtggctcaagaagaaagagaaaatctgaatagacctataacctaggagattgaattagtaatcgaaagcgattaacaaagaaacatttatgaccaaatagctgcattaactggtgagtcaacctaacatttaaagaagaattaataccatttcttctcaaactcttctgacaaaatayatgaagaaggaatacttgctaattcattttttgataacagcattatccttataccaaagacaa

SEQ ID NO: 692033 - DNA, 652 bp, Homo sapiens
aactctcatcagatagagaatctatccgctaactttctatctagtattatttccaggaagttacatcaatatcactcccaaaataaatccaggtggaagactaaatccaaagctagcagaaggaaagaaataataaagagcataattagagcataaatcaatcaaatagaaggttggagagcagtagaatgaaaaaatgtagattctttgaaagatcaagcctttcactatattgactgagcaaaagatggaagactaattattaaaataataaatgaaagcagagccattactaccaactttacagaaatacaaaaggattacaggagtatactgtgaacaactgtctagcaacaaattaggtgccctggatgaaatggatgaatcgctagaaagacacaaactaccaaagtggctcaagaagaaagagaaaatctgaatagacctataacctaggagattgaattagtaatcgaaagcgattaacaaagaaacatttatgaccaaatagctgcattaactggtgagtcaacctaacatttaaagaagaattaataccatttcttctcaaactcttctgacaaaatatatgaagaargaatacttgctaattcattttttgataacagcattatccttataccaaagacaa

SEQ ID NO: 692034 - DNA, 625 bp, Homo sapiens
tccacgaaaaatacaaaaattagccagggtggtggtgcacacttatagtcccagctacatgggaggctgaggcacgagaatcgcttgagcccgggaggctgaggttgcagtgggccaagatctcaccactgtagtccagcctgggtgacagagcgagatcccatctcaaaaaaagaaagaaatgcagaggttaatgatagtattattttattcgtatatcctataatttgaaatgaactgtccttcatacacataaactcttyttccacattggtgatgaatttacagtgaatgattgatcattcctcttttacctggtctttcttataaaattaatggcatatactaggggatcaatcaaaggagcttctaaccccgtgtttcttccttcccagggcctacctcatgctgtctccttacaaacaccaattcagtgtaggacaaggtaggctggttatgaaataaagtacagttaaccgtgttatgtgggaattgaaatcatgacctcatgtgcataacacctgcaatcagccagtgaaggcctgataaatctttgcatttgtaagagttagctaaacactcagcctttaggagtatgctttgggaagggttccaagagttggac

SEQ ID NO: 692035 - DNA, 625 bp, Homo sapiens
tccacgaaaaatacaaaaattagccagggtggtggtgcacacttatagtcccagctacatgggaggctgaggcacgagaatcgcttgagcccgggaggctgaggttgcagtgggccaagatctcaccactgtagtccagcctgggtgacagagcgagatcccatctcaaaaaaagaaagaaatgcagaggttaatgatagtattattttattcgtatatcctataatttgaaatgaactgtccttcatacacataaactcttcttccacattggtgatgaatttacagtgaatgattgatcattcctcttttacctggtctttyttataaaattaatggcatatactaggggatcaatcaaaggagcttctaaccccgtgtttcttccttcccagggcctacctcatgctgtctccttacaaacaccaattcagtgtaggacaaggtaggctggttatgaaataaagtacagttaaccgtgttatgtgggaattgaaatcatgacctcatgtgcataacacctgcaatcagccagtgaaggcctgataaatctttgcatttgtaagagttagctaaacactcagcctttaggagtatgctttgggaagggttccaagagttggac

SEQ ID NO: 692036 - DNA, 610 bp, Homo sapiens
gtctagttgaagtcttcttgatgtaaagaaaaactctcatttaaaaaattaccacaaataatttttttgtattaatttttaaaaattggcccaacagagtggctcctgcccataataccagcactttgggaggctgaggcaggcagatggcttgagcccaggagtttgagaccagcttgggcaacatagtaaaacactgtctctactgaaaatacaaaaattagcctggcgtggaggtgtgcgcctatactcccagctactcaggaggctgaggcgggagaacagttgagcccaggggctcaagactgatgtgagccttgtttgagccattgcactctagcctaggtgacaaagagagaccctgtctcaaaaataatgataatactactactactamtaataattgctcgtttgattttggcaagataaacttatggtaacaagcatactagatttctcttttcttcatccctttctaactctgaataatatgattgaaattcttacagaaaaaaaaactcaaatctttctctggttgtaagctttaaagaaaattatttttagaaaatgctgaaataaattagagtagtttgacaaacacttttgaacc

SEQ ID NO: 692037 - DNA, 600 bp, Homo sapiens
tattgcattatatggttatacagaaatttatttatcctttctgctattgagggacatttggggaattttcactgttcggctttatgaatagtgctgctaggaatatctaatacatgttttgtagccaatgtcttgtacacactattcttggatattgtagatatgtagaagtggaatactgagccatttaaaatttcggtatgttttcctgaaatgcagataaggaattgaggatctatactatgtagctatataaaacaatgtggaaggtcctcaggtatwggtgggaaaaatttcaaaaatatgattattaataaaaaaaggtacaaaacggagtacattatactttgtgtaaaagtgagataagaaaatatattattatttgcttttatattcacagagaagcccttggaggataaacaagacactaataaatgttgctacattcaaatatataggtgatggtaagatggggccagagtagaagaaaactttttcatgcacatacctaaacacatacacacacacacatacacacacgtatgtttatatatgtagatatatagattctatatatatttatgtgtgtgtatgtatata

SEQ ID NO: 692038 - DNA, 666 bp, Homo sapiens
tcagaagaactgagttgttcaatgccatattcaagagagaaaaactaaactctgctttctgatggctattgctctagtgtgaatgttattgccactccaaaattgatgtgttggacacctaatcctcagtgcaacagtgttggcaggcggtgcctgatgcaaggtatttaggcaatgagggctctgctcaagggttgactaattccattatgaaaacggcctgtggaggtgggtttcctctcttctgctcttctgccatgtgagaacgtagcrtttcttttctctggaggatgcaacaatcaaggcaccatcttggaagtaggatacagccctcaccaaataactgaacctgctgatgccttgatcttggacatcccagcctccagaactatgagacataaatttctattttttaaaaataaattacctagtctcaggcattctgttgtaacagcacaaagaggactaacacaactggaatgtcagagaattatggacatattttaaaatctcctcaaagactcatttcatcatgggaaattcatttctttaatgagattttacagagtcttatatccaaaatagaataattgctggtagtataaagagcttcattcgtgatcagttccttatataactagaaattggcacacaaatccataaaaa

SEQ ID NO: 692039 - DNA, 653 bp, Homo sapiens
tctgggtttataagctaggtaatttgtgtctcctgcctgtgccctgtccccagaggacattgtgacatgttgtttggcttaacatctaggtaatgtgactctacattcctgcctgggtcctgctcaccaaagaaattgtgacttaccgctgattgcaaaccctaaatgatgtgactgtccttcatattctagactctgccaagagaggggattattacatattgcagagcccagcacctaggtggagtgactctcatctttttcttctaccccgtatatagccagcttggtgacctactatttgagkctatacccaggtaatgtgactctcctgtcttgtccctgctcacacataaaattgtgacatatacctgggttaagcacacatgcacaataactctcatacctggacccagccagtagagatttttgactcttatggtcagtctcacggccattggtgaagtcctgggtttttcacttgtataaagttcacaaaggattataacactcaggtatagcatataaagccttaatggtacagactgtcataacagggaccagcaatgacataagaatgtgactcttgtgtgcacaactagctgacacgattaccattctcacacatgaacaggacctaggaatagggtcta

SEQ ID NO: 692040 - DNA, 1062 bp, Homo sapiens
tttgataaaaatatgcaacttgggaccttacctattgccctaagcgtagagatgaaaggcaaaatatctcctattggctgaatcccagtataagtctgaccatctatgtcatagtcccatttgtgggcaaaaaactaggcaggaggttaacatcacttgggtgctgtgccaaccaatatgtcacaatgacttctgtaggcagggtataggaattacagtcacattaactgggtgctggactcaccaatgtgacaccattccacatgtggaaaaaaacccagccaagttatgagagccaaaacacccatataatggacccaggttatgtcaaaataccttctttggctccagcacaggcatgagagtcagagtatcaggatgctgggtccagctatatgccataattctctctatatgcaggacccaggcaaaacagtaacactatctgtgtgctggaccctgcaataggtcaaaatttctgtttgtgggcatggtttgagaaaaaaaggaatcaaataacctgagtgctgggctcagcaatatgccataatcccccaattgtaaagatcaggcagaagaagagagtcacttcacttaggtcatgggctcagagatatatcmcaatgtccccagtaggcagggcccaggcagaaaaggagagtcatctcacaaaggtgcttccctagttatatgtcacaatctaagatgtgggcagaaaccaggcagaagagccacatttcttgggtatagcctcaagtaatttgtcaccataccctatgtagaaaggtttaaagaaaaaaagagaatcacaccacctgggtgctggctcagcaatatgtagtaattccctctcttggcagagtccaggacagagaggagaatcatgtcacctaggttctgcactcagtggtatctcacaatttcttcagtggcaggatctccttcagacaggagaggagagccacattacatagatgctatatttagtgatatgtcacagtgtcccctgtgggcagggcactggcagcagagatatatcaactagccaatatgcctggacat

SEQ ID NO: 692041 - DNA, 1062 bp, Homo sapiens
tttgataaaaatatgcaacttgggaccttacctattgccctaagcgtagagatgaaaggcaaaatatctcctattggctgaatcccagtataagtctgaccatctatgtcatagtcccatttgtgggcaaaaaactaggcaggaggttaacatcacttgggtgctgtgccaaccaatatgtcacaatgacttctgtaggcagggtataggaattacagtcacattaactgggtgctggactcaccaatgtgacaccattccacatgtggaaaaaaacccagccaagttatgagagccaaaacacccatataatggacccaggttatgtcaaaataccttctttggctccagcacaggcatgagagtcagagtatcaggatgctgggtccagctatatgccataattctctctatatgcaggacccaggcaaaacagtaacactatctgtgtgctggaccctgcaataggtcaaaatttctgtttgtgggcatggtttgagaaaaaaaggaatcaaataacctgagtgctgggctcagcaatatgccataatcccccaattgtaaagatcaggcagaagaagagagtcacttcacttaggtcatgggctcagagatatatcccaatgtccccagtaggcagggcccaggcagaaaaggagagtcatctcacaaaggtgcttccctagttatawgtcacaatctaagatgtgggcagaaaccaggcagaagagccacatttcttgggtatagcctcaagtaatttgtcaccataccctatgtagaaaggtttaaagaaaaaaagagaatcacaccacctgggtgctggctcagcaatatgtagtaattccctctcttggcagagtccaggacagagaggagaatcatgtcacctaggttctgcactcagtggtatctcacaatttcttcagtggcaggatctccttcagacaggagaggagagccacattacatagatgctatatttagtgatatgtcacagtgtcccctgtgggcagggcactggcagcagagatatatcaactagccaatatgcctggacat

SEQ ID NO: 692042 - DNA, 1866 bp, Homo sapiens
tgtgaccatggcaggtacctaaaactctctaaacctcaagttcttcatctgtaaatgaagttggtatggggattaactgagaaatacatgaaaagcatctggagcataggaggagctatttaataatcatcctcatttcattcaaatcaatatttttaagaatctgcaatgtgctagagcagtgtgctaagcattcggaatagaaagacctattaaaggcatccctcacctttaggaaatcagagaccaattgttaggtcacaattgtagataagaaaatgaacatttaaaacacactgtgataaacaggctttttattatacagggtagcaaaatacccaataaacatgaaaaatgactcaaatcatgaatcacttttacgtatgtataggaacccatcatggttgtaagttgggtaaaattaaagatacgaacaatacaaagtgttggcaagtttatgaagcaactgtgactctcttgcctagctggaggagtggaaattggtccaatcacattgaaaaaatattttaaagtacttactaaatcttaacatacacatatcctgcaacctagcaatcgcattcctagacatatgcccaacagaaatgagtgcttatgttcaccataatatacaagaacagcctctttatgcatagaagtgctaaactggaaagaaaccaaattagctgggaagaagcctgaatgaattttctggggtgatgaaagtgttccttatcttcatatggatgccagttacacctaaacagttaagagctgtatgtttcaatgtatataaatgatggtttaataataacagtaataacaataatgtcaacaatattaaaaaatacattttaaaacaggtgcttccaaattggcagttacaagrgtctcttatcatatttcagttgtagtttttgatgatgactcctatatcctaggatatgccacagctccccctgcacccaaagaaagtttaccaatgacacacaccatctcaataattctctccacattattaacgttatttgtattaaaaactcatcctcagttttggcattaaggtgatccagctatttcatggctgttctgcatactaatcaggttacagttcgaaacagacacaaacataccctccattttggacaagaacccagacagctattttgtttctctgcttgccaaacaaaattcactatataaattaaccttcttcattaaaaaaaggataatcttcacctcggtgataaaacataccaagtagggaagaaaatattttattgcaaatctgacttaaaataagaggtaataaaaccaatttcttctaagtcttccaaagcactgtcttttaaagactatatcttgttccctaattataaggtaattcacgaatatagtaaaaatatttggaaatataaaacagaaagactatatataacatatatgaaatatatgttctcttttaaaagctatttagactaaaaaattacaaagtaaagaataaaaattagaaaaaatttcaaaatcactcacaatttccccaagcaaataaagtaagcattataaatataatgccataggagaattgcttattgctttggttttccaggtgttaggtctctgcatctgtgaatagaagaatggaatggggagtgtcttcccatctggctccatttgcaatataaatattataatttttctttgattacattattttccaatttttgtttatcctaaatttacatattttgctagttctatattttcatttgcatatacttacaattgtattttaatgatagttggaagaggctactcacccctttaaatcagaaatctattatttttaggatggggaatgccaat

SEQ ID NO: 692043 - DNA, 1386 bp, Homo sapiens
cacagatgcagcccaatgacaagccaggactcatccccrtaacaatggggataacaatcctcattcttctactccatgagaaggcccatctttcactgcgaatcccagctccaggctggctggcgcttgacccaaccttggccccagtgtcatctgtaaaatcagggaaacaatcccaacctcatatgattatagtgccaggcacatgatggactctgccaataatggttcctatggctcccatgggctctgagaagaaccagtaagtaatttgaggctactgcacaaaggggcccagggcatgtccaggctcctctccctagttctccttcccaactgaccttggacccagtgcacagtggggtcctgtctccctgttcataccacaaaacagaagctcaaagcatctaaggtaagtggggaggcaacaggcaatgagggagccaaaatcatatagagaaacaaagctgaggctggggaagctcagagagttgcctgtcaacacttgtctaccagaagtagatgaaaacactaaggggcatgggggaagtgggggacctgctgcaggtgagaacccaaagacctgctttcacctcttcaacctaaaacaggtggactaggccaggcacagtggctcacacctgtaatcccagcactctaggaggccaaggcgagaggattgtttgaggccagaagttcaagaccagcctgggcaacatagtgagactttgtctctataattaataaaatgggtgcactagatcctggcacatttacacatgggattttgactatccttagagtccttggtttgcctggtataaagatttctgcctactataccacagccacccacaactaatcctctaagggctgccaggccaggaagggcagaaaagaggcaggaattggggctctgaggtccttagcagcagaggcacagaggcacatgagtttggggtgacaagctggtcccaccgtggaactcctccagcatttcaggtctctctaccagccaacaccaaacaccaacactgccttggagctgggagaggcaaggcctgctgaccttacagttgctgtcttgaaagaagccttcagacagttactaggcacatctgcaggaggcagaaactgcccaagaaagcctgatttaaggagatcacaggctgtagctcacaggccaccaaaaaggccagaaaactttctggtttcggcaacccttagagacgatgtgcttctgagatagaaagtaagtctagcattaaggaaaaaaagatcttgaaaagcctataaccagcttctgaaatcctgacccacaaagtgcatcccaaaacattaagaatcaaaaccacaaaacctgggcagatccacaaaaagttccaa

SEQ ID NO: 692044 - DNA, 1283 bp, Homo sapiens
tcagcctcaaacaagttgttttgtttttttttaatttaggaaasagaaagattatctttaaacaaaagtggcaccaatatcctgccatcctgattaaaagcaggatgaagataaaatgatttctctatccctcatggcctacaaagccaacgcctcccagggaaatggccttctcccagcggcagcccagctcttcacctttgaagctgcctctaaacctgtttgcttttggagctccaataagatttgtgcttgctgccacaggctggcccagataggctgctcgtgctgagactatggctgtcttcccgggtgaacaacaatgacagttaattacatcaacccaattagcagcagcacccactttgtgcaagcaaggcccacctgtggtcttacctatgtctagcaaagggcccccgggccttagtggggaagctggtgaattgggaggctagatgtttagcagtgacctcctttcagagccctcttttcttggagataagtgagggaactggaaaaagaccaatgccttacaccatagtcagctaaacaggctgcagatcataatggttttcagattattctgctaggtaggaacagagtcttccctcagcacttagtggatgatcagaggtggaactttatcagattttgcctttggtaatgaggccgtgtttgccttgcctctaatagaacactaagaacaaaggcctctctatggaaggtgggaggtagacaagagaatgtgacagctgttttccttggctccacactcatgttttccagcctttacagggaatcagaagtgctgggttcaaaggctaaatctaatcacctattagctgcttaccttgggcaagttacttaaactttctgagccttgcttttttatttgttaaaaatgtgtctagacaaactgtaggggtggagagcaaaccagtgattgcccaggaatgagtcaggagggaatgacacaaagggcagcggggtgggtgggaggaggaaagttctgtgtcatgattacagtggtggtctcacagctccacgcatttgtgacccatagaagtgaacctgaaaataatgaattgtactgtatacacattttaaaagcaaataaattctaaagagtgattaaaataagggtgaggataataataaaagatttgaaaacatctaggacaataaatggctcacatgtgtgctaaatacatatcaattgctttcttttctgagtctgtttcttcattcataaaatgaaaattaaaatattacttcttataatc

SEQ ID NO: 692045 - DNA, 2074 bp, Homo sapiens
aatggatgaagtttttaccagaattattttatcgggaccctgggtcttttctgtggcccaatgggtctttgaagggtgttcaggtcagggctttttctcataaataagtgatagattgcagtgaggactgaatccttgcatttgggactaaattcttgcatttgagatctgaattgttgcatttcagacccagagtctccacttactatgcgatttgaggcaataacttcaattttcaggactcaatttacatcttaaaatcagacaggaataatacctgttcctactgggtgattgtgaggataaaatgagacaacatataagaaaacacattgtaagagaataggatgaactgatatacaaatgctgtgagttgtaatttgttattattaatgtatcctctgggccaaataaacccttcataaaaaagtaagccatcttgaaggaaaaaaaagccataaatcatgtaaaacataacttcctgcctgccctcccatgagaaaactatatctgagaacagtttcaatttatccctgaccttgtaaaggcaaacagaccagacccaactcaaaatcatgaaattagagaaagctgtatcccagtccttctctttgtgactcggagtgagtttttaaatatttttgaatctcagtatctatatctggaaaatgggaatgaaaatacagtttagaactacagagttgtagggagtccaaatgaaatgaagtgtattatgaagccccagggccaagttcatagtaggtcctctataaatgttaatcaactccatcaccaaaacaataagggttccaaaattaccatgaattctaatttgattaaccaatcaccctttactattgatgagttttgcacaagccaactcaatcagcatttgcattttgacactattatttctaattatgcataatttgctccctgttaaagaaatttcagtcatcagcaagcaaatcagaagacagtttgcagacacagaaggcccatttgaaagctgcttctaaagtcatatgtctttattccttttagtatggtttccaggagagtaggtgggggtgtagaaatagtcagatgtgtcccatgtgcttggtggaggttcatttttaaaatgtaaccatagcctaagagtaaatctattgtcactgatttcctctaggatttggaatcatgtgcccttgatagctctatttcttttcccaaaagcaggcctcattccctaatcttagcccaaccccttctttcttatctcaaggccccaagaatctttctgtatgttagcatattttacaatattttcttcatttttcatcccataaccctgtgttagtttgtgttaagttggagataagataatctattttaagttaaacagaaaggggtttaatcaccaggtactgttggggctacatcagcaggctgcggagtaaacttccaggcaactcccagccttcagaatcacactgcacctttcaatgattgggaaagcagccctgctacaacagaaagctgcaagtacagaagcaggctgactgtctcaccaccgagcttatgaaatggatgtcttgccccttgccttctcccggtataacccagacccatctccacatcttgccaaaaagtgccaattggcagagcctaaacacatccagaaagctatccacaaaggaatcttggaaatgcagttttttgctttttggtctctgcagaagaggaagaacactagacaggacgtggagtgctgtatacataaatcagtccattataagtatctgccaaaaacattatgaaatcttttaccatgcattctgtattttgctacctttcttatgggaaagagggcaaaagaaagcagtttgctactagaacatgttctgtttgttattaaagtagcayagttaacaaccatgaacttgaagtcaaagacctggagtccagggcgtgctctgccactaattagtttttggcctggggtaagtccatttatttttcagagttttcgtttcctgcgagtacaaaatgaggcaattagactcagtgattgctgaagaagcatcctttt

SEQ ID NO: 692046 - DNA, 2074 bp, Homo sapiens
aatggatgaagtttttaccagaattattttatcgggaccctgggtcttttctgtggcccaatgggtctttgaagggtgttcaggtcagggctttttctcataaataagtgatagattgcagtgaggactgaatccttgcatttgggactaaattcttgcatttgagatctgaattgttgcatttcagacccagagtctccacttactatgcgatttgaggcaataacttcaattttcaggactcaatttacatcttaaaatcagacaggaataatacctgttcctactgggtgattgtgaggataaaatgagacaacatataagaaaacacattgtaagagaataggatgaactgatatacaaatgctgtgagttgtaatttgttattattaatgtatcctctgggccaaataaacccttcataaaaaagtaagccatcttgaaggaaaaaaaagccataaatcatgtaaaacataacttcctgcctgccctcccatgagaaaactatatctgagaacagtttcaatttatccctgaccttgtaaaggcaaacagaccagacccaactcaaaatcatgaaattagagaaagctgtatcccagtccttctctttgtgactcggagtgagtttttaaatatttttgaatctcagtatctatatctggaaaatgggaatgaaaatacagtttagaactacagagttgtagggagtccaaatgaaatgaagtgtattatgaagccccagggccaagttcatagtaggtcctctataaatgttaatcaactccatcaccaaaacaataagggttccaaaattaccatgaattctaatttgattaaccaatcaccctttactattgatgagttttgcacaagccaactcaatcagcatttgcattttgacactattatttctaattatgcataatttgctccctgttaaagaaatttcagtcatcagcaagcaaatcagaagacagtttgcagacacagaaggcccatttgaaagctgcttctaaagtcatatgtctttattccttttagtatggtttccaggagagtaggtgggggtgtagaaatagtcagatgtgtcccatgtgcttggtggaggttcatttttaaaatgtaaccatagcctaagagtaaatctattgtcactgatttcctctaggatttggaatcatgtgcccttgatagctctatttcttttcccaaaagcaggcctcattccctaatcttagcccaaccccttctttcttatctcaaggccccaagaatctttctgtatgttagcatattttacaatattttcttcatttttcatcccataaccctgtgttagtttgtgttaagttggagataagataatctattttaagttaaacagaaaggggtttaatcaccaggtactgttggggctacatcagcaggctgcggagtaaacttccaggcaactcccagccttcagaatcacactgcacctttcaatgattgggaaagcagccctgctacaacagaaagctgcaagtacagaagcaggctgactgtctcaccaccgagcttatgaaatggatgtcttgccccttgccttctcccggtataacccagacccatctccacatcttgccaaaaagtgccaattggcagagcctaaacacatccagaaagctatccacaaaggaatcttggaaatgcagttttttgctttttggtctctgcagaagaggaagaacactagacaggacgtggagtgctgtatacataaatcagtccattataagtatctgccaaaaacattatgaaatcttttaccatgcattctgtattttgctacctttcttatgggaaagagggcaaaagaaagcagtttgctactagaacatgttctgtttgttattaaagtagcacagttaacaaccatgaacttgaagtcaaagacctggagtccagggcgtgctctgccactaattagtttttggcctggggtaagtccatttatttttcagagttttcgtttcctgcgagtacaaaatgaggcaattagactcagtsattgctgaagaagcatcctttt

SEQ ID NO: 692047 - DNA, 1480 bp, Homo sapiens
caaatattgaattttttttctgggatctgttgttgtttaaattgtctgttcaccaagccatgttctcagctggagcactcaaaagcagggacatatttctgtatatatttttaaggttcattcacattatgtttgaaagttgcaataaatcaacttaatttgaatcagtccataagtttatatgcctgtctaaactttctgtttgaatataaaccgtaagtgcatattttccctttaatcatttttttctgtttaaatgctgtttcaagacttcaatatgtgtttattcgcattgttgatttattcattcattcacccattcagcagatatataccatgcttcttctatgtgacagatcctatattggtaagtgtggagatataaagacaaataagacatgatctctatgttaaagggctctcagtctggcagcggagtggggctttgtagttcacatagcattttcaaatacttattcaccctcaatgaccattacagtgggtttcaactggaatgcaatgagaatcacctgggaagctttaaaaaattaccagtgcctggaccccacctccggaaattcagatttgatttctcttgggtcaggcctggtcatgggcattttttaaaagttcatgagatgattctactatgcagccaagattaaggactgccgttctactgttatttaattgctgtggttctccttggacaccatactgtttcccatgcctgagtttttgcttctctatccctgtacttactactttacattggaatcctttttctggttttcaacaaccctctcaccccctgacacacagacacagttttgaactccatcttatccatcttgtagacctgagtgcctagcacagtaccttacccacagtaggagctcattgtttgttgaaccatcttcaacttgatcacaaaatatactactttgtgttatctcttctacttcagcacaaaagatgaaatcttccatctgattagatctactatttcatttttgtctccttcttgctaaggacccagggcaattgccctggagcaaggcaggaggacaggaaaagtggtactgtgatgttctacactcaaaatcatccctcctcactaattcctattgtttcatacctcaactccctctctctgtgctacatttggcaggaaagtaaggaatgtggccattgacctaaagcaacccagctcatccagccaaggttgctgtcgggaacctcaacagatcttcattaaaacaatttttcctactgacccttaaagatatacccagctgggtcaaaattcaaaatatgcaccaagtttagaccttaactgtaaaatctatagcactcmatacttacgaaatttctttcttgataatagatctttacagtgtatttttctaacggaatgaatgttgttcaaatgtgttagggccatcccaagaaatacaaaccaagtactttaattcttcaa

SEQ ID NO: 692048 - DNA, 1480 bp, Homo sapiens
caaatattgaattttttttctgggatctgttgttgtttaaattgtctgttcaccaagccatgttctcagctggagcactcaaaagcagggacatatttctgtatatatttttaaggttcattcacattatgtttgaaagttgcaataaatcaacttaatttgaatcagtccataagtttatatgcctgtctaaactttctgtttgaatataaaccgtaagtgcatattttccctttaatcatttttttctgtttaaatgctgtttcaagacttcaatatgtgtttattcgcattgttgatttattcattcattcacccattcagcagatatataccatgcttcttctatgtgacagatcctatattggtaagtgtggagatataaagacaaataagacatgatctctatgttaaagggctctcagtctggcagcggagtggggctttgtagttcacatagcattttcaaatacttattcaccctcaatgaccattacagtgggtttcaactggaatgcaatgagaatcacctgggaagctttaaaaaattaccagtgcctggaccccacctccggaaattcagatttgatttctcttgggtcaggcctggtcatgggcattttttaaaagttcatgagatgattctactatgcagccaagattaaggactgccgttctactgttatttaattgctgtggttctccttggacaccatactgtttcccatgcctgagtttttgcttctctatccctgtacttactactttacattggaatcctttttctggttttcaacaaccctctcaccccctgacacacagacacagttttgaactccatcttatccatcttgtagacctgagtgcctagcacagtaccttacccacagtaggagctcattgtttgttgaaccatcttcaacttgatcacaaaatatactactttgtgttatctcttctacttcagcacaaaagatgaaatcttccatctgattagatctactatttcatttttgtctccttcttgctaaggacccagggcaattgccctggagcaaggcaggaggacaggaaaagtggtactgtgatgttctacactcaaaatcatccctcctcactaattcctattgtttcatacctcaactccctctctctgtgctacatttggcaggaaagtaaggaatgtggccattgacctaaagcaacccagctcatccagccaaggttgctgtcgggaacctcaacagatcttcattaaaacaatttttcctactgacccttaaagatatacccagctgggtcaaaattcaaaatatgcaccaagtttagaccttaactgtaaaatctatagcactccatacttacgaaatttctttcttgataatagatctttacagtgtatttttctaayggaatgaatgttgttcaaatgtgttagggccatcccaagaaatacaaaccaagtactttaattcttcaa

SEQ ID NO: 692049 - DNA, 1443 bp, Homo sapiens
ataataacaatataacaattaaaataatgcaaattttaaaagcataacaactatttacatagtatttatattgtattaggtattataagtaatccagagattatttaaaacatatgggagagtgtgcataggttatatgcaaatactacaccattttacataagagacttgggcatctgtggactttgttatctgcaagggtcctggaaccaattccccatggatactgagggtcaactgtaccaagytgaaaacaaaacaaaaggaaatctattgcaaaaaggaaattcccaaagataaaaagcatgtctatgaaatagtcaaagagccgaaaatgttgggaagacccacactgctttccctgccctgtgcccctttttgcagatctatttgtgtctttatctaccagcagatattctattattctaatagattcctgtttttcccaagagggtttacttatttattaaatatgatgcaaacatctctctcagagatgttgctctctcttcctaggattccttagccctaaatctgcagagccaattaggtattaatattgggctttacaactttggaccatctgaccaccaagactgattcattaaatgtatatggtttcagatcacattaatttatcatagactttagaattggctttttagaagtactgctataaggaaaatctcagcatagcaagttttatctaatagtctacttgtattaaagagtactcaatgtaaaccctaggaagacttttaactgccttttggaaattggttgagtgggatttgaaccgtgtactctctgtaaagcaggaaattatcacttagtaattactaagtatttaaaaatgggaaatagaaaattacatttcagacctggtgcagtggctcatacctgtaatcctaacactttggcaggtggaggcaggtggatcgcttgagcccaggagttcaagaccagcctgggcaacatagtgagcaactccatttctactaaaaataaaaaaaattatttgggcgtgatggggtgcacctgtagtccccactactcaggaggctgagacaggaagattgcttgagcctagaaggtcaagcctgagtgagcagtgaccggccattgtattccagcctgagcaacacagcgagaccctgtctcaaaaaaaatgtatatttttaaaaaaagaaaattacattttagttgttccataaatatcagtacaaccaaacctaagtgcaaaattcccaacacaaatgatcgcctctgggccagccatgtagcccccatcttgctgtcaataatcatttccaggggctgtaattgtcttccttccccctgtaccaccccatcacaggacacaaattgttttgcttagtttagatagctgtgactaaactaagtgccaattgtcttttaaaatatgtgttaatcagcactcaa

SEQ ID NO: 692050 - DNA, 601 bp, Homo sapiens
tattccctcaaatgtcacaagatgatcaacacatttattttgttttgtatttcatattcactgctaccctggtctccctgagggcagaattcacattgagtaattactaaattcctaataccaatcagcctgaacactaaataactaaatacttgggctcactataccattttggtcatgctacaggtgttttgattttacttttcatgaggggtacatctgagatagaatttcagatatatttttttccactttcaatattcaaatttctgccctcttccagcacttctgcccagtagcatgcagtatagtaaaaattctatctctctggtatatatttgtgtacctacaatgtttcaaccttgtaccaaatgtttggctaagcctattcatttacccttggttccttggttcctttctcacagtcaggtccacatgaataatcaaaggtaggtctagcwtcaatgaactcaaaatgttatgttataaaatttgctggccaagttgctgacttgaaatagttcaggtcattttaaaacatatggataaaggtaagaaataaatcttctggatatttagtctatactagaacaaaggttta

SEQ ID NO: 692051 - DNA, 631 bp, Homo sapiens
ctggcttaatttcctattttttttaggtggtgagatctgctgaggaagcggcatcagtgttggccacttcaattagtccagagcagtgcatcaaagtgctttgtcctatcattcaaactgcagactacccaattaatctggctgcaatcaaaatgcaaacaaaagtgatagagagagtgtccaaggaaaccctaaacctgcttttgccagagattatgccaggtctaatacaggtaagcaacaaagcttggagaggaataagccatgatacatttgggrtacagttattttaggtactttccaggcatcattactggcatgatcaagccttcctcccgtttgtctgcaatattcaggacaaagacttttcataactagccagggggttatagatgtgggtgtggtaaaatttacataacataaaattaacgatttttaattgtacaatttaggagcattaactacattcacagtgttatgcaaccatcactactatccacatacagaaatttttcatcatcccagactgaaactctgtacccattaagcaataaccccattccttcctcccttcatcccccccagcacctggtaacctctattctattttctgctagattccttataagtg

SEQ ID NO: 692052 - DNA, 631 bp, Homo sapiens
ctggcttaatttcctattttttttaggtggtgagatctgctgaggaagcggcatcagtgttggccacttcaattagtccagagcagtgcatcaaagtgctttgtcctatcattcaaactgcagactacccaattaatctggctgcaatcaaaatgcaaacaaaagtgatagagagagtgtccaaggaaaccctaaacctgcttttgccagagattatgccaggtctaatacaggtaagcaacaaagcttggagaggaataagccatgatacatttgggatacagttattttaggtactttccaggcatcattactggcatgatcaagccttcctcccgtttgtctgcaatattcaggacaaagacttttcataactagccagggggttatagatgtgggtgtggtaaaatttacataacataaaattaacgatttttaattgtacaatttaggagcattaamtacattcacagtgttatgcaaccatcactactatccacatacagaaatttttcatcatcccagactgaaactctgtacccattaagcaataaccccattccttcctcccttcatcccccccagcacctggtaacctctattctattttctgctagattccttataagtg

SEQ ID NO: 692053 - DNA, 2035 bp, Homo sapiens
tagttatccacctctggctctgttggatgtaacaaaatcacttatagaaaaaaattctttccatagtcccattcctagttttctttccctagtgttgatatcattctgaatccaagggtaaaaattgctgacagactcttcagcatttatcaggatgtgcaaagaaatgtgaaacgagatctgagtagctgtagttccactccttggcgaatattgaagaactttgtgtttaaacakagttgctgagtccagtctagccatgtatgtggataggcaatagatttaaatagtcttccaaccccacataatagccaacaaagtgaagttgtgaaatcgtgaactaaagtatactcactgtgtaatgtgaaattttagatgttaatagtgtgatgtgcacaatataaaaatataatattctgtattcttttttataaatctagcttatgattgatacacctaccagtccagttaccagtggacttccattattctttgtgataacagtaactgccataaagcaggtatgaaatactttctttttttaattttcctctaagtcatttagaagttgctaaatatttccactccaaagtaacatttattgttgtgaaaataatttccataagaaagcagcaaatttgtctgatacgtagtaaaattaaactgaattagccactctgttatatttcaggtacctggtgactcatggaatgattaacatcgttaaaatatgtagttcccttgacagagctagaaagcatccaaaaacaagtattgtatatgtataaaccatttatatatgaaatagatttcttaattataatcatctttgtagagtttggtgatatttaaaggaaatacaattcaaaagagatatgtttatagagagcagggtatatacttctggtgtgaacatttgtgagtaaaaactatgtagttcaaaaattagggtgtggtagcacatacctgtggtcccagctacttggtgggctgaggtgggaggaacgcttgagcccaggaggtagaggctgccctgagccgtgattatgtcactgcactcccacctggttgacagagtgagatcctgtctcaaaaaaaaaaaaaaaaatgtatagtccttttctgctgtttacaactttctcttatgagtttagtttttatgtattttccccctggggaaatattttcaatcagagcatgaattgacattaaaatctagttacagagaaacaaggttattagataaacatatagaataagaaggaaattcatagaaatgtcctgttgatttagctactacttctcaaaaaggtcttggcagggtttcagttatacagagatgattccttccacctgcaagagaattaactgaattttctcaggcaaatgtgaatttttcattttataagatgtagggataaggcataaattgacatggaaataaaattgacaaacattttacagttctgggatgaagtatattctttattgcatacataagaaagatagaggagcctatagattaacaattagattatgcatctacatgtcagagaatactaggccacagctctaagttcgattttactttcttcacttttccattggagattaaaatgtgtgtatatcagtcgatatgcatttaaatcactccatataattattcacctgatgaatatttactttgatgaaataaatgacaaacagatgtcatttatttcaacaaagtaacatgtttgtcctttggacctcgtttctatatatactttcaccttaggtaatttcatcccatccagcagaatgaagttaccatctctatgatgatggttcccaaatttatgtttatcctgaaactattctttgaactccaaacacacatgtacaactgtttgtacaacatttcaactttgtcatctcacaagaatctcaaacatgactcgatttttttccccctcaaaaactatactactagttcttgttattctgcagtttattaaatggcactaccatccaaccaccgcaagccttgacatca

SEQ ID NO: 692054 - DNA, 1264 bp, Homo sapiens
cccatctctactaaaaatacaaaaatgagccagacatggtggcgggtgcttgtaatcccagctactcaggacgctgaggcaggagaatcccttgaacccgggaggtggaggttgcagtgagcagagattacgccattgcactccagcctgggtgacagagccagagccagactctgtctcaaaaacaaaaacaaacaaacaaaaacacacacacacacaaacaaaaagtctgtcctgccccttccacaacagccccacagatacctaagagctcatcacttctaaacgtacctcctaacttccttcttctgctcttccttttctctcttctctctccttttctttccttttaccagctccttatgacgtataccaacttaaaaaaaatcttttcctcagggccatacaaacaaatccagtctctgctacaactcactggagataaatagttactatcatctttatgtacatctctccatgtaagataaaagaatcactccagttaaaagtcatagttttcaagcattctgtataaaccaatattagcaaacatttactgagtgcctgctatgtgccaggcactagctatatgccacttctaacccttacaacccttccaggtgagttaatgatagytaatacttacaaagcctttacaatcgactcatctaggatatggtaaacaccagtaaagggcttatgctggaggctgacacatagtgacattcaataaatgttaactgttactatctcttgtacttcgggaagaatttggagaatgttcgactcaactacagtgttctacatagcattaacctggggaaattttttggctcctgatgggctatttctcctacatttgtgttaaccacagagtttggtccttaaagctattcaaaaggatgatcgaggatcaaggatggaggcctgcatttttcaaaagcttcaggttattctgggccaggcctttgcacagttctttgaggtctgtttcttccacggaagaagcactatcaggtacaagaagaacgggacctgaaagttgagtttcagctctaatgagagactgctaaagagacagcactagtttgaatttcacaaattaaaattcaccttgaaaaattgcaacctttctcagctcagttaaagggaagaggaaagagttaatgctctcagttgatcaggtgtgggtctgctggtggctgccggtactccagtctgagaactgataggtataggtattaattgtttggggaacatcatt

SEQ ID NO: 692055 - DNA, 660 bp, Homo sapiens
gtttgcctccaccacctagacctaagggtgtttgcatatttttaaaatctatgttttcatttactttttggttgtccktacgagatttctgagactcacctaaagttagctagacctttattttctacagtctgattttttaactatatgagtggtttgagatatttttttaaatcaaaacaaaaggagaaaaatcttcttgtttgaaatgtaagacttcgtaataaaacaggagtttatgaagagcacatagtttcatcctatgaatagcaactttgaagatacattcttaaaatatgaaattgtagattttaattggttgattttgtgttaaccagacaattaccaatctgtttattcgtgtttccttcctaatgagagaaaattccagttatattgctatattgtataataacattcctaggtcaagtcaaagagtttagaattatccttaaatatactatgtagtttaacttaaaatacagtcataaaagtattctctactactaatttgtttctgttcttttcagactacaagataaagttcgagaaactattgaagcattgagaatggctggtatcaaagtatgggtacttactggggataaacatgaaacagctgttagtgtgagtttatcatgtggccattttcatagaacc

SEQ ID NO: 692056 - DNA, 660 bp, Homo sapiens
gtttgcctccaccacctagacctaagggtgtttgcatatttttaaaatctatgttttcatttactttttggttgtccttacgagatttctgagactcacctaaagttagctagacctttattttctacagtctgattttttaactatatgagtggtttgagatatttttttaaatcaaaacaaaaggagaaaaatcttcttgtttgaaatgtaagacttcgtaataaaacaggagtttatgaagagcacatagtttcatcctatgaatagcaactttgaagatacattcttaaaatatgaaattgtagattttaattggttgattttgtgttaaccagacaatyaccaatctgtttattcgtgtttccttcctaatgagagaaaattccagttatattgctatattgtataataacattcctaggtcaagtcaaagagtttagaattatccttaaatatactatgtagtttaacttaaaatacagtcataaaagtattctctactactaatttgtttctgttcttttcagactacaagataaagttcgagaaactattgaagcattgagaatggctggtatcaaagtatgggtacttactggggataaacatgaaacagctgttagtgtgagtttatcatgtggccattttcatagaacc

SEQ ID NO: 692057 - DNA, 592 bp, Homo sapiens
gtgtactaaattcataaataattttatttcatgaaatagtagaaggtctgcctttctatcaatggaattatattgtaaaaaatggtgatgacaaaacttaagcctatttcctttagccttttgtccaagacaaaatcaaacatagcaggtaggaccayctgctcatgatttttggaagcacgttacttcaggaattgattcataggaagaaaagaccactttcctataaagttattatatgtcagtgttgcaaaatttagtggtaatttatatgaccttctttctatttgggtttcttgaaatacatttgtattggtcagagttctccagaaaaataaaaccataaaatatacttctatatctctagaaagggatatattacaaggaattggctcatatgattatggagactggcaagtccaaatctgcaggcagatttgcaagcccaccaggcagagaggcaagagaagacccaatgatgtaaatgaagtctaaaggttgtcttctggagaattccctcttacaagggtctttagctggtctttacattctagtctggtcttcaactgattggacaagacccacccacatt

SEQ ID NO: 692058 - DNA, 593 bp, Homo sapiens
tttttaaattcagacgctgcttttttaatagtcaggcactgacatattttaattctcccttaccgaagtgaaaaggcacaagcagattaagaatttatggtttaaacaacaaaataaaacaatgtgttggcagcattatactccctagaatttcacacatttaattttgttatttttactttcttgtatcaggcctgttaaatcctggaaggagagcagacatttgagaaattttttttcctgttctgtttggaattcatttcccttagtgtgacagttgagataagctatttggactgcctccagggagtgctccagaggtgggcagggaggaggcctcctggttccatgactaaggtatggctgcgttgggagctcggctcagccatccctagtgaaatacagtggaaagcggcagctggaatcagatccacaaggaatagccygagttctccagaccaaagttatattttttaggtttgcctagctgtttaaaccaagtcacaggcagggctatggtagtcattcctaggtatcatcccagtgggacttgtgtacctgggatccgatggtgggactgctggctctggagg

SEQ ID NO: 692059 - DNA, 568 bp, Homo sapiens
acattttggtgtctgggcaaggtctacccaggatcaaatctgttgacrcccttctctccaaccccagccctgtccctacctacacacacgctttgtttaaaaatactcattggtgcttactctgtgtcaggtgtcaggtagtgtgctagcactgaggatgcatagtcctttccctctttttttttttctttgggacagtgtcttactctgtcacccaagctggagtgcagtggtgtgatcgtggctcactgcagccttatccttgacctcctgggctcagctgatcttcccacctcagtacctcctgagtaactgggactacagctgtgcactaccaccgggctaatttttcagttttatgtttttgtagacatggggtcttactatgttgcctaggctgatcttgaactcctggactcaagcaatcctcctccctcagcctcccaaactgctgggattacagttgtgagccactgtacccggcctcatcatatccctcttgaagcttgcagtgtaggacaggtgaacccagcagccacatctcttatttgggtattgcgggagacct

SEQ ID NO: 692060 - DNA, 614 bp, Homo sapiens
ttaataactactcttaattgcagcaattttgttttggacagagattatgggaataaattttaattctggttggaaaatagtactgaaacagcacttgtcttattctttcaaatttttagtacttgggtatttggagtcattgagatttactctttgtatatgcaggaacattagttgtttcagactggacaatggctggttataagtagttgaataaaatccctgcagttcatccattcttctcctaccagcaggtgtcattatggaaatatgaaaatastgtaaattccagagttgtaggaactagctgtgagaaagaaaagtaacactttggatattaaaaaacaacaaaaaatgaaaaaatcatttggcactaagcaaggatggcatgtttaattactgatttggcagtgttctacagtatgatgtaataggattttaaagcacataatttattttaattagattaagtaaatatttataagaaccattctaggctcataggagtcacaaaagaaaagtaagatgtgattcttatcctcgaggagccgacatgatatctgaggatacattaatgaaataattagttcatagaatgaatcaatctttctttt

SEQ ID NO: 692061 - DNA, 638 bp, Homo sapiens
tgccagggaattttcaacataggagtaggattgggagctaaattatgacaaattgagggatgaatggggaggtgaggcagtggagggcatgagtaccaaaaacaggtgggtactcatggaagggcagccatagggcggtggtttgatgagtatgtagaactgagggaaggcttgctttagtgattgatttttyttggatgaagaagtctggagttcatgaaacatcctagaagaggaaggccaggatcaacatgctgatggattgactggccctggatagaagtggggtactttctttttgaacaagaagtggggaaggtaagtggaagtaaaacttgaaagggataaaaattgtggatgactgctttttttttcttggacattaggaagctgtgttgtcttgtgagggtcaaggggctagggttggggtagggaacttgagcaacatggaacaaatttggaaatgctgctgtaaggaaacacaatacaggaatatgcagggcagaactgaggtttgagctttaaaacgtaatttagataatcaacatagttttatgattttcttttccaacagtggcagaatattcagaattggagaaaacagagttgctgtggaatgtcaagggtgagcagaagga

SEQ ID NO: 692062 - DNA, 1505 bp, Homo sapiens
atacaagggtaggctgaaacgtctgctatcaataaggatacctttttaaaaatgttaaatcgaacgcagagaattaaacagtagaaaagtattcattttaatgctaccattatcctgaatatagccggtcaatgaaagaatgtttaaagaatatttcaatttttttccactagattatttttagtttaatcaccaactgcctacagattatctagctggcttgctaactatagttatattcgctctaggacaatgaacttggcgttacatttttgactgatttataaattagtaataaaatcaacccaatttaataaacccaatgtttttaaaatgtatttctacctatttcccatagttggaagttttgcatttgttctcaagtttcaccaatgacctttgaaccattttcatggatttgtaaatgagtgtaggtgagtaaaagccagcaaagataaaacacaaaatgaagtctgccatttgagatctttcacaagagtcactttcctttcagaaaatttattcatttaagtcttcttatttctataataagtcacctcctcaattttcctataatattttaagtacacgaaaagttgagtgggatctttagataaagactttcactcactttaatatactgtcaaagtgatttttaaatatttcagaaagtttttaactgctaaaaggtaaaagtttgccatttgctagaaaattatcaaaactattttagcttatttggagcaggcattaaagttattgatttggggggaaaaagaaagagctaagtatttttaagtgaagcatcacataagtgccagaacgcattataggaacaaacataagaaacgacattttgtgctgcacatatttaggtataaaggagaattttcaggctgagaataaagcagaatggaaccctaaaccagtaaacatatctcccccctcttaaattatcacttttttccattgattgaattccttaagataacccataaaagtatggtctctgtgaccataagaattaaaataagggtcaggcgtggtggcttacgcctgtaatcccagcactttgggaggccgaggcgggcagatcacaaggtcaggagatagagaccatcctggctaacacggtgaaaccctgtctctactaaaaatacaaaaaattaaccaggcgtggtggcgggcgcctrtagtcccagctactcgggaggctgaggcaagagaatggcatgaacctgggaggcggagcttgcagtgagccgagatcgcgccactgcactccagcctgggcgacagagcgagactccgtctcaaaaaaaaataaaaaataaaaaaaaataagatgtcaacttgagcataaacccaatataaatttggtctcatcttcacattaatacatttggggttcaggtttgttttgttttgggttggaaatatttatttcattgacaaacaattccagagtgcaaacatttgtcctgttaagctgaagccaatgttta

SEQ ID NO: 692063 - DNA, 1505 bp, Homo sapiens
atacaagggtaggctgaaacgtctgctatcaataaggatacctttttaaaaatgttaaatcgaacgcagagaattaaacagtagaaaagtattcattttaatgctaccattatcctgaatatagccggtcaatgaaagaatgtttaaagaatatttcaatttttttccactagattatttttagtttaatcaccaactgcctacagattatctagctggcttgctaactatagttatattcgctctaggacaatgaacttggcgttacatttttgactgatttataaattagtaataaaatcaacccaatttaataaacccaatgtttttaaaatgtatttctacctatttcccatagttggaagttttgcatttgttctcaagtttcaccaatgacctttgaaccattttcatggatttgtaaatgagtgtaggtgagtaaaagccagcaaagataaaacacaaaatgaagtctgccatttgagatctttcacaagagtcactttcctttcagaaaatttattcatttaagtcttcttatttctataataagtcacctcctcaattttcctataatattttaagtacacgaaaagttgagtgggatctttagataaagactttcactcactttaatatactgtcaaagtgatttttaaatatttcagaaagtttttaactgctaaaaggtaaaagtttgccatttgctagaaaattatcaaaactattttagcttatttggagcaggcattaaagttattgatttggggggaaaaagaaagagctaagtatttttaagtgaagcatcacataagtgccagaacgcattataggaacaaacataagaaacgacattttgtgctgcacatatttaggtataaaggagaattttcaggctgagaataaagcagaatggaaccctaaaccagtaaacatatctcccccctcttaaattatcacttttttccattgattgaattccttaagataacccataaaagtatggtctctgtgaccataagaattaaaataagggtcaggcgtggtggcttacgcctgtaatcccagcactttgggaggccgaggcgggcagatcacaaggtcaggagatagagaccatcctggctaacacggtgaaaccctgtctctactaaaaatacaaaaaattaaccaggcgtggtggcgggcgcctatagtcccagctactcgggaggctgaggcaagagaatggcatgaaccygggaggcggagcttgcagtgagccgagatcgcgccactgcactccagcctgggcgacagagcgagactccgtctcaaaaaaaaataaaaaataaaaaaaaataagatgtcaacttgagcataaacccaatataaatttggtctcatcttcacattaatacatttggggttcaggtttgttttgttttgggttggaaatatttatttcattgacaaacaattccagagtgcaaacatttgtcctgttaagctgaagccaatgttta

SEQ ID NO: 692064 - DNA, 1535 bp, Homo sapiens
attcagtcttaacccattccttctaagtaaaatatctcacaccacactggagatcttagacaatttcagaggaaaaccacatcattcatgaaagactgagcactctcaagattaagaattaatggaaaatacagaaataatattagcccttgccagcctgctccatgccttcagataaatccctgaatccaccatataaggatgaaatggaagtaacatttgtggactgtctactacatgccagtttcagcaggctgtatctcaaccacaggacagttcagagtttggtagtgtaattcctatttaatataagcagaaactgaagccagacaggttaagaaactcgcctaaagtcaygtggctagttggtaatgcagctgggtcttgaactctaaatcctgaactcaagtccatgctctctactcaccacacagactctattcttacacagaaatggaattcatatttttaaagggtgggtgaaaggtggggcaaacaatgccttatggctttgaacctggataagcagtcacttactatcggccaattatggccaagtgatccatctgacttttgagatgtgtgatatttggcacatattagataatcgataaaggttagttccattccattctctttttccttccttctttcacttattcgaaagacccattcacataagaaaaatgaaaatagagtcaccgctggttgaaaaacacatttgctttataaaaatatcttcttccttattcttccgaaactcatatctcaaaacggcacaaaagcaaagggtcacgtgtgctactacttaagtgggaaacattttcatacctgattgtcatccatctttttctcctagaaaggtgaggagctgaaagccatgtaattattagtttgccaagacatatccccattctgccatgaagaaagacaactcgaagggcaccaacacggctttattcagatcctgttagctaataaaacaggaactgtaaaggtttttgtttgagaggaaaagttgttcaaccttttcccaggaaagaaaggaaggggtttgctttctcagtaggtttattcatatacctgtggtaaaccagcctatgagagaagtaacatctttgctgtaagatcagacctaagagctaccaatcaaatagcagtccaaccttaatatgctgatacagcaaatttccggatcttgatcacactaggctagggagtcattcttctcagtgataaagttggcgaatgcactcttgagaagataacaaattaaaaaccggctgactcgacaccatttgagtgaggaattcaccgctgacccagtagaacacaatttctaccaccagtcagtaatcactggagaggggccaacttcacttcatagctgtaaaactattccctaacagagggtcttggcacacttaaaacataactgtccgatttaccttatgcacatctactgaagttggtaatgacttcctcaactatttatattctgagtcatactgtgtgtgaaggttcaaagattctca

SEQ ID NO: 692065 - DNA, 693 bp, Homo sapiens
ggcaggaggatcccttgtgcccgggagttagagatcagcctgggcaacatagggagaccctgtccctttttaagwtttttttctaaaaaaatttaaattaaaaaaaaaaaagaaagaactgtgacactttcttgttttctcactcaaataacaaaaatagtgccaggttatttgtaccaggaagatggtttaaaaaaattaaactatcgaccagactcggtggctcacgcctgtaatcccagcactttgggaggctgagtcagggggatcacctgaggtcaggagttcaagactagcctggccaacatggtgaaaccccgtctccactgaaaatacaaaaattggccgggtgtggtggcacatgcctgtaattccagctactcgggaggctgagccaggagaatcgcttgaactcaagaggcagaggttacagtgagccaagatcgctccactgcattccagccggggtgacagagagagactcatctcaaaaaaataaaaaaatcgttggcaacatataggagataaaatggatgatatccttgttatatagggttcttcaaattcatctcaagaaaatcaacaaccaaatagaaaaaaacaaaacaaaaaacgagcaaaggcaggaacagaaaacttcaccccaagaaatatcattgtttccaaaatgtgaaagatgttcaacttcactaa

SEQ ID NO: 692066 - DNA, 405 bp, Homo sapiens
aaataaaataacacctgattcatttctccttgtacattctttcaaggcctaacccatgaccttccaaggcatcctgggtcaacayccagttcacaatgatctcttatgaatttcaacattgctactgtcccagcagccttcgtagttgactattccaacttaactctaaactctaggttcatggtgcataggggctacgttttctttcaacttagtctcaacatctcctaaaaattactcaataaatactcacgttaaaaattagcctgagcaaggccaggcacggtggctcacgcctgtaatcccagaactttgggaggccgaggcgggtggatcacgaggtcaggagatcaagaccattctggctaacacggtgaaaccctgtctctactgaaaatacaaaaa

SEQ ID NO: 692067 - DNA, 405 bp, Homo sapiens
aaataaaataacacctgattcatttctccttgtacattctttcaaggcctaacccatgaccttccaaggcatcctgggtcaacatccagttcacaatgatctcttatgaatttcaacattgctactgtcccagcagccttcrtagttgactattccaacttaactctaaactctaggttcatggtgcataggggctacgttttctttcaacttagtctcaacatctcctaaaaattactcaataaatactcacgttaaaaattagcctgagcaaggccaggcacggtggctcacgcctgtaatcccagaactttgggaggccgaggcgggtggatcacgaggtcaggagatcaagaccattctggctaacacggtgaaaccctgtctctactgaaaatacaaaaa

SEQ ID NO: 692068 - DNA, 609 bp, Homo sapiens
tttctgcaattgaactctaacagatgaactgacagactgagttatttaactgaactaagactatggtttagaaagtaaagttttttgatcattctgcatgaatttgaacccccattccaatacttacacactatatgaccttagataaattgcttaatctctccagcttcagctttactcatttgtagaataggaataaaaatagtattttggcccaggcatagtggcccacacctgtaattccagcactttgggaggcagaggtgggataattgcttgaggccaagagttttgagaccagcctgggmaacatagtgagaccctatctctgcaaaatatttaattttaaaaattaactgggcatggtggtgtgcacctgtattcctggctacttggggtgctgagatggaaagatcacttgagcccaggacttggaggctgcagtgagctatgattgtaccatagcactctagcctgggtgacagaataagaccctgtttctaaaaaagcataacatttaccccagaaagtgtttgaggattaaatgacataataatggtaaagcacttaatatagtatctggcatataataagagttcactaaatgtt

SEQ ID NO: 692069 - DNA, 609 bp, Homo sapiens
tttctgcaattgaactctaacagatgaactgacagactgagttatttaactgaactaagactatggtttagaaagtaaagttttttgatcattctgcatgaatttgaacccccattccaatacttacacactatatgaccttagataaattgcttaatctctccagcttcagctttactcatttgtagaataggaataaaaatagtattttggcccaggcatagtggcccacacctgtaattccagcactttgggaggcagaggtgggataattgcttgaggccaagagttttgagaccagcctgggcaacatagtgagaccctatctctgcaaaatatttaattttaaaaattaactgggcatgstggtgtgcacctgtattcctggctacttggggtgctgagatggaaagatcacttgagcccaggacttggaggctgcagtgagctatgattgtaccatagcactctagcctgggtgacagaataagaccctgtttctaaaaaagcataacatttaccccagaaagtgtttgaggattaaatgacataataatggtaaagcacttaatatagtatctggcatataataagagttcactaaatgtt

SEQ ID NO: 692070 - DNA, 652 bp, Homo sapiens
tgacggcaggccaactcttcgtttgcatagaagtgcagctttgtaacttcaccttaccctgtgattgattgctttttgcagccaatcagatgtttgcacaggagtgtgacctttgtaactttaattcagcctctcattggttgctttgcacaaccaatcagactgactgcgggccaccacttcatctacatgaggtgaccaccaaggggccaatgggaaacctgtagagggtgtttgaagccgagaagatgctgtatcttggaccttgagccactgctcaggcctkctgccacactgtggagtgtactttcattttcagtaagtccctgctttcttctttcattgcttccttcttcctttgctttgctgggtgttttgtccaattctttgttcaaaacactaagaacctggacaactcgcagtcaagatcctctaatggtaacatctccacaagatctttagattctagaccattgaaaccttagaatgacatgcatccttcactttgttaactgacagagttagtccccacatatccagcacagatacacaaatcagcttgtttcatctctgcaattcgattttcactccttgattgtagggactagaaagcctcatttttctagggtgctttggatgtaggttttgatta

SEQ ID NO: 692071 - DNA, 664 bp, Homo sapiens
agcctgagatggcaactatagcactgctgtctttttctttatcactgctttatgtctcaccttttacacttatgaatatgttatgtttatcatttcatattgccaatttaagatctacctcataattttgagtggctgcagaatactgtgcttatgttcaaagtttgggtcgcttaagatttttcgcaaatacagacaaccctgccatagatatccttttatacctttattcgcatacttacctggttctttttttagaagaaattcctagacatagtattaccaggtccaaagtattgtgtgtgtgtgtgtgtgtgtgtgygcgcgcgcctgtgtgtggtttttctttgcttgtttctaattttgtggagttttctttagtccttttggttttttccatgctggtaggtataaaattctgcattgttttaattagcatttctttaattataaaggatgttaaatattttttacttttgttgccatggtatttttttttgactgcctgaactctgcccatttttctatcagggttagaattagtcttgttcttacatgtgttctaacttggatgttagtgttttcctttgttaggcttctttataaagacattaatttttatttactgttatattttgcagatgtattttatcagtttgtcctg

SEQ ID NO: 692072 - DNA, 664 bp, Homo sapiens
agcctgagatggcaactatagcactgctgtctttttctttatcactgctttatgtctcaccttttacacttatgaatatgttatgtttatcatttcatattgccaatttaagatctacctcataattttgagtggctgcagaatactgtgcttatgttcaaagtttgggtcgcttaagatttttcgcaaatacagacaaccctgccatagatatccttttatacctttattcgcatacttacctggttctttttttagaagaaattcctagacatagtattaccaggtccaaagtattgtgtgtgtgtgtgtgtgtgtgtgcgygcgcgcctgtgtgtggtttttctttgcttgtttctaattttgtggagttttctttagtccttttggttttttccatgctggtaggtataaaattctgcattgttttaattagcatttctttaattataaaggatgttaaatattttttacttttgttgccatggtatttttttttgactgcctgaactctgcccatttttctatcagggttagaattagtcttgttcttacatgtgttctaacttggatgttagtgttttcctttgttaggcttctttataaagacattaatttttatttactgttatattttgcagatgtattttatcagtttgtcctg

SEQ ID NO: 692073 - DNA, 664 bp, Homo sapiens
agcctgagatggcaactatagcactgctgtctttttctttatcactgctttatgtctcaccttttacacttatgaatatgttatgtttatcatttcatattgccaatttaagatctacctcataattttgagtggctgcagaatactgtgcttatgttcaaagtttgggtcgcttaagatttttcgcaaatacagacaaccctgccatagatatccttttatacctttattcgcatacttacctggttctttttttagaagaaattcctagacatagtattaccaggtccaaagtattgtgtgtgtgtgtgtgtgtgtgtgcgcgygcgcctgtgtgtggtttttctttgcttgtttctaattttgtggagttttctttagtccttttggttttttccatgctggtaggtataaaattctgcattgttttaattagcatttctttaattataaaggatgttaaatattttttacttttgttgccatggtatttttttttgactgcctgaactctgcccatttttctatcagggttagaattagtcttgttcttacatgtgttctaacttggatgttagtgttttcctttgttaggcttctttataaagacattaatttttatttactgttatattttgcagatgtattttatcagtttgtcctg

SEQ ID NO: 692074 - DNA, 664 bp, Homo sapiens
agcctgagatggcaactatagcactgctgtctttttctttatcactgctttatgtctcaccttttacacttatgaatatgttatgtttatcatttcatattgccaatttaagatctacctcataattttgagtggctgcagaatactgtgcttatgttcaaagtttgggtcgcttaagatttttcgcaaatacagacaaccctgccatagatatccttttatacctttattcgcatacttacctggttctttttttagaagaaattcctagacatagtattaccaggtccaaagtattgtgtgtgtgtgtgtgtgtgtgtgcgcgcgcgcstgtgtgtggtttttctttgcttgtttctaattttgtggagttttctttagtccttttggttttttccatgctggtaggtataaaattctgcattgttttaattagcatttctttaattataaaggatgttaaatattttttacttttgttgccatggtatttttttttgactgcctgaactctgcccatttttctatcagggttagaattagtcttgttcttacatgtgttctaacttggatgttagtgttttcctttgttaggcttctttataaagacattaatttttatttactgttatattttgcagatgtattttatcagtttgtcctg

SEQ ID NO: 692075 - DNA, 611 bp, Homo sapiens
ctcatgggacatacttggttgggttcgttcatttactcattcacacaacatttacctagcttctccaaatgccaagcaagttaacaggtgctggtataacagatcctcacaatagagctaagacggcactgctgcagatttgctccgcaagacaggaaagactagctgcaggttttactgacatgggatagagcttcaggctaaaaaagaagaaaaaacgtcatggctgggcacagtggctcacacctgtaatcctagcatcttgggaggccaaagagagaggctagcttgatatcagatgttcaagaccagcctgggcaacatagtgagacactgcctctacaaaaaaataaaataaaattaattagccaggcatggttgtgtgggcctgtagtcccagctacttgggaggctgaggtgagaggatcacctgagtccactcggtcaaggctgcagtgagttatgatcatgccactgcactccagcctgagcaagagtgagaccctgtctaaaaaaaaaaaaaagagagagagagagagagaaagaaagggaaggaagaaagggagggagggagggagggarggaaggaaggaaggaaggaaggaaggaag

SEQ ID NO: 692076 - DNA, 598 bp, Homo sapiens
taatcttattaatttcaaacatgtttttccttgtggagatctgtctgaaattactaaccttatacagcatattagttctcaatcacccgaacatttgataagctctgaaattattactaaaaatgtctaactgggtaagaagaaggaaagagtcctgaattatatactcttctgtgtcccctctaatccactaatcaacactattaggtttaatcagataattcaactggctatatttttataaagggccttctacattcctaagaatgccaatggaccaaacattaacagctctgaccttgagacttttggcaaaggatttctgtgcccagccttaacatggaaagagaaagctgcttttcagccctcaggcagcagcaacactttcccaagtagactggagagtaggaagtagctggatgttttggcatatctaaaatccctgagaatcttgtataatattagagaattggagcaggctctttccccasagcagattactagcagcaaattataagccaaccagatagatacatggaggctcacaattgattgatctgattttgcaaaccaaagagaagtatccatttctatttta

SEQ ID NO: 692077 - DNA, 819 bp, Homo sapiens
attaatatctaataaaactaatttggctgtttgatgaatatgggcatactgattcctattgtggcaaaacatgtttatcttacgggcctatatatttgctgataacatgcttatttccacattataatgttattcagcctgggctacttctagaatggaaaattagaatgtaagagtatgtttaaatttccatccattttcacagtaagagagcagacttctttgtatgctggccatatgcatttagatagagggacacgtgtgggaaatgttagttggtatgccgttcttggtatgacagtactgcttaataaacatatatacacctgctcaggaggctgaggcaggagaatcgcttgaacccaggaggcggaggttgcagtgagccgagatcgtgccactgcactccaacctgggtgacaagagcaaaactccgtatccaaaaaaaaaaaaaaawaaatatatatatatatataaatacatatgttatatatatttatgtataaatctatatattatataataaatatataatatataaatctatgtaatatattataaatataaatatatttatataacataataaatatatattatatttataatatattatatataaatatatatttaaatatatatatagtatctaagagggtacagtgatgaattgaactgtaccatggtgtcacaattattgaccttggtaatgtgttttattctttgaatcatttagttttgttaagcagatgagttttatttcctaatgacataaagagaacatgctcctctctaagaaatgctcctactctgttctct

SEQ ID NO: 692078 - DNA, 819 bp, Homo sapiens
attaatatctaataaaactaatttggctgtttgatgaatatgggcatactgattcctattgtggcaaaacatgtttatcttacgggcctatatatttgctgataacatgcttatttccacattataatgttattcagcctgggctacttctagaatggaaaattagaatgtaagagtatgtttaaatttccatccattttcacagtaagagagcagacttctttgtatgctggccatatgcatttagatagagggacacgtgtgggaaatgttagttggtatgccgttcttggtatgacagtactgcttaataaacatatatacacctgctcaggaggctgaggcaggagaatcgcttgaacccaggaggcggaggttgcagtgagccgagatcgtgccactgcactccaacctgggtgacaagagcaaaactccgtatccaaaaaaaaaaaaaaaaawatatatatatatatataaatacatatgttatatatatttatgtataaatctatatattatataataaatatataatatataaatctatgtaatatattataaatataaatatatttatataacataataaatatatattatatttataatatattatatataaatatatatttaaatatatatatagtatctaagagggtacagtgatgaattgaactgtaccatggtgtcacaattattgaccttggtaatgtgttttattctttgaatcatttagttttgttaagcagatgagttttatttcctaatgacataaagagaacatgctcctctctaagaaatgctcctactctgttctct

SEQ ID NO: 692079 - DNA, 592 bp, Homo sapiens
agagagagagagacatggcatcaaaacagcagtatcaaaagcttagaatggtgggagtctgacctacatacaagctttttttcttttcttttttcttttttttttttaaacagcaggcatctgaagcctgaaaaattaaaagctttgctaaaattaggtttaactagtagaaaaatccctcattctctctcaggtttattktatcttttactaaagcattacactcatgacacttaatggaatattagtaaaggaccttaattttatactttgggttgggaaaggagggtaggaaaagaaagtgaatctaggaaagggaacctgtgaatttccagtcttgagcacatttcatcaatccatttctaactgtctatagcacatcctctggctgagtctcctggagaatggaaataacaaaatcagggccaagtgaggggaagcccaggctcctcagagactgtgccttccccacagcagcttcctggggatgcctgtgacagactctctttgttgaagactgggccctcactgttctctttgtgagggtaacctgctactccggaaagtagcatggctactccggaaagtagca

SEQ ID NO: 692080 - DNA, 679 bp, Homo sapiens
tgataaattaataactttttagtttttatttttggtggaggtgctggggagatatattacttttttaaaaatttcastatcaattgcttttaataatatcacagaagtacattttaacaatatatgcaaacgctaataattttatgacatgttacaggtcataagcagagatcaggtaaaatgatcaggcctaacagtaaaaaaagaacaaactgtatatctagcacaaagtttctgctgctaatataagtgtgtgtttcttcctgatgacattttagtttctcagtgactttccagatatgcaacatgttaagtagtggttgcacggcaaagagcaaatcaatggtctgggaatataattcaaattattcactttttgaatatttggtaacatttaaattaaattggatttgtagggtcaaatactataaatacaatgaattaccggcaaacttctagaaagataatttctaagatggattaatgctatataaatatatataatgactcttaaaagaataaccgtaaggaactaattacataattctaatataactcctaatgttttcattgttacaggttaggaaaggcccacttttaaaaaaaattctgtatcataactagtatttctattatttaactgcatgtagtgtgacatgcaaagatgatcaggcaaatg

SEQ ID NO: 692081 - DNA, 1535 bp, Homo sapiens
aaaacacaggtttctccctttggcctactttttaaatttttttattttttttttaatcatttgtctctttttttgtatgaggtaaaaaaaaaaaaagtcccaacagctcctcttctgatgggacttgaagcttcaccacattgtattttattcaaggacttatgggtgcaaatttacaaatacatgatggtggatgggcttgaaaataaaaaaatgaaaagggggactgaaatttttttaaaaacattaaaaaaaagataatttttaaaatttgcaaatatagctggacaaactggtgtttctctgcctcttggttggccctgggacaggcatccctcaaggctcagcgcagcatgaaagccgtttccctctcccctaggccgcatgctcaccaagctatggaggaggtacttggcagccagagaagagtcatacatgcccaggcactgaatcaaggcggggaccttcagagggctcttgaacatgtcttcgacactgaggaagtcatactcgaagatccgcttgcatcgaaggaagttcagctcgcgatacttctccaaggacagatcggctccaggggaacgagcgaaaagagggtcattctcaagagctgagaagatggttttctggaaatgcaggagatgggtaaggcttatttggagtaaaagatggactctccatgtgcccttatatagttgacctccaggccacaggcttcatgggacacagtctgacccggagacacccagacagagatatgactatcattcccaatggactagaggactggaggcttaagaaacatcaacaatccgtgttcatttccagactcctcatcaattccctgaggcctgtcctggggtgcagagaggagagaggccgcgctgcctgggatgagcctcgcccggcagaggaggagctgtgagagccagaaatcccattctgctaacgaactaagaccccactgggaaaaaagacaagctgcgcacaaccgcacgcctcaccttaaagcggagcatgccctccccttccgtgaacagcgccagctccttccagctgaaggacgctcttgctcggtaggcatcgaggggccccctggggaattctgggagcagagctgtgtcgcctccttccacagtggatgccatcgcgtgataagagcctgcacaaaacatgcaacctgaatccatgctctcccatctatgggttcaaactacccccaccaacaggagagcccgcaacaccttacaaatcagagaaaagtaaacttgaaatccaaaaggatggcaaaagagaatcactctgtgaatggctagcatcattttcccagaagaaaaggcgagaagaattccctcgtccactcctgaacacagatgccaaggacacagaagagagccaggcacagcctgggggtcaccaggcacacagggcagagggtttgtcagagtcttgttttctgtcacacagccttgcctgagagtaccctgccctcttgggagcacccyggacatccagactcatccccaaggctcact

SEQ ID NO: 692082 - DNA, 607 bp, Homo sapiens
ttttccatttcttctaatatttcatccaattttagaggccttttgatatggttaggctttgtgtccctacccaaatctcatcttgaattgtaatccccaggtgtttaagggagagacctggtgggaagtgattggattaaggtggcagtttcccccatgttgttcttgtgatagtgagtgagtgctcatgagatctgatggatttaaaaggcagtttttccagctctcactagcactctgtctcctactgccatgtgaaaaggtccaagtttgcttccccttcgccttctgccatgattgtaagtttcctgaggcctcccaggccatgcggaacagagtcaattaaacctctttcctttataaattacccagtctcaggtagtatctttatagcagtgcaaaaacagactaatacacctttcaatgcagatggctttatataagctagtgttaacctgcatttttattacttggtttggaaaaacataatcccatccaattattgtacctgaawgctttctggccacttactccctcctgaaatcatccttgctcttcaaagcatccttccatctcactttttcctctggaattcatagagaaccaa

SEQ ID NO: 692083 - DNA, 2006 bp, Homo sapiens
  misc_feature 544: n = A,T,C or G
ggggcctgaatgaatgaggggctatgaagcctgtcacttcacaagctttggggaagttctccttgatgatctgtgtaggtaaaggataacacatagaaagcataatacgttccccacacgtcttcttgaagacataggctgaagacagtttcccttttcagcaattaagcgttgagtgatgtgtagttgttctttgtgctggattattgaatgttcaggtatctgagtaaatgcttgacctcagcactttaatttaaccttgtaaaatagggctacacattggaagcaggctaaatgcctcatatatttggggctgttacctttcactttactgatattatcttagagcttatgtatctgtcctgcctgaataggaaactttgaaaagcacacacacaatgaaccttacccaaatgtgactttccttaattttttttttttttgtttgcgactatcatgttggtgatagtatcgtgtgctaatattgaagtagccgatgctgtgcttttggacgctggaaaatgttcattttgctcttaagagntttggtgttctgataattttgtaaatcatgtggacataataaacgtgtcagtaactagcctttttttgggcaagctttaatggattaccattacagatgagagaattaggcttgtagaaataattgatgtgcctaaatcacatagtaatgacgttatgaagcagagattcagtctccagtcagtgttatactgcctgggagactagtgttaggagactgagttaatcctttttttttcgttttgagacaaggtcttgctttgtcacctaggctctagtgcagtggtgtgatcacagctcactgaagcctggacctcctgggctcaaacaatcctcgcatctcagcctcccaactagttgagactacaggtgtacacccccactattggcttttttttgtgtgtgtgtgattaggcatggggtcttgttatgttgtccagggtggtctcaaactcctgtatacaggaaattctgccaccttggcctcccaaagttctgggtttgtaggcgtgagccaccatacctggcctcggatggattttggaattgaattgacctaatttcaagaacctgctcaggataggcgcggtggctcacgcctgtaatcccagcactttgttaggttgaggcaggtagatcacttgagcaaggaatttttgagactagcctgggaaacatggcaaaaacccatctttacaaagaaaaatacaaatattagccaggcatgatggcacatgcctgtggtcccagcttcttgggaggctgagggaggatcacttaagcccaagaggtggaggttgtaatgagccaagatcacaacactacactccagcctggatgacagagtgagatcctgtctcaaaataataaaataaaacaaaaaaaaaacaaaaaagctgctcaattatttcacggccttmattttccttagctataaaatgtccataacatccatttcacaggttattgagagagtcgtatgagagtcgtatgagagagtagctagcacatagtcctatgagagagtagctagcacactcaagaaatcttgctctttcatcctctcattgtatatacttactgagtatgagcattttatttaaacagatattactatattttagtccctggaaatgtctgaggacaaaaatttgctcaaacattagcacagacaacagagccacatgctaacttgcatcatgctcccaatatcttcctttaaatgttttctggggcaggactcatttggagtaatcggttttattaaatttggggactagaaatatgctccatttctctgaaatcggaaaaatatgccacgtgctttatttcctgaaatcggcataaaaaccttatgtgttacctattattttgtcctttgagagatagagttattttgttccccaccgagtcctgcaagtgtgcctcaatgccttccttcattttcaaaacttccctcactc

SEQ ID NO: 692084 - DNA, 2006 bp, Homo sapiens
  misc_feature 544: n = A,T,C or G
ggggcctgaatgaatgaggggctatgaagcctgtcacttcacaagctttggggaagttctccttgatgatctgtgtaggtaaaggataacacatagaaagcataatacgttccccacacgtcttcttgaagacataggctgaagacagtttcccttttcagcaattaagcgttgagtgatgtgtagttgttctttgtgctggattattgaatgttcaggtatctgagtaaatgcttgacctcagcactttaatttaaccttgtaaaatagggctacacattggaagcaggctaaatgcctcatatatttggggctgttacctttcactttactgatattatcttagagcttatgtatctgtcctgcctgaataggaaactttgaaaagcacacacacaatgaaccttacccaaatgtgactttccttaattttttttttttttgtttgcgactatcatgttggtgatagtatcgtgtgctaatattgaagtagccgatgctgtgcttttggacgctggaaaatgttcattttgctcttaagagntttggtgttctgataattttgtaaatcatgtggacataataaacgtgtcagtaactagcctttttttgggcaagctttaatggattaccattacagatgagagaattaggcttgtagaaataattgatgtgcctaaatcacatagtaatgacgttatgaagcagagattcagtctccagtcagtgttatactgcctgggagactagtgttaggagactgagttaatcctttttttttcgttttgagacaaggtcttgctttgtcacctaggctctagtgcagtggtgtgatcacagctcactgaagcctggacctcctgggctcaaacaatcctcgcatctcagcctcccaactagttgagactacaggtgtacacccccactattggcttttttttgtgtgtgtgtgattaggcatggggtcttgttatgttgtccagggtggtctcaaactcctgtatacaggaaattctgccaccttggcctcccaaagttctgggtttgtaggcgtgagccaccatacctggcctcggatggattttggaattgaattgacctaatttcaagaacctgctcaggataggcgcggtggctcacgcctgtaatcccagcactttgttaggttgaggcaggtagatcacttgagcaaggaatttttgagactagcctgggaaacatggcaaaaacccatctttacaaagaaaaatacaaatattagccaggcatgatggcacatgcctgtggtcccagcttcttgggaggctgagggaggatcacttaagcccaagaggtggaggttgtaatgagccaagatcacaacactacactccagcctggatgacagagtgagatcctgtctcaaaataataaaataaaacaaaaaaaaaacaaaaaagctgctcaattatttcacggccttcattttccttagctataaaatgtccataacatccatttcacaggttattgagagagtcgtatgagagtcgtatgagagagtagctagcacatagtcctatgagagagtagctagcacactcaagaaatcttgctctttcatcctctcattgtatatacttactgagtatgagcattttatttaaacagatattactatattttagtccctggaaatgtctgaggacaaaaatttgctsaaacattagcacagacaacagagccacatgctaacttgcatcatgctcccaatatcttcctttaaatgttttctggggcaggactcatttggagtaatcggttttattaaatttggggactagaaatatgctccatttctctgaaatcggaaaaatatgccacgtgctttatttcctgaaatcggcataaaaaccttatgtgttacctattattttgtcctttgagagatagagttattttgttccccaccgagtcctgcaagtgtgcctcaatgccttccttcattttcaaaacttccctcactc

SEQ ID NO: 692085 - DNA, 1165 bp, Homo sapiens
aaaagaaacataacattattatattgcagttcatgtccacaaacatccaaactgttctaagggcattttgtgtaaaaaaggtataaaataaaatagcaacaaccccaagctctcatactgataaataacgaagcaagtaatggcataaaccaagtaatcaattatgtaacaataacatcgtaacaggatgctgaatgaaaatcatactgtaagatgaggcatgcctctcgtttgcattccatggaaacatgcatagtggttttcaagttattaaaactagtttttaacgttaagaaataaacttcagtgtacagatgtatattagcaaataagatttaaaatactttaaaatttatattccattttcactgcaaagaactcaagcattccacatagggaaaatcctggattcttaacaggtgttagttttgatttgttcgaagtaatcaagataattttattgtagtagataaaaatatatgttatttttaaattcttaaattatgataacacctgattttatatcttactctggtaaaacattaattgcatcattggagatgctttataaaaaattgtgaattaatgattgaattaccaataactgtaaagaattccgtaagtataccaaaatttagttttgcctgttctgttcttcatcttatataaaattttcattctgttatgtaaaaaaaaaaagagctgcacgctgtttttaaagcagtttaaacagttctttcatctaataattactgaatgtttagtaaaaacaagggytgttattagaaaaaggattgccactagttctgaaagcaaacatttaaatattttgagacaactaaacaactactatgaaagattttatttttaaaaataaatactttttttctgttttaatacattttaataagtagccatatactattatttgcacatacccttatgaatatcctggtcgaagtgaaaataaaaatacatgtttaatttcctccttcttttaaaagctgtatatttgattccatttctttcaactactcaaacagtgcttaaggggcaaaaggaataaaaaatcaaaaaagaatactagatttataatttaaaaatcaaagaaaaataattatttaagataattatattatttaaaaataactcttatgaaaggttt

SEQ ID NO: 692086 - DNA, 1165 bp, Homo sapiens
aaaagaaacataacattattatattgcagttcatgtccacaaacatccaaactgttctaagggcattttgtgtaaaaaaggtataaaataaaatagcaacaaccccaagctctcatactgataaataacgaagcaagtaatggcataaaccaagtaatcaattatgtaacaataacatcgtaacaggatgctgaatgaaaatcatactgtaagatgaggcatgcctctcgtttgcattccatggaaacatgcatagtggttttcaagttattaaaactagtttttaacgttaagaaataaacttcagtgtacagatgtatattagcaaataagatttaaaatactttaaaatttatattccattttcactgcaaagaactcaagcattccacatagggaaaatcctggattcttaacaggtgttagttttgatttgttcgaagtaatcaagataattttattgtagtagataaaaatatatgttatttttaaattcttaaattatgataacacctgattttatatcttactctggtaaaacattaattgcatcattggagatgctttataaaaaattgtgaattaatgattgaattaccaataactgtaaagaattccgtaagtataccaaaatttagttttgcctgttctgttcttcatcttatataaaattttcattctgttatgtaaaaaaaaaaagagctgcacgctgtttttaaagcagtttaaacagttctttcatctaataattactgaatgtttagtaaaaacaagggttgttattagaaaaaggattgccactagttctgaaagcamacatttaaatattttgagacaactaaacaactactatgaaagattttatttttaaaaataaatactttttttctgttttaatacattttaataagtagccatatactattatttgcacatacccttatgaatatcctggtcgaagtgaaaataaaaatacatgtttaatttcctccttcttttaaaagctgtatatttgattccatttctttcaactactcaaacagtgcttaaggggcaaaaggaataaaaaatcaaaaaagaatactagatttataatttaaaaatcaaagaaaaataattatttaagataattatattatttaaaaataactcttatgaaaggttt

SEQ ID NO: 692087 - DNA, 1718 bp, Homo sapiens
taaataataaaaaacaatgtgccataatcatatttctcaatgtactttgttttccaggtataggtagtatgagtattgcctggacaatactcataggcagcatgagtattgcctggacagagggctataatctccctgatcctacaagaatccaacctgggcaccagctcagtgtggtcactgagcacggctcttcttccttcatgggttcacatggacacacactcagcaacccacacaatgcttttctctttaagaatctttttagttaagtacatcttccggattcaaaatacttaataaagcaacatactgcaaatgccattttttttcagattttcagaaggtttgaacaataaccaagagaacaggtgtatttcagatggaatattcgctaaggaagatgtctttctctacatagaacacagtctgaggctctactgtcctaaatsccgaaagctgatagtgttagtcattaagcttgctcttactacagggtctgtgtattatctaatgtgtaaatagcatttaagcagcctcaacaaccaaaatgctgaagatgggtggggatttgtaattacaatacaaaattaacagagaaaacactgatccagtataggacaagatttggctgctggttatattcgatcacacatcatcttttcttgcaagaaagattcatgtaattcagatgtaatgatttatctcaaagttttcaaggcattgaaaccgactactcttctttactaagacctaatgcagggcagggacagtggctcatacctgtactatcagcactttggaaggccgaggcaggtggatcacttgagttcaggagttcgagaccagcctggacaacatggtgcaagcacatctctactaaaaatacaaaaattagccaggcttggtggcatatgcctgtaatgttactactcgagaggctgagggaggagaattgcttgaacctgggaggcagtggttgcagtgagcctagatcgtgacactgcactccagcctgggtgacagagtgagactctgtctcgataaataaagataaaaagagtggctgtagctgcaaaagatgaggctgggtggagaaagggcttcccaggcccatgctctcgctacttgcttcctaatggaacatcacagaatgctcagaagctgaaaaacattgctccaatctctcacttatacctcctcttccatgcagcagcctggagatgggtggtcatggtcactagtgttgtttaagatcctggtctataagtttgtgttttttttcccctttcccttgtacaagttatttaacttggtgaaatctctgtaaaatgaaaataaaatccacatcagaaaataggtgacggcataattgaaatttcattccatcgtaacttgacataaaattaaataaagatttaagaaaatgctaccacatttaaaaagtgtaaaggttccttgctttgatgtcagtagtggacatggttcacacaccaaaggatgattttgacaataaaataaccatgtgtagatgccacagaggaatcatacatattaccattttaaatcactgaagaagaaatctaacctcctaccaagagaaagacggggagatttttaaatgaagtatccatctataagtgcatttctagaaagctgtcaaattagaaagcaaagctctggataatttgcaaaaacaaacaaaccaaaaaaatccc

SEQ ID NO: 692088 - DNA, 1718 bp, Homo sapiens
taaataataaaaaacaatgtgccataatcatatttctcaatgtactttgttttccaggtataggtagtatgagtattgcctggacaatactcataggcagcatgagtattgcctggacagagggctataatctccctgatcctacaagaatccaacctgggcaccagctcagtgtggtcactgagcacggctcttcttccttcatgggttcacatggacacacactcagcaacccacacaatgcttttctctttaagaatctttttagttaagtacatcttccggattcaaaatacttaataaagcaacatactgcaaatgccattttttttcagattttcagaaggtttgaacaataaccaagagaacaggtgtatttcagatggaatattcgctaaggaagatgtctttctctacatagaacacagtctgaggctctactgtcctaaatcccgaaagctgatagtgttagtcattaagcttgctcttactacagggtctgtgtattatctaatgtgtaaatagcatttaagcagcctcaacaaccaaaatgctgaagatgggtggggatttgtaattacaatacaaaattaacagagaaaacactgatccagtataggacaagatttggctgctggttatattcgatcacacatcatcttttcttgcaagaaagattcatgtaattcagatgtaatgatttatctcaaagttttcaaggcattgaaaccgactactcttctttactaagacctaatgcagggcagggacagtggctcatacctgtamtatcagcactttggaaggccgaggcaggtggatcacttgagttcaggagttcgagaccagcctggacaacatggtgcaagcacatctctactaaaaatacaaaaattagccaggcttggtggcatatgcctgtaatgttactactcgagaggctgagggaggagaattgcttgaacctgggaggcagtggttgcagtgagcctagatcgtgacactgcactccagcctgggtgacagagtgagactctgtctcgataaataaagataaaaagagtggctgtagctgcaaaagatgaggctgggtggagaaagggcttcccaggcccatgctctcgctacttgcttcctaatggaacatcacagaatgctcagaagctgaaaaacattgctccaatctctcacttatacctcctcttccatgcagcagcctggagatgggtggtcatggtcactagtgttgtttaagatcctggtctataagtttgtgttttttttcccctttcccttgtacaagttatttaacttggtgaaatctctgtaaaatgaaaataaaatccacatcagaaaataggtgacggcataattgaaatttcattccatcgtaacttgacataaaattaaataaagatttaagaaaatgctaccacatttaaaaagtgtaaaggttccttgctttgatgtcagtagtggacatggttcacacaccaaaggatgattttgacaataaaataaccatgtgtagatgccacagaggaatcatacatattaccattttaaatcactgaagaagaaatctaacctcctaccaagagaaagacggggagatttttaaatgaagtatccatctataagtgcatttctagaaagctgtcaaattagaaagcaaagctctggataatttgcaaaaacaaacaaaccaaaaaaatccc

SEQ ID NO: 692089 - DNA, 594 bp, Homo sapiens
taaaaatgtagacataaacagaatttaaactagaaggtaagcacaaactgacccaggccatttgaaatgtaatttaatataaaaatattcagtttgcattcagcttttctattatggagttgagaagtaaagggaccagcagataagaataatgaacaaattgttagattatcctctacwtacacttcaaataaaccagcaaatcatttatttatttgcctaacagttgctgccgtgagtatgggccattagtgactattaatatatgaaaatgtgtttttatttcccaaagcaattctgaattccataaatcttgcttttctcattaaagatattccattttatacatgcttgatcaacaaatatgaccaaggtctacggtgcaactttaaaagtaacatggaacctttagaacaaaaatgactaaaagataaatcgtgattttttcttaccgtttttctctgatggagatatttgttttcaagtgtatgctaatggcagacatgaaaactttaaaaaattaagatatagtaattgtaacttgtatctacatatgtacgttatgatacattaaatgttttaatattctatttg

SEQ ID NO: 692090 - DNA, 594 bp, Homo sapiens
taaaaatgtagacataaacagaatttaaactagaaggtaagcacaaactgacccaggccatttgaaatgtaatttaatataaaaatattcagtttgcattcagcttttctattatggagttgagaagtaaagggaccagcagataagaataatgaacaaattgttagattatcctctacatacacttcaaataaaccagcaaatcatttatttatttgcctaacagttgctgccgtgagtatgggccattagtgactattaatatatraaaatgtgtttttatttcccaaagcaattctgaattccataaatcttgcttttctcattaaagatattccattttatacatgcttgatcaacaaatatgaccaaggtctacggtgcaactttaaaagtaacatggaacctttagaacaaaaatgactaaaagataaatcgtgattttttcttaccgtttttctctgatggagatatttgttttcaagtgtatgctaatggcagacatgaaaactttaaaaaattaagatatagtaattgtaacttgtatctacatatgtacgttatgatacattaaatgttttaatattctatttg

SEQ ID NO: 692091 - DNA, 808 bp, Homo sapiens
ctttcttatatcatacatgaagataatgtccaagtagaaaaaataataaataaatatataaacagaaaaaaagaccaataaggatgaaatagaaatatataatttttttcctaaaatacctgaaggggaaaattacaaccaagaagccataaaacatttgataaatttgtataaaattttaaaactcctgccactttccaatttatcataaactaagtcaaaagaaaaatgatagttgtgaaagctatttctatccaatatgatagtctaaggattaatatgttcaatattaaaatcattttacaaatcaaattttattttatatatttatttttgtggaggtgggtgacagagtcttacgctgtcatccaggctggtgtgcagtggtgcagtctcagctcactgcagcctctgcgtcccaggctcaagggattctcatgccttagcctcccgagtagctaggattacagacgcgtgcgaccatgcccagttaatttttgtatttttttgagagatggggttttaccatgttagamgagggtggtcctcgaactcctaccttatgtgaaccaccccgcctcagcctttcaaaatcctgggattataggcataggccaaccgtacctggcccatggatgaaattgtaaactattcaatagaaaaaatgagaacaataacatggacaatttatagaagaacaaagcatcagaactgtaaaaatttaaaacttttctgctacataacactgaagggaaatacattgaaatactagatacacttttggtgggcatttacattgatgcacttt

SEQ ID NO: 692092 - DNA, 808 bp, Homo sapiens
ctttcttatatcatacatgaagataatgtccaagtagaaaaaataataaataaatatataaacagaaaaaaagaccaataaggatgaaatagaaatatataatttttttcctaaaatacctgaaggggaaaattacaaccaagaagccataaaacatttgataaatttgtataaaattttaaaactcctgccactttccaatttatcataaactaagtcaaaagaaaaatgatagttgtgaaagctatttctatccaatatgatagtctaaggattaatatgttcaatattaaaatcattttacaaatcaaattttattttatatatttatttttgtggaggtgggtgacagagtcttacgctgtcatccaggctggtgtgcagtggtgcagtctcagctcactgcagcctctgcgtcccaggctcaagggattctcatgccttagcctcccgagtagctaggattacagacgcgtgcgaccatgcccagttaatttttgtatttttttgagagatggggttttaccatgttagaagagggtggtcctcgaactcctaccttargtgaaccaccccgcctcagcctttcaaaatcctgggattataggcataggccaaccgtacctggcccatggatgaaattgtaaactattcaatagaaaaaatgagaacaataacatggacaatttatagaagaacaaagcatcagaactgtaaaaatttaaaacttttctgctacataacactgaagggaaatacattgaaatactagatacacttttggtgggcatttacattgatgcacttt

SEQ ID NO: 692093 - DNA, 607 bp, Homo sapiens
taacaaacctgcacgttatgcacatgtaccctagaacttaaagtataataatatatatatatatataaaataataataaaaaatccactctagaaatgtacattatcatgactgtacctaatattgtgtactagcttctaaatctaaaccagagagcctgcttctttttgttacttccttttgacatgcagtcttccttcttacctttttaagaaatgacaccatttcctgtgaccaggcagaagggtaagttacaacagtcatctcaaacgtgtacaatttccttgctggaagtactggagcaaatatgatatggtcttttaagggagaaaagaagtaaaagtcttcatttgtatagggcaaaagaaaaaataaattgtttccaagctaaactttcaagcaayaaaatacctgtatcaatttctaaaaaataaaaataaaacataaaaaggaatatatatttagccaatttaagagaacgtgtatgttacacactattgagggaatatagttgaaaaataaaatttcctctcagcctagaaaactgctccacaaaggtagaagaaaaagacaatttttcttttctttttcgttttaattgaagaag

SEQ ID NO: 692094 - DNA, 1611 bp, Homo sapiens
taactatacagtcaaattacttttgattaaaaataaatattaacgtttaaaaaggctttcaacgtttaaaaagccttttctgtatgctgccctgctgtttcacgttrccgtgcaggcaagccccttctgctgctgtacacatctggctgaagagactgctcccttgataaaacttaaacatctgcacccagtgtcttgattagctcacaagacagaaataaacctcctaagatgagctctacatttttggcccacctgcacctcaggaaagactgtcaaacccagaaggggagagaaggaacttcctgtggtcaggagtggagaggatgtgaggaggggtctgttccgcagccccacgttcaccgaagaagcaggggcgggggcagtggatgcaagctgtggaaagcagtcctggcagaatggcccccaaactccatctccatcaaccaacttatctgactcaatccgctgaaacttcccccaagtggatttcagtggatgtcccaatctgctaggaaaataccctcaggtttggcccggtccccaagacaatgagttgggcccaggtgaagctgcaaagggaagggggctgggtccggctgaagtcttgaagaatccttcaggagagaggggctgggcactggtgccccactccatgcccagtgcacagctgaatgctggagtgggcgcgcacgtgcacacgcgcacgcacacacaccccacaccacacagcaatgctggtgtgggcgcacacacccaacacacagcaacgttggtgttggtgcgcacatgcatgcgcacacacacacacgccacatcacaccacaccgcacagcaatccttagcaatgccagtaacctggtccgcacttacagcacatgcatcttggacagtccccagaaggccccatctgtcagtttgctgatgttgtttcgctgaagcttcagcacctccaagctgttgagcccctggaaggtgaggccctctatcagccgaatcctgttccgattgaggtccctaaagagatgaagccagcagggtcagagtgtcttatgtgcatatcccacccacaaccattctgaagcagtcctggctaagtttccaagccagaggagaaatcccagtgcagggatccctgggaagccaggatgtgtaggggagcccaccatgtgtctcggctgccatgcaggcactgatgctgccacctgaccacacctagtgcaggcaagaggggtgagtgaggccagctctccacagccagctccgaggctggcccacagctgcacagaagagaacgcgtgtgtgctcacgtctcctcccccagtagcaccagtgccatttgtgactctgcagtgaggacgtgggtatgactcaaggggtgaatgtcttatgtgaggtatctctgagctcagcaacagaaatccacaccacatgcctcaacccaggaaaaaccaaaccactatgtatcaaatggcaataacactttccactgggggcatttcacagcatctccactatggagagaagttactgcacatgggggcagggggagatggggtagagacaccccacaagtcatatacacttggcttctagccccagtatgacaaa

SEQ ID NO: 692095 - DNA, 619 bp, Homo sapiens
taacctttcttgtcayatttctatttttaatatcgtttcaaaagtgataattttgatgtaccaatataaacatattcctctaactgatcaaaaattttcagtgaccacctcccttccatagtccgaatgtgacaggtgggcttttataatttggactcaacctatgtatctggtttcatggctatgtagtaattgcttgtattttgaatccatccatataaaccacttttgaatatgcaaattcaccctaaaattgcctatctttttcccttgcatgtaattctcttcttcttagatattattctacacttagctggctggaatgtttctattcaaactttaaagctcagttcaacagaccctttaaattctttcctgatttttccaggtagggctttataaattgtgcctgacatttatgaaacacattgtttaaataaacattcacaatattactggtgtagtcatttttcccacttacagatgagggaactaaagccctgagaggttaagcaccttgtacaagatcacacagccaagtaagtagcagaataaagaattgtctctcggtgtacaggattctaaaactcatgtttttaaatatcacacattactatct

SEQ ID NO: 692096 - DNA, 619 bp, Homo sapiens
taacctttcttgtcatatttctatttttaatatcgtttcaaaagtgataattttgatgtaccaatataaacatattcctctaactgatcaaaaattttcagtgaccacctcccttccatagtccgaatgtgacaggtgggcttttataatttggacycaacctatgtatctggtttcatggctatgtagtaattgcttgtattttgaatccatccatataaaccacttttgaatatgcaaattcaccctaaaattgcctatctttttcccttgcatgtaattctcttcttcttagatattattctacacttagctggctggaatgtttctattcaaactttaaagctcagttcaacagaccctttaaattctttcctgatttttccaggtagggctttataaattgtgcctgacatttatgaaacacattgtttaaataaacattcacaatattactggtgtagtcatttttcccacttacagatgagggaactaaagccctgagaggttaagcaccttgtacaagatcacacagccaagtaagtagcagaataaagaattgtctctcggtgtacaggattctaaaactcatgtttttaaatatcacacattactatct

SEQ ID NO: 692097 - DNA, 1293 bp, Homo sapiens
cggtggctcatacctgtaatcccagcattttcagaggccaaggcaggcgaatcatgaggtcatgagttcgagaccacctggacaacatagtgaaaccccatccttactaaaaatacaaaagttatccaggtatggtggcatgtgcatgtagtcccagctactcatgaggctgaggcaggagaatcacttgaacccaggaggtggaggttgcagtgagccaagaccacaccattacactccagcctgggtgacagagtgagactccatctcaaaaaaaaaataataaaataacatatcattgcagtgctatgaaaatttgggaattaggtcattataagaatatatttgtctaaagtcagttatactgagaacactgcaccctttttactggtaaagacatcacactctggggactgttgtggggtgggggcagggggggagggatagcattaggagatatacctaatgctaaatgacgagttaatgggtgcagcacaccagcatggcacatgtatacatatgtaactaacctgcacattgtgcacatgaaccctaaaacttacagtataataataataaaaaaaaagaaaaaaaaaaaggagagtctccacactacccatacagaatgagaacagggacacttctcttacaaaggtctttaggaaaaagaaattaaaataaggccagaatcttactgtacaaagatctacatatgaaatgtagattgatctcagtgtgtttgtcatgtatctttcaatttaataaacagacagtggatgtttctatagtatgtgttcagtcactttttaaaaaatattgagttagaccctctggttttgcctaagtgacttggccacaaatgggcatatcaactaatattaaaatgaccatgaaattttttgtctaggagtgtacaaaccagataacagcatcaactacggaaggattcctggatgaatcctttttctgtttgagtgaattatatggcacagtatgatttaaatgaaaataaaaatcatccaagtgaattttgagtaatcatagtgaaaaaaaacaggacrtcagacaacaaaaatttcactttttaacaacagagaagatgtttttaaacatatataaatattattgctaacaacaaaaaaatgatgaaacctgaaaatgtcattttatgttattttaacataaaacaaatgcttattaggtttgcatttgaatatattttattttttcctttaattttttttatttcagtagttttaggggcccaagcattctttgaggctgggcactgta

SEQ ID NO: 692098 - DNA, 1293 bp, Homo sapiens
cggtggctcatacctgtaatcccagcattttcagaggccaaggcaggcgaatcatgaggtcatgagttcgagaccacctggacaacatagtgaaaccccatccttactaaaaatacaaaagttatccaggtatggtggcatgtgcatgtagtcccagctactcatgaggctgaggcaggagaatcacttgaacccaggaggtggaggttgcagtgagccaagaccacaccattacactccagcctgggtgacagagtgagactccatctcaaaaaaaaaataataaaataacatatcattgcagtgctatgaaaatttgggaattaggtcattataagaatatatttgtctaaagtcagttatactgagaacactgcaccctttttactggtaaagacatcacactctggggactgttgtggggtgggggcagggggggagggatagcattaggagatatacctaatgctaaatgacgagttaatgggtgcagcacaccagcatggcacatgtatacatatgtaactaacctgcacattgtgcacatgaaccctaaaacttacagtataataataataaaaaaaaagaaaaaaaaaaaggagagtctccacactacccatacagaatgagaacagggacacttctcttacaaaggtctttaggaaaaagaaattaaaataaggccagaatcttactgtacaaagatctacatatgaaatgtagattgatctcagtgtgtttgtcatgtatctttcaatttaataaacagacagtggatgtttctatagtatgtgttcagtcactttttaaaaaatattgagttagaccctctggttttgcctaagtgacttggccacaaatgggcatatcaactaatattaaaatgaccatgaaattttttgtctaggagtgtacaaaccagataacagcatcaactacggaaggattcctggatgaatcctttttctgtttgagtgaattatatggcacagtatgatttaaatgaaaataaaaatcatccaagtgaattttgagtaatcatagtgaaaaaaaacaggacgtcagacaamaaaaatttcactttttaacaacagagaagatgtttttaaacatatataaatattattgctaacaacaaaaaaatgatgaaacctgaaaatgtcattttatgttattttaacataaaacaaatgcttattaggtttgcatttgaatatattttattttttcctttaattttttttatttcagtagttttaggggcccaagcattctttgaggctgggcactgta

SEQ ID NO: 692099 - DNA, 1509 bp, Homo sapiens
gggagtgatttgcaaaaagtctcactgtggattgaagtaagatatgaaagtttagatctatggttccaaatttcactaaaacragtctagctctgggaactaaaccaatggtcaagaagttgcaatgggacattgaataactcacgtatgtggaactatcctcctgattaaaattaattttgaaaaatgaatttttctttgactctatctgtgaggtgtggcagctagagactgttttttccctattaaatataacccatgattgtttagtcctgatgattcaaatggtaatattatctatttatattactactattatttttttcaaatcagcctaataaatatagaaattgatcttttttgtttgtttgttttagagaggggatctcgctgtgttgcccaggctaatgtcaaacccctggcctcaagcgaacctcccacctcagcctcccaaaatgctgggattataggcatgagccaccaaatccagtcaatattttacttttgaatatacagattcataatttttaaaagcacagcagtggaagttacaatgattagtacttttcttaatcaaagtggaaaattgctttactcattatcttagaaataaattcagtagatattttagaaatgaagtgtccctacttacttttataactttttgcataaataaaatgagtaactagtctatgtatttaaaaataatcaaaataaatgcaatttttagctttttttcttattaaaattgtcatgtaaaacatctcctagtattatttttatcatttgttgtcatcagcatttctcaaaaggtgatctgtaattcacctgcatcagagtcacctgagatatttattaaaatgtagaggttagtttcccaccccagctctactgaacaagactcttagcaccagactctagacatctgtattttaaataagctttttaggttacaagtacaacctgcgagtaattcagaattgcttcagtgtgagaggctggggaagtagagacagaggcaagggagataagcaagggaaagcatgatatgctgaggtgttcggatcttatcctggaggtagtaaggatttaagataggcagtaacataaattaactgcattcactttgagtcgcatttactttttatctaacaattttttagagacagggtctcgctacattgcccaggctagagtgcagtggctattcacaaactcaacaattgtgcactataggcttgaattcctgggctcaagtgatcctcccacctcagcctcccaagtagttggaattacaggtgaatatcactgaccttggcttttgagttacttttataaattacttatttagagaagagttaatcccactatcaagaaagataggttaaactaactgcacataagattgcattcttatttaagattactttgaagggtatcagatgtgtataatttattattcactatcctggccttagcagttccaatttgttttgcgtgtaaatgata

SEQ ID NO: 692100 - DNA, 631 bp, Homo sapiens
taacactaattgtcaactttaacctattaaaaagagagagagagaggttcttgcttactacacctcaaacaaagatcccataagaaaagacaggatcctgcaccaggtgtgttggttcatgattataaacccagyattttgagaggcacaggcaggaggattgcttgagcccaggagttcgagacaagactgggcaacatagtgagacctcctctctacaaaaaataagcaaacgtagctggccatggtggcatatgcctgtagtcccagctattcaggaggctgaggtgggaagatcacttgagcctgggatgtcaaggcttcagtgagccacgatcatgccagtgcactccagcttgggcaacagagtaagaccctggaccctgtctccaaagacaaaaaggaaaaacaaagatcctctctccattactgataatatgcactcattaatttatgaaaaatctagaggccttcctttggtagtttcatatctcctttttcatcagctcttccaccaggatgcctaggaatcagcagattgaactggcttgcatttttgtttcttctccttccttctctctaattgaagcacaattaaataaacttatgatcagaagagtctgataatggg

SEQ ID NO: 692101 - DNA, 2107 bp, Homo sapiens
atttctattactctgtgtgttggacttcaaggaaggaatggaatgccatcattaggcaccaaatagttccactattgattagcattgagatttttagtaaatatttaggagtactgggggatgaaggagagacaacactatttgttcttgtactagaatactcatttctaatgcctataattaaatcaataggagagttattgagaaaatctgggcattttgagatagttgaagagtaagtattccatatgtatgtcagttgaaaattatttttgctgtttgcttttgaaagaatataacaatgttagcaaatgaacaaggtaattcctggctgaattatataattattacagtacttccaaagatattaatctattaccattatatgtaattcatggggaatgatattaaacaatagataaaataccaagttaatgtgtttcaggacatcactcacagcataatgaaaaactgacttacttctgtatttcaatagcttcaatacccattcaacattactgtkcattacaaatctattggtaaattgcttgcaaaaataagactgaaaacaattttaaattaagtgtacaaatttttctctttttcttttgaaataattaatattttattttatgactgtagtttcctttaactctataatttgaactgagatgtttggagaaaaagtatttttaaaagaatttataacaataagaataactgttagaatgccagtcctatcaagaaatgttagaaatatataagcaaaactcaaaagtaaatatcactgtctgtctaaccatattccatgcatagcttctactactgttccccagaattgtctgttttatcatttctcttgacttttgatacatttattcatatatcctccatcctcacttagtccttactgtttgtacttcagcatcatatcaaccctatctcgccacttaaaagacaaagtaatactactttttcagtttttttcatttaatgtaagaagttatcatttccccaatagtgaaatgatgcaaaatgattatttgatgtattgtccaaatgggttcaggtttgtgacagtctcaaatgcatcagggagtagggacacccttcagttaaagcacaaagttgtattttaatctgtattttatttttaaaaaagattttttctcaatatcacataaacattaagctctttattttacctctctatttacttatttacactatttaagattgagcatttttcattatcaaaaatattttcataatatgtgtaaaattgttgaaatcttaatttttccaaaatgacagctgactcctcttaaaggtaatgggaatcttagaatgttatttgcaagtcagtctacagcattattttcatatataaaatgttgtgtactaatttttgaaatatttgtaaattaaataggtcatttttctttcaggagaaaggagactttgagagatttttgtgcaggagaagagtagttttaaaaataggtagtttgcaatagggcagactagttttaaaactctaaaatgagaacaagtcaataagagtctcttgattaaatctagtggtcttattatttatttattaattgacatgtaataattgtacatattcatggggtacaatttgatacctggatacctatccatgttgtataatgatccattcagagtgaatctattatcttacatatttatcatttctttgtggtgagaacattcgaagacaactcttcaagctattttgtaatatacgatatttcactgttaaccatacttgctctacatgcaacagaacaccagaatttattgctcttatctagttgtaattttataccatcaatcaaagtttcctcatccttctttagtctctggtaacatttttctactctctgcttctatgctattaacttttttaaatgtttgtattttcttttttttttagactccacttatgagagagatcatgctgtatttgtctttctgtgtctggcttatttcacttaccacgatgtcctctagattcatccatattgtcataaatggcaagattttattttttatggctacagagtacttcattgtatacaga

SEQ ID NO: 692102 - DNA, 600 bp, Homo sapiens
ttgacaggctaatagctaaataactaagatattataagcactttcttagaatttagagatccacttaaaagacaggttttcattaggaatttctgtactttawttcacatttccataaaaaaattcctcattgcaagaaccactgcacctattatatgaaaaaactcaagagaaaacaatcaggtgaccattacctctaaaacatctgatttgatttagttatcctataggaatcaagtatcaggctttacaagatcctcttttttcaatgttgttttactgactaaaacaatgtttaacatgactaattcacgtttctttttgtgatttatttttacttgatctaatttctaaagtgatctttatgaggtgtcttgcctaaaaatttgcctatacttataaatgcattttcgcttactacaatctcattttttactgtactatagatgtacagttagttgaatgcatacataataattttgagaatatatgaggttttacataagaagaatcatattgaagtggttatctagcatatctaaagaggaaacaacagagaagcaagctggaaacaatatgtagacatcagtaattatttta

SEQ ID NO: 692103 - DNA, 600 bp, Homo sapiens
ttgacaggctaatagctaaataactaagatattataagcactttcttagaatttagagatccacttaaaagacaggttttcattaggaatttctgtactttaattcacatttccataaaaaaawtcctcattgcaagaaccactgcacctattatatgaaaaaactcaagagaaaacaatcaggtgaccattacctctaaaacatctgatttgatttagttatcctataggaatcaagtatcaggctttacaagatcctcttttttcaatgttgttttactgactaaaacaatgtttaacatgactaattcacgtttctttttgtgatttatttttacttgatctaatttctaaagtgatctttatgaggtgtcttgcctaaaaatttgcctatacttataaatgcattttcgcttactacaatctcattttttactgtactatagatgtacagttagttgaatgcatacataataattttgagaatatatgaggttttacataagaagaatcatattgaagtggttatctagcatatctaaagaggaaacaacagagaagcaagctggaaacaatatgtagacatcagtaattatttta

SEQ ID NO: 692104 - DNA, 600 bp, Homo sapiens
ttgacaggctaatagctaaataactaagatattataagcactttcttagaatttagagatccacttaaaagacaggttttcattaggaatttctgtactttaattcacatttccataaaaaaattcctcattgcaagaaccactgcacctattatatgaaaaaactcaagagaaaacaatcaggtgaccattacctctaaaacatctgatttgatttagttatcctataggaatcaagtatcaggctttacaagatcctcttttttcaatgttgttttactgactaaaacaatgtttaacatgactaattcacgtttctttttgtgatttatttttacttgatctaatttctaaagtgatctttatgaggtgtcttgcctaaaaatttgcctatacttataaatgcattttcrcttactacaatctcattttttactgtactatagatgtacagttagttgaatgcatacataataattttgagaatatatgaggttttacataagaagaatcatattgaagtggttatctagcatatctaaagaggaaacaacagagaagcaagctggaaacaatatgtagacatcagtaattatttta

SEQ ID NO: 692105 - DNA, 684 bp, Homo sapiens
ttagaaaagaaaaaagaatctaatcagttcctaaagcaaattaaacccaaacaaaacagaatgctattgtctgaatgtttgtgtctcctcaaatttcctatgtagaaatcctaactcccaaacttatggtattaggagatggggtcttttgggaggtgcttagatcatgaaagtagagatctggggctcttttataagggtactaaattagtactacattaaggatagtaaatgagtagttttcttacaaaagagaccccagagagctaccttgctctttccattatgtgaagatgcagagagaaggaaccatctatgaaccaggaaatgggccctcaccagacatcaaatttttgagtgccttgatttcagacctctcagcctccagaactatgagaagtaaatttataagttataagtttatattattataaattataaaattatgttgtttataagccacaacaaaaaggtatttttctattgtagtcgaaatgtactaaggtaaaaagaaataataaaatacatataagaacaaaaatcaataaaaattgaaagaacaccaaaatggaatatcaataaaataaaaagmtaatttattaaaaaatgaaaaaattctagctatactcaacaaaaaagagaaaaaatactaaatactaaagccagtaatgaaagactgtcact

SEQ ID NO: 692106 - DNA, 1310 bp, Homo sapiens
gggaggccacagaagagctcagcatctgaagaaagggtggtgctggcaggcagagagcaacaagccctggcttcttgttgggctggtagtgtgaggactcctgagaaaatccattgcctatatgggcagcaacatgcaacagctgggggctaagtgtcaggttaaagtgtacaaccccatgggattactaggaagaacacagccttttcaaaacaggccagtgaagagtgcctattccaggaaaggccctgtggacttacacccttgggtttgttagcaagtgagtcttgcaagttgcaattatggagtgtacaaattttctcaggaaagacatcaagaaaagtggcatgaagggagaggaaaggcagaaaagatggtcatgcaatcctctacactttgtgagacctttgcagtgggagacccccgagctgcccrcaattcaaaggccatctccaatctcagcctgcaagaagattccagagcgatcacagcccaccagtctcagctgttttgtaagcattgattgctgccaacaactgttctctaggggctttgtgtatgtgctaggaggtagggctcttcagaaaaggagtggaagctacaacctcaagacaatatctagagagaaggcagtcagaggagccaaggaaagagctagtttattaacgtttgaccaagacccaggacaactgttatttttagtatttctcataactttataacatccccattgttggctatttattggctattttccgcaaacctctcagtttcccatttttgttttaacatgcaataaaatcttaaaaggggattgtgtgcttatttcaaacacagcaaaactggggagacactggaaaacattattccttccccagagttctgggatacgagggaagagggaagacacagtggaggcagacacctggacaggtgggccaatccctgaggtctacgggagagaagaaaggggtgaaggggaagcttactgggaccccaaagagtccctggctaaaggccagagggtcccaggctgggcttcaaagctccactgtcagccagggcataggaatctcatcttcgaaaattctgcctcttgtagaatcagatgcttgagtaataagtgaactggtgtagagagagtctgagactgaaggaaatgatcaataagagccttgtttttctcaaatacttttgtgctcaggccatgtgtgtctgtgtgtaggcaggcacaagcatcagaatctcaaatatgcttctacatagctgaaaataaacaggatggctctggtcaaaactgtgaagttcaa

SEQ ID NO: 692107 - DNA, 645 bp, Homo sapiens
atcctgtgtcatttctgggggcttttccaggattgtcagaagagtaagagtgaacctctctcatttttacttctgaagcttcttgtcctaagaattttttttccccaaaaacagataaagcaccgggctctgtcagccagttaagagctaatggcacaggtgcagaacacaagcctgctggggagaactttgtcaacactccgccattgcccttgggtgttgggaatgttggctttgtttcaatccagcttcccttcacggaggtctagccatctgtgggaggggaaggaggtcctggggcaattgcgggtattgggctgaagytataccttggtgttatccaaaggcccctggactggctccagtccccgacagcccactagggtgttggcactaggacctccagtcttttctatgtcatttttatcctttcttttgaggctgtcatagctcctatctcttttttatattcaatgataagtgttttgttgcaaaccagagagagaaataatgtaactgagcacttggctcagtcattaggagtatgatttagaacaacgtggtttctgtctattctttgaagcaaggagtatgccatgattgagaggtttcttttccctgctgaagaaacccaaaagcatagga

SEQ ID NO: 692108 - DNA, 961 bp, Homo sapiens
ggggaaggagatccagttctaattgctatmctgtattttcccagtcttcccccttttcagctccctgccttgcctacactttttgagtaaatagttcctctgatatttaagcccctctagattttttccaaaggagtaaattatgcttattgatctccccttccaggcacttgctatgcagcttttcagccctctgaactcctccatatgttttctatcttccaaaagatattctaagaaatattgaccacacttgcacttgttcactgctgctttatcttctgatagctttgttcttgcagggataaatggttttagctatagtactcttactgagttaggttttaggagaaaacagagataaatgtgtccaacaaatcaagtttaacctaaagtccactcacccttttacatcttcagattttctaaggtagtcattccattgctttacaggttgtaaacaccatgtgcagaccaataactcagaaatttgtgttttcatcctggattttactgaagaattccagattcatatattccactgctaacttgacatgcctttttcaatctttaataaacatcatggatataagtctaccaaaatagaattattgattatgttctcttctgtttttttccatagcatctaaaagacatgtaaacagacaatttagagagttctgcattctagtttgtttgataagaagaaaaatcacttattattaaatacgaatccttcaacctctcaataggatcaattcatgctctttcaacttcagtcattgatttccgtgtttcaaatttccctgtatccactctttctacacacacacatatacacatcccctaaacattttgatttttggttttctttctcaggttagaagtgatcttccctatatataagtcaaagacataaaaatagctgattagacagctgatccacccataagaacttttt

SEQ ID NO: 692109 - DNA, 961 bp, Homo sapiens
ggggaaggagatccagttctaattgctatactgtattttcccagtcttcccccttttcagctccctgccttgcctacactttttgagtaaatagttcctctgatatttaagcccctctagattttttccaaaggagtaaattatgcttattgatctccccttccaggcacttgctatgcagcttttcagccctctgaactcctccatatgttttctatcttycaaaagatattctaagaaatattgaccacacttgcacttgttcactgctgctttatcttctgatagctttgttcttgcagggataaatggttttagctatagtactcttactgagttaggttttaggagaaaacagagataaatgtgtccaacaaatcaagtttaacctaaagtccactcacccttttacatcttcagattttctaaggtagtcattccattgctttacaggttgtaaacaccatgtgcagaccaataactcagaaatttgtgttttcatcctggattttactgaagaattccagattcatatattccactgctaacttgacatgcctttttcaatctttaataaacatcatggatataagtctaccaaaatagaattattgattatgttctcttctgtttttttccatagcatctaaaagacatgtaaacagacaatttagagagttctgcattctagtttgtttgataagaagaaaaatcacttattattaaatacgaatccttcaacctctcaataggatcaattcatgctctttcaacttcagtcattgatttccgtgtttcaaatttccctgtatccactctttctacacacacacatatacacatcccctaaacattttgatttttggttttctttctcaggttagaagtgatcttccctatatataagtcaaagacataaaaatagctgattagacagctgatccacccataagaacttttt

SEQ ID NO: 692110 - DNA, 961 bp, Homo sapiens
ggggaaggagatccagttctaattgctatactgtattttcccagtcttcccccttttcagctccctgccttgcctacactttttgagtaaatagttcctctgatatttaagcccctctagattttttccaaaggagtaaattatgcttattgatctccccttccaggcacttgctatgcagcttttcagccctctgaactcctccatatgttttctatcttccaaaagatattctaagaaatattgaccacacttgcacttgttcactgctgctttatcttctgatagctttgttcttgcagggataaatggttttagctatagtactcttactgagttaggttttaggagaaaacagagataaatgtgtccaacaaatcaagtttaacctaaagtccactcacccttttacatcttcagattttctaaggtagtcattccattgctttrcaggttgtaaacaccatgtgcagaccaataactcagaaatttgtgttttcatcctggattttactgaagaattccagattcatatattccactgctaacttgacatgcctttttcaatctttaataaacatcatggatataagtctaccaaaatagaattattgattatgttctcttctgtttttttccatagcatctaaaagacatgtaaacagacaatttagagagttctgcattctagtttgtttgataagaagaaaaatcacttattattaaatacgaatccttcaacctctcaataggatcaattcatgctctttcaacttcagtcattgatttccgtgtttcaaatttccctgtatccactctttctacacacacacatatacacatcccctaaacattttgatttttggttttctttctcaggttagaagtgatcttccctatatataagtcaaagacataaaaatagctgattagacagctgatccacccataagaacttttt

SEQ ID NO: 692111 - DNA, 961 bp, Homo sapiens
ggggaaggagatccagttctaattgctatactgtattttcccagtcttcccccttttcagctccctgccttgcctacactttttgagtaaatagttcctctgatatttaagcccctctagattttttccaaaggagtaaattatgcttattgatctccccttccaggcacttgctatgcagcttttcagccctctgaactcctccatatgttttctatcttccaaaagatattctaagaaatattgaccacacttgcacttgttcactgctgctttatcttctgatagctttgttcttgcagggataaatggttttagctatagtactcttactgagttaggttttaggagaaaacagagataaatgtgtccaacaaatcaagtttaacctaaagtccactcacccttttacatcttcagattttctaaggtagtcattccattgctttacaggttgtaaacaccatgtgcagrccaataactcagaaatttgtgttttcatcctggattttactgaagaattccagattcatatattccactgctaacttgacatgcctttttcaatctttaataaacatcatggatataagtctaccaaaatagaattattgattatgttctcttctgtttttttccatagcatctaaaagacatgtaaacagacaatttagagagttctgcattctagtttgtttgataagaagaaaaatcacttattattaaatacgaatccttcaacctctcaataggatcaattcatgctctttcaacttcagtcattgatttccgtgtttcaaatttccctgtatccactctttctacacacacacatatacacatcccctaaacattttgatttttggttttctttctcaggttagaagtgatcttccctatatataagtcaaagacataaaaatagctgattagacagctgatccacccataagaacttttt

SEQ ID NO: 692112 - DNA, 961 bp, Homo sapiens
ggggaaggagatccagttctaattgctatactgtattttcccagtcttcccccttttcagctccctgccttgcctacactttttgagtaaatagttcctctgatatttaagcccctctagattttttccaaaggagtaaattatgcttattgatctccccttccaggcacttgctatgcagcttttcagccctctgaactcctccatatgttttctatcttccaaaagatattctaagaaatattgaccacacttgcacttgttcactgctgctttatcttctgatagctttgttcttgcagggataaatggttttagctatagtactcttactgagttaggttttaggagaaaacagagataaatgtgtccaacaaatcaagtttaacctaaagtccactcacccttttacatcttcagattttctaaggtagtcattccattgctttacaggttgtaaacaccatgtgcagaccaataactcagaaatttgtgttttcatcctggattttactgaagaattccagattcatatattccactgctaacttgacatgcctttttcaatctttaataaacatcatggatataagtctaccaaaatagaattattgattatgttctcttctgtttttttccatagcatctaaaagacaygtaaacagacaatttagagagttctgcattctagtttgtttgataagaagaaaaatcacttattattaaatacgaatccttcaacctctcaataggatcaattcatgctctttcaacttcagtcattgatttccgtgtttcaaatttccctgtatccactctttctacacacacacatatacacatcccctaaacattttgatttttggttttctttctcaggttagaagtgatcttccctatatataagtcaaagacataaaaatagctgattagacagctgatccacccataagaacttttt

SEQ ID NO: 692113 - DNA, 615 bp, Homo sapiens
catagaaaaaaaagaagagagacagacagagagagaaaagtattatataaacagagagagtaggatttataattctctttggtacgggatggaraggagaaaacactcatttgaaaacctctaaacaaaattcaatgctgacttggattcagggcaattcatattacttaggggtccagaaaaacaccaagcaaaatatgtatttttaaattattcctaggttgtaaatatttccaggaaattagcaaatatcctcttcggtgtaggcattttgaatctggtcttaaaaatttttctaaactaaatatgatgaaaaacataaactcacaatcgaaaatcttaaaatttatgggagaaaatagaaaaggaatgagcatcaacaaaaccaacaaaatgtacaactgcagatatgagagtgaaatataatcaatataatactgatttattgtcaaactctaaaaatagaaaatcaaaattgtgataaaaattaaaatttatcaaaatgaccaagcatatttgattaaaaccaaaaataatttcaagaaaataagaatgtaaaaattgatttaaaaaacaatcaatggtttaattaagttccatctatttatctttgtt

SEQ ID NO: 692114 - DNA, 615 bp, Homo sapiens
catagaaaaaaaagaagagagacagacagagagagaaaagtattatataaacagagagagtaggatttataattctctttggtacgggatggaaaggagaaaacactcatttgaaaacctctaaacaaaattcaatgctgacttggattcagggcaattcatattacttaggggtccagaaaaacaccaagcaaaatatgtatttttaaattattcctaggttgtaaatatttccaggaaaytagcaaatatcctcttcggtgtaggcattttgaatctggtcttaaaaatttttctaaactaaatatgatgaaaaacataaactcacaatcgaaaatcttaaaatttatgggagaaaatagaaaaggaatgagcatcaacaaaaccaacaaaatgtacaactgcagatatgagagtgaaatataatcaatataatactgatttattgtcaaactctaaaaatagaaaatcaaaattgtgataaaaattaaaatttatcaaaatgaccaagcatatttgattaaaaccaaaaataatttcaagaaaataagaatgtaaaaattgatttaaaaaacaatcaatggtttaattaagttccatctatttatctttgtt

SEQ ID NO: 692115 - DNA, 664 bp, Homo sapiens
cagacactgyttccaattaacacattctcacaggtagcaaaagtgtaggtagaattaatccacagatcgacatatttgaagcaggttacctcttttccctcttttctgatttggtcttttgtcatgtgtaggtatgtagatggtgtaacacaaacattgtcctcaggttgcatttcaagcttgcgaatatgtcctaatgtgcttcagcacaacaaagtgatcatggatacatgctccctatatattcagttcataaagccacttagggccttttaggataaaagcagtgatggtggtaataacagtagtatcaataattaaatactgtgctcagtaaaaacataggctcagaagctaccctagagattagctagttcaaccatccagatgaagcaaaaacactccagcttattttacagttttttttgttgttgtttggctgggtttttttgtttttttttttgttgttgttgttgtttgttttttgttttttttgacagagtcactgtcgcctaggctggagtgcagtggcgccatctcagctcactgcaacctccacgtcctgggttcaagcaattctcctgcctcagcctcctgagtagctgggattacaggcatgtgccaccatgcccagctaatttttgtatttttagtagagatgggg

SEQ ID NO: 692116 - DNA, 1682 bp, Homo sapiens
tgcagtttgggatgggaccttcgagacatttgctatgtatacaccacacacacacacacacacacacacacacacacacacacacacacaatgatttcctccattctatgacgccatcaaatgtaaagcccaggagtgaactggtgccacttctcaaggctactgtcccctcctgttgtgtcctctcccgttgtgccccaagtgtaggcacagcccaatccctttctccacagcaagactaatcaagtaaatgatggtttgcatagcgatactgacatttttgagggacagctagcaggaattccatcccataacaagccagaaaatctaactagattattgctctggaattggacagcctgggttcgtatcccagtttttctactcactaatgacctgactttgagaaaattaccaaggtgtcttaactttcttatgtgtgaaatgaagataataatagtacctgccttatagggttgttcacaaaattatattaaatacatgagaagagtctatagccatgctgggtaagaaggagtgctcagcaaatgttaaatttgttttactcttccaaaaatccatgtgtcatactacaaggcaggggtcagcaaactttttcagtaaagggtcacatagtaaatattttaggctttggaacccatatgatctctgtaaaactactcaactttacatgggggaaagaagccctagacaatatgtaagtgcatgggtctggcatgttccaataaagctttatttatgacatgtgaattttatatactattcacaagtcatgaaatattcttttaaaaaatttatttctcaatcattttaatgtaaaacaaacaaacaaaaaaacaaacaaaccatccttcactcctgggccatgcaaaatcaggtggtgggctggatttggcctacaggctgtagttcaccaacgaatcccaccaccagcatcacaggtgtacccacctggccgtttctgtgccctctcttttccaggtctccatttccctgtttttgctcatgtttcatctataggagaaagcaaaacttggtaatcacctttctactcaagaagagccctttcccattaggacacagggagcatggtccctctgtctcaggctctacactacaggttgagctctgccctcacctttgcaaactagagggcctggggaaaatggtcacatgtgttatacgtggaagcctgccttctgttggggacatatattttaatggctgcatagaagtcaactgcttgagcccacaaacttctttaacttgtcccttggtgattgttatggtttggatgtgtgtctccgcccaaatctcatgttgaattgtaatccccagtattggatttggggcctggtgggagatgattggatcataggggtggctttctcataaatgacttagcgtcatcccaccatcctcttggtgctgtccttgcaatagtgagtgacttcttgcaagatctggctgtttaaaagcatggcacctcactctcactctctcgctctctctcctgttcccaccatgtgagatacctgctcccccttcactttctaccatgattgtaagcttcctgaggccttcccagaagcacatgcctgtgttatgcttcctgkacagcctgcagaaccatgagctaattaaacctcttttcttgataa

SEQ ID NO: 692117 - DNA, 1555 bp, Homo sapiens
gccaagatcgcgccactgcacaccagcctgggtgacagagcgagactccatctccaaaaaaaaaaaaaaaaaaaaaaaaaaaaaattccttcctatacctacaaaaaaaaattttttttaggactcttgattaccttgaagctggaaatagaagtctttttgtttgcacttttaagagtctgattgacccatttaattataatttcatcatttactttttcaccctctccaagatccgataacacattcaatgtgtacctgcaacagaaaagatgtatatttgagactgaaaagggtgaaatttgctttcacataatttatatcaatgtttarataaatacttaagaaatagttcagttctaataaatatttctaattttagtctggcatttgcacccagttacattccaaagttacaaacctcattaatcagaaacaaaaactactacatggtatttttaaaacttaaagcaattccttatgaagccatttttaagaggcattaataaaagtgatagtgtttctggatattgacccatttttaaataaaatataatttacaaaaaaaccataatcaacagtaaatcctttaaaaattaaaatattttgcattgtatatttcttctgtgttcattattgttcaaaaatagctaaaaatttggttcagattacttgttggaggaaacaggcagtgttgctaccaacatatcagcctttaccttctcatcagctgccataccaatgccagggtaagtgttgaattcccttcatttaggtcctgcccagcaatgccaaccaaggagaatttggccttgttcttcccaagttccactgcatagttacagttttcaatctataaataagtaaaagtttgggtataaaaagatttttaaaaacatatctccagaataggccagcctagttcagccatctgaaaaacaattatgatgacaccttaaatttatatgaccaatttcataataataacccagggaaagcaaggacataattatttccattttatagttgaagatattaaagcactgagtgggttaacctagatagaggaacaactggccggaaagttttaagatcccttcctactctaaaaatcttgactatccaggccgggcgtggtcgcttacgcctgtaatcctagcactttgggaggccaaggcaggtggatcacctgaggtcaagagttcgagaccagcctggccaacatggtgaaacctcatctctactaaaaatacaaaagttagccaggtgtggtggcgggtgcctgtaatcccatctactcaggaggctgaggcaggagaatcgcttgaacctgcgaggtggaggttgcagtgagccaagatcgcgccattgccctctagcctgggcaacagagcaaaaactccgtctcaaaaaaaaaaaaaaaaaaaaaaattcttgactatccaagatgaaatagcttattaatggcacatgtgtgcctaaaaacctaggtgtcctgctttcctttcatagaagtaatagatgatgttttgtgtagatttaaaatttaaaaata

SEQ ID NO: 692118 - DNA, 1555 bp, Homo sapiens
gccaagatcgcgccactgcacaccagcctgggtgacagagcgagactccatctccaaaaaaaaaaaaaaaaaaaaaaaaaaaaaattccttcctatacctacaaaaaaaaattttttttaggactcttgattaccttgaagctggaaatagaagtctttttgtttgcacttttaagagtctgattgacccatttaattataatttcatcatttactttttcaccctctccaagatccgataacacattcaatgtgtacctgcaacagaaaagatgtatatttgagactgaaaagggtgaaatttgctttcacataatttatatcaatgtttagataaatacttaaraaatagttcagttctaataaatatttctaattttagtctggcatttgcacccagttacattccaaagttacaaacctcattaatcagaaacaaaaactactacatggtatttttaaaacttaaagcaattccttatgaagccatttttaagaggcattaataaaagtgatagtgtttctggatattgacccatttttaaataaaatataatttacaaaaaaaccataatcaacagtaaatcctttaaaaattaaaatattttgcattgtatatttcttctgtgttcattattgttcaaaaatagctaaaaatttggttcagattacttgttggaggaaacaggcagtgttgctaccaacatatcagcctttaccttctcatcagctgccataccaatgccagggtaagtgttgaattcccttcatttaggtcctgcccagcaatgccaaccaaggagaatttggccttgttcttcccaagttccactgcatagttacagttttcaatctataaataagtaaaagtttgggtataaaaagatttttaaaaacatatctccagaataggccagcctagttcagccatctgaaaaacaattatgatgacaccttaaatttatatgaccaatttcataataataacccagggaaagcaaggacataattatttccattttatagttgaagatattaaagcactgagtgggttaacctagatagaggaacaactggccggaaagttttaagatcccttcctactctaaaaatcttgactatccaggccgggcgtggtcgcttacgcctgtaatcctagcactttgggaggccaaggcaggtggatcacctgaggtcaagagttcgagaccagcctggccaacatggtgaaacctcatctctactaaaaatacaaaagttagccaggtgtggtggcgggtgcctgtaatcccatctactcaggaggctgaggcaggagaatcgcttgaacctgcgaggtggaggttgcagtgagccaagatcgcgccattgccctctagcctgggcaacagagcaaaaactccgtctcaaaaaaaaaaaaaaaaaaaaaaattcttgactatccaagatgaaatagcttattaatggcacatgtgtgcctaaaaacctaggtgtcctgctttcctttcatagaagtaatagatgatgttttgtgtagatttaaaatttaaaaata

SEQ ID NO: 692119 - DNA, 674 bp, Homo sapiens
tagcaacttaaacaatacaaatttattatcttacagttctgtaggtcagaagtttgatacaggtcttgccaggctaaagtcaacacagcaggactgcgttcctttctggaggctctaggggagaatcgttttcatggctcatttgggttgctggcagaattcggtttcttttgatggtagrcctgagatctctgttttcttcttggatgtaaatggaaggccatccccagcttctagaggccacctgcattccttggctcatggttcctttccttcatcttcatagccagcgacagtcggtaaagcccctctcatactttgaatctttcctcctcctccttctgtttcatctctctgagccagcagagaaaggttctctgcttttaaagactcatgtgattagattggtcctgcccaaataacctaagacaatctgcctcatctcaaggcccatacccttaatgaacatctgcaaaaatctgttttgccatgtaaggtaccataccatattcacaggttctggggattaggatgcagacatctttgggggacagggtattatcctgcctgccacagatgtgttgtctgcctctgttgacaaataagatagcggtggttatcgctaccagcagggctccaagcattcatgttgatgtacatgagaaaatgtgact

SEQ ID NO: 692120 - DNA, 674 bp, Homo sapiens
tagcaacttaaacaatacaaatttattatcttacagttctgtaggtcagaagtttgatacaggtcttgccaggctaaagtcaacacagcaggactgcgttcctttctggaggctctaggggagaatcgttttcatggctcatttgggttgctggcagaattcggtttcttttgatggtagacctgagatctctgttttcttcttggatgtaaatggaaggccatccccagcttctagaggccacctgcattccttggctcatggttcctttccttcatcttcatagccagcgacagtcggtaaagcccctctcatactttgaatctttcctcctcctccttctgtttcatctctctgagccagcagagaaaggttctctgcttttaaagactcatgtgattagattggtcctgcccaaataayctaagacaatctgcctcatctcaaggcccatacccttaatgaacatctgcaaaaatctgttttgccatgtaaggtaccataccatattcacaggttctggggattaggatgcagacatctttgggggacagggtattatcctgcctgccacagatgtgttgtctgcctctgttgacaaataagatagcggtggttatcgctaccagcagggctccaagcattcatgttgatgtacatgagaaaatgtgact

SEQ ID NO: 692121 - DNA, 674 bp, Homo sapiens
tagcaacttaaacaatacaaatttattatcttacagttctgtaggtcagaagtttgatacaggtcttgccaggctaaagtcaacacagcaggactgcgttcctttctggaggctctaggggagaatcgttttcatggctcatttgggttgctggcagaattcggtttcttttgatggtagacctgagatctctgttttcttcttggatgtaaatggaaggccatccccagcttctagaggccacctgcattccttggctcatggttcctttccttcatcttcatagccagcgacagtcggtaaagcccctctcatactttgaatctttcctcctcctccttctgtttcatctctctgagccagcagagaaaggttctctgcttttaaagactcatgtgattagattggtcctgcccaaataacctaagacaatctgcctcatctcaaggcccatacccttaatgaacatctgcaaaaatcygttttgccatgtaaggtaccataccatattcacaggttctggggattaggatgcagacatctttgggggacagggtattatcctgcctgccacagatgtgttgtctgcctctgttgacaaataagatagcggtggttatcgctaccagcagggctccaagcattcatgttgatgtacatgagaaaatgtgact

SEQ ID NO: 692122 - DNA, 408 bp, Homo sapiens
tggcatccaaagaaatctactgagtctcatgactatattgatacagtgctggaattcttttagtccttatcattcatctaggctcctaaaagtcattagttaatcacatcttagtgataacttttgaaatcctcattacctattcaactattgatcttaaatcttaaatttctcagtatcatyaaatttggaagagttagcaatgaagaagatatttagagcactggcagcaaggtagaagaggaattattaggttacgataatacctatataataaaatttaatcttttcacactcttcctccaagtctatatacaaggtatagctaggagtctggcttgggttacattttttttaactgcccagataaaagactgaccctgtacacgtaatatcccattctccaaa

SEQ ID NO: 692123 - DNA, 605 bp, Homo sapiens
aaaaaaaacacatggttttaactgttactttatatgccaatgactttcaaatccctatttccacccagacctcctctgagtctccactctaagctgtgtatctatatatgtacttggttatgtctacctggatgttctgccaatacctcaaactcaacatgatatttttgtaaagtgctcatttggaagcacttctttaaaaaatgatgtacaattaggttttaagataattttaaagtaactcttaagatggattttacagatgaggaaactgcagcactgacagtttccacagtggaaaggccggggtctgatcccagcggtctcccgagcccatcctcttttttatttattttttttgagacggagtctcactctgtcacccaagctggagtgcaatggcactatcttggctcactgcaagctccgcctcctgggctcacgccattctcctgcctcagcctcctgagtagctgagactacaggcacccgccaccacgcccggccagtttttcgtgtttttagtagagatggygtttcaccatgttagccaggatggtctagatctcctgacctcgtaatctgcccgcctcggcctcccaaag

SEQ ID NO: 692124 - DNA, 479 bp, Homo sapiens
cacacaygaaataaaaaacccagacatttaatgcaaagacattaatattagaatagctatatacaggatacggtagtggcactgaagacaggaagattatttttaacctatgaaaagggaggaaaagaatgctaaagctgctctggagtttgaaaggtgagtaaatgattggggtcagccagcaatgtttttaaatatctattaataatatgaaattcaggtattgtggaggcaatatctgaatctttctctttgtgtgtaccttcagctctgaatctgaacgtggagtggggctggacctaggggacacatcgcactgatgatttatcctgtttgtttcaggcagaggaacggactagatacttctcagtcttctacctgtccatcaatgcagggagcttgatttctacatttatcacacccatgctgagaggttaggatttttttgaggggccctgtataaggctttgctctggtca

SEQ ID NO: 692125 - DNA, 479 bp, Homo sapiens
cacacatgaaataaaaaacccagacatttaatgcaaagacattaatattagaatagctatatacaggatacggtagtggcactgaagacaggaagattatttttaacctatgaaaagggaggaaaagaatgctaaagctgctctggagtttgaaaggtgagtaaatgattggrgtcagccagcaatgtttttaaatatctattaataatatgaaattcaggtattgtggaggcaatatctgaatctttctctttgtgtgtaccttcagctctgaatctgaacgtggagtggggctggacctaggggacacatcgcactgatgatttatcctgtttgtttcaggcagaggaacggactagatacttctcagtcttctacctgtccatcaatgcagggagcttgatttctacatttatcacacccatgctgagaggttaggatttttttgaggggccctgtataaggctttgctctggtca

SEQ ID NO: 692126 - DNA, 479 bp, Homo sapiens
cacacatgaaataaaaaacccagacatttaatgcaaagacattaatattagaatagctatatacaggatacggtagtggcactgaagacaggaagattatttttaacctatgaaaagggaggaaaagaatgctaaagctgctctggagtttgaaaggtgagtaaatgattggggtcagccagcaatgtttttaaatatctattaataatatgaaattcaggtattgtggaggyaatatctgaatctttctctttgtgtgtaccttcagctctgaatctgaacgtggagtggggctggacctaggggacacatcgcactgatgatttatcctgtttgtttcaggcagaggaacggactagatacttctcagtcttctacctgtccatcaatgcagggagcttgatttctacatttatcacacccatgctgagaggttaggatttttttgaggggccctgtataaggctttgctctggtca

SEQ ID NO: 692127 - DNA, 2360 bp, Homo sapiens
  misc_feature 767: n = A,T,C or G
tgcaagacaggaagtaactaaacaagggacaaggggacaaggtgggaagtgttggtcacatccattctaggcactcagcagtttcttgccccactgagaggcactggtgtcatgtactctagtggctgagtttttgtaccaagaggtgtttttttttttttttttttgagatggagtttcactcttgttgcccaggctggagtgcaatggcaccatctctgctcaccacaacctctgcctcctgggttcaagcaattctcctgcctcagcctctggaatagctaagattacacacatatgccaccacatctggctaatttttgtattttttttagtagagatggggtttcttcatgttggtyaggctggtttcgaactcccgacctcaggtgatccgcccacctcagcctcccaaattgctgggattacaggcatgagccactgcacctggctgagaggtgctcttaactcccactctgtacagggagagtggctgggcctagacatttctctcaggagcaacctccctcccaaaagctggaccagacctctcatatcttgggaagagttggtgcccaaataaaggatctttaagaaccacctggcctaagctagcacatagttcaaaggaacgttctgccctcaacaaggaggaaagaaaggggtcaacacaaatctggggccaaggggcctgaggaaatctactgtctattgagaatatgatataggccatgatctctattatttatgattttacaaactcattntaatggctggaaccaaatatcttatgaaaaaataatttttgcttaaggaaaatactttgctagactgcgttgactggagaaattaaaaccccaaaagtttggtgcataagaagccaagaaattaagatactcaattgttctacctaataaattaagttttgggagatgggagtaaagatgggatgatctgaaataagggagagagagaagatgtaagtctaggagtctactcctcactaggactaatgttaatctattagtctctttatctttagtctcttctcacagggatggcttctacccctaatgttgtaaaaatgaccatccccctcctaagaaattcctgcccagccctgcttccactttaagtcttagccttatgtttcctattcacttcccactggagctccttgagtcacccctgaggtggcccaggctctgggcttcattgtatctggccaggatgcctaagctgcccatcacccctaagcactgtcaggaaccccacagtcaaaggctctgcagagtcaagtagcctcccacttatccaagtcctcatctgtcactcttgacatctgatgaacttccaaagatgccccagttatcaatgaacagggcaactgcctcccacctctaacatcacaccaggctgaagtatccataaaggcctgtcttatctactttcaacagcaccgtgagaaatgacccatgtccaaggccccctatagacaagcagactgtgcctatcttcctgctgactctctagtattgaggattttttttattcttctttgctttaaaatgaagtgtttataaaatgttgctaaacccaggactgtaagctacttgagaacatgaaatgtgttgtttccatctctgcccctgctacagccctcatgctgtcagcaagtgatgctgcttccagggcaagccagggttcttgccctgttctgagtaactggagtcactgatcaaattgacatcttctaaattatagttccatctaatggtgagaatgtggggaaatgggcatgaccaaacaccactggtgtcaagtgaattgatctactctctgtagaggtactggcaataataatcaagagccctggtgtccatgccttttaatcatataatttcactttgggaaatgtacctagaggaaagtacgaagcttcatgtgtaagaaaattctcataaggaaatatttgtaatatttggaaatagccaatatgcctaagattttaatatatatgatgaaatattttgtaggcataaaatatttcataggcattggctgggcacggtggctcatgcctgtaatcccagcactttgggaggccgaggcaggcggatcatgaggtcaggagatcgagaccatcctggctaacacggtgaaaccccatctctactaaaaatacaaaaaaattagccaggcgtggtggcgggcgcctgtagtcccagctacttgggaggctgaggcaggagaatggcgtgaattggggaggcagagcttgcagtgagctgagatggtgccaccgtgctctagcctgggcgacagagcgagactgtctcaaaaaacaacaacaacaaaaa

SEQ ID NO: 692128 - DNA, 2360 bp, Homo sapiens
  misc_feature 767: n = A,T,C or G
tgcaagacaggaagtaactaaacaagggacaaggggacaaggtgggaagtgttggtcacatccattctaggcactcagcagtttcttgccccactgagaggcactggtgtcatgtactctagtggctgagtttttgtaccaagaggtgtttttttttttttttttttgagatggagtttcactcttgttgcccaggctggagtgcaatggcaccatctctgctcaccacaacctctgcctcctgggttcaagcaattctcctgcctcagcctctggaatagctaagattacacacatatgccaccacatctggctaatttttgtattttttttagtagagatggggtttcttcatgttggttaggctggtttcgaactcccgacctcaggtgatccgcccacctcagcctcccaaattgctgggattacaggcatgagccactgcacctggctgagaggtgctcttaactcccactctgtacagggagagtggctgggcctagacatttctctcaggagcaacctccctcccaaaagctggaccagacctctcatatcttgggaagagttggtgcccaaataaaggatctttaagaaccacctggcctaagctagcacatagttcaaaggaacgttctgccctcaacaaggaggaaagaaaggggtcaacacaaatctggggccaaggggcctgaggaaatctactgtctattgagaatatgatataggccatgatctctattatttatgattttacaaactcattntaatggctggaaccaaatatcttatgaaaaaataatttttgcttaaggaaaatactttgctagactgcgttgactggagaaattaaaaccccaaaagtttggtgcataagaagccaagaaattaagatactcaattgttctacctaataaattaagttttgggagatgggagtaaagatgggatgatctgaaataagggagagagagaagatgtaagtctaggagtctactcctcactaggactaatgttaatctattagtctctttatctttagtctcttctcacagggatggcttctacccctaatgttgtaaaaatgaccatccccctcctaagaaattcctgcccagccctgcttccactttaagtcttagccttatgtttcctattcacttcccactggagctccttgagtcacccctgaggtggcccaggctctgggcttcattgtatctggccaggatgcctaagctgcccatcacccctaagcactgtcaggaaccccacagtcaaaggctctgcagagtcaagtagcctcccacttatccaagtcctcatctgtcactcttgacatctgatgaacttccaaagatgccccagttatcaatgaacagggcaactgcctcccacctctaacatcacaccaggctgaagtatccataaaggcctgtcttatctactttcaacagcaccgtgagaaatgacccatgtccaaggccccctatagacaagcagactgtrcctatcttcctgctgactctctagtattgaggattttttttattcttctttgctttaaaatgaagtgtttataaaatgttgctaaacccaggactgtaagctacttgagaacatgaaatgtgttgtttccatctctgcccctgctacagccctcatgctgtcagcaagtgatgctgcttccagggcaagccagggttcttgccctgttctgagtaactggagtcactgatcaaattgacatcttctaaattatagttccatctaatggtgagaatgtggggaaatgggcatgaccaaacaccactggtgtcaagtgaattgatctactctctgtagaggtactggcaataataatcaagagccctggtgtccatgccttttaatcatataatttcactttgggaaatgtacctagaggaaagtacgaagcttcatgtgtaagaaaattctcataaggaaatatttgtaatatttggaaatagccaatatgcctaagattttaatatatatgatgaaatattttgtaggcataaaatatttcataggcattggctgggcacggtggctcatgcctgtaatcccagcactttgggaggccgaggcaggcggatcatgaggtcaggagatcgagaccatcctggctaacacggtgaaaccccatctctactaaaaatacaaaaaaattagccaggcgtggtggcgggcgcctgtagtcccagctacttgggaggctgaggcaggagaatggcgtgaattggggaggcagagcttgcagtgagctgagatggtgccaccgtgctctagcctgggcgacagagcgagactgtctcaaaaaacaacaacaacaaaaa

SEQ ID NO: 692129 - DNA, 666 bp, Homo sapiens
tgttgtctttagattcatggagtagacattcaactaagcagaaatcctcctccaacccttacttcttccctctcaccaaacattcccatgcctgactcttctttaccttagaaatgtcctcgttatccccattagtatcagctggttccattaggacacagatatcccgacctggacattctagagatttatttcctcaccaggcactggtttggtaaagttctccttattccacaacatgagcactgttagcattttggacctgacaattctccatggtgggggccatcctgggcattgtaagytgttgaacagcatccctggtctctacacatgagatgccagtagcgtctccagttgtgacaaacaaaactgtcttcagatattgtcaaatatcccctgaggccaaaataacccctagttgagaactactggtttagtgaatgacaagtggggcctggcagcaatacaggtagctccacacattcctacacatcaaggctccttggaacatgctcagtggtgactgtgagtctccctcaggaacaggggagttagaagcccccaaagtgaggatcccagtgctttttttttctgaagccctttcatattttatgcctatagaagcttagggtcttaatacattcatttctgcatgggtggggt

SEQ ID NO: 692130 - DNA, 1569 bp, Homo sapiens
atatcctcatctgctagacagatgtctagactgggcctataagagaaaggccaactcggaatgagattgaaatatcctctctctccaaattggagggctttaccaaataatgggcaagatgttgaactaatagctccaaaacctctggtcaacctggttgtaccataataaatgaggtgaatggaatgaatatttttattctatttggcccacttttagttacgtgagaaaacgttataaattcctgtcattgatgtggtatgtgaaatcttatggaaataataatctgttgcaagtgcaatttgatgatagatttaagtaaatgagtcaaaccaaaaataaagcatgttgaagtgagaaagacaaggggaagaaattcctcatggttgcttgaaatttagactatgtcattcacatatcctcatgggagccagatgttgaactgtagaattagtctatgattcgtacgaaatgcctcagaaaacaccaagggctactatgagactcccagctgctctttcttcatctacccctgaaaagttggtactcatgcatttcttcattcatgtagtcaatgaatgattattattgaaccctattctatgccaaggattgggcatacgtaatcctattttcttggagttgggtattttgtcctctttcctctctatctcttcccccttccagatctcaatgatgctatttgcttaaatgctgacttctgaattggtatttctactcttttctcgtctgtcatatagatcaacattttctagttctttctgtagaacttcccttgaatctctcccagtctttaattcttccttccttcatcaatacactcactaaatatttattgaacacctatcatgtgccaggcacaagtcttgagtatgatgaatatagatattttgacttgacatactgaagactaaccacattccatcctcctctaaacgttcattttcttggtttcatcttttgaccaaagacatcagatcaatttggccaaccaagccaggctgtctcttacttctacagcccagtagttaccaagtgatgtctaactttatttataaaatgagttttgtatttgctagtgtctcatcgttttcatacctattgccgtaaatcagacccttattatccctattctgggttatgcaataaatgattaccctgcctccaatctctccttttccaattcatcttaaattagctttttaaacacagatttaattatgttatttctctgctcaaakatttttggtgagtccccactgactatagaatagtatccaaatgcttttcacataatcttttacacctgatctcaacctacctttcaggagttcgccaactctgagcaatttcctgaatttaaaatgcaatgtcatattctgccctgtttacattattctctttctcctggcacaataagaatccatcacatttgtatgttgttttccagtttacagtgaaatttcccatgcaccttctgtgaggtaggcagagatatttccccccagacttagagctggaagagtcaaggttctgaatgtgtaggtg

SEQ ID NO: 692131 - DNA, 1569 bp, Homo sapiens
atatcctcatctgctagacagatgtctagactgggcctataagagaaaggccaactcggaatgagattgaaatatcctctctctccaaattggagggctttaccaaataatgggcaagatgttgaactaatagctccaaaacctctggtcaacctggttgtaccataataaatgaggtgaatggaatgaatatttttattctatttggcccacttttagttacgtgagaaaacgttataaattcctgtcattgatgtggtatgtgaaatcttatggaaataataatctgttgcaagtgcaatttgatgatagatttaagtaaatgagtcaaaccaaaaataaagcatgttgaagtgagaaagacaaggggaagaaattcctcatggttgcttgaaatttagactatgtcattcacatatcctcatgggagccagatgttgaactgtagaattagtctatgattcgtacgaaatgcctcagaaaacaccaagggctactatgagactcccagctgctctttcttcatctacccctgaaaagttggtactcatgcatttcttcattcatgtagtcaatgaatgattattattgaaccctattctatgccaaggattgggcatacgtaatcctattttcttggagttgggtattttgtcctctttcctctctatctcttcccccttccagatctcaatgatgctatttgcttaaatgctgacttctgaattggtatttctactcttttctcgtctgtcatatagatcaacattttctagttctttctgtagaacttcccttgaatctctcccagtctttaattcttccttccttcatcaatacactcactaaatatttattgaacacctatcatgtgccaggcacaagtcttgagtatgatgaatatagatattttgacttgacatactgaagactaaccacattccatcctcctctaaacgttcattttcttggtttcatcttttgaccaaagacatcagatcaatttggccaaccaagccaggctgtctcttacttctacagcccagtagttaccaagtgatgtctaactttatttataaaatgagttttgtatttgctagtgtctcatcgttttcatacctattgccgtaaatcagacccttattatccctattctgggttatgcaataaatgattaccctgcctccaatctctccttttccaattcatcttaaattagctttttaaacacagatttaattatgttatttctctgctcaaagatttttggtgagtccccactgactatagaatagtatccaaatgcttttcacataatcttttacacctgatctcaacctacctttcaggagttcrccaactctgagcaatttcctgaatttaaaatgcaatgtcatattctgccctgtttacattattctctttctcctggcacaataagaatccatcacatttgtatgttgttttccagtttacagtgaaatttcccatgcaccttctgtgaggtaggcagagatatttccccccagacttagagctggaagagtcaaggttctgaatgtgtaggtg

SEQ ID NO: 692132 - DNA, 625 bp, Homo sapiens
tcaatcattgttgttccgtttcttccaccatcaccttgagcctttcaggtacatgaaaagttcaattacmtgtaaagcgactgttaaatcagcaggccctttgtaggggtctgggcctcctctccctgcttcaatcgcaagtgtgctcaatccattactgttcctgaggattgtacatccatcaggtcgagtgtgctggccagggtgcatcttacagcttttactgcatatgagacattgcaggcctttctcaggaactgccaggcggactgggaatcacagtcacggttaatagcagcgaattgccagctcttgatgggtgggtagtcactcctttcagtggttgccccctgggggagaaggtagaaaaacagagggagggaattagagtgactttgcacagttgagcaggttcatgccgctggatcagtggcaagcattggcagggctccactctggggaggctcacaacaacatcacagtctcatttttaccaattggtgctgctatatcgccagtggtgcacagggggagagcagaggggagggtgagctgggagtgggggaaggggaagaaggcagaagtctaagctaaattaaacaaacaaaaaaattcatgttcaaac

SEQ ID NO: 692133 - DNA, 345 bp, Homo sapiens
gacagaagcaaaagacaaatcaaaaaaggaaggttaaaatagcagtgagataaaatgaatgagagccaaatgcaagagctaaagctataaacctctccgaagaaagcagaggtataaatctttgttaccttggattaggcartgatttcataatataactaaaagcagaagcaaccaacaacagaaaacacaatttggacttcatcagcattaaatccttttgtgctttattagcttagtggtcagctagaggtaacatttaaaaaaaaaaattggctgggcatggtggcttacgcctgtaatcccagcactttgggaggccaagcaggtggatcacttgaggtc

SEQ ID NO: 692134 - DNA, 1138 bp, Homo sapiens
ctgtagctagactttatggatgaatactgtttatccaaacattacataatagtcaagagagactacagtggaattaacttattggcaagccctatccaatttgaggaaaataagaagcatacccatgaacatcctatgccgtatggcccactagtgccctctacctaccaacctagcaaacacacacktccctccatagctgaccagtcattggaaaacagatgttaactatattgttcgtatctgaaaggatgtatatatctcttaggtagaacagcatgggcaggagtgaacagtaatataacaaatcattattatatcagctatgcttgaaattgaagccatcagcatagatgagattactgagagagggtcctaagacaaaacactgaggaaaaacattgaagggattattatggaaagaagagccagcaaagaagaaccacaaggagtggcctgagacataggaggaaagcaaggaccctgcaataacagaagggcaggaaggagtttttctaaagaaagactagcactgtcaaatgctgcaaagaaattaagataaggaccaagccatggaaattaacgtatgcccagttttccacccttccttccctcaaattaagaagtttttgatttaacttttagaaatcgtatctcacactaagtaatgccataaaaatgttactgttaggagatcctggaaatgttgggccactaaaatatgttgaacctccccccacacatgcccttttgggaatcaggcttccagcaaccttgagcatttaaaatgcttccctgtacctgtaaacaggtaaaaatcctcccagaggcaataaggaaaactgttcttactaaacctaaggagagcattctcaagcctcctctctgacagctttgctttaactctaaaggcaggtagtgcatccatgcagtcagtcattcatgagcctctcagtgtgccatgcactgcattaggcacaggatatgtgggagtgacacacacggggaacaaaaacctgcagtgacaaaagcaacagcagagggagccagtggaagaaacagaaaaacagcatgggtgtgaagtgcagtgctacgcagcttgtggtccttcagtaattcttgagcatgtcatgggatt

SEQ ID NO: 692135 - DNA, 1138 bp, Homo sapiens
ctgtagctagactttatggatgaatactgtttatccaaacattacataatagtcaagagagactacagtggaattaacttattggcaagccctatccaatttgaggaaaataagaagcatacccatgaacatcctatgccgtatggcccactagtgccctctacctaccaacctagcaaacacacacttccctccatagctgaccagtcattggaaaacagatgttaactatattgttcgtatctgaaaggatgtatatatctcttaggtagaacagcatgggcaggagtgaacagtaatataacaaatcattattatatcagctatgcttgaaattgaagccatcagcrtagatgagattactgagagagggtcctaagacaaaacactgaggaaaaacattgaagggattattatggaaagaagagccagcaaagaagaaccacaaggagtggcctgagacataggaggaaagcaaggaccctgcaataacagaagggcaggaaggagtttttctaaagaaagactagcactgtcaaatgctgcaaagaaattaagataaggaccaagccatggaaattaacgtatgcccagttttccacccttccttccctcaaattaagaagtttttgatttaacttttagaaatcgtatctcacactaagtaatgccataaaaatgttactgttaggagatcctggaaatgttgggccactaaaatatgttgaacctccccccacacatgcccttttgggaatcaggcttccagcaaccttgagcatttaaaatgcttccctgtacctgtaaacaggtaaaaatcctcccagaggcaataaggaaaactgttcttactaaacctaaggagagcattctcaagcctcctctctgacagctttgctttaactctaaaggcaggtagtgcatccatgcagtcagtcattcatgagcctctcagtgtgccatgcactgcattaggcacaggatatgtgggagtgacacacacggggaacaaaaacctgcagtgacaaaagcaacagcagagggagccagtggaagaaacagaaaaacagcatgggtgtgaagtgcagtgctacgcagcttgtggtccttcagtaattcttgagcatgtcatgggatt

SEQ ID NO: 692136 - DNA, 799 bp, Homo sapiens
tagctaaaatatcttcccaagttattctttatcacatcacctggttcgtttactacttattataataaaaatatttcgtatattctgaaataatgatattttgttttttagagtttttattttatatcttactgtttgcctccacatgggaaataagttgcatcatgcatatttctgttttatttatatacttttgaatcaatggcacttaattcatggtcagacacagaataggtagtcaaacattgtaatgaaataattaatgactgcattaattatgtaaagttccctgaacatgctcttggaaaataatgcaactttgtttttagygtaagagaatttcaattgcctgcctttaatataatctggatttgtaacatatatggcagatatgtatatcttaactttggtattctacctgtatttatttcattttcttctcatattcaagccaggctattgttttcattcttttttcttgttcaggcattttgtcatgcctctattttcgtactttgaggtgatttgtgtttttaggatttttatttctaaatgcaaagtgcaattggggtggggaagactagtttttaagagaaagacagagttagcaagagaaagatctactataaattcatggatgctgtgatactcagagatactcttcagaaataagatttattgttcagtcctctactctcagcactctttaggaattgtttcagttgaagagagtcatctgtcccagggccttagcctctccatactatttgtggaactcttcacatggttttatgaggtt

SEQ ID NO: 692137 - DNA, 593 bp, Homo sapiens
gtgctccattgtctcatctgggcttcacaaaacacaaatccaaagctgaaattttcaggatggtgactgcaaaacattaaaccttgagtgttggcccttcagagcactgtacgctgggaaactgcactgttgtactagaagtcagctcttctcacagataatgaagaacacaaaattcagaaaataatacttttattgattaactacctcacgcacttctgtaatagtcttttctctacagatgtatacacatatatacatatatgcgcatatatgcatacacatttatatgcatgtatgtctatgcacatatatgcatatatgcacatccttatatatgcatatatgcacatgcgtatatacatatatatgtgtatcacatatataatatatatgcatatatatgtgagtgtgtgtatatatatttttggttgttgttgttgatgttacatcgagacacggtcttcctctgttgcccaggctgaagtgcagtggtgcaatcatggcttactgyagcctcgaacttctggcctcaagtgatcctcctgcctcagcctcccaaagtgctgggattacaggtgcacaccactgtg

SEQ ID NO: 692138 - DNA, 613 bp, Homo sapiens
  misc_feature 493, 495, 496, 497: n = A,T,C or G
agctagcccagtgatccccattcagagcctgcactcttgcttccagggaaggtgaaggaaaagacagtgggccaggctgggggctctgatgggggaagagagggcttgggccagtctgcaggactggggatacatcggagggcttgccagggttcaggagccctggagagtcagtactgcgggctgacccaaccaaactgggtgtggaggtgttagaagttccctgcttcggcctctgatgggcggccctgccacccatcacaggtgtggggaccggaacagatgtgcatggggacgtgggaattgtgtctcagcccctaattcggtttccaaccagtccttcctttttttttgagaaagagtctcgctctgtcacccaggctggagtgcagtgtcacaatctctgctcactgcaaactccgcctccctggttcaagcaattctcccacctcagccttccgagtagctgggattacaggcgtgcaccagccgngnnnctaayttttgtattttcagtagggacggggtttcaccatgttggctagggtggtctcgaacgcttgacctccgaagcgatctgcccgccttggcctctgaaagtgctgggattata

SEQ ID NO: 692139 - DNA, 1311 bp, Homo sapiens
ggccctgggagggcagtgagggtctcaaaggagcttcccagggcaggtcatacctgagctaagtcttagaggatgaattgaagttagtcaagcaaagatgtgataagctagaagttctggtgtgatcccgatgaagacagccagcagagaagagcagggcctggaaggtaaaaacagttcacactgccatggagtttctgattggtgtctattctgttgtcctgagaagcaagtcaagcaaggcttgggttatttgaatctctaagaagtatagtggcttttccaccatgatgtcatcatgaaggtgctgaagaggtgcatgctgacaatcctcccagaacgacagaggtattgaacaggagcatgctgggctgcagctcagaatggggaccatccttgctgcttcttagtcatctgctgcagggatacacaggggtcttactcttcagccggtgttgggccattacttttcatcatgatttttggcagaaccaaattgggttgacaatactgctggccttccctctaaggccccaaggtagctcacttcagttcttttctttcttcatatttcctaattttaagaacaaacaaaaatatcaaagcatcttgttatgttttgagaagaccctattaaaatgtttaacagcaaatagagaaacaattgatggacaatgttcagtgtatggggcctcactaacatacgtgaggtagagtggtttatggagattacttacgtcgtagattagaaatggtaaatatggctgacggccgggtgtggtggctcatgcctgtaatcccagcactttgggaggccgagacaggaggatcacgagatcaagagatcgagaccatcctggccaacatggtgaaatcctgcctctactaaaaatacaaaaattagctgggcatggtggtgcgcacctgtagtcccagctactcgggaggctgaggcaggagagtagcctgaactcaggagggggaggttttagtgagcagagattgtgccactacactccagcctggcgacagagcgagactccatctcaaaataaataaataaataaaaataagagaaatggtaaataccaccaccaayctgaagagaaacctgactttggaaaaatattacatgtatgttgattaaaaagaaagatttaaaataccataaatgataacttcttttttcaattcttcacaaaaccttctagtcccagtgttctgtgtttgggtgcccaaactccagagccctacctactcttttgttactgggaagggctaattatttcctgaagatatccgctcactcaa

SEQ ID NO: 692140 - DNA, 1151 bp, Homo sapiens
gacaaaacttaagtatcatacataagcaaggcagtatccagtccaatatatataattggataacattagctataaatactgtaataattagaaaaaaattaacacattactattagtggggttatttggcataggtttataaaacagaataaatttcagattaactgtaagaagaaagaaataatgtattgacttgtaaagaggagaggcagtcaaaaaaaatcattccatcttttagataaaaaatgagcaccaaatggctttatcatggttaacatcgaggttaaccaaaatatgatctgattatcctgagtaatttggagacctattaaattaaaaacaaatgcttatgaaragatactttgccaaatttctagtgagattatagcaggattaccacaaggtaagtgactttttaagatattgagccactgtatctggtcccctgactcctaacatcatcccaaagtatttttttacctactgtttcttcatatttgtattttctgtttcccaaaatgacagtgtgtttaagctttgcttaaaaggcttaaagttgtatgccttaagtttatacaataaaaaatcaattttaaaaaaaggtcattgaaagtctctttatgtgaaagatgtagcaataatatgacatttctcccattttcttataacttttctagaaactaacacacatccttactttgtatagttgtatgccttgtttgtgagaagtctttttcttctaaaattcttaggacttcaccaaatttgcagtgttcccactcatgtcatctgtgccagtcatgttttcattttcaacacattgtacatacacggacacacataccatattcacttgccacaaataagttttaagtttaacacatcttaaaagagctttcaatggaatcaaaaggaaagttaaagaaagcataaagcctattcaatttgattgtctcatcatctctctgtatagatactactctaatttcttctaaatatgtagtatatgatccaggacctgttattaaaactggataaggcaaaacataaaaataaaaataaactggataaggcaaaacacaagcctagaataaagtgacctgcatttacactcacagatctgctaatgattacatatcctaaaagtaacc

SEQ ID NO: 692141 - DNA, 1846 bp, Homo sapiens
atttttttgctagtctgtggcttgtcttttcatattcttggtggtttttgaagaacagaaatgtatggaagcccatttatcaacttttttcttttatggttcatgcttttttatgtgctagctaagaaatttttgcctaccacaaaattacgaagtttttaaaaaatggtttttcaaagaaattttgtacttttagcccttacatttaactcagtgataaattttgagttaatttgtgtatatgaaatgagaaagtaaataaatgttcatcctctcactccatggatatcaattattcccacatcatttgttgaagaagactgttatttccctattgaagtatcttgatgactttgtctaaaatcatttgaccacatatgcatagcactgtttgtatggttatgtgaataaaagaaatgaatttatataatgcctttgaaggaaaytcaagatcatgtaatacttctcaagtattataataaacatttattttcataccctactgaataattttttagttaaaaaacctattacagagacatgacaagtaattgcacagtcttaccctgcactggactctggactggagagaaaaaaataccttaaagaatattaataaatcaagtagcaaaatgggaataggaacagcagattaaagttttgtattaatgttaagtttatgaagttggcagttgtactgtggtaacgtaaaagaatgttctcagttttagtaaatacacactatttagtagtaaagggccatgatgtatataagttactctcagatgctccccgctcctagatgtgtgtgcatgtgggaggggacagaataaatgcatgcaaacgataaataaaaacactctaccagaaatgttaacagtaggtaaatctgaataaagagtgtatcacttttgctgagcttgaaattctttctaaattaaaaaattatttatttttatgtttttgagatggagttgcccaggttggagtgtaatggtgccatctcggctcactgcaacctccgcctcccaggttcaagcgattctcctgcctcagcctcctgagtagctgggattacaggtgcatgccaccatgcccagctaatttgtgtatttttagtagagatggggtttcaccatgttggccaggctggtctctaactcctgacctcaggtgatccgcctgcctcggcctcccaaagtgctgagattacaggcatgagccgtcacgccagacctaaaaaacttttttttaaataaaatgtttttttaaaaaaatctattacattaatttgttggcttaatatttgccttttacataaaagtggaatttaaatgtattaaaatagccataatagtgatttaaaaaaatctaggttgttaggcttacgtttatttgaaatagaaatttatctgaaaactaaatggccattctagatgtaatggtcatttaccatttcaagaaacaaagttttatgatgatgtcgtctgttacaaattctttcttattgtctgaaatccagctctcagtttggctgggtaaactggcctttttgaagttttctgaggataaattttatctctcactatctttttggtgacctagtttgattacagtggtaaaaattattacagagccttatgcacaagagcccatgtatgtcttaaggaggtggagttactgttcagtttgggtatcactccaaggatttaatgtgagtctgattgtatttgttaagtcctcttttgtatttgatctattttctaccacaacaaagtcaacagaaaaagcctgtaatgctaccagatacagattatctacttctaggccagaagtaaatctgaga

SEQ ID NO: 692142 - DNA, 608 bp, Homo sapiens
tttgtgaatgtgcctaatgccaccaagctgyacattcaaaaatggttcaaatgataaattctgttatgtgtattttagaataaaaaaaagttaagtaaaaacaaagttcatagaaatcacagcaacaagaaaagcaataaaacaacgatacgtaaaagagcacagggcatgaacagacagctcgcaaaagaggaaatacaactaactaatgtggaaaaatgtataaggtcaaagttatcaaaaatgcaaatgtaaagcatatggcaaattttaatccattaaatgatcaaaaataatattaatgctgacaagagtacaaagaaagcaagcctcttgcgcggtgctgacagcagtctgaaatggcacactgtgcagagactaataaattactaacactgctgaactccataatcaaacactgctagttctttttaagtaaaaaagactcgaaatacaggaaaaactgtatgcacaaagattacattatttcttataaaaccaagaaaatgactaaaaatagtggaactgctaagcaggaaatacctactagacagattatcatatagctgttaaaataagggttatgaaaactgtaaggaaatgaggag

SEQ ID NO: 692143 - DNA, 608 bp, Homo sapiens
tttgtgaatgtgcctaatgccaccaagctgcacattcaaaaatggttcaaatgataaattctgttatgtgtattttagaataaaaaaaagttaagtaaaaacaaagttcatagaaatcacagcaacaagaaaagcaataaaacaacgatacgtaaaagagcacagggcatgaacagacagctcgcaaaagaggaaatacaactaactaatgtggaaaaaygtataaggtcaaagttatcaaaaatgcaaatgtaaagcatatggcaaattttaatccattaaatgatcaaaaataatattaatgctgacaagagtacaaagaaagcaagcctcttgcgcggtgctgacagcagtctgaaatggcacactgtgcagagactaataaattactaacactgctgaactccataatcaaacactgctagttctttttaagtaaaaaagactcgaaatacaggaaaaactgtatgcacaaagattacattatttcttataaaaccaagaaaatgactaaaaatagtggaactgctaagcaggaaatacctactagacagattatcatatagctgttaaaataagggttatgaaaactgtaaggaaatgaggag

SEQ ID NO: 692144 - DNA, 608 bp, Homo sapiens
tttgtgaatgtgcctaatgccaccaagctgcacattcaaaaatggttcaaatgataaattctgttatgtgtattttagaataaaaaaaagttaagtaaaaacaaagttcatagaaatcacagcaacaagaaaagcaataaaacaacgatacgtaaaagagcacagggcatgaacagacagctcgcaaaagaggaaatacaactaactaatgtggaaaaatgtataaggtcaaagttatcaaaaatgcaaatgtaaagcatatggcaaattttaatccattaaatgatcaaaaataatattaatgctgacaagagtacaaagaaagcaagcctcttgcgcggtgctgacrgcagtctgaaatggcacactgtgcagagactaataaattactaacactgctgaactccataatcaaacactgctagttctttttaagtaaaaaagactcgaaatacaggaaaaactgtatgcacaaagattacattatttcttataaaaccaagaaaatgactaaaaatagtggaactgctaagcaggaaatacctactagacagattatcatatagctgttaaaataagggttatgaaaactgtaaggaaatgaggag

SEQ ID NO: 692145 - DNA, 1414 bp, Homo sapiens
  misc_feature 681, 682, 683, 684, 685, 686, 687, 688, 689, 690, 691, 692,693, 694, 695, 696, 697, 698, 699, 700, 701, 702, 703, 704,705, 706, 707, 708, 709, 710, 711, 712, 713, 714, 715, 716,717, 718, 719, 720, 721, 722, 723, 724, 725, 726, 727: n = A,T,C or G
  misc_feature 728, 729, 730, 731, 732, 733, 734, 735, 736, 737, 738, 739,740, 741, 742, 743, 744, 745, 746, 747, 748, 749, 750, 751,752, 753, 754, 755, 756, 757, 758, 759, 760, 761, 762, 763,764, 765, 766, 767, 768, 769, 770, 771, 772, 773, 774: n = A,T,C or G
  misc_feature 775, 776, 777, 778, 779, 780: n = A,T,C or G
gcccgggcgctggggctcactgcagactacagcccaggcactagagctcactacagactgcagcccgggcgctggggctcactacacactacagcccggcactagagctcactacagactacagcccgggcactagggctcactacagactacagcccgggcactagagctcactacacactacagcccggacactagagctcactgcagactacagccccgggcactagggctcactacagactacagcccgggcactagagctcactgcagactacagcccgggcactagagctcactgcagactgcagcccaggcactagagctcactacagactgcagcccgggcgctggggctcactacagactacagcccgggcactagagctcactgcagactacagccccgggcgctggggctcactacagactacagcccgggcactagagctcactgcagactacagcccgggcactagagctcactgcagactgcagcccaggcgctggggctcactgggatgcttgaagatgtctcaacctccccaacctagagattcctaaaagttcagaaatgtaaacagggaactttaaaacacatactttgtcattctgaggatctgcatctttataacaatcatttgaatgttttaaatgcattcatttcagatttttcttctnnnnnnnnnnnnnnnnnnnnnnnnnnnnnnnnnnnnnnnnnnnnnnnnnnnnnnnnnnnnnnnnnnnnnnnnnnnnnnnnnnnnnnnnnnnnnnnnnnnnagcaaaggtttatttctttgcacgtggttcacgtctggtgtggtcggcagtaggctccaccaccgtgttgtggctgcccttctggaacacatcgcctcaggtccccgctgccggggaggagacagctggtgcgccattccacccctcctccccgggccgtcacgtgggccagcctccaccgggcactggaagcgggagggtgatagaatgtttggtgggcaccatgcctctcctgtagccacgaagaaagggacttctttccaaagtatgggtcttgatgactaagttgaagtttaatattgaggcctaagaatgcccgtttctgtgcgttagcctgccaggtaacagctgctgtagtgttttttttccccatggtgatatgagaccgggagttggccaactttttctgtaaagggccagatggtgaatcattttggctctgcaggccgtatggtctgtgctgcatttattcagttctgccagagcagccgaagaccgtgttgaacgactaggagtggctgggttcctataaagttttatttacaaaagcaggagagagcctgttgtagacatgtgaggagttacttatggaagcctcrttctaatactgtccgggttggcctgtgataattat

SEQ ID NO: 692146 - DNA, 607 bp, Homo sapiens
ctactttgttttaggtactgtagtaacctatagtttactacaaatagcagaacaaatataacaaatacataaacattatgtaaatagacgataaacgttgtagtgaaaatgtgtaaagttatacagaatacaggattgtagatgtggtgagaatgaggctggaatagtaaactgggcagataatataaaaggcatgaatgatttgggctgttattcacagcaatgttcttattgaaagtttcttagtatagaaataatatatatgaatgtaataaagatggtgactttttgataaattcgaaggggaagtgtgagagttacagaaatcagttaccttgctatttccaaaacccagaagagacttggtgagtctcaggtaggcttgacaacatagataggaagggatggtgtctctgttaacttttgttgcttagcgaaccacaccaaactgagtggctgcagcaaagaatgatttattatttctcatcaatctatgggttggctagatgattctaccattgatctttcttgggctcattcctatggttgcaatcacattatggcttgaaagctgcatggttcaagatggatttaytcatgtgtctgg

SEQ ID NO: 692147 - DNA, 604 bp, Homo sapiens
gaaaagttctcattttcattatgatgcctgtttgacttttttttttcctttattcgactcacaaggggttttcctatattacaggtctttaaaaaaaaaaaaaaacagctttaggttagatttatcctcgtgactttttgmgtttcattaagtttctgtcttcataagtttcttgtttattcggatctatttttctaagtttctgatttctaatttctatgttctctattctaatactatttatctaatttcttgaaataagaagaaaaattcttatttcctcctccttactcctctatttcttgctcaaataaaggcacttagaacagtttttgttctattatagacttagttttctatgagaattttttttactggtttctagataatttttttgtttttctctttagttcctcttaaatccaagcatctttcttcattatttagtgattaggcattttcattctatttttattatttatttcccattttatttaattaatttatatatttttatttttatttttttctgcgacaaagtctcgctctgtcattcaggctggagtgcagtggcgccatcttggctcactgtagcctctacctc

SEQ ID NO: 692148 - DNA, 604 bp, Homo sapiens
gaaaagttctcattttcattatgatgcctgtttgacttttttttttcctttattcgactcacaaggggttttcctatattacaggtctttaaaaaaaaaaaaaaacagctttaggttagatttatcctcgtgactttttgagtttcattaagtttctgtcttcataagtttcttgtttattcggatctatttttctaagtttctgatttctaatttctatrttctctattctaatactatttatctaatttcttgaaataagaagaaaaattcttatttcctcctccttactcctctatttcttgctcaaataaaggcacttagaacagtttttgttctattatagacttagttttctatgagaattttttttactggtttctagataatttttttgtttttctctttagttcctcttaaatccaagcatctttcttcattatttagtgattaggcattttcattctatttttattatttatttcccattttatttaattaatttatatatttttatttttatttttttctgcgacaaagtctcgctctgtcattcaggctggagtgcagtggcgccatcttggctcactgtagcctctacctc

SEQ ID NO: 692149 - DNA, 604 bp, Homo sapiens
gaaaagttctcattttcattatgatgcctgtttgacttttttttttcctttattcgactcacaaggggttttcctatattacaggtctttaaaaaaaaaaaaaaacagctttaggttagatttatcctcgtgactttttgagtttcattaagtttctgtcttcataagtttcttgtttattcggatctatttttctaagtttctgatttctaatttctatgttctctattctaatactatttatctaatttcttgaaataagaagaaaaattcttatttcctcctccttactcctctatttcttgctcaaataaaggcacttagarcagtttttgttctattatagacttagttttctatgagaattttttttactggtttctagataatttttttgtttttctctttagttcctcttaaatccaagcatctttcttcattatttagtgattaggcattttcattctatttttattatttatttcccattttatttaattaatttatatatttttatttttatttttttctgcgacaaagtctcgctctgtcattcaggctggagtgcagtggcgccatcttggctcactgtagcctctacctc

SEQ ID NO: 692150 - DNA, 604 bp, Homo sapiens
gaaaagttctcattttcattatgatgcctgtttgacttttttttttcctttattcgactcacaaggggttttcctatattacaggtctttaaaaaaaaaaaaaaacagctttaggttagatttatcctcgtgactttttgagtttcattaagtttctgtcttcataagtttcttgtttattcggatctatttttctaagtttctgatttctaatttctatgttctctattctaatactatttatctaatttcttgaaataagaagaaaaattcttatttcctcctccttactcctctatttcttgctcaaataaaggcacttagaacagtttttgttctattatagacttagttttctatgagaattttttttactggtttctagataatttttttgtttttctctttagttcctcttaaatccaagcatctttcttcattatttagtgattaggcattttcattctatttttattrtttatttcccattttatttaattaatttatatatttttatttttatttttttctgcgacaaagtctcgctctgtcattcaggctggagtgcagtggcgccatcttggctcactgtagcctctacctc

SEQ ID NO: 692151 - DNA, 656 bp, Homo sapiens
ttcaggaagtgattgccttctttttctctcctcataatttaacttctaaggccataaactgttttctccaatagggtgtgctctaatcaccttaattatccctgaaatctaaatgaagccaaaactcaaaatacttttactccacttttattctaatctcctaattcctaggttttactggtataatacttacaaagtccttacaatctgcctttttragagttccttttcagcctttagattatacaagcttggatagtcaatatgtctaactatctatacatatattcattgatcatcattgatccctttttttcactctcttgaggattgtatttattgttttgtgtttgattatagtatatttgcagcaattttcctcgatgagaatgtgagtaatatatactcacatcaatccctatagattaccaaatgtcttccttttatatcacaggcaaaagtttatgaattttggcccacacattctgtgtctgagatatagcctaaggaaataataaagatagttatatacaaaatggaacacatagttatatattttatatatagaaaatatatcttatatgcaacataaatatacaaatattatatatacagtacacacaaaaaaaaattgtgactgttatcattaattgaca

SEQ ID NO: 692152 - DNA, 642 bp, Homo sapiens
ttatttctaagttgtttcaaaacagcatacattacatcagctatatttacaaaggaaggctaatgtggttctgctagttcaaaagtaagaggagaagaaaatactgggcagttcactttgtgaatatggcacatttcatttgcccttgaagcccaggtggaaacattgtcccattgagaaggcccaggaaattctctaaagaatcttccttgggctcagggaggcaatttaaatatttcttgctctcagggacttctgaaaatttctaagtgataactttaaattgcttcaggcaaaacatattcaaaacttttagaaatttcaagaataatgccctaaagacttaatcatatgagacccattattgtaatttacataaccaatcagaagccctgaagacatgtcttatcccattttcaatctattactatatactgctgagatcctttcyccaaatatattctaatcacttggtccagacctttgttcatcctatcatgtcatcttgtatgtagtacagtagaaagaactcagactacattaagtcttcattattaacaataataataatagaatacaaatttccaggcatcattataagggttttatagatattatgtcgtttaatttgtttttgttaaa

SEQ ID NO: 692153 - DNA, 647 bp, Homo sapiens
ttcccaggtgattcttatgtacacttaagtttgagaaatatcgccaatagttctcaactctggttgcatgttgaaaatcacttggagaactttaaaaatgttacatgtgtctactcctagcccccaggaaagattctgatttaattggtataatgtaaggcctgaatattagtgctttttaaaagttcccaggtgattctaatgtgcagtcatcwttgaaagtctcgctcctgccccaggtgtgctttcatgcagtaatgcttagaaatacctcagctcccttatcaataaggacttaaatacttaaacagctttactcatttagcaacatcaaaaaggctaaacaaagagatatactcaaaaaccctccctgtattattacttacaaccgcatgtgagcatacaattaaaaaacagataacaatttttaaagttcacatggacacacacattttgttctgcatatttgtataataaaacctaggtctacagactcacatatctcctattgccatttaaaaaaaataaatacagttacattaaaggactcagaggattccaaatgaaaagtgtaagtctctcttctccaataaatctatcttcccaaacataataactattagtattaactttcatcttctagaaaa

SEQ ID NO: 692154 - DNA, 1193 bp, Homo sapiens
ggaaacatcaaattctgtgtaaaaacttgccccagttctctgattgacccctgcaccataaaggcacaatccagctaaataccaatatgtatatatacagggatcccttggtatctgtgagggatggattccaggactcccatggatacccaaatccatggatgttcaagttccttatataagatggcaaagtatttgcacagaatccacactcattttctcatatactttgaatcatctctaggttacttataatacctactactatgtaaatgctatgtaaacacctgttaagctgtatttttaattcatattatattgttatttctattggcttttgcctgaatatttttgatccaaatttgttgaatccaagttaygtgaaacccataagcatggagggctgactgtaaaaacataaatatagatatagagatagagatagagatcttgaactgagatgtgtattggtaacaaaaagatcaagtttgtagttggagtccaacctgattgcccctaaagcaaaaacatcaaaaccatttagaggaatgtaatggtattcagagcctccacaatattgttctaggacaaccaggtttgcctgtcatatgggtaacagaccaatgcaccgaaacagtgggagttgcagcagagaaagagtataatgattgtatggtagccaaataagaaagtggaaaggaaccttaaatccacctcaccaaggagttttggcctagaatttttagggaattttggcaaatagggggctgaggagctaattgcttagggtgtgtggaatgcaatctttaataaagatgtaaaaactacattttggggctgaattacttcctcagagagggtcttcagactggctggcatcgatggacccattggaatgcaggatctggaaaatatctcaaaatggaaaacttgacatttcttaacattaaagatgttatctacagaagttaggaccttatggcaggggctatgtgacttttaagtagtaatcagctgtacagaagtgggccatagagcagtctggttaatgctttgctatgtttctacttaaagcttatgcttttgttaaacttagcaatttagttttatcaattttattaggatggcttcaatatgacattcacaatgtctaggatactatgtttttctctaataagggcaggaatatgtgt

SEQ ID NO: 692155 - DNA, 1062 bp, Homo sapiens
aaacagtgtttgtggtacaattgcctttctgcaggaataacatcatcaatcatttcacctgtgaaattctagctgtcatgaaactggcctgtgctgacatctcaggcaatgagttcatcctgcttgtgaccacaacattgttcctattgacacctttgttattaattattgtctcttacacgttaatcattttgagcatcttcaaaattagctcttcggaggggagaagcaaaccttcctctacctgctcagctcgtctgactgtggtgataacattctgtgggaccatcttcctcatgtacatgaagcccaagtctcaagagacacttaattcagatgacttggatgccactgacaaacttatattcatattctacagggtgatgactcccatgatgaatcctttaatctacagtcttagaaacaaggatgtgaaggaggcagtaaaacacctactgagaagaaaaaattttaacaagtaaatgagaaaggtgagagtaattttataatcacaatatggaaatcaattagagaaaccaaggttaaacagataggttctcgttgctgtttcacattcatctctcgaagttctaaagctccaaaatacacttctctgattgcgatayataatgaaaagaagtaaataaataaatttcagtgtttggaaataagtttctattctgttccattggttgatatgtctatttttatctgagtaccatgctcttttgattacaataactttataacatattttaaaactgcagcatatggtgctctcagctttgtttttgcttcagattgctttgcccaggcagggtcttttctagttccatgtaaattttaggattgttgtttcaatttttatgaaaaatgacattggaattttgatacagattgcattgaatctgtagattgctttaggtaatatggacatttcacaatattaattcttctaatccatgaacatgtaatatctttcgatttacttatgtcttcttcaatttttttatcaatgttttatagttttcagtgtatagttcttttacgtctttggttgtc

SEQ ID NO: 692156 - DNA, 1062 bp, Homo sapiens
aaacagtgtttgtggtacaattgcctttctgcaggaataacatcatcaatcatttcacctgtgaaattctagctgtcatgaaactggcctgtgctgacatctcaggcaatgagttcatcctgcttgtgaccacaacattgttcctattgacacctttgttattaattattgtctcttacacgttaatcattttgagcatcttcaaaattagctcttcggaggggagaagcaaaccttcctctacctgctcagctcgtctgactgtggtgataacattctgtgggaccatcttcctcatgtacatgaagcccaagtctcaagagacacttaattcagatgacttggatgccactgacaaacttatattcatattctacagggtgatgactcccatgatgaatcctttaatctacagtcttagaaacaaggatgtgaaggaggcagtaaaacacctactgagaagaaaaaattttaacaagtaaatgagaaaggtgagagtaattttataatcacaatatggaaatcaattagagaaaccaaggttaaacagataggttctcgttgctgtttcacattcatctctcgaagttctaaagctccaaaatacacttctctgattgcgatacrtaatgaaaagaagtaaataaataaatttcagtgtttggaaataagtttctattctgttccattggttgatatgtctatttttatctgagtaccatgctcttttgattacaataactttataacatattttaaaactgcagcatatggtgctctcagctttgtttttgcttcagattgctttgcccaggcagggtcttttctagttccatgtaaattttaggattgttgtttcaatttttatgaaaaatgacattggaattttgatacagattgcattgaatctgtagattgctttaggtaatatggacatttcacaatattaattcttctaatccatgaacatgtaatatctttcgatttacttatgtcttcttcaatttttttatcaatgttttatagttttcagtgtatagttcttttacgtctttggttgtc

SEQ ID NO: 692157 - DNA, 1062 bp, Homo sapiens
aaacagtgtttgtggtacaattgcctttctgcaggaataacatcatcaatcatttcacctgtgaaattctagctgtcatgaaactggcctgtgctgacatctcaggcaatgagttcatcctgcttgtgaccacaacattgttcctattgacacctttgttattaattattgtctcttacacgttaatcattttgagcatcttcaaaattagctcttcggaggggagaagcaaaccttcctctacctgctcagctcgtctgactgtggtgataacattctgtgggaccatcttcctcatgtacatgaagcccaagtctcaagagacacttaattcagatgacttggatgccactgacaaacttatattcatattctacagggtgatgactcccatgatgaatcctttaatctacagtcttagaaacaaggatgtgaaggaggcagtaaaacacctactgagaagaaaaaattttaacaagtaaatgagaaaggtgagagtaattttataatcacaatatggaaatcaattagagaaaccaaggttaaacagataggttctcgttgctgtttcacattcatctctcgaagttctaaagctccaaaatacacttctctgattgcgatacataatgaaaagaagtaaataaataaatttcagtgtttggaaataagtttctattctgttccattggttgatatgtctatttttatctgagtaccatgctcttttgattacaataactttataacatattttaaaactgcagcatatggtgctctcagctttgtttttgcttcagattgctttgcccaggcagggtcttttctagttccatgtaaattttaggattgttgtttcaatttttatgaaaaatgacattggaattttgatacrgattgcattgaatctgtagattgctttaggtaatatggacatttcacaatattaattcttctaatccatgaacatgtaatatctttcgatttacttatgtcttcttcaatttttttatcaatgttttatagttttcagtgtatagttcttttacgtctttggttgtc

SEQ ID NO: 692158 - DNA, 1257 bp, Homo sapiens
ttgttatcccctcaactcccttatccagggagaaagatgtgcaacacctgctcaaactcaagactcattactgggggattcaacttgaccattgcagagattaatatatgccccgggtggtaggaagtcatggtaccatggaatctgactatcactcagaaggtagactatagrcagaaattttatctgaaggttcacccaagtcatgacagattttctaaagaaaactagaaattctcagaatcttcttaatcttcttactggtgcttcttacggaagcaaaatcattttatcttgaggaataaactatcttctattattaacatcagtgttataggtgtttccagctatccctcaggtaagaggtttcctgacatgttttcattcccccagcatacttacgaattcctaaaatttggaacaaacctttttttggcaaaaaaaaaaaaaaaaaaaatctgaatataaacgtaattaataggacattagtgcttaaattgccactcacatccaaatacatagagttcatttattcccactaggggatgaaatatttggccatgaggattacctttctaggatattgttgtgttcatggaagattatttattaaacagccagatcctaagaaggtaatccagatggccaaattgttagttcttaagattattctgataattcagctatatgccactgagaaataccactacccccaacctcaggcagacttttcataattgaaagagaagaagctacaggtatttttctcatatgaattaattgtttgcatttatttcttctcctgtttttatctttacaatttattttaattttttttaagtgttgttgttgttctgcttgccagagtcctattttttgcttttctgaagactccctaaacaatcatttctccaatatttcatgttattgtacattccattattacaggtatacacaacatgagaacttatctctgactctagaaaagaatcatcttaatctgcataaattcattcgaatacattaaataccctctaagagagagtaaaggtttaatttcggtaaacgcagtactgttttctcttgtctacaaattccttggatacctggttagatgtaatatgtgcctgttttcatgggttttgaatttttgggtgactacataaatatctataatcatatacttcttcctctaccttatgaaagccagtctctgagacaggcttcctggtgtattgcatactgattttcatgtca

SEQ ID NO: 692159 - DNA, 1257 bp, Homo sapiens
ttgttatcccctcaactcccttatccagggagaaagatgtgcaacacctgctcaaactcaagactcattactgggggattcaacttgaccattgcagagattaatatatgccccgggtggtaggaagtcatggtaccatggaatctgactatcactcagaaggtagactatagacagaaattttatctgaaggttcacccaagtcatgacagattttctaaagaaaactagaaattctcagaatcttcttaatcttcttactggtgcttcttacggaagcaaaatcattttatcttgaggaataaactatcttctattattaacatcagtgttataggtgtttccagctatccctcaggtaagaggtttcctgacatgttttcattcccccagcatacttacgaattcctaaaatttggaacaaacctttttttggcaaaaaaaaaaaaaaaaaaaatctgaatataaacgtaattaataggacattagtgcttaaattgccactcacatccaaatacatagagttcatttattcccactaggggatgaaatatttggccatgaggattacctttctaggatattgttgtgttcatggaagattatttattaaacagccagatcctaagaaggtaatccagatggccaaattgttagttcttaagattattctgataattcagctatatgccactgagaaataccactacccccaacctcaggcagacttttcataattgaaagagaagaagctacaggtatttttctcatatgaattaattgtttgcatttatttcttctcctgtttttatctttacaatttattttaattttttttaagtgttgttgttgttctgcttgccagagtcctattttttgcttttctgaagactccctaaacaatcatttctccaatatttcatgttattgtacattccattattacaggtatacacaacatgagarcttatctctgactctagaaaagaatcatcttaatctgcataaattcattcgaatacattaaataccctctaagagagagtaaaggtttaatttcggtaaacgcagtactgttttctcttgtctacaaattccttggatacctggttagatgtaatatgtgcctgttttcatgggttttgaatttttgggtgactacataaatatctataatcatatacttcttcctctaccttatgaaagccagtctctgagacaggcttcctggtgtattgcatactgattttcatgtca

SEQ ID NO: 692160 - DNA, 614 bp, Homo sapiens
gaggcatgcaccaccacgcccrgctaattttgtatttttagtagagacagagtttctccatgttggtcaggctggtctcgaactcccgacctcagatgatccgcctgcctgggccacccaaagtgctgggattacaggcgtgagccactgcgcctggccctttttttagacggagtctcgctctgtcgccaggctgaagtgcagtggcgcaatcttggctcactgcaatctctgcctcccaggttcaagcaattcccctgcgtcagcctcccaagtagctgggactacaggcaccttgccaccacgcccggctaattttttgtattttagtagagacggggtttcaccatgttggccaggatggtcttggtccctgacctcgtgatccacctgcctcagcctcccaaagtgctgagattacaggcgtgagccaccacgcccggcccccaaactttctttaggagtcaaccgaactcacaccaagctgtgtgaaaagccacagctttgtctagtttagacacaaatccaggcagagtttctggttatgacaaaacacaatctctgtcctcctcctcctccctcttccctcattcattcaacgatatctattgact

SEQ ID NO: 692161 - DNA, 614 bp, Homo sapiens
gaggcatgcaccaccacgcccggctaattttgtatttttagtagagacagagtttctccatgttggtcaggctggtctcgaactcccgacctcagatgatccgccygcctgggccacccaaagtgctgggattacaggcgtgagccactgcgcctggccctttttttagacggagtctcgctctgtcgccaggctgaagtgcagtggcgcaatcttggctcactgcaatctctgcctcccaggttcaagcaattcccctgcgtcagcctcccaagtagctgggactacaggcaccttgccaccacgcccggctaattttttgtattttagtagagacggggtttcaccatgttggccaggatggtcttggtccctgacctcgtgatccacctgcctcagcctcccaaagtgctgagattacaggcgtgagccaccacgcccggcccccaaactttctttaggagtcaaccgaactcacaccaagctgtgtgaaaagccacagctttgtctagtttagacacaaatccaggcagagtttctggttatgacaaaacacaatctctgtcctcctcctcctccctcttccctcattcattcaacgatatctattgact

SEQ ID NO: 692162 - DNA, 699 bp, Homo sapiens
acttttatttcctctttataatgtttgaaacagtaataagtgtgaaatagggggaaatacactgaactatttttctagaaacaaaacacttaccaataaattatcactaaatgtatattattctacatcattgttttcaaagccctttgcattgaaattagatactacttggagaaaacttttaagttcttcaaaagtaagaagaatgacatccacaatatggcctctaaactggctatacatttcctccttatctatcaatgaaaataataaactgacttctccactaatattttgagaagataaaacaatgtccgaaaactagaacgtctgttgttagtaccaaaaattttgagattatggaaagatcatcaattcttataaaaaatatcaaatgcttcttctttggattgaggccattgtgaatgtcactacttgactgctgcagactaatggagctgaattaagaatatgactttatcctacacacacacacacacacacacacacgtgtatattctatatatagatacacaaacacataggatgtgtgtgtgtgtgtgtgtgtgtgtrtatatatatatatatatatatatatataatttaaaaatcctttatattttccaaggtacacagagttggtatttcaaatatatacacatacaaaaacatatgtgaaaatgactaaagaaaactcct

SEQ ID NO: 692163 - DNA, 647 bp, Homo sapiens
tgtattgttagtagagacggggtttcaccatgttagccgggatggtctcggtctcctgacctcgtgattcgcccgcctcggcctctcaaagtgctaggatcacaggcgtgagccactgcgcccggccaaatagtcatgtcttttaaacacattccctatatagccatcaaaaataataatagcaaaatacctttaaactgagataactgcatgcgtattgctgaagccakgtatttttatgagagccttgaggcatccatagcattgataatgtcaacgccacagacctgcaaattccacagcaaatgtaggtagttgctgacagctagttgacagtttattaggaagaattccatacttctaagttggctcttgttgtgattgatgaaattaagggatttcttatcttcagacttcctttccattccagctttaaaataatcacagagtggcaatactggtataaggtaaaaagttattttggctcagaattttctaaagaaagatgctcaaaaatactttttcctcatagctctactttctcctaattatttttgttctaaagtcattatttttatcattttgtgtttgtacttatgaacatgaatgtgcacatccagacacttaccttttatggtaagcactct

SEQ ID NO: 692164 - DNA, 647 bp, Homo sapiens
tgtattgttagtagagacggggtttcaccatgttagccgggatggtctcggtctcctgacctcgtgattcgcccgcctcggcctctcaaagtgctaggatcacaggcgtgagccactgcgcccggccaaatagtcatgtcttttaaacacattccctatatagccatcaaaaataataatagcaaaatacctttaaactgagataactgcatgcgtattgctgaagccatgtatttttatgagagccttgaggcatccatagcattgataatgtcarcgccacagacctgcaaattccacagcaaatgtaggtagttgctgacagctagttgacagtttattaggaagaattccatacttctaagttggctcttgttgtgattgatgaaattaagggatttcttatcttcagacttcctttccattccagctttaaaataatcacagagtggcaatactggtataaggtaaaaagttattttggctcagaattttctaaagaaagatgctcaaaaatactttttcctcatagctctactttctcctaattatttttgttctaaagtcattatttttatcattttgtgtttgtacttatgaacatgaatgtgcacatccagacacttaccttttatggtaagcactct

SEQ ID NO: 692165 - DNA, 647 bp, Homo sapiens
tgtattgttagtagagacggggtttcaccatgttagccgggatggtctcggtctcctgacctcgtgattcgcccgcctcggcctctcaaagtgctaggatcacaggcgtgagccactgcgcccggccaaatagtcatgtcttttaaacacattccctatatagccatcaaaaataataatagcaaaatacctttaaactgagataactgcatgcgtattgctgaagccatgtatttttatgagagccttgaggcatccatagcattgataatgtcaacgccacagacctgcaaattccacagcaaatgtagktagttgctgacagctagttgacagtttattaggaagaattccatacttctaagttggctcttgttgtgattgatgaaattaagggatttcttatcttcagacttcctttccattccagctttaaaataatcacagagtggcaatactggtataaggtaaaaagttattttggctcagaattttctaaagaaagatgctcaaaaatactttttcctcatagctctactttctcctaattatttttgttctaaagtcattatttttatcattttgtgtttgtacttatgaacatgaatgtgcacatccagacacttaccttttatggtaagcactct

SEQ ID NO: 692166 - DNA, 609 bp, Homo sapiens
agtttcatttgtctcttctttgacgtcttggattctcaaatcccatcttccagcttatctttagaatattctttctgacactgcttcccactaccctcaacattctgaaactatcatttyaaaatacctgctcagggttttttgagcaagtgctgtgagtatattggttattattataccttggcttgatttgatttgacttgactcactgatgtcataggtagactacagtccatgaaacttgactgtaggcatgacttcatattacatgcataacctatataatagggttagttttgtcacctgtcacactcctgttgcatttttaacagtaataatgtgatttagaaatttccctaatagatagtttattttatttaggacagaaaacttactctaagaatacactctcctggtccttcatttgtgaattgatcaatggcattaactatctataaggaggctttgataaataatgaagctcactgtctaaaatctctaaggtctgagtccaccaaatatagtattaccaagagtctctagtcaaggaaatgcctatgcacaagcatgagcgcttgtaaaatggatactttttaaaaaaatataaag

SEQ ID NO: 692167 - DNA, 609 bp, Homo sapiens
agtttcatttgtctcttctttgacgtcttggattctcaaatcccatcttccagcttatctttagaatattctttctgacactgcttcccactaccctcaacattctgaaactatcatttcaaaatacctgctcagggttttttgagcaagtgctgtgagtatattggttatyattataccttggcttgatttgatttgacttgactcactgatgtcataggtagactacagtccatgaaacttgactgtaggcatgacttcatattacatgcataacctatataatagggttagttttgtcacctgtcacactcctgttgcatttttaacagtaataatgtgatttagaaatttccctaatagatagtttattttatttaggacagaaaacttactctaagaatacactctcctggtccttcatttgtgaattgatcaatggcattaactatctataaggaggctttgataaataatgaagctcactgtctaaaatctctaaggtctgagtccaccaaatatagtattaccaagagtctctagtcaaggaaatgcctatgcacaagcatgagcgcttgtaaaatggatactttttaaaaaaatataaag

SEQ ID NO: 692168 - DNA, 609 bp, Homo sapiens
agtttcatttgtctcttctttgacgtcttggattctcaaatcccatcttccagcttatctttagaatattctttctgacactgcttcccactaccctcaacattctgaaactatcatttcaaaatacctgctcagggttttttgagcaagtgctgtgagtatattggttattattakaccttggcttgatttgatttgacttgactcactgatgtcataggtagactacagtccatgaaacttgactgtaggcatgacttcatattacatgcataacctatataatagggttagttttgtcacctgtcacactcctgttgcatttttaacagtaataatgtgatttagaaatttccctaatagatagtttattttatttaggacagaaaacttactctaagaatacactctcctggtccttcatttgtgaattgatcaatggcattaactatctataaggaggctttgataaataatgaagctcactgtctaaaatctctaaggtctgagtccaccaaatatagtattaccaagagtctctagtcaaggaaatgcctatgcacaagcatgagcgcttgtaaaatggatactttttaaaaaaatataaag

SEQ ID NO: 692169 - DNA, 607 bp, Homo sapiens
cttaacacttactggcagtctaggtcaatatttgtcatccttgttttccaaaaagccatttatacattcataataaactcatgtatctgagatcctctatacctctctctcaattgatattctttgatacctcagtgatatccccagaggccaaggcgttccacaaggtagaaaaataaacaagcacaatcwatttgtgcattaactcaaaaggattctgaaagatttaaagtcccctgggaacatcacacaccagggcctgtcgggggatggagggaaggggaggtatagcattaggagaaatacctaatgtagatgacaggttgatgagtgcagcgaaccaccatggcacgtgtatacctatgtgacaaacctacacgctgtgcacatgtatcccataacttaaagtataataaaataatacaaataaaaataaaaagatttaaagtcccctggaccttggtttggttgaattttgtgacatgtactttggggaaacctggatatcctggtttctaattttaacaattcatgattaatgagggccgatcacggtggctcacgcctgtaatcccagcactttgggaggccaagacgggcagatcac

SEQ ID NO: 692170 - DNA, 607 bp, Homo sapiens
cttaacacttactggcagtctaggtcaatatttgtcatccttgttttccaaaaagccatttatacattcataataaactcatgtatctgagatcctctatacctctctctcaattgatattctttgatacctcagtgatatccccagaggccaaggcgttccacaaggtagaaaaataaacaagcacaatcaatttgtgcattaactcaaaaggattctgaaagatttaaagtyccctgggaacatcacacaccagggcctgtcgggggatggagggaaggggaggtatagcattaggagaaatacctaatgtagatgacaggttgatgagtgcagcgaaccaccatggcacgtgtatacctatgtgacaaacctacacgctgtgcacatgtatcccataacttaaagtataataaaataatacaaataaaaataaaaagatttaaagtcccctggaccttggtttggttgaattttgtgacatgtactttggggaaacctggatatcctggtttctaattttaacaattcatgattaatgagggccgatcacggtggctcacgcctgtaatcccagcactttgggaggccaagacgggcagatcac

SEQ ID NO: 692171 - DNA, 624 bp, Homo sapiens
tgtttctatcacaagtaatattttaaaggtaggtattaattttgaagtagaaatggactctgtttctgtcacagtttctatctcaaagattttctttactctgtgatgatttgcttctgaatactgggaacctgaaagataactagaagggaggggcttgcaatcataattacggttgaaggcatggattcaagtttctaaattggaattagaaaaccattgcatacagtcctgaaaacaacaggactcaaactagttgatgagaagyttaccaaattataactgaaatataaaaatgcagctgtgtggatcaaccaaaattcaaacagaagaggtaaaaaatataagttcaaatacggggacaaccctgaaagcctgatgctgaactaacagaaatatgtagcagcaacttgtatcttatagggagaaatgatcaattgtctaaaagcattggcaaggtaagtctgaaaaggacaagtggatggacgggttcctctaacctcattatttcagaattcagccaggccttgcaataattattgtgccccagttttgaaatgtttcacctttgtttccactccatgagtgagtataagaagggactcattatgggataagtagata

SEQ ID NO: 692172 - DNA, 624 bp, Homo sapiens
tgtttctatcacaagtaatattttaaaggtaggtattaattttgaagtagaaatggactctgtttctgtcacagtttctatctcaaagattttctttactctgtgatgatttgcttctgaatactgggaacctgaaagataactagaagggaggggcttgcaatcataattacggttgaaggcatggattcaagtttctaaattggaattagaaaaccattgcatacagtcctgaaaacaacaggactcaaactagttgatgagaagtttaccaaattataactgaaatataaaaatgcagctgtgtggatcaaccaaaattcaaacagaagaggtaaaaaatataagttcaaatacggggacaaccctgaaagcctgatgctgaactaacagaaatatgtagcagcaacttgtatcttatagggagaaatgatcaattgtctaaaagcattggcaaggtaagtctgaaaaggacaagtggatgracgggttcctctaacctcattatttcagaattcagccaggccttgcaataattattgtgccccagttttgaaatgtttcacctttgtttccactccatgagtgagtataagaagggactcattatgggataagtagata

SEQ ID NO: 692173 - DNA, 651 bp, Homo sapiens
tatagtgtgaactctttctcaaaacaagcatattacaaaagtttggtgaatgttgttcctttcatgtaatacatctgaatgaatggactgaagtgagttctcagaaaagttgttgatcattaaaaaggctggaagtgcacacacttacttgtctttcatgaagcagggataaggaattgcttgaacctggactgctatttcctgggagttccttccagtttgcaattcaatgattgctctttcaatactatcctgtaaataaataaaagccctgccatagatctggttgtgtgatggagaattgtgtggccctggagcccaaatcttggttcttaggcttcttgtggtctgtgcggtcttgagactcatccggatggtatattttatgacaggaggaagaaagacatttccagagtcatagcctctgtgccagcttctgttagaaggaagcttaaaaataacacctaaaaataaaatggcaacaacagcagaaaggttattttatggttgacgttattcattgtttggagagtacacagaggggacagccaaacagtcaattgagttartaatgtgacagtaggttcaggttcttaatttacagaaaacatggttaattggaggtgtcaacctcagaaattcaaagctgga

SEQ ID NO: 692174 - DNA, 591 bp, Homo sapiens
ataatccattaacccattagtccatggatggattattccattcttgagggagagtcctcatgcaatcatgtctttttttgttttctctgagacagagttttgctcttgttgccyaggctggagtgcaatggtgcgatctcggctcggtgcaatctcggctcactgcaacctctgcttcccaggttcaaacgattctcctgcctcagcctcccgagtagctgagattacaggcatgaaccatcttacccagctaattttgtatttttagtagagatggggtttcaccctgttggtcaggctggtcttgaactcctgacctcaggtgatcctcccacctcagccccccaaggtgctgggattacaggtgtgagccaccacacccagaattcaatcatgtcttaaagaccccacctctcaatactgtcacactggggattaagtttcaatgtgagttttaaagggtacatttaaaccataccactatgggatgtaggttgttttgatgagggacagtctcaaaatgggaggaagattagaatatatatatatatatataataatacaaagaaaaggcttatctatgtgttaacc

SEQ ID NO: 692175 - DNA, 636 bp, Homo sapiens
aaggagcaaatgtggaggatgagtggaaaataaagactaatcattaatctgtcatttcccaaatgaaaagcgatcaaaacaggaataggtcaaaattattgtcctgtgttgttgccctgttatttccaagaattgttagtttgtcatgaagctctgtgagggcagaaactaactttgtgtccctcaaagtacttagtacaatcgacttcactcttgcaaggtggacttaaactacttccctttcctctaaagtgaatgcaaacccaaactatactttcagataaacatatattccttctatcctttcccctcttttaaatctttattcagatgtcacctcaatgaagcctactttgacaccctcrtatttaaaattgcaacccatctttctttttcctcccatcatcaaacactcccaatatcattcatctctacttttcctcgtttttaagcatcactttgtaacaaaactatctaatttacaatttattgcatttatcctcctccctgcttgagtcaaagctattccaggtcagagatatctttgttgtgttcactgattaatctaaaacacctaaaatagtgttgtgccattaattaggaatgcaaaaaattgattaagttagtgaatgctta

SEQ ID NO: 692176 - DNA, 642 bp, Homo sapiens
ggcaaataaaaatcttaaatgactaataagaaaaattaaatccgcttatctttttgcttagttacaatactgycccaaagacaaaaaagaaagctatcctggataaaaagtttatataaggtaggccctacagctgggtagaaaaccaagtaggctctcacggtacctgatttcaggacttggtttttagatggcatttctggacttgccttaggccagaagggacctcactgctctaaagggtgagtcccaggccaggcagcattcaacacaagctgactgaagagcccttgagcctaaagggaacatggtggtagtctggcagtactccctgtgggcctgaggtggccgtggccatggggtgaggctcgctgcatttggaaaggggagggaagcatgggaagcgctgcgtcttgtggtttgagtgccagcttagccacagtacaatagaacaccaggtagacttctaagatttttgactctagtttctggctcctgaatggcacctctggaccctcctggagcttgggcttggagaaactcatcaccctcaagggaagaacataggcctggctggctctgtcaccagctaattgcagatcttcagggccttgaatgaacatagctggtagccaaagagtg

SEQ ID NO: 692177 - DNA, 635 bp, Homo sapiens
tgaataacttgagtgactcagaggataaatgaaaatagaacatgcacactcttaatactcaggaaaaacaactggataacattttagtaagtttccttcttattttttttctattttttcatggttgaacaattaccctttatacaattttctacactatcttttcacttaatattagctacttctgctcttaattatttttatttaagaagcaatatagatccataataaaaccaacataaatccatgataacagttcaaataacatgaagaatggagaataaaagtcctcttcaactctgatcttcatttccaaacctctagggagtaaccacggctaacagttgaggtacctgtattagtttcctattgctaccataataagtaacyacaaatttagtggcttaaaataaagcaaatgtattacctggcacctctgaaggtctgaagtccaaattggattggtagagctgtgttccttctgtagactctagggaaaaattagtttctttgtcttttccagcctctagaagcaacagacatgcctttgctggtggcccttcatcactgtgaccactggtttggtcttcacatctctttctcttctctgacccccttgccctcctcttaaaaga

SEQ ID NO: 692178 - DNA, 1083 bp, Homo sapiens
tattttagaccttttcagcattgacatggcattgtttttcctttcaaatgtggaatcaaaaattgtgtatactaccttactttttaaaagaccgaaaaaatatctggcacagtggctcatgcctgtaatcccagcactttgggaggctgaggtgggcggagcatttgaggtcaggagttcgagaccagcctgaccaacatggtgaaaacccatctctactaaaaatgcaaaaaaattagccagatatggtggcccacatctgtaatcccaactacttggaaggctgaggcaggagagtygcttgaacccaggaagcagaggttgcagtgagcccagattgcctcactgcactccagcctgggcgacagagcgagattgtctcaaaaaaaaaaaaacaaaaaacaaaaaaaaaacaacaccaaaaaacaaaacaaaacgaaaaaaacaggaaaaatatataaagcctccattttttcttaatattactgaaagtatttctatatcccgagctagtctaaagtaaagtatatcttttaggtaaaattaatgacacaattaaaacttttaaatactgagtacaaagtgcaactctactagttatgtcataactgtaggggtagttttagaattcagacaagcagttagttatctgaaaatgtttgatatctgtggaacatcaatgcatttcacaaaatctcactttaaaaactctctctaaaatcaagaattaaagacctgcttcgttctctcctcaccctctttctttatctatttcttcttctctgttttcaatattctctttcagtattggcataggtttacaatcttaaccacacactgtcagtatctattactctcagtatataaaattttatcttattttagccagagaacacagaaatagacagttagtataacacaataaatttttattagtgaactaattctccaggctaagactgggatattgttaaggttttctaccttccatgacatcctgctatgctataaacagatgcattttaaggaatgaaaaatttatatgtttattttttttttcctttctgtgtggtaaaaccttat

SEQ ID NO: 692179 - DNA, 669 bp, Homo sapiens
caacagcctttcaaggtaggaatagtcatttccattttccatgtgaggaaactgacgtgtttcctcatgcagcaactcattctaggttatgctgctagcaaatggcagactagggattctaacttccaaatccatgcccctgaatcctgccagaaaactcattgatatcagcaacacttctctctgcccagcttcttataaatatgaactattgccaaagcccagctccaatgttatgtcttctggaataaccacctgtcataatgcatctgttattctctgttgggtcagcatggcagggtcttgaggcagaattatattatgttatgagtgcatactcagaagtccaactacctgggaacaaatcctagccccagcacttaaaarctatgtaacctcatcactcaatttcttggtgcctctgtttcctcatttataaaattgggtcggtaagagtccttatcatgtaggtggttcatgaacacttagaacaggacctagtgcacagtgaacattcaacaatgatagctctcaaatgactctcaggatgtgtcaggcactgctctaagtactttctgtgtattaacatttaatcctctcaacacacttccaaggaaaatatgacttttgtcctcattttacagttaagaaattgagacataaagaggt

SEQ ID NO: 692180 - DNA, 669 bp, Homo sapiens
caacagcctttcaaggtaggaatagtcatttccattttccatgtgaggaaactgacgtgtttcctcatgcagcaactcattctaggttatgctgctagcaaatggcagactagggattctaacttccaaatccatgcccctgaatcctgccagaaaactcattgatatcagcaacacttctctctgcccagcttcttataaatatgaactattgccaaagcccagctccaatgttatgtcttctggaataaccacctgtcataatgcatctgttattctctgttgggtcagcatggcagggtcttgaggcagaattatattatgttatgagtgcatactcagaagtccaactacctgggaacaaatcctagccccagcacttaaaaactatgtaacctcatcactcaatttcttggtgcctctgtttcctcatttataaaattgggtcggtaagagtccttatcatgtaggtggttcatgaacacttagaacaggacctagtgcacagtgaacattcaacaatgatagctctcaaatgactctcaggrtgtgtcaggcactgctctaagtactttctgtgtattaacatttaatcctctcaacacacttccaaggaaaatatgacttttgtcctcattttacagttaagaaattgagacataaagaggt

SEQ ID NO: 692181 - DNA, 649 bp, Homo sapiens
caggtgccatttcaggaaattacacgggaatttggctcattatccatcttgctaagctgccacatcgtaaagtcacagactattaatagaataccattgataactcagagtgtgcaggtagagttcctccatgttgattgtcgtacacattgtctccagtttctgaagtagccatgatttgtttgtgttttaaggtacactgttttcaaagaacagcctttaaagctcttttgaattcaaagatctttcagttactcaaggaatgggtccagttttcagattctccacgccatgggtgcatcttcccttcagctttcttcattttggtcattgctccagatgttcattgtttaacacaagtgggtagggagacggagaagaagggaatttcaggctcatattttggtgtmatgggcagatcttgggtgaggttttcattgttagttaaactaagtttgaaggtttacactgaatttctttccctaccgtcctctttggctacttaaatagatcatcaggactgtttgttcttctgttgaaagtgccccacactgccctgggcataagctaaattctttctctcccttttagaagagaagccagattgctccaaggcccgctgtgaagtccagttctctccacgttgtcc

SEQ ID NO: 692182 - DNA, 1461 bp, Homo sapiens
tatattttcttttgttaaagtctttttcatttttctcaaaaatatcattttatatagagttttcaaatattatcttagatttatgttttataattgttctttttgacacaattgcaaaaagcatcctctgtttgcagctgagaattcttatttctcttaaatttattggaccctgtaaaaaaataataaagttttcaattcatgtttatacaatttgaagaaaaagtaatgtaaaactcagcttctacctctaaagtttcactaactctgaatttgtgcattcacctctaatatatgaatataaatacttttcataaaatttgtgactcaaatatttttattttcttaaaataataacaaccatttataaccatagcaaacatttattgtttaattgcaatatgctaagtgctgtgccaagcatttaacatacgtaatcataattaaccttaaaacaaacctatgatttaaaattcataattatgttcatttcacaggtgaggaaactaagacatagactattaatatctgtgataccatatcaagttagggccagagctagatgagtgattcaagcctttctgactataacacaaattagtttaaatatgatttaatttattctaattaattgtaggatttagcatgattattgattaaaacagtcccatacttcactattatgtgctttaatttaacaaagactatttataactcatcttgtatgagggattttattattttaatcaattgttgatggagctcaaatatagattaaaaacacattctattacattgaaaaaacaatttaacatcattataaatgagctaaccaaggattgctgacacttgccaaataacattacaaactgtgttatctgcttagtgtggatacaaaatatattacttcaaatttgcttcaatggatatgttctttagtgcaaaacagtgtcattttaatgagaccaaaatattctctgtatttctttaaaatgaaaagatatttttgctatatttaagttaaaattaacattaagggttataagtataacatggccatcaaaagtgtaatggaatatatgtgtaatggaagagtaatagagtagatgcctgtacaggcatatcgaacatttgacttccttcatggyatttataaatacattgctttctctcttgaaaattttaatataaattattaaaattatttttatttaaatgtatttcacaggagaaaatcagcctttttacaccagttaaggatttgccacatccattattttaggaatttcaatagcccacctgatttttaccaaattccaagccatataaccaaaatggagttcacaattctgcacatgaggaaaagaaaattacttagactatgtggggaatagtggtacctacttcagtttggagtgaaatattttatagtaagaagaaaacttcatggtttaattcact

SEQ ID NO: 692183 - DNA, 593 bp, Homo sapiens
atatatatatatatgtatatttactgatgtatacatacacaaacgcacacacaatagatgtgttcaccattggtctgttgacactttggtttcttttcatatcttggctcacacttgttagaatggctgttatyaagaaaagaagcaataacaagtgttggcgatggtgtggagaaaaggaaacccttgtcctctgttggtgggaatgtaaattagtacagtcattatggaaaccagcatgggggttactcaaaaaaattaaaatagaatgggggtggaattacagcaaattatttcattttatattacatcatcaaagtagaacaaactgttacatattccagcaatcccagttttgactatatacccagggaaatgaaatcagcaccttgcagagatgtctgtatgcccaggtatattgcagcattatttgctgtttcttaagccaaagcaaattatagttggttatagatttaagaacaggagattcctatatataaattcaatagtaataatattttatttcctggaatttttaccttaccaccccagccaagtgaaaaataccaagcctcacaactgtgatattttag

SEQ ID NO: 692184 - DNA, 1039 bp, Homo sapiens
atccttgcctattcccagctgctggtggccactgccaagaccttggcatttcttggcttgcagctgtgtcactccaacccctgcccctgtcatcacatggcattctcccctccatgtctctgtgtcttcacattgtcttcttataaggacaccaagtcataccatataaagagctcaccctactgcagtatgaccttaccttcacttcttccagctgccaagacatgacatccaaataaggtcacattctgaggcactgagggttaggacttcaaagtatcttttttggggacacaattcaacctacaacagtttctatagattcaaaataatagaaaactgcttctgaaataattctgtaatgtagttttgcagtatagtgagaacaaatgtgtttagaattcttcatttttcttcttttcatcacattcttttttcttctgtattaggtctgggtcttaaagttaatttgtcatgagtgctattctactttatttaggaaattttccttcatataaacatttaaatttataagactgtcaccactagtcaagatrgaataatagagaccatatttatcctactgcatgaaaacctaaaacaccagacaaaacaaatgaaacatttttttttgaagacattggacatcaaggaacaaaggacaatgatccttgagaaattggaaatgaataaggtgagcctgcaaccaagccccacagcttacaacttgggagagcttcccagacatggcacaggtaatgagaagccaggcagggcaaaccaaacagttgcctgagttgaggagaaagacctggggatttcccagctgaaacaccatttctaatagtcatattaactctcaacttagtttcttgtttgtgtattttaaagttcttaataattatttttaatccataaaactgatattctgacaatcattgtcaattgttagtgtgccgtgttagtcttataatatttgcacatttttactatgatagaatttcagaatgtaaagaatttttttcttgctaaaagttat

SEQ ID NO: 692185 - DNA, 1039 bp, Homo sapiens
atccttgcctattcccagctgctggtggccactgccaagaccttggcatttcttggcttgcagctgtgtcactccaacccctgcccctgtcatcacatggcattctcccctccatgtctctgtgtcttcacattgtcttcttataaggacaccaagtcataccatataaagagctcaccctactgcagtatgaccttaccttcacttcttccagctgccaagacatgacatccaaataaggtcacattctgaggcactgagggttaggacttcaaagtatcttttttggggacacaattcaacctacaacagtttctatagattcaaaataatagaaaactgcttctgaaataattctgtaatgtagttttgcagtatagtgagaacaaatgtgtttagaattcttcatttttcttcttttcatcacattcttttttcttctgtattaggtctgggtcttaaagttaatttgtcatgagtgctattctactttatttaggaaattttccttcatataaacatttaaatttataagactgtcaccactagtcaagatggaataatagagaccatatttatcctactgcatgaaaacctaaaacaccagacaaaacaaatgaaacatttttttttgaagacattggacatcaaggaacaaaggacaatgatccttgagaaattggaaatgaataaggtgagcctgcaaccaagccccacagcttacaacttgggagagcttcccagacatggcacaggkaatgagaagccaggcagggcaaaccaaacagttgcctgagttgaggagaaagacctggggatttcccagctgaaacaccatttctaatagtcatattaactctcaacttagtttcttgtttgtgtattttaaagttcttaataattatttttaatccataaaactgatattctgacaatcattgtcaattgttagtgtgccgtgttagtcttataatatttgcacatttttactatgatagaatttcagaatgtaaagaatttttttcttgctaaaagttat

SEQ ID NO: 692186 - DNA, 1917 bp, Homo sapiens
tagtgttcatgaaaacagatctgatttcttattaagcacataaatcacaattaccaggctggtactagaggggatatgctagctttgtgatttctggatttggattcagattttaaatgtacctctgctgattaatagctatgttaagtcattagcctctccaacacttggtgtctcttctataaaatgaagataataatatctaatgtatacagttgttcttaggagtaaataagataatgccatgaaccattaatctacagtaactcaatgtatggtagattttcagcatcctttcttgaaacttcctcaattccaggggtcttatcacactgatttagcaacctcactggatgatgtcatttaggctgggggtcacgaggctaatttcccaaaatgaacaccaagtaaattgaaaagacaaatttttatccacttcaggttctgctcaccttttaatccttagtttcttttaaatacacttggattttatttatttctggcctcacagatgttatcttaggtgggacttcaaaaactttttaaaacataaaattaaatttggaaatagctacaaatagcactttgacagagcttatttctttttttctcattaaaaatgtatgaatacatatggagagtgtttctttttccttaatctttttctggtgttaaatatcttcagtaaacaagaagaatatatatgattttcatctatcacttctaagtatctgtgaaattgcaggatatgacactcacacttaagtcatagttgggattttcacataaagatataaagctacatatattattattactaataagttgtaagttgaaataaattggatcctgtgaataatggtcctatgtgccaaaatatatttaaaagtaagtagatcaagaaaagagtttctctccacatgcttgttgatttgccttctcttacaggatattaaaacaaattttaaaacatattctcgtctaatagtcatattccatattgtgatcagctaattaaactacctatgttttagtaagcatggaggccaagtctgcactaacaaaatgtagtgttattaaaatctaaatcttagataaattatgtttatgtaaaaacaatttcagattatttaaaaatgtgcttcttaatgcaatgaaaaaataaaactaattctattgatactttttagaaaagttagcagattataagtggtgataaactaacataagataaataaataataatctatagtacaccataatccttatcaataaattgataataaagtgtcacatcctagctaagcataggttagaaattatttgttcttccctagagaacagaaccataacagaagcaaatgaaggtcattttacatcaaaatgatcaatttggcttctctgccatcagtcgaatttgggatgcttaaacaccattattgatgtgttcaaccaagagttgcagcttagacaggggcctatgtcaacttaaccatgattttgcaacatttggctaaatttagcataatgtgaaaactcttgaatattagcactatatctctggattcttgattccaagctctttttaaggataattattttgtgatgaagaataggaagattcctttggtacaacctggctaacaattgcaacaattgcattagaaaattagttgtataccctatgcttcctttaccagcaatgacaataccgtaaatattggctacttgtcctcactaccatggcarctacccattgtggctaccattcttgattgcagtttttcctatgaaggagaaaaggctagtagatgtgaactgcgatgctttgaataatactcagactccttataagtcttggcatgatctgactcttaagtctctttccaacttcatcttatactacttttcctcttc

SEQ ID NO: 692187 - DNA, 596 bp, Homo sapiens
ttaattttttttattttgtttttgtacagacaatgtctggctctgttgcccaggctgatcttgaactcctggcctcaagccatcatcctcctttggcctcccaggtgctgggtttacagggtgactcactccacccagatgtggccaaatgaatttctaatggattctaatgtctttttcacaggattaaatcaaacaatacatataaataattaagattagggccaagtacatagtgcataataattattggctacaatggggttaaaggaggaaattttaacrtggcatagaaatttgcaccttgaaattcagcctttttatctcattgctcaggaaacaaatgttcagagcatgaaatcacttgatcaagataattcatgtgatctttatttctcttcataagttactattatgaaatgtgctatttattaatcatctgctatgtaacaggtgttccacaaaagtccgggtatagagtaatgccctcacaaaacttccttatagtgtcacacattctgggtctaaaacttgaattaaacccatttaagatttaattacatcaaatattaaaaagtgttgatactcaggtttag

SEQ ID NO: 692188 - DNA, 618 bp, Homo sapiens
atttgtaacagccatgtgttagagttctccagagaaagagaacaaatatgtgcacacacacactctctctctctctmtatatatatatggagagagaattttcaacccagaatttcatatccagtcaaaataaacttcataagcaaaggagaaataaaatcatttacaaagaagcatatgctgagagattttgtcaccaccaggcctgccttacaagagcttgtgaaagaagcaccaaacatggaaaggaacaaccggtaccagccactgcaaaaacataccaaattgtaaagaccatagatgctatgaagaacctgcatcaactaatgggcaaactaacaagctatatcataatgacaggagcaaattcacacatgacaatattaaccttaaatgtaaatgggctaaatactccaattaaaagatacagactggcaaactggataaagagtcaagacccatcagtgtgctgcattcaggagacccatctcacatgcaaagacacacataggctcaaaataaagggactgaggaatatttaccatgcaaatggaaagcaaaaacaaaagcagggcttgcaatcctagtctctgataaaacaggctttaaaccaacaaa

SEQ ID NO: 692189 - DNA, 636 bp, Homo sapiens
tcaaaaatgagaaagcttttgggagcttctttttatcttaagtgttctgaaatttcaagacagtatgcctgggttctttttaaattccttttgctggatactcaggtttcaaatcagaaggtttatgtccttcttcatttctgcaaaattatcttcaattatttcttgtactatctawtcttcatctgtgttcttactgagataccgaatcatctgaatttgttccttttttgtatttttttctttcttcatattttataagaattattcagctttattttaaagtcctatttttattctctaagtgactattcttgtatttaactttttatagcatggtctacattttaatggttgtcatatatttttgaatgtttatttacagagcatcacttttaaaattgttttctttccataaattgggtctgtttgttttggaacaagcttttccatgtatttttctttttcactctctttagtgatctccagctgtcaattcatgttgtagaaggacagtgatgttggtcacagattccccaaatgctaaggttaggtgagaaccagcatactcatcaaagatcttcattttccccaaagacaaaatgcagtgcttttagaaaaaaattaattactttt

SEQ ID NO: 692190 - DNA, 682 bp, Homo sapiens
tatacacagattttgactgtgcaggggatcagcgctcctaacgcctgcattcttcaagggttacctgtattcttgatacaagttctccttcagatttaagtattatagatatttttccagtctatagcttacctattcattttcttaataatgtcttttgattgatttttaatttttaactttggtgaattccagttgtatactttttttatgattagcatttttgtgtcctatgaaactgttgccttcctcaatgtcactaaattctcttaggttttcttctagcaagtttatgtttcaaattttcacccttaggtctataattcrtcccaaatttatttttgtctgtaaagcaatgtcacgattcattttttttctcaatataattacccagttgtttcaaaactggttattaaagtttttctcttaatcattgaattttcttggcaccaaattattaactcttgacaaaaataattgacccttaagtaagcagacagacaagcagtgcttctattttatagcaatgtaaataatacacaacttacacaaagactttttagaagctaactaacagtggtcctatctaagtacgtacaccagattttttataaccacttttaaaataaaagtatttagattttaacacatagattaggacagagaaagcatatggtggaat

SEQ ID NO: 692191 - DNA, 682 bp, Homo sapiens
tatacacagattttgactgtgcaggggatcagcgctcctaacgcctgcattcttcaagggttacctgtattcttgatacaagttctccttcagatttaagtattatagatatttttccagtctatagcttacctattcattttcttaataatgtcttttgattgatttttaatttttaactttggtgaattccagttgtatactttttttatgattagcatttttgtgtcctatgaaactgttgccttcctcaatgtcactaaattctcttaggttttcttctagcaagtttatgtttcaaattttcacccttaggtctataattcgtcccaaatttatttttgtctgtaaagcaatgtcacrattcattttttttctcaatataattacccagttgtttcaaaactggttattaaagtttttctcttaatcattgaattttcttggcaccaaattattaactcttgacaaaaataattgacccttaagtaagcagacagacaagcagtgcttctattttatagcaatgtaaataatacacaacttacacaaagactttttagaagctaactaacagtggtcctatctaagtacgtacaccagattttttataaccacttttaaaataaaagtatttagattttaacacatagattaggacagagaaagcatatggtggaat

SEQ ID NO: 692192 - DNA, 682 bp, Homo sapiens
tatacacagattttgactgtgcaggggatcagcgctcctaacgcctgcattcttcaagggttacctgtattcttgatacaagttctccttcagatttaagtattatagatatttttccagtctatagcttacctattcattttcttaataatgtcttttgattgatttttaatttttaactttggtgaattccagttgtatactttttttatgattagcatttttgtgtcctatgaaactgttgccttcctcaatgtcactaaattctcttaggttttcttctagcaagtttatgtttcaaattttcacccttaggtctataattcgtcccaaatttatttttgtctgtaaagcaatgtcacgattcattttttttctcaatatarttacccagttgtttcaaaactggttattaaagtttttctcttaatcattgaattttcttggcaccaaattattaactcttgacaaaaataattgacccttaagtaagcagacagacaagcagtgcttctattttatagcaatgtaaataatacacaacttacacaaagactttttagaagctaactaacagtggtcctatctaagtacgtacaccagattttttataaccacttttaaaataaaagtatttagattttaacacatagattaggacagagaaagcatatggtggaat

SEQ ID NO: 692193 - DNA, 664 bp, Homo sapiens
ttcagccttggctgcaaaaggaagatagctatatttaaggcttgttgtgattcaggtacagttaccctatccacttgtttgcattatcttctttaattttcacaactgtattttgaaatcagtattatcattcctcattacagataaggaaaatgaaatagaaaggttaaatactaaatacttggtaaacagtaggaaaggacatcgttgattcaggagagactggtgagagagaaagagaaagaaagggtggagggaagaaaaagaataaaaggagataaagtaaatttgaaattttaacagaaagaaaaactgcagttcccaagatatcactagaaacttgtgagatgagagttctgactggtacataacagtgacagaatctaaatttaaaatgaatggagaaatgaagaaaaaccatcaaatagcaaggagctatacttgcatggaattccataaaaatgattataaaagatcactgatgaacattgagtaaatccaaaaagaagcaagacaaacgaaatatttcttataaaatggatgacaaatggtctagcagattttttaagtcctgtggataattatttcctaaagcaaattacaaagctgatgcagagccaagatagagtaatcatggraactcactagatgtcctattataaaa

SEQ ID NO: 692194 - DNA, 1167 bp, Homo sapiens
tccctgcctctaggaacttacagtctcatgtctgagattatttcagggcaccacatggtgggttcaggtacaggttctggtgtcaaatcacctggaatcaagtttctgctctaccacttcccagccagaagacctcatatgaaccattttgaatcgatttgctccctctgaacttgtttctgcatccttatactggggataagattactattttctgtgtatggttgtttaaatgagatttggattcacaaatgtaggtgctgctggctatggtggtggcagctttctcttctcttctgaactcactgtaagctcctccggggaaaggcctgttctctactcctcctgtgtgtctctcaggtccactctaagctgcctctgaagctggtactctgtaaatacctgttgagtccttagggctactgaattctgattcagtagctctggcgtgggacctgggattctgccttgctagcgtgtcccaggtaagacccatgctgctggtctggggatcacactgtgagtagccagagactggctcatcctctcgccttgccctacagtttttcataactgaacaggaagtgttgttatctcatgcaaattcagggttgttagagcgtgagctcagcatgcactcagctaaacttcagagattccaaacaaacttttttccctcctagaagaagctgaagttttgctagatatgctttagccaggactattttaaatgactcagcggcagtaacattgaagcttcagccctaaagactcttccatgygttagcttctcacctggggcaagttgtttaatctctcttggcctcggtttccttgtctgtagtagggggactggtccatttgggggctgtgaaatgatgcgtggaaatcaccctgctcgaggtcaggcatatggttggttttgataaaggagggcttctgttatagacctggtatttcccatcagtccagatcttcagatgctggagtgaaagaatcagtgctaagggaagtgctggctctgaggaaccaagggaaggttaaagcatcacttacagctcctcccttcttctccctgcacgtggagggctagacggaatgcttgcaaaactaaaagcaattatagcacagttttaaaagttcattggcatttatggagcatctaga

SEQ ID NO: 692195 - DNA, 1476 bp, Homo sapiens
gtacggacacattggaccattttaatgccagtgagtgtggccagatttactgcctgggggctgggggtgaagccagcagccttgagcattctattgaacacacccttggtatccacccagaaattcccaacaactcccagtggagatgcaggacaacagtgcgtgtggaagtgccatgcaaactgcagccctaactaaatgtgagcaacagtgatccgttrctattactgatcattccttgggaggtcagggctgtctcctaaacagtgtgcctctctagaaagctagtagattggagattcagaggcacacttggctgtctgaagacatgtagccctggctctccgtgccacttcccgtgcttcctaggtgagctttgtaatgtttctcatctcagtttcccagctgggaagcaagaatgctcaccgtcctcaccctcatcacctgccattgttaacattggccacctgttcactctgggccacactctgctctcaaggacccttgcagatggagccatccaggctccccagagccctctggatggtgctgtgttcccttattcccattccacagatgatgaagcagagaggtgaacactgctcaggatgacatgggaggtacaagtgcgaggcttgggggcccacctggctcagaaagagctcagctttttttgtaatctccacactcaccagagctgctcctgcttggtccacctgagggccagctttggagaagagaaggagggtagagagcaacatgcacctcagcctaggtttgtccagcccagcagaaaccactgtgcctagcctcctggcttctgacttgtgccgtttcccctcctcccatgcctttttcatacatacacccctctctcacacacacccctctcgcatgcacacacgcacagacacacacagagagcccagcatccccaccctacactggttttagtgctcctcctctgtgcttccaggcctctgtgcgtctctcttgtagagcgaaccccgagaccagctgctgtgctctgggcatgtctagaagtccatgcctagcacaaggatcttctcctcctacaggagatgcctataatgatatttgacttaaattaactggtccttaggaggaaaataaaagggatgtagtttggattctgcatatctattcactgattagcaagatgcactctgagcagtgggactgtgtgcgtgtgccatgtagcttttcatttatttattttcaaagtggtggtattctttctaggaaatacaaccagaaaaacaatgacaggaaatatttgcaaattacttgacaaatataatattaggagaattgctattggcaatatgagtgaagggatgaggtgcattgctatggaaactaaaggaaatgcaaagttaatattggccaatcatacaaagtcagagtcctccaataaaaggccgtgactcattccactgcatttgtcatctaaaa

SEQ ID NO: 692196 - DNA, 1613 bp, Homo sapiens
  misc_feature 824, 825, 826, 827, 828, 829, 830, 831, 832, 833, 834, 835,836, 837, 838, 839, 840, 841, 842, 843, 844, 845, 846, 847,848, 849, 850, 851, 852, 853, 854, 855, 856, 857, 858, 859,860, 861, 862, 863, 864, 865, 866, 867, 868, 869, 870: n = A,T,C or G
  misc_feature 871, 872, 873, 874, 875, 876, 877, 878, 879, 880, 881, 882,883, 884, 885, 886, 887, 888, 889, 890, 891, 892, 893, 894,895, 896, 897, 898, 899, 900, 901, 902, 903, 904, 905, 906,907, 908, 909, 910, 911, 912, 913, 914, 915, 916, 917: n = A,T,C or G
  misc_feature 918, 919, 920, 921, 922, 923: n = A,T,C or G
caggatttctgtttcaggtgatcaaaatgtgcccaattttattttgatgatattggcacaactctgaatctagttaaaaaacattgaattgtacactttaagtaggtgaattttatggtattatatttcaataaagctgttaaagaaaagtggctaacattaggttccatgaaaccagcagtactattcaagctttttaaaactaccaaataaaataaattgagataatatcttaacatttatgtaccactgctcattttgttcttaagttaggaaatgtccttcaagctacagcataaaatttgcagagaggcaccctgggctgccattagttctgtgtttgaaacttcagggaacgctatcctgaagaggtcaacgtctccactgacgtcccagcagcctcctgacaagttgtgctgtgaccgtcttccactcccatcttggacggcccagatgtgggctgtgaagccaccctcttctgtctgcacttcacgcttgcttcccctccatctgctgggtccagctcacctcataaccaagagtctaatgctgatggctcccgggaaccaccactttcttggcaagaaggatccatgcagtgtttctcatcaaggagtaaggggcgtgcttctgcatttctgttcacatcgtctttcttcctacctttctattgctttttcttgtttttgcctgcattccttttatttgcctatcatattttcttcttattttttgtttactttaatattagctcaaactccagtttcattatgaggctttccttggttactgtagtgtaccatgagttctcagttctctatttnnnnnnnnnnnnnnnnnnnnnnnnnnnnnnnnnnnnnnnnnnnnnnnnnnnnnnnnnnnnnnnnnnnnnnnnnnnnnnnnnnnnnnnnnnnnnnnnnnnnaccgtcttgcaccaccctggcagtcctgactgaggaacagctgtccacaccctggtcctctgcccactggctccccacaccccttcccacctcggaaagcacgtgctcaaatcctgacaggtgaggccagaactggcctttggcagcccccgtgactgatgcagggtctgtcccttctgcccatccctgtggtcttgggggcaggtcagagtgcccacctgcttttgcccaaacttctttwctttcagaaatgaagaagactaggtgtcgatcaacccaatgttcctctgtcccctggggagacaggagatcctatgtcagggttagaattaatggggaaatgggaaagttgcacttcttgagccctttagctattggtgcacaggtaactgtggtcaacacaaccctgtccccaagacaaggggaaacagctctctggttttgagtcaccaaactggggtatgggcaggcacatttggggcccgacaaacctctattttcatagctcccaccacggagttggtatggatttgatcattggtattggtttattgtctgtgtgcaccactgctagccttcactcccatgctgcaatggaaattgctgcagttatgtccatgttcctgccgcacgtggagaactctgaacctaccagattcataggttgccgctagtggcctggccatttga

SEQ ID NO: 692197 - DNA, 1613 bp, Homo sapiens
  misc_feature 824, 825, 826, 827, 828, 829, 830, 831, 832, 833, 834, 835,836, 837, 838, 839, 840, 841, 842, 843, 844, 845, 846, 847,848, 849, 850, 851, 852, 853, 854, 855, 856, 857, 858, 859,860, 861, 862, 863, 864, 865, 866, 867, 868, 869, 870: n = A,T,C or G
  misc_feature 871, 872, 873, 874, 875, 876, 877, 878, 879, 880, 881, 882,883, 884, 885, 886, 887, 888, 889, 890, 891, 892, 893, 894,895, 896, 897, 898, 899, 900, 901, 902, 903, 904, 905, 906,907, 908, 909, 910, 911, 912, 913, 914, 915, 916, 917: n = A,T,C or G
  misc_feature 918, 919, 920, 921, 922, 923: n = A,T,C or G
caggatttctgtttcaggtgatcaaaatgtgcccaattttattttgatgatattggcacaactctgaatctagttaaaaaacattgaattgtacactttaagtaggtgaattttatggtattatatttcaataaagctgttaaagaaaagtggctaacattaggttccatgaaaccagcagtactattcaagctttttaaaactaccaaataaaataaattgagataatatcttaacatttatgtaccactgctcattttgttcttaagttaggaaatgtccttcaagctacagcataaaatttgcagagaggcaccctgggctgccattagttctgtgtttgaaacttcagggaacgctatcctgaagaggtcaacgtctccactgacgtcccagcagcctcctgacaagttgtgctgtgaccgtcttccactcccatcttggacggcccagatgtgggctgtgaagccaccctcttctgtctgcacttcacgcttgcttcccctccatctgctgggtccagctcacctcataaccaagagtctaatgctgatggctcccgggaaccaccactttcttggcaagaaggatccatgcagtgtttctcatcaaggagtaaggggcgtgcttctgcatttctgttcacatcgtctttcttcctacctttctattgctttttcttgtttttgcctgcattccttttatttgcctatcatattttcttcttattttttgtttactttaatattagctcaaactccagtttcattatgaggctttccttggttactgtagtgtaccatgagttctcagttctctatttnnnnnnnnnnnnnnnnnnnnnnnnnnnnnnnnnnnnnnnnnnnnnnnnnnnnnnnnnnnnnnnnnnnnnnnnnnnnnnnnnnnnnnnnnnnnnnnnnnnnaccgtcttgcaccaccctggcagtcctgactgaggaacagctgtccacaccctggtcctctgcccactggctccccacaccccttcccacctcggaaagcacgtgctcaaatcctgacaggtgaggccagaactggcctttggcagcccccgtgactgatgcagggtctgtcccttctgcccatccctgtggtcttgggggcaggtcagagtgcccacctgcttttgcccaaacttctttactttcagaaatgaagaagactaggtgtcgatcaacccaatgttcctctgtcccctggggagacaggagatcctatgtcagggttagaattaatggggaaatgggaaagttgcacttcttgagccctttagctattggtgcacaggtaactgtggtcaacacaaccctgtccccaagacaaggggaaacagctctctggttttgagtcaccaaactggggtatgggcaggcacatttggggcccgacaaacctctattttcatagctcccaccacggagttggtatggatttgatcattggtattggtttattgtctgtgtgcaccactgctagccttcactcccatgctgcaatggaaattgctgcagttatgtccatgttcctgccgcacgtggagaactctgaacctaccagattcataggttgcygctagtggcctggccatttga

SEQ ID NO: 692198 - DNA, 686 bp, Homo sapiens
tttataaacattaatataaaatgattttttctttctttaagccattcatgtgttctacataaactgagaaaatattcccaaggataaatataatttgtgctaaataatctactagrgcccttgagaacaatttataagctaatctttattttttcctttacctaagaaataaaaatttaacattaaaacactttataattctcaagtttaaaaaacatatatttgaaagcttcaattcagatatatgtacttaatacattaaattttaactacatataggtaaaacaacatctatgtaatagaatatttattcatatatatataaaatgtaaagtccatctgaaattactcagcttgttacaaaatcagatgtttagtagttattgttgtaagaataaatctgatagtgtgagcacagactagactcaaagatagattcatttataaaaatagatttgagtctctattgtgtgctagaaaatgaaaaacaaataggtattaggaaccaatagtaagagagacaaataatctactactgtcattgaaaatgagcttaagtttacaccctaatttttaggataagaaggccacagacaatagtcaaggggcactaagaataatgggaaatagtctgagtagagaaaatgctcagaccacatatgtaccaaacacgtaccacatcatat

SEQ ID NO: 692199 - DNA, 1991 bp, Homo sapiens
tgcagtgtctgtagttatatgaactattgtatttcttatattagcaatttgtctttactcttgaattttctcttttgtgagactttctaaaggtttatcaattttatcagtcttttcaaagaacttttcctttgaatttaaataattatttctccttatttatttatagcggttttcatttacatagaaccctcaaatgtatctacactatgtaaaccacactgtaatgccatactagcaacactattttgtgagactggatgaatacctctagtaccataagtaattattatcctgtgtaatgcatctcagccagatgcattataccacattctatgtcatattaatgagggtctacatttttattaattattctgccacattttaagtcacagtaaaaagaaaatattatatcaataaatgaggctttattcacacagcagaaaatatgattttatgaaacaatttatatgcaactctctcgttatatttaaccaatgttttaatttacaaaactacaaagtacctttrtcttttcactatggctttttgtaaagatttcaagtatttctgatgaacagtaattttttcagtgtctacttaatgtcattttcaacatagttttagggacatattagtgtgtaaaatagtatttttagaattattattaataattactattattcaagctaattaccattactattaataatggtaatcatgctggtgtcatatttagattgcaactgacaactgaatttaagtgagaaaaatattcataaatatatttttaaattaacattacctcattttctgtaacaacaaaatatggatatttaaaaatgtatattgatttatttgttcatttatattctgtgtcttttgtgataaaaataactcatttaatttttttcagaaaaaaagactggcaactttgtgtgctggtttgtttttatatgaattaaaaccattgagtcataaactcgtgacaaactgcacttacaatagaatgatgccagcaagatctgctataatttttaaataacaataatgacaaagtaaaataatagttttcatgttcatcttgagtttaaaagaatctttaactttcagcactaaatgatgaagactcattattttcaatgagttaaattaataagaaaagaaatcttgtagcaatcacattgtaaaacttttagatttttgtctctgtgtaataagctttaagtttcacaagaaatacttatatctagttagcaggttgtaatcttattgactaataatagccattagtactttctttaaataaaaaaaaaaattctccctagagtaaattatcattgcccaccttctgtaacaatttagaacaccattactatttctttcaagctacacagtggaatagaaatgtttaaacagctagttgattcagtcaaagcttttcccattgacattgtttaagaattttttgtttgttttagttgagaacgagaaatttttcagatggatttgcactgtacttctagatatatgttcagttcactttttaggttgtatttggaaaaagtagcttggggatcctaaataaacccacgctaatttcctgtcatatcatctacagttagaaatagaaccagttctttcattttcattattatacttgtcttttctaatgtcatttaaataattcaaaaataatatcaaatgacagagatgacatgaacatgaaattacaatttggaaattaccgtttggtaatttcattgccaaacttgaaaacgatccagatgtctttcaaaaggtgaatctataaactgctaaatactattcttcaacaataaataatgtgtcaccaataaacattacaacatagatgcatctccagataattatgttgaaggacataagctggaaaaaacactactctctgaatttatttacataaaactctagaaaatgcaaactaatctttattgacagaaaactcatca

SEQ ID NO: 692200 - DNA, 1991 bp, Homo sapiens
tgcagtgtctgtagttatatgaactattgtatttcttatattagcaatttgtctttactcttgaattttctcttttgtgagactttctaaaggtttatcaattttatcagtcttttcaaagaacttttcctttgaatttaaataattatttctccttatttatttatagcggttttcatttacatagaaccctcaaatgtatctacactatgtaaaccacactgtaatgccatactagcaacactattttgtgagactggatgaatacctctagtaccataagtaattattatcctgtgtaatgcatctcagccagatgcattataccacattctatgtcatattaatgagggtctacatttttattaattattctgccacattttaagtcacagtaaaaagaaaatattatatcaataaatgaggctttattcacacagcagaaaatatgattttatgaaacaatttatatgcaactctctcgttatatttaaccaatgttttaatttacaaaactacaaagtacctttgtcttttcactatggctttttgtaaagatttcaagtatttctgatgaacagtaattttttcagtgtctacttaatgtcattttcaacatagttttagggacatattagtgtgtaaaatagtatttttagaattattattaataattactattattcaagctaattaccattactattaataatggtaatcatgctggtgtcatatttagattgcaactgacaactgaatttaagtgagaaaaatattcataaatatatttttaaattaacattacctcattttctgtaacaacaaaatatggatatttaaaaatgtatattgatttatttgttcatttatattctgtgtcttttgtgataaaaataactcatttaatttttttcagaaaaaaagactggcaactttgtgtgctggtttgtttttatatgaattaaaaccattgagtcataaactcgtgacaaactgcacttacaatagaatgatgccagcaagatctgctataatttttaaataacaataatgacaaagtaaaataatagttttcatgttcatcttgagtttaaaagaatctttaactttcagcactaaatgatgaagactcattattttcaatgagttaaattaataagaaaagaaatcttgtagcaatcacattgtaaaacttttagatttttgtctctgtgtaataagctttaagtttcacaagaaatacttatatctagttagcaggttgtaatcttattgactaataatagccattagtactttctttaaataaaaaaaaaaattctccctagagtaaattatcattgcccaccttctgtaacaatttagaacaccattactatttctttcaagctacacagtggaatagaaatgtttaaacagctagttgattcagtcaaagcttttcccattgacattgtttaagaattttttgtttgttttagttgagaacgagaaatttttcagatggatttgcactgtacttctagatatatgttcagttcactttttaggttgtatttggaaaaagtagcttggggatcctaaataaacccacgctaatttcctgtcatatcatctacagttagaaatagaaccagttctttcattttcattattatacttgtcttttctaatgtcatttaaataattcaaaaataatatcaaatgacagagatgacatgaacatgaaattacaatttggaaattacmgtttggtaatttcattgccaaacttgaaaacgatccagatgtctttcaaaaggtgaatctataaactgctaaatactattcttcaacaataaataatgtgtcaccaataaacattacaacatagatgcatctccagataattatgttgaaggacataagctggaaaaaacactactctctgaatttatttacataaaactctagaaaatgcaaactaatctttattgacagaaaactcatca

SEQ ID NO: 692201 - DNA, 1415 bp, Homo sapiens
attaatccactcatgaaggtggatccytcatggcttaatcacttcttaatactgccacaatggagattacattaccacatggcttttggaggggacattcaagccatagcatattcttaaaaagtacattcattctaatcatttatgggatcaaaaactgtatatgttgtgatccattttcttaagagagtaaacccaatgaaaaattacatgtgataagcagataatggcttaatatgttatttcaacttcccagtattattttaattctaatagtgcctaaatgctttaaaggaagaaataatttgcaaattcaataatgtggtccattttggcctatatatactctccaatcagattttacagtcagccatttttaaatcctttttgtctagaacaaataatagccccatgggggaagtagtgagatggagtagaaagagtgcttatcttggtttaaatcctggctctgcttcttactagatgtatgctattgatcaatgtggttaaacatcaaattatctagaacccttctttctctttggatatggtatatgtttaaaacatgagaatttaaggaagaaacaaacgagtttcatagtgtcaccagtagtcttttcctctacactctttttccgcattctaattttttaagtatttcctgatcattagctttcttcaagctaaacctatattatgacatgctttgcggactacctttctaactctccttcactctcattatctgatagctttctttttaagtctttcctgtatgtcttcctgcctcacatgtatctttccacagtaatgtttattttactaatagataacacaaggcagataaaggtaactgaattttggatgtaagctatttttaactggggtgagatgatatctcattattgttttgattttcatttatctgatgatcaataatgtcaaacacctttttacatgcctgtttgctattgtatgtcttcaagcaatgcctattcaaatattttgcccattttttgatcagattaataggctttttcctacggagttgttcgagctccttatgtattctggttattaatcccttgacagatgggtagcttccaaatattttctcccattctgtgggttgtctcttcacctcgttgcttgtatcttttgctgtgctgaagctttttaactggatgtgattccatttgtccattattgtcttggttgcctgtgcttgtggggtattgctcaagaatgtttgcccagattaaagttccggagattttccaaaataagttttcttttagtagtttcatagtttgaggtcttagatttaagtctttaatccaattttatttttgtatatggtctcatttattcttctgcatatggatatacagttttttcagcaccttttattaaag

SEQ ID NO: 692202 - DNA, 1415 bp, Homo sapiens
attaatccactcatgaaggtggatccctcatggcttaatcacttcttaatactgccacaatggagattacattaccacatggcttttggaggggacattcaagccatagcatattcttaaaaagtacattcattctaatcatttatgggatcaaaaactgtatatgttgtgatccattttcttaaragagtaaacccaatgaaaaattacatgtgataagcagataatggcttaatatgttatttcaacttcccagtattattttaattctaatagtgcctaaatgctttaaaggaagaaataatttgcaaattcaataatgtggtccattttggcctatatatactctccaatcagattttacagtcagccatttttaaatcctttttgtctagaacaaataatagccccatgggggaagtagtgagatggagtagaaagagtgcttatcttggtttaaatcctggctctgcttcttactagatgtatgctattgatcaatgtggttaaacatcaaattatctagaacccttctttctctttggatatggtatatgtttaaaacatgagaatttaaggaagaaacaaacgagtttcatagtgtcaccagtagtcttttcctctacactctttttccgcattctaattttttaagtatttcctgatcattagctttcttcaagctaaacctatattatgacatgctttgcggactacctttctaactctccttcactctcattatctgatagctttctttttaagtctttcctgtatgtcttcctgcctcacatgtatctttccacagtaatgtttattttactaatagataacacaaggcagataaaggtaactgaattttggatgtaagctatttttaactggggtgagatgatatctcattattgttttgattttcatttatctgatgatcaataatgtcaaacacctttttacatgcctgtttgctattgtatgtcttcaagcaatgcctattcaaatattttgcccattttttgatcagattaataggctttttcctacggagttgttcgagctccttatgtattctggttattaatcccttgacagatgggtagcttccaaatattttctcccattctgtgggttgtctcttcacctcgttgcttgtatcttttgctgtgctgaagctttttaactggatgtgattccatttgtccattattgtcttggttgcctgtgcttgtggggtattgctcaagaatgtttgcccagattaaagttccggagattttccaaaataagttttcttttagtagtttcatagtttgaggtcttagatttaagtctttaatccaattttatttttgtatatggtctcatttattcttctgcatatggatatacagttttttcagcaccttttattaaag

SEQ ID NO: 692203 - DNA, 1415 bp, Homo sapiens
attaatccactcatgaaggtggatccctcatggcttaatcacttcttaatactgccacaatggagattacattaccacatggcttttggaggggacattcaagccatagcatattcttaaaaagtacattcattctaatcatttatgggatcaaaaactgtatatgttgtgatccattttcttaagagagtaaacccaatgaaaaattacatgtgataagcagataatggcttaatatgttatttcaacttcccagtattattttaattctaatagtgcctaaatgctttaaaggaagaaataatttgcaaattcaataatgtggtccattttggcctatatatactctccaatcagattttacagtcagccatttttaaatcctttttgtctagaacaaataatagccccatgggggaagtagtgagatggagwagaaagagtgcttatcttggtttaaatcctggctctgcttcttactagatgtatgctattgatcaatgtggttaaacatcaaattatctagaacccttctttctctttggatatggtatatgtttaaaacatgagaatttaaggaagaaacaaacgagtttcatagtgtcaccagtagtcttttcctctacactctttttccgcattctaattttttaagtatttcctgatcattagctttcttcaagctaaacctatattatgacatgctttgcggactacctttctaactctccttcactctcattatctgatagctttctttttaagtctttcctgtatgtcttcctgcctcacatgtatctttccacagtaatgtttattttactaatagataacacaaggcagataaaggtaactgaattttggatgtaagctatttttaactggggtgagatgatatctcattattgttttgattttcatttatctgatgatcaataatgtcaaacacctttttacatgcctgtttgctattgtatgtcttcaagcaatgcctattcaaatattttgcccattttttgatcagattaataggctttttcctacggagttgttcgagctccttatgtattctggttattaatcccttgacagatgggtagcttccaaatattttctcccattctgtgggttgtctcttcacctcgttgcttgtatcttttgctgtgctgaagctttttaactggatgtgattccatttgtccattattgtcttggttgcctgtgcttgtggggtattgctcaagaatgtttgcccagattaaagttccggagattttccaaaataagttttcttttagtagtttcatagtttgaggtcttagatttaagtctttaatccaattttatttttgtatatggtctcatttattcttctgcatatggatatacagttttttcagcaccttttattaaag

SEQ ID NO: 692204 - DNA, 1415 bp, Homo sapiens
attaatccactcatgaaggtggatccctcatggcttaatcacttcttaatactgccacaatggagattacattaccacatggcttttggaggggacattcaagccatagcatattcttaaaaagtacattcattctaatcatttatgggatcaaaaactgtatatgttgtgatccattttcttaagagagtaaacccaatgaaaaattacatgtgataagcagataatggcttaatatgttatttcaacttcccagtattattttaattctaatagtgcctaaatgctttaaaggaagaaataatttgcaaattcaataatgtggtccattttggcctatatatactctccaatcagattttacagtcagccatttttaaatcctttttgtctagaacaaataatagccccatgggggaagtagtgagatggagtagaaagagtgcttatcttggtttaaatcctggctctgcttcttactagatgtatgctattgatcaatgtggttaaacatcaaattatctagaacccttctttctctttggatatggtatatgtttaaaacatgagaatttaaggaagaaacaaacgagtttcatagtgtcaccagtagtcttttcctctacactctttttccgcattctaattttttaagtatttcctgatcattagctttcttcaagctaaacctatattatgacatgctttgcggactacctttctaactctccttcactctcattatctgatagctttctttttaagtctttcctgtatgtcttcctgcctcacatgtatctttccacagtaatgtttattttactaatagataacacaaggcagataaaggtaactgaattttggatgtaagctatttttaactggggtgagatgatatctcattattgttttgattttcatttatctgatgatcaataatgtcaaacacctttttacatgcctgtttgctattgtatgtcttcaagcaatgcctattcaaatattttgcccattttttgatcagattaataggctttttcctacggagttgttcgagctccttatgtattctggttattaatcccttgacagatgggtagcttccaaatattttctcccattctgtgggttgtctcttcacctcgttgcttgtatcttttgctgtgctgaagctttttaactggatgtgattccatttgtccattattgtyttggttgcctgtgcttgtggggtattgctcaagaatgtttgcccagattaaagttccggagattttccaaaataagttttcttttagtagtttcatagtttgaggtcttagatttaagtctttaatccaattttatttttgtatatggtctcatttattcttctgcatatggatatacagttttttcagcaccttttattaaag

SEQ ID NO: 692205 - DNA, 1415 bp, Homo sapiens
attaatccactcatgaaggtggatccctcatggcttaatcacttcttaatactgccacaatggagattacattaccacatggcttttggaggggacattcaagccatagcatattcttaaaaagtacattcattctaatcatttatgggatcaaaaactgtatatgttgtgatccattttcttaagagagtaaacccaatgaaaaattacatgtgataagcagataatggcttaatatgttatttcaacttcccagtattattttaattctaatagtgcctaaatgctttaaaggaagaaataatttgcaaattcaataatgtggtccattttggcctatatatactctccaatcagattttacagtcagccatttttaaatcctttttgtctagaacaaataatagccccatgggggaagtagtgagatggagtagaaagagtgcttatcttggtttaaatcctggctctgcttcttactagatgtatgctattgatcaatgtggttaaacatcaaattatctagaacccttctttctctttggatatggtatatgtttaaaacatgagaatttaaggaagaaacaaacgagtttcatagtgtcaccagtagtcttttcctctacactctttttccgcattctaattttttaagtatttcctgatcattagctttcttcaagctaaacctatattatgacatgctttgcggactacctttctaactctccttcactctcattatctgatagctttctttttaagtctttcctgtatgtcttcctgcctcacatgtatctttccacagtaatgtttattttactaatagataacacaaggcagataaaggtaactgaattttggatgtaagctatttttaactggggtgagatgatatctcattattgttttgattttcatttatctgatgatcaataatgtcaaacacctttttacatgcctgtttgctattgtatgtcttcaagcaatgcctattcaaatattttgcccattttttgatcagattaataggctttttcctacggagttgttcgagctccttatgtattctggttattaatcccttgacagatgggtagcttccaaatattttctcccattctgtgggttgtctcttcacctcgttgcttgtatcttttgctgtgctgaagctttttaactggatgtgattccatttgtccattattgtcttggttgcctgtgcttgtggggtattgctcaagaatgtttgcccagattaaagttcyggagattttccaaaataagttttcttttagtagtttcatagtttgaggtcttagatttaagtctttaatccaattttatttttgtatatggtctcatttattcttctgcatatggatatacagttttttcagcaccttttattaaag

SEQ ID NO: 692206 - DNA, 681 bp, Homo sapiens
gttctttcctttttgtagaccctagtgtttcatgaatttccacacattctggacactaagctagaagtagccacatatccactcaatagtgacagaaacaacaccatatgaagcaaagccgggattcctacatttaaaattctgaatcaaagcattagaatattataatttggctgccagattgttgaacattctggattcagtggaatacaraaataaaatggttttcggctttttttttaaacgactttcactatgccaggagggctgttcatttaccacctctttgtaaaatctcagtcaatttccatagttttccagccacttccagttatcaaaaagttcgatccaatttgtcatttcaaactttagtcttttatccacgcttcctctagttcaagttagctgtggcctgaagaatatggaataaggaaggggcatggagtgctccattaactcatctttgttcccttgctgagtccccttctcttgtggcatgtgggaagcagacaggagaaacgaaagattggaagcaaacgtttcttacttatctatagctacagcagtcctctctgtgagatgatcttgatatgatggccctcgaatggacacataagtgggatctttagatgacccttgttgggtcttctaactaaaatttctgcctgaggatatttggtc

SEQ ID NO: 692207 - DNA, 646 bp, Homo sapiens
gttgtttccaggtgattactagaatgttcagatggcctgattaataataaaaattagctcaggaaattgttgatgattcttctttgaacatattgatctgagtgtgccattcattgccatgggtttagaaatatctaagatacttattttctgttacatcatagcttgatctggaactcactttagtaatgattctatctaatagttttaattctttcttcagatcaaggattttcataaactcttggtgaagtagggaaaagggatgactactgatcagtcacatcacctattacactacagtcaatcccatgtaaaatccagaggcaaattagaaaaatcacatctgagtttattaaggaaatatttgtttagaactgtacaagcaggtggaaagagaattctttgtactgcaaatcccattcacagatccccactcactcccctcatccccattccaacccttccccttaattctccaacaggatatctagtgaaaagcacttaaccgatgagagacaactgtctcactggctccatgagtgagtctaatgtcaggagagctggrgggctagtgcagaagggcatgaacacggtttgaaaaaccccctgtcctcaccacacaccagcagcccctcatgtagct

SEQ ID NO: 692208 - DNA, 656 bp, Homo sapiens
tattaataataaacaaccagagttaagaaccactgttgtaaatacttggccttgggctgagaaactccaatttgttacagacaggggcacatctaatctttatctttttttttttttaattatacttttttagagtacatgtgcacaacgtgcaggtttgttacatacgtatacatgtgccatgttggtgtgttgcacccattaacttgtcatttaacattaggtatatctcctaatgctatccctccccgacaacaggccctggtgtgtgatgtttcccttcctgtgtccatgtgttctcactgttcaattcccacctgtgagtgagaacatgmggtgtttggttttttgtccttgcgatagtttgctgagaatgatggtttccagcttcatccatgtccctacaaaggacatgaactcgtcattttttatggctgcatagtattccatggtgtatatgtgccacattttcttaatccagtctatcattgttgatgatggtgatgtacagatggggttttggtgtggatgtcctttctgttcattagttttcattctaacagtcaggaccctcagctgcaggtctgttggagtttgctggaggtccactccagaacctgtttgtatgggtatcagcagcggaggctacagaacag

SEQ ID NO: 692209 - DNA, 1251 bp, Homo sapiens
tatggtacatattgccaaacaaatgtatgtaataagtgtattttgtagatgtttatatgaaagtttacagggccgtagaagtggcattagcaactggaaaagatttcaaaccagaagtcgatatttaaactatagacttccaataacttatagtatttgttaatgtaatattagagatgctcttaaattttcttgagtggttgacattaaatgctgattaatattatccctgtatacataatataatcaataagcaattggttatacagaaaccagtagtttttttgattaataataaacctgtctacatgacaggaaaatgtggacagaatggtcttaatgtctaaacaaacttaaatttcatgtaaagattgaagacagtatccttattttctttagattataagcactttcatattgtttagtacccatttgttaatattatatttcagatgcctaaaaatataattaaaagttgtgccttagctttgtgaaatgagacatttgttattattattcttttaaatttaraatgacgcaaacagagcagagatcatagcatatttgtttcttattaatttcactcgaaatttttctagttgtttatgagattataaatatttattaagtaataaacattttattctaaacagtttgccctattcggaatataatattatacaatatgtaaacaatcacaatgcaaaattaattagggttacttatgtataataaatagaagtatctctggtcatatttgacagttacagttcactaaattacccaaaagtattttgatttaaaatattttcctagaagaattgtcttcaggattaatctcttctcataacaattgtttatgaatctgttgtactaatagtagtagccagttttataattatatttagctaaataaaagttataaggaacagaaaagagctatcaacaattaaaggcaattttaacagtggagcacaagaaaatttttggaggtaatgaatatgtttattactttaatgatggtgatctttgacaggtttaagcgtatatccaaactcatcaaattttgcacatttcatatgtgcagcattttgtttattgaccatatctcattaaagctgttaaaaaccataattttaggcagggcgcggtgtctcaagcctgtaatcctagcactttgggatgccgagatgtgcggatcatttgaggtcagatgtttgagactgacctggccagcatagcgaaaccccg

SEQ ID NO: 692210 - DNA, 1251 bp, Homo sapiens
tatggtacatattgccaaacaaatgtatgtaataagtgtattttgtagatgtttatatgaaagtttacagggccgtagaagtggcattagcaactggaaaagatttcaaaccagaagtcgatatttaaactatagacttccaataacttatagtatttgttaatgtaatattagagatgctcttaaattttcttgagtggttgacattaaatgctgattaatattatccctgtatacataatataatcaataagcaattggttatacagaaaccagtagtttttttgattaataataaacctgtctacatgacaggaaaatgtggacagaatggtcttaatgtctaaacaaacttaaatttcatgtaaagattgaagacagtatccttattttctttagattataagcactttcatattgtttagtacccatttgttaatattatatttcagatgcctaaaaatataattaaaagttgtgccttagctttgtgaaatgagacatttgttattattattcttttaaatttagaatgacgcaaacagagcagagatcatagcatatttgtttcttattaatttcactcgaaatttttctagttgtttatgagattataaatatttattaagtaataaacattttattctaaacagtttgccctattcggaatataatattatacaatatgtaaacaatcacaatgcaaaattaattagggttacttatgtataataaatagaagtatctctggtcatatttgacagttacagttcactaaattacccaaaagtattttgatttaaaatattttcctagaagaattgtcttcaggattaatctcttctcataacaattgtttatgaatctgttgtactaatagtagtagccagttttataattatatttagctaaataaaagttataaggaacagaaaagagctatcaacaattaaaggcaattttaacagtggagcacaagaaaatttttggaggtaatgaatatgtttattactttaatgatggtgatctttgacaggtttaagcgtatatccaaactcatcaaattttgcmcatttcatatgtgcagcattttgtttattgaccatatctcattaaagctgttaaaaaccataattttaggcagggcgcggtgtctcaagcctgtaatcctagcactttgggatgccgagatgtgcggatcatttgaggtcagatgtttgagactgacctggccagcatagcgaaaccccg

SEQ ID NO: 692211 - DNA, 810 bp, Homo sapiens
ccataaagtaatttagatagagtatatatttgcatatacagtctcaatccttccaaaaagcagtatcatttcctaatacaaaggacagtagtacatgtcagggtacaactgggaaagaatttcacccaggaccttgagagcacaagtgtagacaaaataamtaaatctgtcagtgtcagcaaattactcacaaaacctatcctcaggagcagtgtttgcactctcactcagtcacgctgataccatggaatctgttcaccatcgacagagaagaggcagaccctgccagaatagcacaagtattgactgagtgcatatcctcagacacccatcttcacagaaatgtttcacctggggtctgcctcccaggtcctatcctccctccctgtgacaccttgctcctcacatcctccctgagggcactttttgttgatagaatcctgacaaatacctgtctgaaatatcataaagccattgaaagctcaattgatttcacttacaatagaaataatatctagatgtcattcaaatccagtttgataggtgcatgacatggaatcaataaaaagcctgtggaatgcttttagtagcgtttcactcacatgagatgctcaacttcaaagatggcttatgtaagttgaaaaatgcagccccctttctcaattcctacatccataagaaaaacacttgcttttctcctaattttctccatgttctattttttcttaatatcctctaaattgtccaacaattttcaaaatacaccatacagtatagtgtattagagttgcctccttcctagtctatagt

SEQ ID NO: 692212 - DNA, 735 bp, Homo sapiens
aaaaagcaatgagaagaataaactgtgacatctgacttgtaaggtcctgtagaaactttattttatgaaagaataatttatttggtgtgcattccgtgcaaggcaatgtgctaaccagtaatgatacaaagataaacttacaggttgccagaagatgaattgtaagaggtacttaatatttacagagtacctttgagtggcaggcagtttataaacatcttctcatttaatcagcacagcaatctatgagctggttttataggacacagagaaaaagcatcagagagatctctgttttgattctctatttactacacaattatggtaagtagttcacaatgatttaatggttagaaattatcagaattttccttgcttatttgccccattatcatatttagattcacaggaaygaatacagccaactatacttagaatcatggaactaggaagaaatttccttgttcaagttaaattaagttcaactgaaaataagagaacatcttataataatagtggcttgaagttagaaatttattcctctttcaagcaaagaaaatctgcaggaagacaacttagcatcaatatgaatgttgcatgaagttttcagggtcatgactcctttcatctcactagtttgccattcttaggtgtagtggttctacactggattcttctttgtaattctacactactcccagtgctcctgccatcacatctacattcaaggaagca

SEQ ID NO: 692213 - DNA, 735 bp, Homo sapiens
aaaaagcaatgagaagaataaactgtgacatctgacttgtaaggtcctgtagaaactttattttatgaaagaataatttatttggtgtgcattccgtgcaaggcaatgtgctaaccagtaatgatacaaagataaacttacaggttgccagaagatgaattgtaagaggtacttaatatttacagagtacctttgagtggcaggcagtttataaacatcttctcatttaatcagcacagcaatctatgagctggttttataggacacagagaaaaagcatcagagagatctctgttttgattctctatttactacacaattatggtaagtagttcacaatgatttaatggttagaaattatcagaattttccttgcttatttgccccattatcatatttagattcacaggaatgaatacagccaactatacttagaatcatggaactaggaagaaatttccttgttcaagtwaaattaagttcaactgaaaataagagaacatcttataataatagtggcttgaagttagaaatttattcctctttcaagcaaagaaaatctgcaggaagacaacttagcatcaatatgaatgttgcatgaagttttcagggtcatgactcctttcatctcactagtttgccattcttaggtgtagtggttctacactggattcttctttgtaattctacactactcccagtgctcctgccatcacatctacattcaaggaagca

SEQ ID NO: 692214 - DNA, 593 bp, Homo sapiens
ggctctctgttattggtgtataagaatgcttgtgatttttgcacattgattttgtatcctgagactttgctgaagttgcttatcagcttaaggagattttgtgctgagatgatggggttttctagatatacaatcatgtcatctgcaaacagggacaatttgacttcctcttttcctaatgctaacaggtttattgtatcttttgggacaaaaaacaatttagaaacattaatatggtagctatgtatgatatatatacatatatagatacacagcacaaatggtgctggaacagctggacatacacatgcaaaaaataatctaggcacagatctttcgtcttttacagaatttatatcaaactaaatcacatatctaaatgtaaatggcaaaactatacaacttctagaacataacataggaacaaattttttaacttgtgtttgtcaatgaattttcagatatccaaagcattagaaataaaagaaaaaaactgacacgtagaactttataaaatttaagtttagttttgaaaaaaaaagacactattaagaacaaaaaatggygacaaattgggagaaaatacttagaaa

SEQ ID NO: 692215 - DNA, 647 bp, Homo sapiens
tagaattttgacatctgtgttcattctaaaattttcattttttgtactgttgtgatccagatttcacattgaggtaattatgcctccttagattttgtagccaactctatttattttgtataatagaaataatttctaaaaatgtaataaaagtttctgtaaaaatgtctagacctgggggagctggaatgttttcctttgtttgtgaaatcacatggaaagagacttctagacacttattcagtttatttaacattttggaataaggaggctgggcactttcccacacttccagcacagattctgcagcagaggtatagagaatcagtgagtgaaccgggtgccccacgtcccctcacctcttctgcttcctgccaaatgaggcttgtcagcttcaagtccccagcacatccacactgcatcccactggaaaactgcagctgtggttctacatttsttgaggagcacaactctcagaggttgttgacaagctccttgcagctgccgctcgcactgctgcctctgtccctgctgggccccaggcagggcaggaaacaaagaggcccagcacctttgtgtgcccctaacagtaaaacccagcactgcgtctgcagaagtaaagtgcaagtgtcacgcacttcatagct

SEQ ID NO: 692216 - DNA, 1471 bp, Homo sapiens
gggatcctgctataagatgcacaatgcacagagtagctcccctacaacaaagtattaaccagcccaaaatgtcaatggtgcagagattaagaaaccctcttctaggcacttacatcgaagttgtaggctccacgccattggcaatagattcacatctctggccctgatatctgagtttcaaacacacttatcgtatttaacctcccttacttggataattcaaaagcacttcaaactcaaattatcccaaaacaaacttgtggttttccctccagatattggttctcttacttggtatttcagcttagcaaattgtgttcatccagaaactcaggagccaataactccctttcctctaacctataaagttcatcaccctgagctaatttactttctaaatatatctttggttcatccatttctttcatttccattgagagtaacttttctcctctaagctgtcatttgtctctcccttggaatgatgtcattcagtttgccaattagcaatcaaatgattactctcaaaattattgagcattctctttataaaatacaaatataaacatgacacttcactgattcaaaacaaacagaaaacattctccattgttcttaaagattgaaatccttaatgttgcctaaaagtaaaatatccataaaatgtattgtcaaaaccagtacacttttaagaggagtgtgtgcgtgcatgagtgtgtgtgtgtttgtgtgtgtgtgtgtgtgtgtgtgtgtgtgtgtggtggggaaatattaaaaattattccaaggcaaatgtaaacagggactgtccctgtttacatttgcataccctgttgctacttgcataccctgttgataagtcctttgttgcttcaccctgcctgcctctcaaaattcatctcatattattttcctttcccttttgactttccagataaattggactttatatgatgctatcttctatgtgcctcttatgtgccatattccttctacctcagtggttttacatgtttttcactctgcatagaaatttctcacccccaaatgtaaattagtacagtcactatggagaacagtttgaaagttcctcagaaaactgaaaatagagctaccatatgatccagcaatcctacctttaaggtacatactcaacaggaagaaaattagtatattgaagagatacctgcactccagtgtttgctgtagcactgtatacaatagctaagatttggaagcaacctaagcatccatcaacagatgaaaggataaagaaaatgatgtacatatacacaatggagtmctattcagccataaaaaaaagagagagagaatgagatcctgtcgtttgcaacaacatgaatggaactgggggacattaagttatgtgagataagccaggcacagaaagaaaaacatcacatgttctcacttaaaaaaaaaaaaaaagaattgaactaatggagatagg

SEQ ID NO: 692217 - DNA, 648 bp, Homo sapiens
tcaagaaagacagattagaaataaaataaaaagaaaaggagtcataagtttcccaaaacaccccttttctttacagtttttaaatttttcctcatattttatcttgttcgatccttacattatgcagtaaaggttcaaaccctgaaattacaggctcaaggttatttccacattttagaaaactgtaataaacagaaaaacaacacttagattgaccttgcttagacatacatggtcacattccaacataaacatgctcatgtttcaaagcctgcaaataatcattatatccttccaaatttttaagaacatgatctccaaagggaggaatatctgagawatggataataaagaatggaacagctcacatggtctggggctgtgggctcagcgccattaacatatgctctcctaacaggactgtaccaatgcatagtcactgtcagcttttctgagcttcttgtttgcaccaagcacagctggaagtacagatgtaggaagcacaccggcaggctggaaaaggatcaagacaggtaccgataaggctcttttcctttagatcttaaaaggaagatgtacgtccttttccaaactccaaatgacatctaaaaaaccttcggtcaacacagtgttaggaaaaacatgtgt

SEQ ID NO: 692218 - DNA, 648 bp, Homo sapiens
tcaagaaagacagattagaaataaaataaaaagaaaaggagtcataagtttcccaaaacaccccttttctttacagtttttaaatttttcctcatattttatcttgttcgatccttacattatgcagtaaaggttcaaaccctgaaattacaggctcaaggttatttccacattttagaaaactgtaataaacagaaaaacaacacttagattgaccttgcttagacatacatggtcacattccaacataaacatgctcatgtttcaaagcctgcaaataatcattatatccttccaaatttttaagaacatgatctccaaagggaggaatatctgagatatggataataaagaatggaacagctcacatggtctggggctgtgggctcagcgccattaacatatgctctcctaacaggactgtaccaatgcatagtcacwgtcagcttttctgagcttcttgtttgcaccaagcacagctggaagtacagatgtaggaagcacaccggcaggctggaaaaggatcaagacaggtaccgataaggctcttttcctttagatcttaaaaggaagatgtacgtccttttccaaactccaaatgacatctaaaaaaccttcggtcaacacagtgttaggaaaaacatgtgt

SEQ ID NO: 692219 - DNA, 620 bp, Homo sapiens
ttttgggaggctgaggcgggcrgatcatgaggtcaggagatcgagaccatcctggctaacatggtgaaaccccatctcaactaaaaatacaaaaaattagccaggcgtggtggcaggtgcctgtagtcccagctactcgggaggctgaggcaggagaatggcgtgaacctgggaggcagcagttgcagtgagccaagatcttgccactgcactccagcctgggcaacagagcaagactccgtctcaaaaaaaaaaaaaaaaaaagaaacaaaaagaaacaaagaactgagtttaaggcaaatgcaatatgaaaatccttcaacattaatctgaaccatctaccaccactcaacatctccaacaaaactataccaaaattactcagtctactctactcccttaattattatacctagtcattccattttttattaatatcctattttatcccattttagaacccagacttccctaatagtactggtgtcaaattgcaaagcaaaagattttttttttggtccccattttgaatctttcctggcttcaactcacatgtactacatctagtttttcctctacaaacagttgcattctcttacctgtgttcaggtccacaccca

SEQ ID NO: 692220 - DNA, 648 bp, Homo sapiens
ttgaagctgtgaaggaaaagcccttcattttttggaagaagtcaaagtaagcagagagatggacaaggaaacacttaaagatgtggccagggcatctctttgtactaaagttcatgctgaacttgcagatgtcttaacagaggtatgtattaaattttgtctgtgtctggtatggtacacctatgtagaaaatctctgatagtagaaacatgaatataattaccaatttcaatcacaaggtgctatgtaggttcatttttgtggcagtgatacctaatctgtgtctctaaaaagtaaaatgaggaaattcaaataatagtatacctaaccgggttttaaaagtaaaattggagctttcattaaaaggtttataaagtggagattttgttattagaaagcttccagttatcagtrtttttaatgaaacaccaggaggaatgttaatgttaaggaatgttaatgtttgagaattacagattgagatttcagaaatgtaacagctgttcatatataatgtattctatctgcttatagaaaaatacaaatcagtgtagagattgtaaaatgaagaaactgtctactttagccttctgaaaagcaacatgtttctgctgctgcaaattgaatttacttaatggttatccttct

SEQ ID NO: 692221 - DNA, 869 bp, Homo sapiens
gcggaggttgcagtgagccaagaccacaccattgcactccagcctgggtgataagagcaaaactccatctcaaaaaaaaaaaaaaaagaaactaataaagtgtgttttgaaatttaggggtgctttgtacaatatatattgttggcaaaatttttaatatatttggatataaaatattgtatatttacctgaagatatcagttggataaattgctaggtaaagatataagttggataaattgctaggtgaagattgtttttacttttagtaatattttctcctgaaataaggtgaatgttatgttgtatttatgggtagaattattccgaaaggtgaacaacatcagtcatttggcgtttattgaattgctaggtacaaagcataatgagaagcagtagaggaattaaaaaaawttttttttctaaagacttagttagaaaacatgtatatgttcatttttcctttctttttatggagaatggagtctccttatgttgcatagcctggttttgaattcctgggattaaggtgtcctctcacctctgcctccccaagtgctggcattacaggcacttggcagaaaacatgtttttaaaagatatcatcacagtttgacagcctaccagggagactatctctgcagacttttctgtacagcataggatcttcaagtaattcaagaaacaacgctgactgcatgaaaattatcagtgccttctcagttcggtgtttaacgtacacccatctggaaatcaataaccataattttgtgtatgtttgaacagcttaatcagagggcttgttttggaccatggagcatagcatcttgataggaagaaaagggtggaggatgcatatatcctcattt

SEQ ID NO: 692222 - DNA, 2439 bp, Homo sapiens
caaacctgcacattgtacacatgtaccctaaaacttaaagtataataataataaaataaaataaaataaatagttaatgaatggagttctgcaggctttgctttaaagaacagatctacagtattttattggggaatgtaatctcagtgtcatctctgaggcatgtttactgctatatctctatcgagcacctgaagtaagtagtgcctggaacagaggaatgactcagggtgtggtgactggactggatggcactttcaaagcactggacctgtcccacgatggggcagtgagtttcccgtccctctacctataaggtacctaaaaggtttagccttgcgtgtggtaaatgtgctttgaagggggtttaggagacagtctaggagatgacccttaagtaacctgcctacaatctcctttacactcaggtgatcagtgaagttttttttcagggacaatgtaaaacagtagttctgctggtatcactgactacgtattagaatcacctatgaactcttaaacactagtgcccataggccctattctcaggattttgatttaattaatgtaggctgacacctattcatctgttcttaatgctttctgagtaatcctaaagtgcagtgaaggtggacaaccactaatgtggaaaaaaacaaaacaaaacaaaaacactccaatatgcaatacaacttcacagctagctcagaactagttctctgcaggtctcataatttataataatttctgcttggaagccagaaggcccgttcctttattgtcaccatagccgaaaagcgtaatcttcaaggcctgattcatccttacctcctccaggaagccttctctgcctgttccagcctatttttctgtccccttattgtacttcctgccagtgcttgcatccctgctttgactcatatccctttggcccttctctcatatcccttgtgcccttctcctttcctttcctgagcctccaccacactccaaattgaatactstaaaaggtttagccctgcatgtggtagaggtgctttgaaagggttttttaggagacagtctaggagatgacccatcctgtgcatgtctactcaccaaaccctgttttataattgcctgcccatttgtatgtctctgaatgaaactgtgtacaccccgagaggaagaactgtgatatatttaccttggcaaccacagcacttagtgcatgcaatagagtaaacacaattgcacaaatggatggaaggaaggatgaatgagtggacagatggatgaatgaaggagtagtactctttgtggggcttaactgcactgtctgaattgattagtgtctctactacatttctcatgtgtctctattacatctatgtaacttgggaaagaatatttcctagtaatcgctatttcccatccatagattttatctgccagctgactgactcacagcctgaaaggaacttgtttattatagttttctgtaataaaagaccaaatcttaacgtcacattacaagattagaaaaggtcttatcatttactgaacccttactgggtcctgggggctttaaattcattatctctttatgtcaactcctcctatttgtcagttgtagaatctgagactcagagtttaaagtaacttgcttcaaaccacactcagcagtagttgagattcaagcctaggttctttcccacagaggctcatttcttctcctgtcccagtttctgtccctcaagtagagactataggggtactaacattaaatacttcaacacaaggtcagtctagaagctccacgaggacccaaacccgacagacctggaccttaacagtgttctgaggatcctgcacatgctccagggttgcatcaacatccagggcaaccaccaacccagagttaaactgcaaagggttgtctgactcgcccgctggctcaatgatggtggctgaggctttgtggatctgtaagccagaggaaaatcctatgattctaaagccaggtcattcctggacaagaaaacacatcttttttctgtctccttatctaatgagtgggcatgtgggagccactcagaggaagagcctagcccagctgctccattggtcaaagaagatcaccaaggtaaagatttttgaccgtctggacagatttggcctacaggggccaaatagaccctgacctgctctggaagtgggagatgcagaaaggcactctgtcgcagcatggtctgtagaattttgaccacttctgcaggtttggatgtcatgagtcggggcataaggtcaaggagtttgtccacaaagctgtcctgcaagtggggcaaatcagcgatgaaatacctggaggaacaaacagaagcaactgactcattcaactgtgcacacattcaccacaggctgggccccagacacctaccaaaccctgaagtaggaaga

SEQ ID NO: 692223 - DNA, 2439 bp, Homo sapiens
caaacctgcacattgtacacatgtaccctaaaacttaaagtataataataataaaataaaataaaataaatagttaatgaatggagttctgcaggctttgctttaaagaacagatctacagtattttattggggaatgtaatctcagtgtcatctctgaggcatgtttactgctatatctctatcgagcacctgaagtaagtagtgcctggaacagaggaatgactcagggtgtggtgactggactggatggcactttcaaagcactggacctgtcccacgatggggcagtgagtttcccgtccctctacctataaggtacctaaaaggtttagccttgcgtgtggtaaatgtgctttgaagggggtttaggagacagtctaggagatgacccttaagtaacctgcctacaatctcctttacactcaggtgatcagtgaagttttttttcagggacaatgtaaaacagtagttctgctggtatcactgactacgtattagaatcacctatgaactcttaaacactagtgcccataggccctattctcaggattttgatttaattaatgtaggctgacacctattcatctgttcttaatgctttctgagtaatcctaaagtgcagtgaaggtggacaaccactaatgtggaaaaaaacaaaacaaaacaaaaacactccaatatgcaatacaacttcacagctagctcagaactagttctctgcaggtctcataatttataataatttctgcttggaagccagaaggcccgttcctttattgtcaccatagccgaaaagcgtaatcttcaaggcctgattcatccttacctcctccaggaagccttctctgcctgttccagcctatttttctgtccccttattgtacttcctgccagtgcttgcatccctgctttgactcatatccctttggcccttctctcatatcccttgtgcccttctcctttcctttcctgagcctccaccacactccaaattgaatactctaaaaggtttagccctgcatgtggtagaggtgctttgaaagggttttttaggagacagtctaggagatgacccatcctgtgcatgtctactcaccaaaccctgttttataattgcctgcccatttgtatgtctctgaatgaaactgtgtacaccccgagrggaagaactgtgatatatttaccttggcaaccacagcacttagtgcatgcaatagagtaaacacaattgcacaaatggatggaaggaaggatgaatgagtggacagatggatgaatgaaggagtagtactctttgtggggcttaactgcactgtctgaattgattagtgtctctactacatttctcatgtgtctctattacatctatgtaacttgggaaagaatatttcctagtaatcgctatttcccatccatagattttatctgccagctgactgactcacagcctgaaaggaacttgtttattatagttttctgtaataaaagaccaaatcttaacgtcacattacaagattagaaaaggtcttatcatttactgaacccttactgggtcctgggggctttaaattcattatctctttatgtcaactcctcctatttgtcagttgtagaatctgagactcagagtttaaagtaacttgcttcaaaccacactcagcagtagttgagattcaagcctaggttctttcccacagaggctcatttcttctcctgtcccagtttctgtccctcaagtagagactataggggtactaacattaaatacttcaacacaaggtcagtctagaagctccacgaggacccaaacccgacagacctggaccttaacagtgttctgaggatcctgcacatgctccagggttgcatcaacatccagggcaaccaccaacccagagttaaactgcaaagggttgtctgactcgcccgctggctcaatgatggtggctgaggctttgtggatctgtaagccagaggaaaatcctatgattctaaagccaggtcattcctggacaagaaaacacatcttttttctgtctccttatctaatgagtgggcatgtgggagccactcagaggaagagcctagcccagctgctccattggtcaaagaagatcaccaaggtaaagatttttgaccgtctggacagatttggcctacaggggccaaatagaccctgacctgctctggaagtgggagatgcagaaaggcactctgtcgcagcatggtctgtagaattttgaccacttctgcaggtttggatgtcatgagtcggggcataaggtcaaggagtttgtccacaaagctgtcctgcaagtggggcaaatcagcgatgaaatacctggaggaacaaacagaagcaactgactcattcaactgtgcacacattcaccacaggctgggccccagacacctaccaaaccctgaagtaggaaga

SEQ ID NO: 692224 - DNA, 643 bp, Homo sapiens
ataggcaaaataatttattctctttttacaaggcatactatactaatttctttccacacttaaaagcatagggatgtaaaatctcagttaagagtttcacctaaggtcatttaacagtagaattctatgctgctctcaagtaagactatgatatttttattgattgttaattatcttttctttatcgattatggaagagacctacaaaatggaattcatgtagagtggtgtggagaataagcaggtggtgattatacatcacatgaggctgcaggccaaagctttgcaacttataataacagcacgaactacaygagggtaagatgtggggttggccaaaatatgtggcatgttcctttcaaagatacttcaaatgcattcagacatcacacgaaagttaatgataagtaaaatgaaatttaggatagactagctaaggaatgtgtgatctattcatttttttcagatattacaaattctgttgttggatcagattagacccttggaaatccaactgtgcgtctcccttgctaaaaaccctctggtgactctccattacatatagcacaacactggactttatctggcaataaggacattctgtatcctcctacttgatagatttcctcaagagtttagtgcc

SEQ ID NO: 692225 - DNA, 643 bp, Homo sapiens
ataggcaaaataatttattctctttttacaaggcatactatactaatttctttccacacttaaaagcatagggatgtaaaatctcagttaagagtttcacctaaggtcatttaacagtagaattctatgctgctctcaagtaagactatgatatttttattgattgttaattatcttttctttatcgattatggaagagacctacaaaatggaattcatgtagagtggtgtggagaataagcaggtggtgattatacatcacatgaggctgcaggccaaagctttgcaacttataataacagcacgaactacatgagggtaagatgtggggttggccaaaatatgtggcatgttcctttcaaagatacttcraatgcattcagacatcacacgaaagttaatgataagtaaaatgaaatttaggatagactagctaaggaatgtgtgatctattcatttttttcagatattacaaattctgttgttggatcagattagacccttggaaatccaactgtgcgtctcccttgctaaaaaccctctggtgactctccattacatatagcacaacactggactttatctggcaataaggacattctgtatcctcctacttgatagatttcctcaagagtttagtgcc

SEQ ID NO: 692226 - DNA, 643 bp, Homo sapiens
ataggcaaaataatttattctctttttacaaggcatactatactaatttctttccacacttaaaagcatagggatgtaaaatctcagttaagagtttcacctaaggtcatttaacagtagaattctatgctgctctcaagtaagactatgatatttttattgattgttaattatcttttctttatcgattatggaagagacctacaaaatggaattcatgtagagtggtgtggagaataagcaggtggtgattatacatcacatgaggctgcaggccaaagctttgcaacttataataacagcacgaactacatgagggtaagatgtggggttggccaaaatatgtggcatgttcctttcaaagatacttcaaatgcattcagacatcacacgaaagttaatgataagtaaaatgaaatttaggawagactagctaaggaatgtgtgatctattcatttttttcagatattacaaattctgttgttggatcagattagacccttggaaatccaactgtgcgtctcccttgctaaaaaccctctggtgactctccattacatatagcacaacactggactttatctggcaataaggacattctgtatcctcctacttgatagatttcctcaagagtttagtgcc

SEQ ID NO: 692227 - DNA, 643 bp, Homo sapiens
ataggcaaaataatttattctctttttacaaggcatactatactaatttctttccacacttaaaagcatagggatgtaaaatctcagttaagagtttcacctaaggtcatttaacagtagaattctatgctgctctcaagtaagactatgatatttttattgattgttaattatcttttctttatcgattatggaagagacctacaaaatggaattcatgtagagtggtgtggagaataagcaggtggtgattatacatcacatgaggctgcaggccaaagctttgcaacttataataacagcacgaactacatgagggtaagatgtggggttggccaaaatatgtggcatgttcctttcaaagatacttcaaatgcattcagacatcacacgaaagttaatgataagtaaaatgaaatttaggatagactagctaaggaatgtgtgatctattcatttttttcagatattacaaattctgttgttggatcagattagacccttggaaatccaactgtgcgtctcccttgctraaaaccctctggtgactctccattacatatagcacaacactggactttatctggcaataaggacattctgtatcctcctacttgatagatttcctcaagagtttagtgcc

SEQ ID NO: 692228 - DNA, 643 bp, Homo sapiens
ataggcaaaataatttattctctttttacaaggcatactatactaatttctttccacacttaaaagcatagggatgtaaaatctcagttaagagtttcacctaaggtcatttaacagtagaattctatgctgctctcaagtaagactatgatatttttattgattgttaattatcttttctttatcgattatggaagagacctacaaaatggaattcatgtagagtggtgtggagaataagcaggtggtgattatacatcacatgaggctgcaggccaaagctttgcaacttataataacagcacgaactacatgagggtaagatgtggggttggccaaaatatgtggcatgttcctttcaaagatacttcaaatgcattcagacatcacacgaaagttaatgataagtaaaatgaaatttaggatagactagctaaggaatgtgtgatctattcatttttttcagatattacaaattctgttgttggatcagattagacccttggaaatccaactgtgcgtctcccttgctaaaaaccctctggtgactctccattacatatagcacaacactggactttatctggcaataaggacattctgtatcctcctacttgatagatttcctcaagartttagtgcc

SEQ ID NO: 692229 - DNA, 1145 bp, Homo sapiens
aaagtggttttgaaactactttagtcaaaatagtacagcagttgtttttgtggaatcataggaaaggtgttaacttgagtaaggacattccccaggaacatgtaattttctatgaaaaatttggttagagaaaagatctgagcctgtataagcatttccgcatttattaacttaggaattagagaagatctcagataaatttcttaacgtctaggmcctgctccaacagcctctgaaactagtctttttgctttcattttgattccttatggtccattagtcatactgttgcaagatgggctttatgaaatataaatctatgttctcccttacttaaaatgagtaagttgcctaatctcagcctcgtttgtcatctagaaaatggggataagaggtatatgggattattgggaagaataaattggaaaaatataagtaaaatattttatacattgttaagctcattagatgtttaacagggattatgtaataattatttataaggcaaaccccttactatggcaaataaggctctttattatcctatctctactgcctcattttcaggagccctatcttacgttccattcgtaaaaccacttaatatttcccacttggcatttgcactgtgattttcatttctccaagtatacctctccctgcctgtaccttaatactgcttgttctctccattcccgtgtcatcattcatagatgtgtattacagcattgcataccttgtcagtttcccttactagtctgtgagattgttgagtgtacagctgttgtctttttatttttgtattcttgttcctggtaactgtagacatataattgaatggttgctaaatatttgtttaattgaatgcatgaatgaatgaacagatgaatggaaagaagaatgaaaaggagtggagagtagtcgttaagggaaaggattttggaggctggatttatctcctagctctggaatttattctttgtgaccgtcaatatgttatttaatctttttgtgtcttttctccatatataaaatgggactaatatagtatttacttctcagggttatagtgaggatttaaatgagttaatatacgtctaaagcccttagaatagtacatgacacatagtggccgggcgtggtgg

SEQ ID NO: 692230 - DNA, 1145 bp, Homo sapiens
aaagtggttttgaaactactttagtcaaaatagtacagcagttgtttttgtggaatcataggaaaggtgttaacttgagtaaggacattccccaggaacatgtaattttctatgaaaaatttggttagagaaaagatctgagcctgtataagcatttccgcatttattaacttaggaattagagaagatctcagataaatttcttaacgtctaggacctgctccaacagcctctgaaactartctttttgctttcattttgattccttatggtccattagtcatactgttgcaagatgggctttatgaaatataaatctatgttctcccttacttaaaatgagtaagttgcctaatctcagcctcgtttgtcatctagaaaatggggataagaggtatatgggattattgggaagaataaattggaaaaatataagtaaaatattttatacattgttaagctcattagatgtttaacagggattatgtaataattatttataaggcaaaccccttactatggcaaataaggctctttattatcctatctctactgcctcattttcaggagccctatcttacgttccattcgtaaaaccacttaatatttcccacttggcatttgcactgtgattttcatttctccaagtatacctctccctgcctgtaccttaatactgcttgttctctccattcccgtgtcatcattcatagatgtgtattacagcattgcataccttgtcagtttcccttactagtctgtgagattgttgagtgtacagctgttgtctttttatttttgtattcttgttcctggtaactgtagacatataattgaatggttgctaaatatttgtttaattgaatgcatgaatgaatgaacagatgaatggaaagaagaatgaaaaggagtggagagtagtcgttaagggaaaggattttggaggctggatttatctcctagctctggaatttattctttgtgaccgtcaatatgttatttaatctttttgtgtcttttctccatatataaaatgggactaatatagtatttacttctcagggttatagtgaggatttaaatgagttaatatacgtctaaagcccttagaatagtacatgacacatagtggccgggcgtggtgg

SEQ ID NO: 692231 - DNA, 641 bp, Homo sapiens
gcagaagccatggcgggggagcacttcacctgctgggaccttggctgtctggcaactcatcttccttcaacaaaaccaagaacaagaaagtaggccagaaagacctcagcacccaaaagaggtgtcgccttccctttgtgttaaatccaatccactttactcatgggggtcccacacccactgctcccagcccacacttgggccgtgcacaagtctacagaggcactttgtcttcccagctcacagaataagaagccataaagaaaccatctgccacagacactaaagaatgcatactgtgtgattccatttatgtgaagaggagaaactggcaaaatgaacccacgagttagaagtcaggataatgccctattacagagggcactgtgggtggaaggcagcatgggctctgaggttctggcaatgttctccattgatgtgggtgctagttacaggggratgtttgctttataagaatttacagagcttgtgatccatgcacctttccaaaaaggtttacatgtaattaaaagtaggtggaataaaacagctgtgaacaaagagaaaaatctttaaacagacgtcaacgttacaaacccaacaaaataaacccaaaggaagtagaagaacggcattaataa

SEQ ID NO: 692232 - DNA, 575 bp, Homo sapiens
gcctctgggaggggaggctgttccctgcagctaagacagcactcagcttccacactccacacaccagggtttcagccttctttgaggttgttgtcaaacccagcctgggtccacttgcccagtgtttgcaaagcctaacaccgacagtgagatttgcagccagagaaagtaaggcgtttattgcagagcaccaggcgaggagaatgggcagctaaggctcaaactccctgatggcttttaagcaagggyttttaaggcaggggtggggaggtttcaaagggagttaggggctgaggaatttctggaacttccttatccattttctggttccagtctgtctgaggtctacgtgctggcattgcacgtggtgacattggtgggggtcctggctcctgaaaaacaactcaaggatatatgtcaagatgttatctttagcgccaggcatggatgctcatgcctgtaaacccggcactttgggaggccgaggtgggtggatcacctgaggtcaggagttcaagaccagcctggccaacatggtgaaacccatctctactaaaaatacaaaattagctggg

SEQ ID NO: 692233 - DNA, 1298 bp, Homo sapiens
taatccctggcaccatggtgatttcaggagtcaaatttagctcattccccagagaatgattcatttttcattttcagatggtgagatcatgctgcaacttcctaatagctcatgagcacctcaagactgtgtcttgtgtcatacatttccctattyctggcacatgtggctgtgctcagcattgcaagcattccctagctcaacaatatcagccgcctgtcattccaccatgacgatattattttcgttcccatttctcattaaattttccagggacaggagtcaccaatatatgacataatataatggcatggaatacaggggcagtgactgaagactgaagacaactttcagggtagagggtgtaaaaatgaaagaaagttacccttagagagaaaatggaaaagttccaatgacaaatgccccagctctcatagttcttcacttcgaattacacctttatcactcacaatacagcgtcacagcaaaattgttaatatttgcctgtttgcttcacataggtagacccaagaccctgaccagcgttatttaggtccctacatgtgggctaatggttgcattctttattggcacctaggggacctgccccggaagcagtcctccctgggctgagtggtggctgtgcctgcaggggtcactactagctgataactgacaaagggcttcactggtactgccagcaggggaatgaaaatgtaaatgggttcacgggtcactttatgtcaagtggaaaatgaataatagttttgttcctgtgagccagagaaaagcacgcatcattgatccctcaaggattaatttctcatgataaatgtaattgtctaaaataatagtggggaagaccaatcattctaaatgcaaagcccagagaatgagcgggtgagagctgcccacttagaaaaggagaaagaattcaaaaggagtagcaaaggagtagctaaagcatgtcctttagcacacagtgaactactggtctctggaacctaaggattctctcacagctagaggtcacaagtaaaggagacctacatgggcagtatgtttataactgggctattaaatgtatggggattttctaaaaggaaacataaataccatatttaaactttggagaaccttagccttagattggctgaaattacaatattgaaacatcatagcaagttttcttgcatgtaaggatttgtctattgtttgcagtgatataaagaacaactaatattttcattgtaattcttaccaatgcatctcagattgttgataaatttttgataaat

SEQ ID NO: 692234 - DNA, 1060 bp, Homo sapiens
cagcaactgtatgtatacgactgtatatatatatagtgcagtgtgtgtgtatatatatacacaccatattgtgtgtgtgtgtgtgtgtgtatatatatatatttactacactaatgtgtagtcacaatctctgtggagcttaaattcaatttcaacccagtttggccaacaaggtatcatgagaatggcttcttatcactgcatgtgtaatatggtaatacatacacacagcaaacacataatttattaagaccttccacactccacctttaacactctgttaaaaaaataaggggctgggtgcggtcgtcacgcctgtaatcctagcactttgggaggctgaggcaggcagatcacgaggtcaggagatcaagacatcctggacaacaaggtgaaacccgtctctactaaaatacaaaaaattagctggacgtggtggcgggcgactgtaatcccagctactagggaggctgaggcaagagaactcgggaggcagaggttgcagtgagcccaaatcgtgccactgcactccagcctggcgacagagcaagactccatctcaaaaaataaataaataaataataaaaataaaaaaagaaagggaccaaaatatgacgcatgagaatgtttttcgtgacatcaatgaaatattaaattttaaaaaataggcagtatagatgtaaaattctaactctatggcaataagttctgccactcctttcgtactttctaaattggcaattgtgccaaaacactcttttctgtagtgtaaaccacacctcagggttagtttggcaatgtgttaaattctgctgtaagcattagtccggtgagactttggcaagccgacactattcaaagcagtcaaaaataaaatgtaaaaaactgaaaaaaaatctcatttgtgccaagttaagaaagaaatacaaatattgaaaaatttaacctttaatgcattttggtttcccttgcatttccattttattcctttagwttttttgtaggtgctaaaaccactaagtctttgctcaaaaggaaacattttgtctactaagtctgg

SEQ ID NO: 692235 - DNA, 1178 bp, Homo sapiens
gcatctttcctcagatataacagtttggcataaatgtgtatagaagaaaatgcaaatttctgcaaaacagcaaatccaaggcagtggatcaggtgcatagagagtcactttcctgtatatgtgagctactgtattcctaaatattcacggaatagcttccatgtcctgcgttctgttcacgttgtttctcaggtttgactgggggccactcaccacagcaaagctaagcgctcctcttacggggacactgatagtcagtggggtcgtcagtgtccttagactgacctcagaggagcagagaaattcagaccacattgatgtttttaaaagaccagttatttcagatgacaactagtgaacagaaacctgctttactgggtactatgagaagaacttactaataaaactgataacaagcagtctgaaagtcctactactggaagagcattgggagggcatgaaaacatctagtctggaaggataatttgtgataatcattgccttctaattttttctttgcaatttccaagggcagagtggacggttcagagagcaatgggtgcagctggtgctgggagaaggccagtctcagttgagggtaaggaagtattgatcccacaatggaaaatgccgcttaagaggaaaagaatgctcaagggagagcgggaggagtgcatccaaccccactgccattggggtcccggagggagagggccttggaagtgctcttatttggggctgtggatgacatctctgaggattccaagggcaaatatgcagaagctcaagaagcacagggtcaatctggaggctgcaatctgaagacaagaacaaatatcacgtgaataaatcaggacactgagacggtcctgggaagctgagctgcaggacaaagggcagcttgcagcatccccagggctattccaccagtctgtggagactcagcttgacagtgagtagagactggccaggcaccatgcctagggcttcacagccctcrtctcatctgggtcttatcatccctatgaaaaatgacagagatgaagaggctcagggagctgagagtctcgctagagttacctggccggcaactgagaagtaagcccttcattctacaactcctccatgtaaaatccaatgctgtaatacagctcccatccccagcataaattgtgtga

SEQ ID NO: 692236 - DNA, 659 bp, Homo sapiens
tctcctgggatgagctgtggggtcaggttcccaggagcgagtctgctagcaatggtctttcaggaccaggcgctggaagctgattgtcrcagcagcagtctgctcccctgagttctgaaaggggcgaacccattcaatacccacaacagagtcccatcccgagagggtgtcaggtgtagatctgctcacgtatgcttctcctgtcctgtacttagtgtttaacccgccacgaggacggcacattcatccacattaaggctctcctgttgtgaactgatgcatttcaacatgggaatatcatgactcgccttttatctgttttcctattgttatggaacatctgaatttcttcttttgtgaattgtctgttcgtgttccattgcctggttttctcctgggagatcctttttcctgttgacttgaaaattattcatcttttgtgctgcaggagaacaactggaatctcttaaattacctgttctcagcagtcttgctgaagttcactgtgcaatcattgagcctctagagtaattgtacaatttctttcatggtcacttgttttctgtatttttctgcatttttggaagttttggtcacgggctttctatatttttctgaatacattttggaagtttgttccctgaaaacgtatctatttc

SEQ ID NO: 692237 - DNA, 1127 bp, Homo sapiens
  misc_feature 508, 509, 510, 511, 512, 513, 514, 515, 516, 517, 518, 519,520, 521, 522, 523, 524, 525, 526, 527, 528, 529, 530, 531,532, 533, 534, 535, 536, 537, 538, 539, 540, 541, 542, 543,544, 545, 546, 547, 548, 549, 550, 551, 552, 553, 554: n = A,T,C or G
  misc_feature 555, 556, 557, 558, 559, 560, 561, 562, 563, 564, 565, 566,567, 568, 569, 570, 571, 572, 573, 574, 575, 576, 577, 578,579, 580, 581, 582, 583, 584, 585, 586, 587, 588, 589, 590,591, 592, 593, 594, 595, 596, 597, 598, 599, 600, 601: n = A,T,C or G
  misc_feature 602, 603, 604, 605, 606, 607: n = A,T,C or G
tggcctacagacaaagacatgatttcaaacttttaatgttttttattatgcaaacatccccgaaaagattgcacaggtcaaagttggtcagtgtttctacttgcaaattttgaacgaagtgagactcatggagaaatgtctatcaacagagcaaaatctctacactgaaaattggtaaactttttaaagaaaaatttaaaagatctaagtatatatagagatacatcatattcataaattggcagactcaatatttttaagattgactaatgcttagcaagactaaaagaaagaagtgagaaaccacaaattctcagcaccatgaataaaaagtgggcataagttaaataacattaaaaggatagaaagaggatataatgagcaatttaatgccaatagacttgacaacttagatgaaattgacaaattccttgaaaatcacaacttgttaaaactgacaaaataaatagaacattttaaataatataatatctattaaaaatattannnnnnnnnnnnnnnnnnnnnnnnnnnnnnnnnnnnnnnnnnnnnnnnnnnnnnnnnnnnnnnnnnnnnnnnnnnnnnnnnnnnnnnnnnnnnnnnnnnnagaaaggaaagaaagaaagaaagaaagaaagaaagaaagaaagaaagaaagaaagaaagaaagaaagaaagaaagaaagaraaagaaagaaagaaagaaagaaagaaagaaagaaagaaagaaagaaagaaagaaagaaagaaagaaagaaaggaaagaaaagaaaagaaagagaaggaaagaattgtcatggaattgtaaagtggcatggctaagtctgtatttcaagcatgaaacctcacacacttcaggggcctagaacataggcaaaatgttttaatgtttttgtttatagtatcctctaaaaatgattatttggaaaaaataaaaaaggcttgtttgcctcattatatggcctcatataatgacacctaatttcttaaatacattatctccaatgtaaaaccactggttgaaatgtaaacaatatatatcttcagtggtttaataaatgaccagaaatgaaagtcaacatatgctttattttgtctaagagaattaattcaggcatttttgagtt

SEQ ID NO: 692238 - DNA, 1127 bp, Homo sapiens
  misc_feature 508, 509, 510, 511, 512, 513, 514, 515, 516, 517, 518, 519,520, 521, 522, 523, 524, 525, 526, 527, 528, 529, 530, 531,532, 533, 534, 535, 536, 537, 538, 539, 540, 541, 542, 543,544, 545, 546, 547, 548, 549, 550, 551, 552, 553, 554: n = A,T,C or G
  misc_feature 555, 556, 557, 558, 559, 560, 561, 562, 563, 564, 565, 566,567, 568, 569, 570, 571, 572, 573, 574, 575, 576, 577, 578,579, 580, 581, 582, 583, 584, 585, 586, 587, 588, 589, 590,591, 592, 593, 594, 595, 596, 597, 598, 599, 600, 601: n = A,T,C or G
  misc_feature 602, 603, 604, 605, 606, 607: n = A,T,C or G
tggcctacagacaaagacatgatttcaaacttttaatgttttttattatgcaaacatccccgaaaagattgcacaggtcaaagttggtcagtgtttctacttgcaaattttgaacgaagtgagactcatggagaaatgtctatcaacagagcaaaatctctacactgaaaattggtaaactttttaaagaaaaatttaaaagatctaagtatatatagagatacatcatattcataaattggcagactcaatatttttaagattgactaatgcttagcaagactaaaagaaagaagtgagaaaccacaaattctcagcaccatgaataaaaagtgggcataagttaaataacattaaaaggatagaaagaggatataatgagcaatttaatgccaatagacttgacaacttagatgaaattgacaaattccttgaaaatcacaacttgttaaaactgacaaaataaatagaacattttaaataatataatatctattaaaaatattannnnnnnnnnnnnnnnnnnnnnnnnnnnnnnnnnnnnnnnnnnnnnnnnnnnnnnnnnnnnnnnnnnnnnnnnnnnnnnnnnnnnnnnnnnnnnnnnnnnagaaaggaaagaaagaaagaaagaaagaaagaaagaaagaaagaaagaaagaaagaaagaaagaaagaaagaaagaaagagaragaaagaaagaaagaaagaaagaaagaaagaaagaaagaaagaaagaaagaaagaaagaaagaaagaaaggaaagaaaagaaaagaaagagaaggaaagaattgtcatggaattgtaaagtggcatggctaagtctgtatttcaagcatgaaacctcacacacttcaggggcctagaacataggcaaaatgttttaatgtttttgtttatagtatcctctaaaaatgattatttggaaaaaataaaaaaggcttgtttgcctcattatatggcctcatataatgacacctaatttcttaaatacattatctccaatgtaaaaccactggttgaaatgtaaacaatatatatcttcagtggtttaataaatgaccagaaatgaaagtcaacatatgctttattttgtctaagagaattaattcaggcatttttgagtt

SEQ ID NO: 692239 - DNA, 593 bp, Homo sapiens
ttttaccagggcctccaacatattattgcagttgggttgtttagtgtgtcttgtccatgtacagctgtaactgggactttcgatcaatatattcctatgcttctcatttagttctctccctctttcttttaaatccaagtagatctcaaatataatatgtggaaactaaatctaaaaatgcttgtatgtctaaaaatgcccagctttgctttcatattatggagaatgtgggttggctagttttttttttttttyttcttcttcttttttttaaaagattccacagctcggatgatttctgtattgtcgctttatctcaagtgtttaaagtgttaagccagatatttagaaatctgactttttctttaatccttctctatactatatagctcttttcaatctaaaatttatatatgttatttattcaattacagtatcttctatttattgcaagatttatcccctttcagtttctatttttgtgttcttctactagtttcaaatcaaaacaactgatatggtacataatcatctctcttttcctctttcataattttttttgtttctttatctatttgagctctattcttgaa

SEQ ID NO: 692240 - DNA, 614 bp, Homo sapiens
ggttagccagcttcccaaagcactatataaatgtcacacctggtccaaccaatctgtgggccctatgtaaatcagacacctcctcctcaagcctgtctgtaaaatccggtgcactctgccatgggctggaaatcccattcggaagcccctctctcgcaagacagagagctgttctcctttctctttcttctgcctattaaacgtctgctcctaaatccacttcttgtgtctgcctaccggatttccttggtgagacaacgaaccccaggtatttaycccagacaacgacatggcttcactgagctgggctgggtgtgaagcctgggccacccaccctgcccggattttatttcttttttaagaattgggctaaccctccacatgctgttggtcaggctggtctcccggcttttttttttttttttttttttttttgctactgctacatagctgttctatgtaggagaaatctgccctaacaaggataatccttggaaatttccctttcaaatctagcatttgcttgtcaaatgatcatctcatgtaaaagggaaaagattaaaaaagacaaatataaaaatataaaaaaaagaagaatgaatggaaacatattg

SEQ ID NO: 692241 - DNA, 597 bp, Homo sapiens
actggctgggaacagggtgaacagggccacagggaggccatgtggggagctgccagggcttcagactcttggcctgggctgggcttcatcgaggccctgtccagtcggctggattggggccagtgagcaggcttactttgtctgtgaaatagaaaaaggggccatggactcacccttcacaagcagttggttcacttcaacattttaatggaaccgacctgaaattaatgagcactgtcacactgagtaaatactgcctctcgggatgagagcggcaatgggtagaagacagtgtgacaattcaaacccaaggccacggacaattacatagaggaagtctgttcagaatttggcggatcgaatggctgtccccaaataacaggcatgcagatggctggagtctgatgctgcctggcgagggcagaggcagatgctgcattctgagggccagcragaggacacgacgtggcagtgggccagccagccacagccgggagccagcacaggaaagggagttggacggagtcagaaggtcaggccgccccagtgaacagggagcacattaacctttccaaagccacgggggagcttatcagg

SEQ ID NO: 692242 - DNA, 1358 bp, Homo sapiens
ttttttttttttgagatggagtctcgctctgtcacccaggctggagtgcagtggcatgatctcagctcgctgcctcctccgcctcctgggttcaagtgattctcctgcctcaacctcccgagtagctgggattacaggcatgtgccaccatgcccagctaatttttgtatttttagtagagacagggtttcaccatgttggccaggctagcttctgacctcaggtgatccacctgcttcggccttccaaagtgctgggattacaggcgtgagccactgtcccaggccacatcttttctttctaaatcacccagtctcaggtatccctttatagcaagagaaaacagacaagacaatgtgcatgcacaggtgagggagaatgaaacctctgtgactgtctgtagtcacatgaggctatggcagagctaagctgtggcttggcagagccaaggcttgaaggggacccaggaaatcactggtgagcccttccgattattcagggaatctgcatggtctccacagccctggagtttcacttcctcattgaggcaagggagttagatgactgaaggccggtgcccagagaaacaatatatgggcagggttcacattttaaaaacccatggcatacaaagttggtgtagagaagggagcaaaatttgtccttcattttcaaatgctagtgaataggtaatagttctccagtcagctggaatgaaggggaaaagcttcaagaaatatgtcttaggaaataacgttggcttggcactcccctccttcattatatgtctaaacacaaccattgcacttttcaagttttttttttttgtcatcttctatatttaagtgcagaacacagaaggatggttgaagtccccagatccacttccttggatagaacagaactagacgaggtgtgttcttgcaagcagcccccagcagaatccagccatctgggcaggagaacagagcagcccctggccccatgtgcagtgctcagacttgtgctgtgagcacgacttgaggcagagctggattctgtcayacacacacacacacacacacacacacacacacacacacatatggttgctgtatatcatgtatatgatatatatctctatgtacgtgatatatacacaacatatctatgaatatgatatatacacatatctctatgtatatgatatatacacatatctctaggtatatgatatatacacatatctctaggtatatgatatatacacatatctctatatatgatatatacacatctctatgtatatgatatatacacatatctatgtatatgatatatatacgtatcacatctatgtatatgatatatatcatata

SEQ ID NO: 692243 - DNA, 778 bp, Homo sapiens
atacttgcttttataaaggtgggtggaaaatgaaatagaagatttagtcattcctggaacaatcagggaggacttcatcgaggaggtagccattgaattgagatttcgtggttgaataacagtaaaaactatctaggccattgtctccagccttcttccttcctctgaaccactttccacccccaatacagccctgcttctcctttcatctctcaactagctgaccatgtttgtcccctctcaagcaaactcatacacttatggcccagattttattttttcctggcttttttttttcttttgagaggaagtctcgctctgtcgcctaggctggagtgcagtgccgcgaygcggctcactgcaacctccgcctcccgggttcaagcgattgtcctgcctcagcctcccgagtagctgggactacaggagcgtgccaccatgcccagttaatttttttgtatttttagtagagatggagtttcaccatgtgagccaggatggtctcgatctcctgacctcgtgatctgcccccctcggcctcccaaagtgttgggattacaggcgtgagccaccacatctggcctcgccggcttaaagtgaaaaacggaacaaaactcagagtttcttcaaatgaccatggtgtcatgggtgtggaatgctatgtatgtgtttggagatgtagcaggagatggtagaaagggcaaaatagaagaccacagggagggacatgttgaagtgtcagaggcaaaggcacagaggacttgtggagttaagtaaa

SEQ ID NO: 692244 - DNA, 1064 bp, Homo sapiens
cagggagggatggggaagatgtaacaggaaaaaccacctttctgtctacccgtaggcaaggattmgttaactagctgcagaaagatgggctaaggccgcagcaaggtgctgagccaggaaaggaatttggaaagtagaaaaataggcctgagaacatttgtctgcctcatcattttgcaagatctagttttgtttatccccaatataattacatttctgaaattcctttgggtcctgtctcagtgcccatgtgtacttggagaagtagtgagtacatcgaaaactctgatttcttaaaagtcagtcagcatcatgggcatcccctgggagcttgttaaaaatgcagaaacttgggccccaccccagacctattgaagcagaattggcattttgacaagatctccaagtgactcaaattaaggtttggttttgttttgttttgttttgttgttttgttgttgttgttgttgttgttttggagacggagtctcactctattccccaggccggagtgcagtggcgtgatcttgatttcggttcactgcaacctctgcctcccagattcaaacgattctcctgcctcagcctcccaaatagctgggattacaggcatccgccaccacgcctggctaatttttgtatttttagtaaagacggggtttcgccatgttggccaggctggtctggaactcctgacctcaggtgatccaccgcctcagcctcccaaagtgctggaattacaggtgagcgccactgggcccaaccttgcacattaaggcttgagaaacgctgctctaaaagataagtttcagaatcctgtggcagggtaagaaacaaaatgttacttgcgcaagttcagagatttttcaattgtattgaaatcaaagatttcatgggatgtttccgtgattccaagaagcataatgatattttgctgaaactgctgaatgtatacatactttgagaattagatcagaacccagtttcttcctctctttctttaaatcacacagttaacttcacctgtgggagtgcatttgtttccaaatgcaatcaaagggaac

SEQ ID NO: 692245 - DNA, 1064 bp, Homo sapiens
cagggagggatggggaagatgtaacaggaaaaaccacctttctgtctacccgtaggcaaggattcgttaactagctgcagaaagatgggctaaggccgcagcaaggtgctgagccaggaaaggaatttggaaagtagaaaaataggcctgasaacatttgtctgcctcatcattttgcaagatctagttttgtttatccccaatataattacatttctgaaattcctttgggtcctgtctcagtgcccatgtgtacttggagaagtagtgagtacatcgaaaactctgatttcttaaaagtcagtcagcatcatgggcatcccctgggagcttgttaaaaatgcagaaacttgggccccaccccagacctattgaagcagaattggcattttgacaagatctccaagtgactcaaattaaggtttggttttgttttgttttgttttgttgttttgttgttgttgttgttgttgttttggagacggagtctcactctattccccaggccggagtgcagtggcgtgatcttgatttcggttcactgcaacctctgcctcccagattcaaacgattctcctgcctcagcctcccaaatagctgggattacaggcatccgccaccacgcctggctaatttttgtatttttagtaaagacggggtttcgccatgttggccaggctggtctggaactcctgacctcaggtgatccaccgcctcagcctcccaaagtgctggaattacaggtgagcgccactgggcccaaccttgcacattaaggcttgagaaacgctgctctaaaagataagtttcagaatcctgtggcagggtaagaaacaaaatgttacttgcgcaagttcagagatttttcaattgtattgaaatcaaagatttcatgggatgtttccgtgattccaagaagcataatgatattttgctgaaactgctgaatgtatacatactttgagaattagatcagaacccagtttcttcctctctttctttaaatcacacagttaacttcacctgtgggagtgcatttgtttccaaatgcaatcaaagggaac

SEQ ID NO: 692246 - DNA, 1064 bp, Homo sapiens
cagggagggatggggaagatgtaacaggaaaaaccacctttctgtctacccgtaggcaaggattcgttaactagctgcagaaagatgggctaaggccgcagcaaggtgctgagccaggaaaggaatttggaaagtagaaaaataggcctgagaacatttgtctgcctcatcattttgcaagatctagttttgtttatccccaatataattacatttctgaaattcctttgggtcctgtctcagtgcccatgtgtacttggagaagtagtgagtacrtcgaaaactctgatttcttaaaagtcagtcagcatcatgggcatcccctgggagcttgttaaaaatgcagaaacttgggccccaccccagacctattgaagcagaattggcattttgacaagatctccaagtgactcaaattaaggtttggttttgttttgttttgttttgttgttttgttgttgttgttgttgttgttttggagacggagtctcactctattccccaggccggagtgcagtggcgtgatcttgatttcggttcactgcaacctctgcctcccagattcaaacgattctcctgcctcagcctcccaaatagctgggattacaggcatccgccaccacgcctggctaatttttgtatttttagtaaagacggggtttcgccatgttggccaggctggtctggaactcctgacctcaggtgatccaccgcctcagcctcccaaagtgctggaattacaggtgagcgccactgggcccaaccttgcacattaaggcttgagaaacgctgctctaaaagataagtttcagaatcctgtggcagggtaagaaacaaaatgttacttgcgcaagttcagagatttttcaattgtattgaaatcaaagatttcatgggatgtttccgtgattccaagaagcataatgatattttgctgaaactgctgaatgtatacatactttgagaattagatcagaacccagtttcttcctctctttctttaaatcacacagttaacttcacctgtgggagtgcatttgtttccaaatgcaatcaaagggaac

SEQ ID NO: 692247 - DNA, 539 bp, Homo sapiens
ccatcatgcctggctaatttttttttttttttttgtatttttagtagagacggggtttcaccatgttgatcaggctggtctcgaactcctgacctcaggtgatccacccactacggcctcccaaagtgccgagattacaggcatgagccaccgcacctggcccaaagaagactttctaaaagtccctcctggaggacagtggcctgactaccagcattctgggagccacatagggaaaatgggttcatagtagccagtatgtaaatgtatatgtttccattgtctctatgatacctctgttctaaactctggcagtcttctagttcacagacattccagtcttgggggcaggcagtttctgggtataygaacaggcaaaaggaactgggaaggggaggctaactttcttacacagactttgcaaaaatcctgtatatttcaatcacccccttcatcaccatggtaattccttagctttctggggtattctgttgtataaattggtttcgttcatcactttaccatctatctgcctaaaa

SEQ ID NO: 692248 - DNA, 1426 bp, Homo sapiens
ctgagtgctgactcctgccactgtactgtctgttatcacttacaacactcaatatgtcactgtcatcaattttttttctgccttttttagtataccccttcataaggaattccaatacttggttgccttcaccagaaatatccaacaatgtacrcagactagtatgacccaaggatttacagaggcctctacctacctcttgaacactctaggtgtcaatttttgtcttcccaagtgacgccattttactccagtatgtggatgacctccttctaggtactgagagttaggtcactgagcaccttcttaaggcatgagcaagagaggatcacagggtggctagagacaaaattcagtggcacttactatgtctgtggtatctgggccacggtaaaattctctccacagaccaaacctctactatttaatactttcctttttttgaaacaaagtaatgctgagaagtttttgggccttgcgagatgttgtaggatatggtacctaatttctccataattgctgcagtgctctgtgccctgattaaggagtcatctccaaaccaagtagtctgagacttgctatccaaaaatgcttttgataattttaagggctctctactttcacacccctcccccgtgcttggactccccagttacttcctgacttttcccttgttcatggataaatgtggaggtcatgccctggtatattattctagaaacataatggataccagagacctctgtaatattgtattttggccttgacccagtagcttgacccattagctaaggcctttgagccatgactgttgcctttgagccatggctagaactgcaaagcatgtccaaaataccactgatgtggtattaggtcaaccaaatgacacacatgttcgccttgctatacaggcccttcttgcttaatgaaaacacatagcacttttctgcatcttgacttacctcatgaaagctcactacactctccctctcaaatcaccgtatatcatcatcaaaaccctaaccttgccaaccttgctttctttgccctttgatgggatgccaccatgaacgtgtcattaacactagatcttgtcctgggctagatttatcggagagcccctccgccaagttgacctcaacctttgtgtctatggctccctctttagagggagaatggaaccttctggaatggatatgtcatcacttatcaacacaaacctcttgaatatcaagccctgacaaatgttaaatcagccagggtggccaagttattgctctcattcaggcttgcaaaaaagcagaggaaacaaaggttagggtttatagtactgttatagccacggtacctttgaggtagtacatgatgtggatatgttgtaaaagaggatacatgacagcagcttgtgcaccaggcaaaagcagac

SEQ ID NO: 692249 - DNA, 1426 bp, Homo sapiens
ctgagtgctgactcctgccactgtactgtctgttatcacttacaacactcaatatgtcactgtcatcaattttttttctgccttttttagtataccccttcataaggaattccaatacttggttgccttcaccagaaatatccaacaatgtacgcagactagtatgacccaaggatttacagaggcctctacctacctcttgaacactctaggtgtcaatttttgtcttcccaagtgacgccattttactccagtatgtggatgacctccttctaggtactgagagttaggtcactgagcaccttcttaaggcatgagcaagagaggatcacagggtggctagagacaaaattcagtggcacttactatgtctgtggtatctgggccayggtaaaattctctccacagaccaaacctctactatttaatactttcctttttttgaaacaaagtaatgctgagaagtttttgggccttgcgagatgttgtaggatatggtacctaatttctccataattgctgcagtgctctgtgccctgattaaggagtcatctccaaaccaagtagtctgagacttgctatccaaaaatgcttttgataattttaagggctctctactttcacacccctcccccgtgcttggactccccagttacttcctgacttttcccttgttcatggataaatgtggaggtcatgccctggtatattattctagaaacataatggataccagagacctctgtaatattgtattttggccttgacccagtagcttgacccattagctaaggcctttgagccatgactgttgcctttgagccatggctagaactgcaaagcatgtccaaaataccactgatgtggtattaggtcaaccaaatgacacacatgttcgccttgctatacaggcccttcttgcttaatgaaaacacatagcacttttctgcatcttgacttacctcatgaaagctcactacactctccctctcaaatcaccgtatatcatcatcaaaaccctaaccttgccaaccttgctttctttgccctttgatgggatgccaccatgaacgtgtcattaacactagatcttgtcctgggctagatttatcggagagcccctccgccaagttgacctcaacctttgtgtctatggctccctctttagagggagaatggaaccttctggaatggatatgtcatcacttatcaacacaaacctcttgaatatcaagccctgacaaatgttaaatcagccagggtggccaagttattgctctcattcaggcttgcaaaaaagcagaggaaacaaaggttagggtttatagtactgttatagccacggtacctttgaggtagtacatgatgtggatatgttgtaaaagaggatacatgacagcagcttgtgcaccaggcaaaagcagac

SEQ ID NO: 692250 - DNA, 1426 bp, Homo sapiens
ctgagtgctgactcctgccactgtactgtctgttatcacttacaacactcaatatgtcactgtcatcaattttttttctgccttttttagtataccccttcataaggaattccaatacttggttgccttcaccagaaatatccaacaatgtacgcagactagtatgacccaaggatttacagaggcctctacctacctcttgaacactctaggtgtcaatttttgtcttcccaagtgacgccattttactccagtatgtggatgacctccttctaggtactgagagttaggtcactgagcaccttcttaaggcatgagcaagagaggatcacagggtggctagagacaaaattcagtggcacttactatgtctgtggtatctgggccacggtaaaaytctctccacagaccaaacctctactatttaatactttcctttttttgaaacaaagtaatgctgagaagtttttgggccttgcgagatgttgtaggatatggtacctaatttctccataattgctgcagtgctctgtgccctgattaaggagtcatctccaaaccaagtagtctgagacttgctatccaaaaatgcttttgataattttaagggctctctactttcacacccctcccccgtgcttggactccccagttacttcctgacttttcccttgttcatggataaatgtggaggtcatgccctggtatattattctagaaacataatggataccagagacctctgtaatattgtattttggccttgacccagtagcttgacccattagctaaggcctttgagccatgactgttgcctttgagccatggctagaactgcaaagcatgtccaaaataccactgatgtggtattaggtcaaccaaatgacacacatgttcgccttgctatacaggcccttcttgcttaatgaaaacacatagcacttttctgcatcttgacttacctcatgaaagctcactacactctccctctcaaatcaccgtatatcatcatcaaaaccctaaccttgccaaccttgctttctttgccctttgatgggatgccaccatgaacgtgtcattaacactagatcttgtcctgggctagatttatcggagagcccctccgccaagttgacctcaacctttgtgtctatggctccctctttagagggagaatggaaccttctggaatggatatgtcatcacttatcaacacaaacctcttgaatatcaagccctgacaaatgttaaatcagccagggtggccaagttattgctctcattcaggcttgcaaaaaagcagaggaaacaaaggttagggtttatagtactgttatagccacggtacctttgaggtagtacatgatgtggatatgttgtaaaagaggatacatgacagcagcttgtgcaccaggcaaaagcagac

SEQ ID NO: 692251 - DNA, 1426 bp, Homo sapiens
ctgagtgctgactcctgccactgtactgtctgttatcacttacaacactcaatatgtcactgtcatcaattttttttctgccttttttagtataccccttcataaggaattccaatacttggttgccttcaccagaaatatccaacaatgtacgcagactagtatgacccaaggatttacagaggcctctacctacctcttgaacactctaggtgtcaatttttgtcttcccaagtgacgccattttactccagtatgtggatgacctccttctaggtactgagagttaggtcactgagcaccttcttaaggcatgagcaagagaggatcacagggtggctagagacaaaattcagtggcacttactatgtctgtggtatctgggccacggtaaaattctctccacagaccaaacctctactatttaatactttcctttttttgaaacaaagtaatgctgagaagtttttgggccttgcgagatgttgtaggatatggtacctaatttctccataattgctgcagtgctctgtgccctgattaaggagtcatctccaaaccaagtagtctgagacttgctatccaaaaatgcttttgataattttaagggctctctactttcacacccctcccccgtgcttggactccccagttacttcctgacttttcccttgttcatggataaatgtggaggtcatgccctggtatattattctagaaacataatggataccagagacctctgtaatattgtattttggccttgacccagtagcttgacccattagctaaggcctttgagccatgactgttgcctttgagccatggctagaactgcaaagcatgtccaaaataccactgatgtggtattaggtcaaccaaatgacacacatgttcgccttgctatacaggcccttcttgcttaatgaaaacacatagcacttttctgcatcttgacttacctcatgaaagctcactacactctccctctcaaatcaccgtatatcatcatcaaaaccctaaccttgccaaccttgctttctttgccctttgatgggatgccaccatgaacgtgtcattaacactagatcttgtcctgggctagatttatcggagagcccctccgccaagttgacctcaacctttgtgtctatggctccctctttagagggagaatggaaccttctggaatggatatgtcatcacttatcaacacaaacctcttgaatatcaagccctgacaaatgttaaatcagccagggtggcmaagttattgctctcattcaggcttgcaaaaaagcagaggaaacaaaggttagggtttatagtactgttatagccacggtacctttgaggtagtacatgatgtggatatgttgtaaaagaggatacatgacagcagcttgtgcaccaggcaaaagcagac

SEQ ID NO: 692252 - DNA, 655 bp, Homo sapiens
gggactacaagtgcgtgtcactgcactagctaatttttgtaatatttgtagagatggagtttcatcatgttggcccagtctcatcttgaactcctgaactcaagcgatctgcccacctcaacctcccaaagtgttgggattttaggcatgagccatcatgcccggtcaacttttataatttttataaagtgactatgcaagtagttggcccataatttggggcattccctgcttttcctctcattgatttgttgtttgtgacatattctgaatatatggtgggcatatgatttctttgttagatatatgcacacaaaatcacttaccccattcatcttaattttaaatttttcaatggtgaattcttacgatgagaagatcttgtcrgaatgtgatccactttgcagtctagtctttttaaaagtacatttaggtctttttgtaacctttgaagaaatatttttccactcgaaggtcagtaagatcaactgcgttgtctcctcaaggctttattttgcttttcatatttacatatataatcagccgtgtatacatttttgggtacaaggtaaggtagatgcagggttactcattttcctatgaatattcaaaagggaatatatctttcccactgttctgagtgcagatttgtgaa

SEQ ID NO: 692253 - DNA, 655 bp, Homo sapiens
gggactacaagtgcgtgtcactgcactagctaatttttgtaatatttgtagagatggagtttcatcatgttggcccagtctcatcttgaactcctgaactcaagcgatctgcccacctcaacctcccaaagtgttgggattttaggcatgagccatcatgcccggtcaacttttataatttttataaagtgactatgcaagtagttggcccataatttggggcattccctgcttttcctctcattgatttgttgtttgtgacatattctgaatatatggtgggcatatgatttctttgttagatatatgcacacaaaatcacttaccccattcatcttaattttaaatttttcaatggtgaattcttacgatgagaagatcttgtcggaatgtgatccactttgcagtctagtctttttaaaagtacatttaggtctttttgtaacctttgaagaaatatttttccactcgaaggtcagtaagatcaactgcgttgtctcctcaaggctttattttgcttttcatatttacatatataatcagccrtgtatacatttttgggtacaaggtaaggtagatgcagggttactcattttcctatgaatattcaaaagggaatatatctttcccactgttctgagtgcagatttgtgaa

SEQ ID NO: 692254 - DNA, 663 bp, Homo sapiens
ccagttaaatcttctacttctccccgatctcctcgcttttccaaacccaaaatctctgtgctccctatgtgctctctytgataaacagtcttggtgcattgctttgcctagctttacaaaggtcccactccaaagtagaccacactgacttttcacaactgctgtccaatcaaccaccagaagtgcaactgatcgtcactgccctgattcgaatgaacttggctgccgcatttgaaataagaaacttcatgagaaatagcagttttatggaataaaaagtctcttattaaaggcaatgatttattttaagttatttttgtattatttctacttgctaggcttcctggaatttattccaaaattactaaaagcccttttcagggatatagcacggtgaagccctaatgataagaccactattgtattgattttctagaggtcttggaggttgtgaaggtttatgatacgtggaatttagaacatttatctcctctcataatcactatttttatatccctttctccatatttgtgcttttaggccagttatctatatggccatcagaaggaagaaaaaagcgttagaggaaataagagaaataaattatatagaactgcatggctcatacagcatttttctttttctgccaatttttacactagt

SEQ ID NO: 692255 - DNA, 1531 bp, Homo sapiens
aagttatgcaaagttaaattattagcaagtcacaaatattctactgaagccattgaattgaacttccacctatatacttggattaaaaaaagagagcccatgtaaagaaaattaaaggtctcctttgcaaaattcatcttctagatttgcaaaatcattttccaggttagagatctgttgacttatgaattagaattatatttggcttcaagtgacagaaagctgaaaataacagtggcccaaataaaatggaagtttatttatcacccacatcaaacaaattctctcttagccacggttcagtgcagaaaagaacacccattctaaagcaggaaaggttttattcagcggtttcggttcccaccaggtcactgcaagggctgggagagctcctgcctctgatgccaccgcagagctgcactggcccccagcagcctcagaacacaccggagctggggacttcccttccaaagcggtgatccaggggtgaggatggctgagcaagaaactggccatgctcacaacagcttcttgaccctctggaagctgggaatgaacacaagaaagtgcttcagaatrcaaagccctgttagccagttatggtagtcaggagccacagtaaggcctgtgcctccctttcagatagcatcccagtgcttttaattatcagaactaaattcacatttagaccttgtctaaaagggattctgcaaaggtgcagtgttgagtttttcaaactctttcaaacagaaggcaagggtgaaataagggttgagaaaatgaaatcaagaaagttcccctgagcctggaggtgtgaagtcgcattgctgtaagtacgcaggctccctcctgctttctgccctgttatcccagtgacctccccttgttctctttgtcagtgttagcgagtagagctggaaccatcaatcccacattcctggcacctggtgaaggaagtggctaggagagatggggcctgagatgtgagcctgctgtctggtaaagtggtcttgaggaagctgtccccaacattcccatctacatctcattatctagaccttagcatctagataatatctagacctagagggcacaccaagctctcgaggagaaaaatgtacagaaaatgaaggctttgtttctattcaaacaaataatttgagaagggatctgacattgatttagccttgacaacaaccaggtactgcacttggcactttccatttgctatttgattttattatcatgattatatcatcagtattttaacgcctctctattaatagtgaaattttgggtagggcacattaaagttttagactggtccaaaaagcctacttcagcccccacaaaaaaacatatatacatttctgaattaaaaagtcatcaaactttgtacagaaaatttcaagggcacagtcttttataaaacacaaaacaaggacttgctggttatctttctcctgacctgcaatcacagcttcaggtacttctgggcttatcatagcacccgtagtctgtgaagccaaaa

SEQ ID NO: 692256 - DNA, 1606 bp, Homo sapiens
tgtctccctaaaatgtataaaagcaaactgtgtcccgtctaccttgggcacatgtcattaggacctcctgaggctgtgtcatgggcatgtccttaaccttggcaaaataaactttctaaattgattgagccttgtctcagatactttttggttcacactctctaacaggcatggatcatrcagtttgaattactaatctatgtggtcatggcaatcccagccactgagctatttctgttttttttataactctgagaagtgtagatccatctctgactagttttcctcttgccttatgatatattttctccttatctgacactggaaatttgctttatttggttgacatttatgtgtgtgtgtaaagagtaatttccacatgacctttgtctatcacatggatttccaattgtttttcccatctgaatgcttctactcatctttcaatactccgtcatcgcttgatttcacgaggatgaggatagccatctctggccatgtgcttgacataggctgtgtttttgagcccctcctcttgttcccatgggtcattgtgtgtacttctagtagtccactatatcaacattacaatttattattttagcttgtctgcactaccaaattgtattttgcctggaattaaaaaagaaatatttgctatcttttcaaacattgtattttctttattacatatgtgaaactcaggtttatatatattttaaattcctagcataactaatgataaattgtttgcaagtaatatcctatcttgagaaaaattaagatgttgacattataatgtcatatctccacaataatctttgttttcctctaggcactcaatctctcagggatgcagtaaaagacccttcatgaaggacagcctcaacttccagatcaatttaacttcaaagcctctgacattggttatttctcaagagctgtgattttttcttctgttgcagtcatagttggtctaaaggtaataatttcctgggcaggaatccaattctgtaaccatctctgtcagcatgccgattttgtattgtacctccaagactcatcaacataagctcagatagttctaccataatacttatatgtgctcttaagctaaagcatcagaaacaaaattaacaattaaaaacctacattaatttgctgatataagcattttaaaacttactgacacaaataattatttgtgtatatcatgcagctttgcctcttattttgcctgtcaaaatctcttcatggagaatcatacttctcttttctttgctagtgaatagtattattcatttcatttccctctctatacagagcactgcccttacttttgtggtcgttagtaaagataaataaagcatagtaagagacgattgaaaggaatttccaagaggtggtatatttgaatacaaatacctatgctaaggaagtgaaaaaaggataagatggtagagaaaaataaagacaaagatcacagaaaaggatgatcattgattaaacctgacttggggcccataaagactaccagtgattagagtctacaaaatcacatacgcatgtggccacatagaacgtgaactcaataattgcatcaata

SEQ ID NO: 692257 - DNA, 1606 bp, Homo sapiens
tgtctccctaaaatgtataaaagcaaactgtgtcccgtctaccttgggcacatgtcattaggacctcctgaggctgtgtcatgggcatgtccttaaccttggcaaaataaactttctaaattgattgagccttgtctcagatactttttggttcacactctctaacaggcatggatcatacagtttgaattactaatctatgtggtcatggcaatcccagccactgagctatttctgttttttttataactctgagaagtgtagatccatctctgactagttttcctcttgccttatgatatattttctccttatctgacactggaaatttgctttatttggttgacatttatgtgtgtgtgtaaagagtaatttccacatgacctttgtctatcacatggatttccaattgtttttcccatctgaatgcttctactcatctttcaatactccgtcatcgcttgatttcacgaggatgaggatagccatctctggccatgtgcttgacataggctgtgtttttgagcycctcctcttgttcccatgggtcattgtgtgtacttctagtagtccactatatcaacattacaatttattattttagcttgtctgcactaccaaattgtattttgcctggaattaaaaaagaaatatttgctatcttttcaaacattgtattttctttattacatatgtgaaactcaggtttatatatattttaaattcctagcataactaatgataaattgtttgcaagtaatatcctatcttgagaaaaattaagatgttgacattataatgtcatatctccacaataatctttgttttcctctaggcactcaatctctcagggatgcagtaaaagacccttcatgaaggacagcctcaacttccagatcaatttaacttcaaagcctctgacattggttatttctcaagagctgtgattttttcttctgttgcagtcatagttggtctaaaggtaataatttcctgggcaggaatccaattctgtaaccatctctgtcagcatgccgattttgtattgtacctccaagactcatcaacataagctcagatagttctaccataatacttatatgtgctcttaagctaaagcatcagaaacaaaattaacaattaaaaacctacattaatttgctgatataagcattttaaaacttactgacacaaataattatttgtgtatatcatgcagctttgcctcttattttgcctgtcaaaatctcttcatggagaatcatacttctcttttctttgctagtgaatagtattattcatttcatttccctctctatacagagcactgcccttacttttgtggtcgttagtaaagataaataaagcatagtaagagacgattgaaaggaatttccaagaggtggtatatttgaatacaaatacctatgctaaggaagtgaaaaaaggataagatggtagagaaaaataaagacaaagatcacagaaaaggatgatcattgattaaacctgacttggggcccataaagactaccagtgattagagtctacaaaatcacatacgcatgtggccacatagaacgtgaactcaataattgcatcaata

SEQ ID NO: 692258 - DNA, 2190 bp, Homo sapiens
atgaattcaaaactcttttggtagtctttaagcatagaaaataaagcattcactaactcagtagttgcataccagttaccagatgctgcactgatttgttccaataaagagaacagatctagaatagtaacagaaattggaattgctagtggttatgtttatgataacccattgtcattctccaaaattcatttgacttctcttccaaatagtcaagttaacagagatgtatcttacaagtctttgttggaggcataaatacatgcaatcttacttagaatgttatattcatttttgtttgctattttgggagggaggggaagttctaggttgtagtggctttgtttttcttttttagcactcatcttaccatttatagaccttatgccatttttcagggaataaaaatagttattttgccagcatatggcaactgattaaggtttaatattgggagttgactttcagcacagccagaatacagaagcaataccagatctggtggtttttatttacttttgtgtgtctcaccctgagacgtactctggtattaatttcctagaccatccctcatccccttttccatataactttcaaaatctatctcttaaacacatcaaaacatattatttgttttttaattagatgaagagttgtatgaatctatcagtccttactcattctgtgcatatattttttcatttggtttgatttggtttggtttacttttctcaaaacagcacagcaatccagcacataaaataatgctgataataaagtaacatttttgactggttactataaaacagcattctgttaaacacttcatgtacaatacattattatcttacttattcttagatatagtgctactactaataaaagctaacactcatacagtctttccatgtgccagacactattacatatatttacttatttaattctaacaataaatctttgaagtacatatatactattatcactagtttataaataaagaagtaacacataataaatatctgttagcacgttcaagtaacttgcccaaaatcactcaacaactaattagctaagttgtaatttaaacggatgtagtctggatagagaaacaatattcaaaactaatacgttgtactgtctctgaatcttacatctagctttttaaaatgtattcctgttcaatttatataccctttaatttgtttgccatgaactttcctgtacagtagctgtgctaaacatgctctgtcttctgttaataagttctttgagaacatggcatgtaatgtttatattcttgcaattaacacaatactattgtcatatttaaggtacttaataattataattattaaattgattggccaattgtgctcatcttagaaaatgctgcagaccgaggactggtgttggaatggatgttcttgacagaaaggatcacattatggggagcaaccagctctgaaagttaacaggtgtcattaaagatcgagcagtaagtcccaacttaccaactagagactcccaaagagttttatagattaataaattagataatgtaacagtgtcagtacttaaaccagaaaacaacaatttcattatttttgccgctataaccaatcgggctatttgggaatccaattaaatattagattattatgtaataatttctgaaaaggagaattatcttagatctgcagaaaccaaagtacctatataataaagaagcaatagttgaataaatatagatgagatagaggctttgagtcaaaggctcaaagagtaagatttaaaatttataaaatatgtatattttatagtatgtttaaccccacaagtttcaagtatgtaaacctttctccaccattttagctataattgttatttctaatctgatwcattatgtaaccttattacacatatttatttccagaaatattatctataaatgcttgatcatattcatcacttactccaaagaactgaattaaagaacggctgcagtatgacaacaatcttttataaatatgatctcccaaaactgatataaggatgaaaaatataagcacttaaacgctaacatttgcattatctaattgagatcctatgtaataattcttaacttataaaccatactgcttttaaaagttcaaactaaataacatattcttagcattgacattagca

SEQ ID NO: 692259 - DNA, 2219 bp, Homo sapiens
tggtagcaaagatgcaatgaactggttgtacctttctggtatacttcttccacttggctttcagaagcagggctgacatgtggtaggccaagcccaagccttgaagatccaatgtcttcttggccttatttgtacttgtgtacagacttcttagtattacattgttgaaatgttatggtacaagataatgcaaatgacaaagtaaaaattgtaatacagaacctggatctggaagaaatgctaaaggcaacttttgctcttatatcaggtaattatttcagagatgtggagtgtggttaggatttaataaagttggtgtgatgaacagaacttaaggaaaactccaatgatttgcacctcctggtgtctctttgtgtccatgcctttatgtaatctcccatcttgagtgtatgtgggacctatgacttgcttctgatcaataagatgagggaaaggtgataggatgccattctcatgattatgttatgttacatgagactcagtgttagcaggatagagaaagagattctccttgctggcttaataagtaagcagccatgggtaaggaagcctacacagcaagaaactggaggtgacttgtaggaactgcaagtgccctctagaacctaagggtggtctccagatgacacccagcaaaacccgcaacagtcatacagcttcaagaagatgaatgctgccaacaagctgaaagagcttccaaacagattcttccccagccaagccttcaaatgggaaaacaactctttgaacatcttgattgcaattttataaaaccctaaacaggacctagttaaactatggtcagactcctgacccacagatgtgagacaagaaatatgtgttgttttaagccacttaatttgaagtaatttgttacacagcaatagaaaatttttactatgttactcttgatgaaccccaccaagaatggccctgacctgggaggctgtacctcagacaggcagatgacccttgctgggatccaaatacatttcctataaagaaactaggatcctggagaaggagcttccatcagcataatattttctcagatgtttggctgagaaagtactttgagcttactgcatgaaatgtaattgtataagacataatgtgtctgagtgctctttttcatcagccctcaagtctccaaggagctcattcttgtcccttcctttagaggcaggggacacatagctcctgcaattatagaggatagaaatgaaggtttaagtaaaagaaaagatgttgaaatagcaaaggaggaaccattcacctaatccacattgctacttcttatggttattttcagttaaaaaatttytagcagcaaccctcataatactgggttgcgtatgaaggagactttaagtgtgatgtggtagaaatcatcctcatattaacaagggctcaggaattcactggaaatatcatagaagtttttagggacatactggatatatatcctttatatataatttacatttgagcaactatgtacagttttatcaacattttaataatttttgttgtctatcacaagaattcatttttttctcctgttatcccaatgtttactttatcaaagatcttttcacatctcaaggcctctgagtaggcaaaggcctcagatctctgtcattcaacaaaaggcaccccacatccccattgactccttaagcttctgaggaaaccccagaaaagcccataaaagccctttttctccccagtttgtctaccttccccctccacaagtttaggctttaaagacaaaacaatccaacaaagagtagacgcagtgttcttttgggactctgaccagtttagcatttattcctgccacaaaaatgagtcaagaccttcacaaggcaaagagttcagaactcagagcacaatacctgacaaccttctcaagtttttggaagaagtgatgagcaagacttctcacatcttccaggttcatgtggtgagaacataggacaaattaatatcagcaaaatatcttgccacttcataccaggttaaatagcctttatatatagataccttaagtggtggccgatacctcaccatcaacatcaaggatctggtattcagactgacaaaaccaggtaagcaatgacgccaacataatactgttagttctccctaaaagtgtcacaagttaggaatacttcagggaaaagagatgaagacga

SEQ ID NO: 692260 - DNA, 663 bp, Homo sapiens
ttgtgggggttgagtttcactttatttaaagtgagtcttaatcctccaacaagtcaacaagtgattggctggaatcacacgtattggaaaaccagcggaagagtaagtctttgtattttatgctactgtacctctgggattaattgctctttccctcattggccagtcactcttagtgtgtgattaatgcctgagactgtgtgaagtaagagatggatcagaggccgggcgcgggggctcgcctgtcatcccagcactttgggaggccgaggcgggcggatcacgaggtcaggagatcgagaccatcctggctaacacggggaaaccccgtctccactaaaaatacaaaaagttagccgggcgcggtggcgggcgcctgcggtcccagctgctggggaggccgaggcgggagcatggcgggaaccgggagcggagccygcagtgagccgagatggcgccaccgcactccagcctgggcgacccagcgagactccgcctcaaaaaaaaaaaaagaagattgatcagagagtacctcccctaagggtacatgcagataaatacagttaaggcgattaacatttcaaatacggtgactgtttcttacgtggacgacgttgtgttgaacatgggtgagtaagactgaagcagccgtaattactgcac

SEQ ID NO: 692261 - DNA, 763 bp, Homo sapiens
gtactttgtttagtattttatattaaaaatatgtacatatatatttatatataattaagaacatgtatgtacaatcgtgcatacatcatgtacatacatctacttaagaaaatagctatgtaatataccattactcaactagattataattttttctccatttctttattgtaatttatcattttctacttttttgttttctcatttttattgcataatatttaattatgcaaaaaatacattaaatacattgaaaatatatagtgtagctataagaataaagaacgatggtaaaacaaatgctaatacccactacctgacttaaagaatrtgatattatttttttccaattgaaattccctcaactactcagaattactgctatccctcttatcctttcattaattttcttctagttttctcacatgtgaatctatttctaaatacatttctttattttgcaagtttttggacttcatataaatgtaaccatattgtatatattcttcttcagcttcttagtttttcactaaacaatatgttttgctgatatttacattcatatgtacagtaatagttgatttattttaatggctatatattattccattgttagaatacaccaggatttatttttacttattttttttgctggaaaattgggtgtcttttttattttttgatataacaaacaatgttgtaatcattttgtatttacttcctagtccactcctgtaagtttctcttgagtacatactagcaa

SEQ ID NO: 692262 - DNA, 636 bp, Homo sapiens
gcctccagcctgaacacggttttctcctgggtgctcccacagaccctgggcctgcgcagcccagcccagcccagcccatgccccgcacccgtaggctctgggggcccgctccccagcagacccgctccctgcaagacccacgggcgtcgccctgctgtgaacctggtcccacacctacgtggacccaggtttcctgaggagctccgctggacccgcagatcccgcactggccaaagggctccggtccccagcaggcycaactgcgcacaggagctcgggagccagaggccccggccctgggcttgcagagccccaccaacaggcaccgcaaccgctgctgcgggtgcgggagcctctgggtcgtcaaggcagcgcacaacagcgtgcgcgcaggccgacaatggccaaccctggcggctggcctctggtgtgcccagggcataggacaagaggccctttggaatgctccttggagtacagcatcctcagggaggaagcatggtactcggagcctctatttgcctcgacctgtgagagtgtgtgccggggctctggcctctacagcagatcaattccacctcagcaccggcaggcgactttcctcccacgtgcccgccccgatcacttcccccagga

SEQ ID NO: 692263 - DNA, 636 bp, Homo sapiens
gcctccagcctgaacacggttttctcctgggtgctcccacagaccctgggcctgcgcagcccagcccagcccagcccatgccccgcacccgtaggctctgggggcccgctccccagcagacccgctccctgcaagacccacgggcgtcgccctgctgtgaacctggtcccacacctacgtggacccaggtttcctgaggagctccgctggacccgcagatcccgcactggccaaagggctccggtccccagcaggctcaactgcgcacaggagctcgggagccagaggccccggccctgggcttgcagagccccaccaacaggcaccgcaaccgctgctgcgggtgcgggagcctctgggtcgtcaaggcagcgcacaacagcgtgcgcgcaggccgacaatggccaaccctggcggctggcctctggtgtgcccagggcataggrcaagaggccctttggaatgctccttggagtacagcatcctcagggaggaagcatggtactcggagcctctatttgcctcgacctgtgagagtgtgtgccggggctctggcctctacagcagatcaattccacctcagcaccggcaggcgactttcctcccacgtgcccgccccgatcacttcccccagga

SEQ ID NO: 692264 - DNA, 896 bp, Homo sapiens
tctgggaggcagaggttgcagtgagctgagatcactctgttgcactccagtctagggaacagagtgagaccctatctcaaaaaaataaaaaacaaaataaaaaataaaggtgtatgaatgggaagttgtttgcctttttagaggaaagtgttatttaaaaaaatacttcaaaactatttgggtctttgtatttaaagtgtatatcttgtagatatcacatagctaggccaagatttttttccattctgaaaatatcttcctaataactgaaatctatatatatttagcacaattgttgataaagttgggcttatgtgtgtcatttgttaattgatttctaatagaatttttattgagataatatagactcacctgcagttgtaagatcattaaggggtaaaagtttagttatgtaagaaaaataagttctagagatctactataaaatatagtccctatggctaacagtactttattgcatacttaaaatttcctaaggggatatatcttatttcaagtatcctttccaccaataataataaaggaggtaggatgaaactttgagaggtgatggatgtgtttatagcattgatggttgtaatggtttcatgagtgtatacttatccccgaacatagcaagttgtatatattaaatatgtatagcttttgatatatcaatcatacctcaataaagcatttttttaaatgctaagagaaattccttggacttttcctccagttttcctcagtggaacattttgcaaaagtatagtataatatcaaaattaggatagtgacattgatacaatccatcaatattaattaatattgggtatttttcctactttattctttgccaagattattttatctatactagrgcctgtatttttcca

SEQ ID NO: 692265 - DNA, 666 bp, Homo sapiens
ttacagacctccaggatcctagctgtgggagaccccatgaccctcacagatatttgagttggcagggaaaattcctttgagagttggtaaagacataactctagtctgtgaggagtccagaggatttggcatgggaatgggtacactggagcacagccatgggcagccatcccccaaggcttgacatactcttctaggtgactttagtatttgttatctgctggacctggagagagcagggctgtcttgtccatgggatgtggccagtctcatcagaataccccgtctgccagcctctcccagggtccctctctggcagcttgagctgcccagctgaaatgcttctcagtggctactgccatagctttttcaccagcagccccccacsttcccataggtggcagacctccaccaggcaggcagacccccaccaggatgtatctacctgcagccttcctcaacctatgtgcattcacccacagcatccctctgccgctctgacaatgaacacacacatggggatccactaccaccccaccagcacccacgcacataaggaccaaccactgccctgctggcacacatgcacccacaatgccctcactaccccattggtgtgcactcacctacagtcctcccaccacagtgcagtctcctacggcaccc

SEQ ID NO: 692266 - DNA, 3309 bp, Homo sapiens
tcataagcacctgagaagtctttctaaaacataagtaaaattttatcactctcctgcttacagaaacagaaacaaagaacaaaaatatttttcttttgtttcccatcacctacacaggaatgcttttagttgttagtgtaggatttttgttttgtttgtttggagctcttttgtggacccggcgtgcaaaaggtcaagttaatcaaggtcaaataatccttggtctgtgggggactaatgtcaggatctttctgattgatgtgtattctcttttgtcactattctccctattataggcagccacacacacatgttgtatgggtatccttgagcttgcatgaacctttggaaaataagaattgttttcatctgcataagcaatagtgtattaagaccttgacgtgtttcttattttttcattcactgtgttaaattctgttcatgttggtgcacatacacttagttccatcacttccactgccttgcacggacactaagctcacctccagctctctccctgacaaatcgcatgtgccatgcatattattgtacatgtcccctttggattggtgtgagaatttccatgtgggattgcaggttcatagggcatatacttctctgcagtgtcgctgcaccagtccccaccccaccagcccaaactccagcaccttctactccctcactgcctctccagccccattttctgccacccccacctgaagttcccattaactgacatgctcactaattcaatgaaggtgagtgtttttgaaagccatctagcccaatcctcttgttttacagactaggactctagggcccagagaggggacatgagtggcccaacttcccaaagcttagaaaggcttacgtaggggagcctctgtctcttcataaacgctactcaaaagcaaaagttttcttccacttttcagaagcagaaaatagagttccagagacacaaagttagaaactttgggtctcatggaacattagaaggaaaggggaaaattgtggctcatttatccctgaaattgccttcttccctgatgtgtaaggttaagcaagggctgcatgcacctacagggtaagcaagggctggatgctagtgtcagaggaatctggggggttgtgctgcatttgggctcacttcatgtcatgtacagcagcaacatccagggtcagatggcccacaccactgcactcacctggccccagtaccagcctctgaggcctgggtgatctgatgggcctttcgtcagcctgatctttgtgaggattcagctagggatagcatatttagagcaaagtttgtctccatgtagtcgtgaattatccccacaaatcaaagctggtttgggaaacccaaggcaaaacttaagtcaggttaagcttataaaattgtttggggacaacagtaatataaatgagcaggctctttaatacatttaaaatgaagtcattgcatttttcatggggttttcatttcctgttccccctctgcctccagggcatcaatcccacactgagaaaatgtttgggaagcagaggctagagtggagaagaaagtgatattgtggctggcttccccagggcgcctcttcagtcagatctacccacaggggcccctacagtggtccccacactgagtaaaaaaagagaattacccatttggactcaggaccactgggtgcccaccgtcttgcacacctagactgtatcactttccagcttctgcaaggagagccagggcatttgtctcctgtgcggcccatactttatgcaagagcaaccacattccacctccacacctccacctccccttagctccccaaatccactcacaagttacaatttaataggcagatctaatctcaccaagattccaaagtattccagtcaatgcatcccaactctgcttgtctctgcctgtccacrgcctcctcttcttcctcctcccaagctgtgccacagcagagacctgtcagagaggaatcagaggttctcccctgtttagctttggcttgtttcattggaattctcaatggaagaatgcaaagtctttttatagtctccaataaaatgtagaggctaacggttgacagcatggcctttggagccaggaagcccagattttttgtcagctgtgtgaatttgggcaagttatttaacctctctgtgcctagattccccaactaacaaaatgggagtactaatacatacctacctattagcagtacttccctcacaggcttgattgtgggatttaaatatgttaatgccaatggtaatatgataagaacatgcttggcttgtgggaagtgtgaggttaagtgttagctacaatgaggatgattgatgaggaggaggatgagcagacacagacggcaaagaaagatgtaaattggttgaattgccaagctctgtaccatcttccccacattattcttggagctcagagattctacacatgtgcaaaagagcctccagagaaccagtactaacctggccagagtgaagtaatttccctgctgaggttgatgatggatagatattctagacatattggagggtggcactcatgagcagatatctgataccagactgttgccaagatggctggggctttgccttcttaggacagagaattagcaccctccaccccgcaaggtgctctagtctcctgctactcaaagtgtggtccaaggatgaaggacatgagtttcctctggaagtttctccaatatgcagaacctcagatctgtcccaggtctgcttaatcaaaatctgcattttaataagagccccaggcgatttctgtgtacactaaaatttgaaaactgctcttgtcatccaaacgcaggggagtggatgtggtgaccttccctttctgcccccactggactgcatgagccacatatggagggacggtgtctgtttcattactcaccttgtcctcagaattgagcttccttcctatcacacagggagcacttgtaaattcttggcagtagatggatgcatgagaaactgaataggtgaatgagtgagtgcatgaccgtgggctcagaagcccagtgtcttggtttcaggtccttggtgaatagtgccggcatatcccagcagaaggcaaaattggtggaccagactaacacctctgcagcaccgaattcactgccaagattgagcaagactggcttgagagacttgagactttcagtagtgtgcagcagggtagagctaggtcatgcaggaactgaccttgtgtctaccacatgtccctgctctcaatactcaagtggccctggc

SEQ ID NO: 692267 - DNA, 3309 bp, Homo sapiens
tcataagcacctgagaagtctttctaaaacataagtaaaattttatcactctcctgcttacagaaacagaaacaaagaacaaaaatatttttcttttgtttcccatcacctacacaggaatgcttttagttgttagtgtaggatttttgttttgtttgtttggagctcttttgtggacccggcgtgcaaaaggtcaagttaatcaaggtcaaataatccttggtctgtgggggactaatgtcaggatctttctgattgatgtgtattctcttttgtcactattctccctattataggcagccacacacacatgttgtatgggtatccttgagcttgcatgaacctttggaaaataagaattgttttcatctgcataagcaatagtgtattaagaccttgacgtgtttcttattttttcattcactgtgttaaattctgttcatgttggtgcacatacacttagttccatcacttccactgccttgcacggacactaagctcacctccagctctctccctgacaaatcgcatgtgccatgcatattattgtacatgtcccctttggattggtgtgagaatttccatgtgggattgcaggttcatagggcatatacttctctgcagtgtcgctgcaccagtccccaccccaccagcccaaactccagcaccttctactccctcactgcctctccagccccattttctgccacccccacctgaagttcccattaactgacatgctcactaattcaatgaaggtgagtgtttttgaaagccatctagcccaatcctcttgttttacagactaggactctagggcccagagaggggacatgagtggcccaacttcccaaagcttagaaaggcttacgtaggggagcctctgtctcttcataaacgctactcaaaagcaaaagttttcttccacttttcagaagcagaaaatagagttccagagacacaaagttagaaactttgggtctcatggaacattagaaggaaaggggaaaattgtggctcatttatccctgaaattgccttcttccctgatgtgtaaggttaagcaagggctgcatgcacctacagggtaagcaagggctggatgctagtgtcagaggaatctggggggttgtgctgcatttgggctcacttcatgtcatgtacagcagcaacatccagggtcagatggcccacaccactgcactcacctggccccagtaccagcctctgaggcctgggtgatctgatgggcctttcgtcagcctgatctttgtgaggattcagctagggatagcatatttagagcaaagtttgtctccatgtagtcgtgaattatccccacaaatcaaagctggtttgggaaacccaaggcaaaacttaagtcaggttaagcttataaaattgtttggggacaacagtaatataaatgagcaggctctttaatacatttaaaatgaagtcattgcatttttcatggggttttcatttcctgttccccctctgcctccagggcatcaatcccacactgagaaaatgtttgggaagcagaggctagagtggagaagaaagtgatattgtggctggcttccccagggcgcctcttcagtcagatctacccacaggggcccctacagtggtccccacactgagtaaaaaaagagaattacccatttggactcaggaccactgggtgcccaccgtcttgcacacctagactgtatcactttccagcttctgcaaggagagccagggcatttgtctcctgtgcggcccatactttatgcaagagcaaccacattccacctccacacctccacctccccttagctccccaaatccactcacaagttacaatttaataggcagatctaatctcaccaagattccaaagtattccagtcaatgcatcccaactctgcttgtctctgcctgtccacagcctcctcttcttcctcctcccaagctgtgccacagcagagacctgtcagagaggaatcagaggttctcccctgtttagctttggcttgtttcattggaattctcaatggaagaatgcaaagtctttttatagtctccaataaaatgtagaggctaacggttgacagcatggcctttggagccaggaagcccagattttttgtcagctgtgtgaatttgggcaagttatttaacctctctgtgcctagattccccaactaacaaaatgggagtactaatacatacctacctattagcagtacttccctcacaggcttgattgtgggatttaaatatgttaatgccaatggtaatatgataagaacatgcttggcttgtgggaagtgtgaggttaagtgttagctacaatgaggatgaytgatgaggaggaggatgagcagacacagacggcaaagaaagatgtaaattggttgaattgccaagctctgtaccatcttccccacattattcttggagctcagagattctacacatgtgcaaaagagcctccagagaaccagtactaacctggccagagtgaagtaatttccctgctgaggttgatgatggatagatattctagacatattggagggtggcactcatgagcagatatctgataccagactgttgccaagatggctggggctttgccttcttaggacagagaattagcaccctccaccccgcaaggtgctctagtctcctgctactcaaagtgtggtccaaggatgaaggacatgagtttcctctggaagtttctccaatatgcagaacctcagatctgtcccaggtctgcttaatcaaaatctgcattttaataagagccccaggcgatttctgtgtacactaaaatttgaaaactgctcttgtcatccaaacgcaggggagtggatgtggtgaccttccctttctgcccccactggactgcatgagccacatatggagggacggtgtctgtttcattactcaccttgtcctcagaattgagcttccttcctatcacacagggagcacttgtaaattcttggcagtagatggatgcatgagaaactgaataggtgaatgagtgagtgcatgaccgtgggctcagaagcccagtgtcttggtttcaggtccttggtgaatagtgccggcatatcccagcagaaggcaaaattggtggaccagactaacacctctgcagcaccgaattcactgccaagattgagcaagactggcttgagagacttgagactttcagtagtgtgcagcagggtagagctaggtcatgcaggaactgaccttgtgtctaccacatgtccctgctctcaatactcaagtggccctggc

SEQ ID NO: 692268 - DNA, 3309 bp, Homo sapiens
tcataagcacctgagaagtctttctaaaacataagtaaaattttatcactctcctgcttacagaaacagaaacaaagaacaaaaatatttttcttttgtttcccatcacctacacaggaatgcttttagttgttagtgtaggatttttgttttgtttgtttggagctcttttgtggacccggcgtgcaaaaggtcaagttaatcaaggtcaaataatccttggtctgtgggggactaatgtcaggatctttctgattgatgtgtattctcttttgtcactattctccctattataggcagccacacacacatgttgtatgggtatccttgagcttgcatgaacctttggaaaataagaattgttttcatctgcataagcaatagtgtattaagaccttgacgtgtttcttattttttcattcactgtgttaaattctgttcatgttggtgcacatacacttagttccatcacttccactgccttgcacggacactaagctcacctccagctctctccctgacaaatcgcatgtgccatgcatattattgtacatgtcccctttggattggtgtgagaatttccatgtgggattgcaggttcatagggcatatacttctctgcagtgtcgctgcaccagtccccaccccaccagcccaaactccagcaccttctactccctcactgcctctccagccccattttctgccacccccacctgaagttcccattaactgacatgctcactaattcaatgaaggtgagtgtttttgaaagccatctagcccaatcctcttgttttacagactaggactctagggcccagagaggggacatgagtggcccaacttcccaaagcttagaaaggcttacgtaggggagcctctgtctcttcataaacgctactcaaaagcaaaagttttcttccacttttcagaagcagaaaatagagttccagagacacaaagttagaaactttgggtctcatggaacattagaaggaaaggggaaaattgtggctcatttatccctgaaattgccttcttccctgatgtgtaaggttaagcaagggctgcatgcacctacagggtaagcaagggctggatgctagtgtcagaggaatctggggggttgtgctgcatttgggctcacttcatgtcatgtacagcagcaacatccagggtcagatggcccacaccactgcactcacctggccccagtaccagcctctgaggcctgggtgatctgatgggcctttcgtcagcctgatctttgtgaggattcagctagggatagcatatttagagcaaagtttgtctccatgtagtcgtgaattatccccacaaatcaaagctggtttgggaaacccaaggcaaaacttaagtcaggttaagcttataaaattgtttggggacaacagtaatataaatgagcaggctctttaatacatttaaaatgaagtcattgcatttttcatggggttttcatttcctgttccccctctgcctccagggcatcaatcccacactgagaaaatgtttgggaagcagaggctagagtggagaagaaagtgatattgtggctggcttccccagggcgcctcttcagtcagatctacccacaggggcccctacagtggtccccacactgagtaaaaaaagagaattacccatttggactcaggaccactgggtgcccaccgtcttgcacacctagactgtatcactttccagcttctgcaaggagagccagggcatttgtctcctgtgcggcccatactttatgcaagagcaaccacattccacctccacacctccacctccccttagctccccaaatccactcacaagttacaatttaataggcagatctaatctcaccaagattccaaagtattccagtcaatgcatcccaactctgcttgtctctgcctgtccacagcctcctcttcttcctcctcccaagctgtgccacagcagagacctgtcagagaggaatcagaggttctcccctgtttagctttggcttgtttcattggaattctcaatggaagaatgcaaagtctttttatagtctccaataaaatgtagaggctaacggttgacagcatggcctttggagccaggaagcccagattttttgtcagctgtgtgaatttgggcaagttatttaacctctctgtgcctagattccccaactaacaaaatgggagtactaatacatacctacctattagcagtacttccctcacaggcttgattgtgggatttaaatatgttaatgccaatggtaatatgataagaacatgcttggcttgtgggaagtgtgaggttaagtgttagctacaatgaggatgattgatgaggaggaggatgagcagacacagacggcaaagaaagatgtaaattggttgaattgccaagctctgtaccatcttccccacattattcttggagctcagagattctacacatgtgcaaaagagcctccagagaaccagtactaacctggccagagtgaagtaatttccctgctgaggttgatgatggatagatattctagacatattggagggtggcactcatgagcagatatctgataccagactgttgccaagatggctggggctttgccttcttaggacagagaattagcaccctccaccccgcaaggtgctctagtctcctgctactcaaagtgtggtccaaggatgaaggacatgagtttcctctggaagtttctccaatatgcagaacctcagatctgtcccaggtctgcttaatcaaaatctgcattttaataagagccccaggcgatttctgtgtacactaaaatttgaaaactgctcttgtcatccaaacgcaggggagtggatgtggtgaccttccctttctgcccccactggactgcatgagccacatatggagggacggtgtctgtttcattactcaccktgtcctcagaattgagcttccttcctatcacacagggagcacttgtaaattcttggcagtagatggatgcatgagaaactgaataggtgaatgagtgagtgcatgaccgtgggctcagaagcccagtgtcttggtttcaggtccttggtgaatagtgccggcatatcccagcagaaggcaaaattggtggaccagactaacacctctgcagcaccgaattcactgccaagattgagcaagactggcttgagagacttgagactttcagtagtgtgcagcagggtagagctaggtcatgcaggaactgaccttgtgtctaccacatgtccctgctctcaatactcaagtggccctggc

SEQ ID NO: 692269 - DNA, 3309 bp, Homo sapiens
tcataagcacctgagaagtctttctaaaacataagtaaaattttatcactctcctgcttacagaaacagaaacaaagaacaaaaatatttttcttttgtttcccatcacctacacaggaatgcttttagttgttagtgtaggatttttgttttgtttgtttggagctcttttgtggacccggcgtgcaaaaggtcaagttaatcaaggtcaaataatccttggtctgtgggggactaatgtcaggatctttctgattgatgtgtattctcttttgtcactattctccctattataggcagccacacacacatgttgtatgggtatccttgagcttgcatgaacctttggaaaataagaattgttttcatctgcataagcaatagtgtattaagaccttgacgtgtttcttattttttcattcactgtgttaaattctgttcatgttggtgcacatacacttagttccatcacttccactgccttgcacggacactaagctcacctccagctctctccctgacaaatcgcatgtgccatgcatattattgtacatgtcccctttggattggtgtgagaatttccatgtgggattgcaggttcatagggcatatacttctctgcagtgtcgctgcaccagtccccaccccaccagcccaaactccagcaccttctactccctcactgcctctccagccccattttctgccacccccacctgaagttcccattaactgacatgctcactaattcaatgaaggtgagtgtttttgaaagccatctagcccaatcctcttgttttacagactaggactctagggcccagagaggggacatgagtggcccaacttcccaaagcttagaaaggcttacgtaggggagcctctgtctcttcataaacgctactcaaaagcaaaagttttcttccacttttcagaagcagaaaatagagttccagagacacaaagttagaaactttgggtctcatggaacattagaaggaaaggggaaaattgtggctcatttatccctgaaattgccttcttccctgatgtgtaaggttaagcaagggctgcatgcacctacagggtaagcaagggctggatgctagtgtcagaggaatctggggggttgtgctgcatttgggctcacttcatgtcatgtacagcagcaacatccagggtcagatggcccacaccactgcactcacctggccccagtaccagcctctgaggcctgggtgatctgatgggcctttcgtcagcctgatctttgtgaggattcagctagggatagcatatttagagcaaagtttgtctccatgtagtcgtgaattatccccacaaatcaaagctggtttgggaaacccaaggcaaaacttaagtcaggttaagcttataaaattgtttggggacaacagtaatataaatgagcaggctctttaatacatttaaaatgaagtcattgcatttttcatggggttttcatttcctgttccccctctgcctccagggcatcaatcccacactgagaaaatgtttgggaagcagaggctagagtggagaagaaagtgatattgtggctggcttccccagggcgcctcttcagtcagatctacccacaggggcccctacagtggtccccacactgagtaaaaaaagagaattacccatttggactcaggaccactgggtgcccaccgtcttgcacacctagactgtatcactttccagcttctgcaaggagagccagggcatttgtctcctgtgcggcccatactttatgcaagagcaaccacattccacctccacacctccacctccccttagctccccaaatccactcacaagttacaatttaataggcagatctaatctcaccaagattccaaagtattccagtcaatgcatcccaactctgcttgtctctgcctgtccacagcctcctcttcttcctcctcccaagctgtgccacagcagagacctgtcagagaggaatcagaggttctcccctgtttagctttggcttgtttcattggaattctcaatggaagaatgcaaagtctttttatagtctccaataaaatgtagaggctaacggttgacagcatggcctttggagccaggaagcccagattttttgtcagctgtgtgaatttgggcaagttatttaacctctctgtgcctagattccccaactaacaaaatgggagtactaatacatacctacctattagcagtacttccctcacaggcttgattgtgggatttaaatatgttaatgccaatggtaatatgataagaacatgcttggcttgtgggaagtgtgaggttaagtgttagctacaatgaggatgattgatgaggaggaggatgagcagacacagacggcaaagaaagatgtaaattggttgaattgccaagctctgtaccatcttccccacattattcttggagctcagagattctacacatgtgcaaaagagcctccagagaaccagtactaacctggccagagtgaagtaatttccctgctgaggttgatgatggatagatattctagacatattggagggtggcactcatgagcagatatctgataccagactgttgccaagatggctggggctttgccttcttaggacagagaattagcaccctccaccccgcaaggtgctctagtctcctgctactcaaagtgtggtccaaggatgaaggacatgagtttcctctggaagtttctccaatatgcagaacctcagatctgtcccaggtctgcttaatcaaaatctgcattttaataagagccccaggcgatttctgtgtacactaaaatttgaaaactgctcttgtcatccaaacgcaggggagtggatgtggtgaccttccctttctgcccccactggactgcatgagccacatatggagggacggtgtctgtttcattactcaccttgtcctcagaattgagcttccttcctatcacacagggagcacttgtaaattcttggcagtagatggatgcatgagaaactgaataggtgaatgagtgagtgcatgaccgtgggytcagaagcccagtgtcttggtttcaggtccttggtgaatagtgccggcatatcccagcagaaggcaaaattggtggaccagactaacacctctgcagcaccgaattcactgccaagattgagcaagactggcttgagagacttgagactttcagtagtgtgcagcagggtagagctaggtcatgcaggaactgaccttgtgtctaccacatgtccctgctctcaatactcaagtggccctggc

SEQ ID NO: 692270 - DNA, 606 bp, Homo sapiens
atgtgtgtagttcaatatagtttatatatgtaaattatacctcaataaagttggttttaaaacttcaattgatactcttaaatggtaacattttaatgtatgtcagcacctactgctattactgctgtgggcaaaaggatattttcctacctttcctgtagaaaggtaaatttttacaacttttatggaagcaactttgagacatctattaagacaaaaattgtaccttttaatccaacctgtttcttgactcttttccrtaggaataaaagttccagtagataaaaacacgtatgcatatgtttaatgaagcatatttcttagtggctaaaagctgggtaccaaattaattcccattattaggggaatggctgattaaattgcagaatatgcttatcataggatataatatagccattaaaagggtaagttagaactgtaactgatgaaaggatttccatgagatattgttgaaggaaaaaagcatgatgcacataatagaatcagatagactactttatttttgaaaagaaatagtgtgccaagaaatagcctgtaaatatgcatattttaatttataagaataacattgaaggatatatttca

SEQ ID NO: 692271 - DNA, 606 bp, Homo sapiens
atgtgtgtagttcaatatagtttatatatgtaaattatacctcaataaagttggttttaaaacttcaattgatactcttaaatggtaacattttaatgtatgtcagcacctactgctattactgctgtgggcaaaaggatattttcctacctttcctgtagaaaggtaaatttttacaacttttatggaagcaactttgagacatctattaagacaaaaattgtaccttttaatccaacctgtttcttgactcttttccataggaataaaagttccagtagataaaaacacgtatgcatatgtttaatgaagcatakttcttagtggctaaaagctgggtaccaaattaattcccattattaggggaatggctgattaaattgcagaatatgcttatcataggatataatatagccattaaaagggtaagttagaactgtaactgatgaaaggatttccatgagatattgttgaaggaaaaaagcatgatgcacataatagaatcagatagactactttatttttgaaaagaaatagtgtgccaagaaatagcctgtaaatatgcatattttaatttataagaataacattgaaggatatatttca

SEQ ID NO: 692272 - DNA, 760 bp, Homo sapiens
ttttaaagaaaaattgcctgggtcaggtgcagtggctcaggcctgtaaatccagcactttgggaggccaaggtgggtagatcacttgaggtcaggagtttgagaccagcctggccagcatggtgaaaacccatctctattaagaatacaaaaactagctggggatagtggcaggtgcatgtaatcccagctacttgggaggctgaggtacaaaaatctcttgaacccaggaggtggagttgtagtgagcagagatcacgccactgtactctagtagactaggtgacaaagcaagactccatctcaaaaaaaaaaaaaaaaagaaaagaaaaattgctggtttaaataaagtaatatgacgttgatggtacatgcaacttatatctataagcaaaataacaaaagtagcatacaggctgggaagggaaatatgaaaggttattataataaatgtgaagtggcataatattgctgtaagaagataaaaagttatagtatgcggaaatctctgggcccagatgatttcactaaagaaatctaccaaacagttaaggaaaaattaatagcaatactatataatttmtcccagaaaacagaagaggagaaaatactacccaatctattttatgaagctaatactgtcctgataccaaaaccaaagatagtacaaaacaagcaaaaactgcagaccaaaatctttcgtgaacatagacacaaacatccttaacaaaatattagtgaatacaattcagcaatatata

SEQ ID NO: 692273 - DNA, 760 bp, Homo sapiens
ttttaaagaaaaattgcctgggtcaggtgcagtggctcaggcctgtaaatccagcactttgggaggccaaggtgggtagatcacttgaggtcaggagtttgagaccagcctggccagcatggtgaaaacccatctctattaagaatacaaaaactagctggggatagtggcaggtgcatgtaatcccagctacttgggaggctgaggtacaaaaatctcttgaacccaggaggtggagttgtagtgagcagagatcacgccactgtactctagtagactaggtgacaaagcaagactccatctcaaaaaaaaaaaaaaaaagaaaagaaaaattgctggtttaaataaagtaatatgacgttgatggtacatgcaacttatatctataagcaaaataacaaaagtagcatacaggctgggaagggaaatatgaaaggttattataataaatgtgaagtggcataatattgctgtaagaagataaaaagttatagtatgcggaaatctctgggcccagatgatttcactaaagaaatctaccaaacagttaaggaaaaattaatagcaatactatataatttatcccagaaaacagaagaggagaaaatactacccaatctattttatgaagctaatactgtcctgataccaaaaccaaagatagtacaaaacaagcaaaaactgcagaccaaaatctttcgtgaacatagacacaaacatccttaacaaartattagtgaatacaattcagcaatatata

SEQ ID NO: 692274 - DNA, 626 bp, Homo sapiens
gttccacctttctgaaccaaaccaatgtataccctacatgtattgattgatgtcttatgtctccatgaaacacataaaattaagctgtaacccaatcacgttgggcacatgttttcaggacctatgtcttatacttatataaaacaaaatatactttaagtggaaagatccaaaattgacaccctaacatcacaattaaaagaactagaaaagcaagagcaaacacattcaaaagctagcagaaggcaagaaataactaaaatcagggcagaaccgaaggaaatagagacaaaaaaaacccttcaaaaaattaatgaatccaggagctggttttttgaaaggatcaacaaaattgatagaccgctagcaagactaataaagaaaaaaagagagaagaatcaaatagacgcaataaaaaatgataaaggggatatcaccaccratcccacagaaatacaaactaccatcagagaatactacaaacacctctacgcaaataaactagaaaatctagaagaaatggataaattcctcgacacatacactctcccaagactaaatgaggaagaagttgaatctctgaatagaccaataacaggatctgaaattgtggcaataatcaatag

SEQ ID NO: 692275 - DNA, 1088 bp, Homo sapiens
tgtgtattatagtatttaatatacaataacattacaaagtaggcagtgatattatctatgtcttacagatgaagaaacaaagctcggtcaggcaggctgtctggcagaagttcacagagctgtgtcagcagcacagcctgacgggaatccacatctgttcaaagccaaagatggtgttcttaaccctcatgctcttcatcaatgctttgctggcagcctgaaagaacactggcacttcccaaaagtagctcatttctttttttgggattaaatatacactctggacctcatacatatgaaatatgttagggctgtttatcagaggatggaaaacttttaaggtttggaaacattttattaaagaactcatgaatatgggaaaataataagcattcaacaactttgaattgaaatgtttttgagattttaacaaacaagaattaaataaaacataaatttagggagttacagcaacattttaaataattaatctattcatggtatcaattttgaaagatattgataccttatcagaagaatgatgtttccttactgtttttgcaaaagacgctcatgaccagtctcgttcataggagagtctaatttcagagtggatgaaagactcagatttttgcagctgaagagactttagaagtcatccagataaatcactctgagttttctagacagaggcttgtctcatttttccttaaacatctctagtgatggaatatgctctgccttctggggcatcacatttcatcctaacagctcttgttagttctttctttcaattgagtccaaatctatatctttaatttccacccaattgcttccttttctttgcttttccaaataacagcccaaattttttctttctcttgccccaattccctatttttctcaagtactccataygtaacatggttctgggtccttttgtcattctgatagattttcttagtatatatgttcctttttttgaagttcattcttaagtgtgtgattccaaacaaaagacaatgcacaaagaactgttagtaaattgcagaataaaatagcactatcgttttccttgattcaccatg

SEQ ID NO: 692276 - DNA, 1088 bp, Homo sapiens
tgtgtattatagtatttaatatacaataacattacaaagtaggcagtgatattatctatgtcttacagatgaagaaacaaagctcggtcaggcaggctgtctggcagaagttcacagagctgtgtcagcagcacagcctgacgggaatccacatctgttcaaagccaaagatggtgttcttaaccctcatgctcttcatcaatgctttgctggcagcctgaaagaacactggcacttcccaaaagtagctcatttctttttttgggattaaatatacactctggacctcatacatatgaaatatgttagggctgtttatcagaggatggaaaacttttaaggtttggaaacattttattaaagaactcatgaatatgggaaaataataagcattcaacaactttgaattgaaatgtttttgagattttaacaaacaagaattaaataaaacataaatttagggagttacagcaacattttaaataattaatctattcatggtatcaattttgaaagatattgataccttatcagaagaatgatgtttccttactgtttttgcaaaagacgctcatgaccagtctcgttcataggagagtctaatttcagagtggatgaaagactcagatttttgcagctgaagagactttagaagtcatccagataaatcactctgagttttctagacagaggcttgtctcatttttccttaaacatctctagtgatggaatatgctctgccttctggggcatcacatttcatcctaacagctcttgttagttctttctttcaattgagtccaaatctatatctttaatttccacccaattgcttccttttctttgcttttccaaataacagcccaaattttttctttctcttgccccaattccctatttttctcaagtactccatatgtaacatggttctgggtccttttgtcattctgatagattttcwtagtatatatgttcctttttttgaagttcattcttaagtgtgtgattccaaacaaaagacaatgcacaaagaactgttagtaaattgcagaataaaatagcactatcgttttccttgattcaccatg

SEQ ID NO: 692277 - DNA, 693 bp, Homo sapiens
ttctttaaggaatctccatgtattgtccatagtcattacactaatttacattcccatcagcagtgtaaaagtgttccctttttaccacatccataccaacatctattgtttttagattttttaattatagccattcttgcagtagtaaggtagcatctcattgtgattttaatttgcatttccctgatkattagtgatgttgaccattttttcatgtttgttagctgttgtatgtcttctttttagaaatgtctactcatgtcctttgtccactttttgatgggattatttgtttgtttttttttttttgctgatttgttttaattctttgtagattctggaaactagtcctttgtcagatgcaaagtttgagaatataagcaaatatttttaagcaactcaaagttaaaaggtggcttaaagatcactgaactcatctgactcagttgtgagttcagaaaaggaattaagaatagaggcagactaaggtcaagaactcaggctctctgacaaccagttgagtgttgtttcttttaattttttctttttccaagagaatttattttctgctttatttaggtataattgacaagtaaaattatgtattttcagggaatacatatctctggtatacatatgcattgtgaagtgattaccacactcaagctaattaatgtatttatcacctcaaat

SEQ ID NO: 692278 - DNA, 589 bp, Homo sapiens
cattattgcagtgcataaataaaaaagaactagatgaatatgtttttcgttttactgtgaatataaattarccacttaaaattattatttcaaattggtaatatcttttttctttccttccttattcatcactgcttttgcaaatccatgtaggaattttagataactatgtgtaaagtgtctaataaaagaagaatgtacattgtccagtgtggactgaacatctattcagaggtcacctgtttagcaattgacatctatcaattactgctcttaatgaggttgctggtttcaccgatgacaagtcatgaaaagactaaggcaaactgataaatctctgcctgataataagcatatttgtgctcataggtacattctttgaattatcctaaattctagaatgaaaagtatgaggtaaataaaatattttcctggttgacatttatatttggaaataattagaaaattgttttcaatatgtaaaatagcaagaaatcaactttgttaatactttaaaccatgctcataaagcatacttcttgtcatgttctgcctaattttgcacctgattttccattttctccgctct

SEQ ID NO: 692279 - DNA, 1476 bp, Homo sapiens
tggaaggaattatagtgcagcagatggagctgaggcctgcaggagcctcagggagagagggttgaactgctggccctcctccttcaaggttaggagatctcaggcaactggcttcctctccctgactcttggcttcctggtttgtaaaaggggatataacacaactcgcaaaatattgttggtgaacagtaaaggaaataatgtgcaggggatcaagcagagtctagcacatagcactcattcaatgggagtatgatcctaagaatamgtgttaatcaggcaaaatgtaggggaagatgctatggactgaacgcctgtgtccccccaaaaatccatatgttgaaaactgttctgtggcaggcagatctatgcaaacctacccctaaaggcaaggggagctgagaggccaaagaaagaggctgacaaaatccagtttctcagaaagaaacatctaatagaggcttaggaacagaaggcatgtcttgggcaagatggtggatctccaagtccttatcatctcccagacccagggcctatgtaccataaagaaaggatatatgtgcttcagaaagagtttgcctgtgtggaggatttacagtaaacagtagataaagcagaaatcttagaggcattcctggaactggaattaatcagaagtcaacatggcagactagcatccaagatggagttgcttcagcgcctacaaaacctaatctccaatgtgatggcattaggtggagagtcctatgggagatgattaggtcatgagggcagaaccctcaagaatgagattaatgcccttataaaagaggccccagagaggtgccttcccctttctaccatgtgaggacacgtctatgaatcagaaagcaggtcctcaccaaacaccaaatctaccttgaccttggacttcccagaccccagatctgtgagaaatgaatttctgttgtgtataagccacccagttaatggccttgtattacagcagataatacagcagatagactaagacagaagggtcccactggggtactgtcactgacatgccactttgcgggaggccagcaagaagagtggcagggactggggctccaggaacaagtgtgtggttcagacacagaattatagcacctgtggaggtggaaaggtgagagctggagtgtcccagagcatgaggcaggtcagcaggaaagagcccaggcccaggcccaggaaatgaggcagggtcctatgacccaagcaagagaactcggcaggcagcctatcgtgggcttgtggcaggcagggctggacagacctgtgcaggcacccacatgttctctcagcctgaaggcaggaatgctgcccctcttccccaagttccatgcactcagtccagggcctgaaggaatggatgaaggacccccacgaggttgcagtcccaccacatgctacagccagggtgttgggcacaacttttaggactctttcagcctc

SEQ ID NO: 692280 - DNA, 1476 bp, Homo sapiens
tggaaggaattatagtgcagcagatggagctgaggcctgcaggagcctcagggagagagggttgaactgctggccctcctccttcaaggttaggagatctcaggcaactggcttcctctccctgactcttggcttcctggtttgtaaaaggggatataacacaactcgcaaaatattgttggtgaacagtaaaggaaataatgtgcaggggatcaagcagagtctagcacatagcactcattcaatgggagtatgatcctaagaataagtgttaatcaggcaaaatgtaggggaagatgctatggactgaacgcctgtgtccccccaaaaatccatatgttgaaaactgttctgtggcaggcagatctatgcaaacctacccctaaaggcaaggggagctgagaggccaaagaaagaggctgacaaaatccagtttctcagaaagaaacatctaatagaggcttaggaacagaaggcatgtcttgggcaagatggtggatctccaagtccttatcatctcccagacccagggcctatgtaccataaagaaaggatatatgtgcttcagaaagagtttgcctgtgtggaggatttacagtaaacagtagataaagcagaaatcttagaggcattcctggaactggaattaatcagaagtcaacatggcagactagcatccaagatggagttgcttcagcgcctacaaaacctaatctccaatgtgatggcattaggtggagagtcctatgggagatgattaggtcatgagggcagaaccctcaagaatgagattaatgcccttataaaagaggccccagagaggtgccttcccctttctaccatgtgaggacacgtctatgaatcagaaagcaggtcctcaccaaacaccaaatctaccttgaccttggacttcccagaccccagatctgtgagaaatgaatttctgttgtgtataagccacccagttaatggccttgtattacagcagataatacagcagatagactaagacagaagggtcccactggggtactgtcactgacatgccactttgcgggaggccagcaagaagagtggcagggactggggctccaggaacaagtgtgtggttcagacacagaattatagcacctgtggaggtggaaaggtgagagctggagtgtcccagagcatgaggcaggtcagcaggaaagagcccaggcccaggcccaggaaatgaggcagggtcctrtgacccaagcaagagaactcggcaggcagcctatcgtgggcttgtggcaggcagggctggacagacctgtgcaggcacccacatgttctctcagcctgaaggcaggaatgctgcccctcttccccaagttccatgcactcagtccagggcctgaaggaatggatgaaggacccccacgaggttgcagtcccaccacatgctacagccagggtgttgggcacaacttttaggactctttcagcctc

SEQ ID NO: 692281 - DNA, 1476 bp, Homo sapiens
tggaaggaattatagtgcagcagatggagctgaggcctgcaggagcctcagggagagagggttgaactgctggccctcctccttcaaggttaggagatctcaggcaactggcttcctctccctgactcttggcttcctggtttgtaaaaggggatataacacaactcgcaaaatattgttggtgaacagtaaaggaaataatgtgcaggggatcaagcagagtctagcacatagcactcattcaatgggagtatgatcctaagaataagtgttaatcaggcaaaatgtaggggaagatgctatggactgaacgcctgtgtccccccaaaaatccatatgttgaaaactgttctgtggcaggcagatctatgcaaacctacccctaaaggcaaggggagctgagaggccaaagaaagaggctgacaaaatccagtttctcagaaagaaacatctaatagaggcttaggaacagaaggcatgtcttgggcaagatggtggatctccaagtccttatcatctcccagacccagggcctatgtaccataaagaaaggatatatgtgcttcagaaagagtttgcctgtgtggaggatttacagtaaacagtagataaagcagaaatcttagaggcattcctggaactggaattaatcagaagtcaacatggcagactagcatccaagatggagttgcttcagcgcctacaaaacctaatctccaatgtgatggcattaggtggagagtcctatgggagatgattaggtcatgagggcagaaccctcaagaatgagattaatgcccttataaaagaggccccagagaggtgccttcccctttctaccatgtgaggacacgtctatgaatcagaaagcaggtcctcaccaaacaccaaatctaccttgaccttggacttcccagaccccagatctgtgagaaatgaatttctgttgtgtataagccacccagttaatggccttgtattacagcagataatacagcagatagactaagacagaagggtcccactggggtactgtcactgacatgccactttgcgggaggccagcaagaagagtggcagggactggggctccaggaacaagtgtgtggttcagacacagaattatagcacctgtggaggtggaaaggtgagagctggagtgtcccagagcatgaggcaggtcagcaggaaagagcccaggcccaggcccaggaaatgaggcagggtcctatgacccaagcaagagaactcggcmggcagcctatcgtgggcttgtggcaggcagggctggacagacctgtgcaggcacccacatgttctctcagcctgaaggcaggaatgctgcccctcttccccaagttccatgcactcagtccagggcctgaaggaatggatgaaggacccccacgaggttgcagtcccaccacatgctacagccagggtgttgggcacaacttttaggactctttcagcctc

SEQ ID NO: 692282 - DNA, 634 bp, Homo sapiens
tttgtttttttgagatggagtcttactctgtcgcccaagctggagtgcattggcatgatctcggctcactgcatcctctgcctccccggttcaagcgattctcctgtctcagcctctggagtagcttacaggtgtgtgccaccacacccgcctaatttttgtatttttggtagagacggagttttgctatgttggccaggctggtctcaaacccctgacctcgagtgattcgcctgccttggcctcccaaagtgctgggattrcaggcttgagccaccgcgcctggccagaatctagatttttataagtggtacagagttgggtgtatttaagatggtatgggatgatgaagtactacttaaattagcctttctcacaggacctatttaaaaatacatgcatgcaagagtcatttaacaatctctttgcaatgggatcatttatgtaggaaatcccaagaaatttatagaaaagctattagaatgaataattgagtttattaagtttacagaaataaagtgactatagaaaaagtaactctatatactagcaacaaataattggaagttgaaataaaaattatgatttataatagcataacaatatgaaaactgtgggataaatttaacaaaat

SEQ ID NO: 692283 - DNA, 478 bp, Homo sapiens
agtgctgggattacaggtgtgagtcaccgtgcctggcctgaaagtcattcttaacactttcctttcctttccttccwtaccaccaaatttccgtcttttctgtctccgaaatctatttcaaatctccttctatttacctccatggccaccattgtaattcacgccctattttctcttgcttgagctgaaacaacagcaaatttgacgatgtcactgaatttgattatgcttgaaaatccttcagtgaattcctgttacagttgagacgaaacgcaaaacctacaaggctctgaagaaattggctgctacctattccttggccagagcatgcgtcactcctcttcaattgttgaagttccttaagccaggtgtttttaaccacagggcctttgcaccaactcctttatttgtccactctttcttactctttacatagctatctctgacccttttttatgtgtcagcttaagtatcattt

SEQ ID NO: 692284 - DNA, 478 bp, Homo sapiens
agtgctgggattacaggtgtgagtcaccgtgcctggcctgaaagtcattcttaacactttcctttcctttccttccataccaccaaatttccgtcttttctgtctccgaaatctatttcaaatctccttctatttacctccatggccaccattgtaattcacgccctattttctcttgcttgagctgaaacaacagcaaatttgacgatgtcactgaatttgattatgcttgaaaatccttcagtgaattcctgttacagttgagaygaaacgcaaaacctacaaggctctgaagaaattggctgctacctattccttggccagagcatgcgtcactcctcttcaattgttgaagttccttaagccaggtgtttttaaccacagggcctttgcaccaactcctttatttgtccactctttcttactctttacatagctatctctgacccttttttatgtgtcagcttaagtatcattt

SEQ ID NO: 692285 - DNA, 1539 bp, Homo sapiens
tgtttcatgtggccttaccatgtctcacaaaagcatcttaccacctaaccctcgattcctgcagcaggctccaggtacatacctccacatagcacctttcttctcacagtgaggttgacctgcccattgcgggctgcgtggtgcatgaggtcgatgacatagcggtgggttttgccggctactggaatcccatcaacatacacaagctcatctcctgggtgaaggcggccatctctgtcggctgagcccatggcaatgacagctccaatcaaaatctagagaagcagtgagaaggaaaggacattcacatttcaatcctttttccttttttttttttttcgaaacagagtctcgcttcgttgcccaagctgaagtacagtggcccagtctcagctcactgcaagctctgcctcccaggttcacgccatctttttcctttttatatacagttatataacttgtggaagatttgattctcacattccatctcttgccctcaaatctgagcatgcacttgtaaagtaaaaaatgagatgttggaaagatgccctttcaactcttttaagttgtttagtgctagagataaatattttgaacatgctgcagactgccatgaagttttggggacacctgctttctggctcatcataaatgacgaatacccttaaggaaaattctaatcccaaataatctgatgctaattggctgaaacaaggtgaggattgaattctggctccgtttcacaatttgtgtggtcttgggtaaagcttcttaaactctgtgagcctcagtttcttcacttgcaaaataagaaaaataataatcagacctacttcatggagttattgggagaattggatgaaataactcatgtgaagcatttaacttttttcacggcacttaacgagggatcaaaaagactcaaggggaaactagctgttgcacatttttaaattctgacaaagattgaaagttttctttttctttgctttgaaaagctggagggtaaggagaaaacaaaacaaaacaaagcaaactcatagttggctttttctggccagttgacttactcaaaaaaatctcaaaccttctccagatttttgttctattcttttgaatacttcctcagagcactgtcctctacgcaaaggacattcccagttctgcctgttccctgaagtgcttctgctgtttgggtggctactgtgccaggaagtgagaaggtacccgtctaggaaatgtggttatttttataattccctgaaccagggactgtgatgaaaggcaacacataagttttcccatgtcccattagaggcactcagtttagtgtgcattagcagggcttttttctttctcagaggaaagaaaatagtattacatattttaattttgctgtttaacctataaacaatttttcaaactcatgaccaataggtcccccttttcttttgccagtggcttagccacacagcagctgatggcagtggttaccattagcctgatgatactacagaggctaygtttcattttaaatcc

SEQ ID NO: 692286 - DNA, 652 bp, Homo sapiens
agtgagtaatattgtttctggtcaaacccaggtcatgacaataaagaaatgagactggttttcttgtctggctcctgaaatgatgctgaagacagttctgaacttttaggggttctagaaacattctgagcaatggcagtattggtgttatgctccagtacagaaactaatgcctttatcttatttgtctgttgacctctgtgcttctaacttgactgcaggttcattgagggcraagtcagattcttttcaactgtgtttctgtagcgcacctcactcactgctgtgccccagcaattgctcaatacaagttggctgaccgagtgaatataaagtatctgcagcaaatgatccttcatcagctctcagaagctcctgaaaatatgctgatgatgcttgtgcagacaaactacaccctcctccccaccctccctgccttctgctgccatattggtttcaccagaggggaggaataacatcgtcctgtgccagttgtaccatccatgggaaaatcccacggacataggattatctcatgccacagatctctattgccttttcgcctgctctccttctccttatgtctggacctcgtttggttttgcccaggtttcatctgattatatgtctggctccaatatcaattattcca

SEQ ID NO: 692287 - DNA, 1244 bp, Homo sapiens
  misc_feature 474, 475, 476, 477, 478, 479, 480, 481, 482, 483, 484, 485,486, 487, 488, 489, 490, 491, 492, 493, 494, 495, 496, 497,498, 499, 500, 501, 502, 503, 504, 505, 506, 507, 508, 509,510, 511, 512, 513, 514, 515, 516, 517, 518, 519, 520: n = A,T,C or G
  misc_feature 521, 522, 523, 524, 525, 526, 527, 528, 529, 530, 531, 532,533, 534, 535, 536, 537, 538, 539, 540, 541, 542, 543, 544,545, 546, 547, 548, 549, 550, 551, 552, 553, 554, 555, 556,557, 558, 559, 560, 561, 562, 563, 564, 565, 566, 567: n = A,T,C or G
  misc_feature 568, 569, 570, 571, 572, 573: n = A,T,C or G
tgctaaataaaaatggtgtgtgtgtgtgtgtgtgtttgtgtgtgtgtgtgtgtgtgtgtgtgtggtggatgtatttcatagtcaaatgcactttagagggtaaggcagcagtacggaaaaactgttaagaagacagattctggagttgtgtgaaattggcaaattacttaatctctgagtcttaatttcctcatctgtaaaataaagggagaaaatattcataccsttgggattgttatgaggactaagtgagttagcatttgtagccttttgaataataaatattgtacatgaagtattgaatgaaggtgtgtaaaacacaagaacaacggctctgaaaaatcagactgtaaaatgatgtttaattttgtttattttagaggtttcccgtgctgtttgaccatggaactattttttccccgaaataatatctattcacattccacagaatacttttctacagaaagcctttannnnnnnnnnnnnnnnnnnnnnnnnnnnnnnnnnnnnnnnnnnnnnnnnnnnnnnnnnnnnnnnnnnnnnnnnnnnnnnnnnnnnnnnnnnnnnnnnnnnaaaacatatacatcataaacagcatcatataattaccaaacaaaacagagtcattttcactttatcaggcacaaccgtgattataattaacgtaattataattaaccaggccagttttatttgttaccagccttacacactgtattaagccatagctccgactgtgaatctcaatccccctccttaaactcctgccccaaatccagcctaatgctttcttttcgggggtctagaactggtatcaacaatgtatacagatcttaatgatggtagtgtgcttgctgactcttgagcatcaaccataattttgctccttctgaatgaaggcagtaactggacatatgtggaggcctgactgccaagtcagtacttctacagctggtctctgctgctgggtcagttccaccaactttagtcttcatgccttaccccaggcatctcatatgaccctttcttcctgcctcataagtcttgccttagctacagcatacgtgaaacagctatgtaaagtattccatggggcctgaaagaaaaccttcattccttctctattataaattatcaaaagattcccttaaaactgaccaaagaatgagattattacatatgtacacaaattacataaatttgagatgtagaaaacattttcttcattaggattaaatttttta

SEQ ID NO: 692288 - DNA, 1244 bp, Homo sapiens
  misc_feature 474, 475, 476, 477, 478, 479, 480, 481, 482, 483, 484, 485,486, 487, 488, 489, 490, 491, 492, 493, 494, 495, 496, 497,498, 499, 500, 501, 502, 503, 504, 505, 506, 507, 508, 509,510, 511, 512, 513, 514, 515, 516, 517, 518, 519, 520: n = A,T,C or G
  misc_feature 521, 522, 523, 524, 525, 526, 527, 528, 529, 530, 531, 532,533, 534, 535, 536, 537, 538, 539, 540, 541, 542, 543, 544,545, 546, 547, 548, 549, 550, 551, 552, 553, 554, 555, 556,557, 558, 559, 560, 561, 562, 563, 564, 565, 566, 567: n = A,T,C or G
  misc_feature 568, 569, 570, 571, 572, 573: n = A,T,C or G
tgctaaataaaaatggtgtgtgtgtgtgtgtgtgtttgtgtgtgtgtgtgtgtgtgtgtgtgtggtggatgtatttcatagtcaaatgcactttagagggtaaggcagcagtacggaaaaactgttaagaagacagattctggagttgtgtgaaattggcaaattacttaatctctgagtcttaatttcctcatctgtaaaataaagggagaaaatattcatacccttgggattgttatgaggactaagtgagttagcatttgtagccttttgaataataaatattgtacatgaagtattgaatgaaggtktgtaaaacacaagaacaacggctctgaaaaatcagactgtaaaatgatgtttaattttgtttattttagaggtttcccgtgctgtttgaccatggaactattttttccccgaaataatatctattcacattccacagaatacttttctacagaaagcctttannnnnnnnnnnnnnnnnnnnnnnnnnnnnnnnnnnnnnnnnnnnnnnnnnnnnnnnnnnnnnnnnnnnnnnnnnnnnnnnnnnnnnnnnnnnnnnnnnnnaaaacatatacatcataaacagcatcatataattaccaaacaaaacagagtcattttcactttatcaggcacaaccgtgattataattaacgtaattataattaaccaggccagttttatttgttaccagccttacacactgtattaagccatagctccgactgtgaatctcaatccccctccttaaactcctgccccaaatccagcctaatgctttcttttcgggggtctagaactggtatcaacaatgtatacagatcttaatgatggtagtgtgcttgctgactcttgagcatcaaccataattttgctccttctgaatgaaggcagtaactggacatatgtggaggcctgactgccaagtcagtacttctacagctggtctctgctgctgggtcagttccaccaactttagtcttcatgccttaccccaggcatctcatatgaccctttcttcctgcctcataagtcttgccttagctacagcatacgtgaaacagctatgtaaagtattccatggggcctgaaagaaaaccttcattccttctctattataaattatcaaaagattcccttaaaactgaccaaagaatgagattattacatatgtacacaaattacataaatttgagatgtagaaaacattttcttcattaggattaaatttttta

SEQ ID NO: 692289 - DNA, 2343 bp, Homo sapiens
ttggtaatattgtgggaaaggacagaggttatcaatgaagaaggagtgaaaataatagttgcttcatttgataaattatttttcatttttattttaaaaatttaataaattaacttgataaacaaaaattacatatatttatatgtatagtgtatatatgtatatatttatagtgtacatggtgtatttatatatttatatataaactttcccacattttccttcctatataaaagtttatatatttatagtgtacatggtgtattaacgtatgtatacattgttgaatgctaaatcaaattaattaacatatgcattacctcacatagttatcattttttttgtagtgagaacccttaaaatctatgctgctagtaattttcaagtatataatatattgttattaactatagctgacatggtgcactgatgcagtagtgaatactcttctcttatgagaagtgggtggtattaaaaagtatcgtgctaatgatgcattgctcagagccgcggaaaactaacccttaataatagactcctgtgttccttgctggacactctcacaacttttcacatcttttattctcacagcactgtgtgtgtaaaggagaaaactgaacctcacagaatctagacagttactgagcaatagagctttgatttgacagcatgactttggaccctggaatctgttaccattaattatgtcatagtgcctcaggtttacgcagaaaatcagcgatgaaatcaggatttaaaatccatgtaggaatctcagtaaaaggtagatcaaggggccttacagaaatagggcctgaatctttgtgacattcaagaaaatttgctctttctaaggaggagaagcttggataacatttcttgtctagtgcagtttgtccttgtatagccctgtggagttccttctcactctattcactgtttcttgatcatctactgcatttaatccatcctaatgaacattggtcgtgtaagagcttattagatctagagaataagaattctacacagtaaatatatgcaaattttcttctctcagatttgagaaatgttatattatgataagaattggaataatttcagcatcaaaagtgtcctttggaattcccaaatgtccttaattacaattcatttcaatgtcagagtaggggtatcataacttataaactgctaggatattaaaaaaagggttaaacatccattaggctgggtgttaacaatagatgtatattatttgtatttttctccattgtaaaaaagcaaagcgttttcattactttagcacagttaatttattattttcaagctggtgcctaaacttctgaaacacaaaattaaygggctcttggcaaccttctctaaattactccaagtcaatagtggttcttcccatctgtcatcttaatttgcagtatgcctcccagaagcactaaaacaaagatacacactccgtgattttccattcccgttggcactaagcaaaaatagccataaattaattctttacatgaagactcccaagctggaagccatgatttaaaataaacttgggtgtcactcagccctgccaaccaactctttcagactgtaaatgccacatatatttatagagatatttagtgaataatagataaaagctcaatgagttattttctaaattagcaaccataaatgtcaactccataggttctgtttcatctgctttctattgaagtaattaaacctggaagtgataagaatatgttaatatttaatattatacccattttgttcatattgtgagagaagactcattatttttatccagaattatggaattcaattgagaataattcatggctcccatatagctttctatgatgagagggtaattgaaaagttgggtaagtaatttcagcatttttttgttgcttcatgctggaattgggcacaggttaccctgggagagatctcaaatcatagttgaatggtaaccaaggaaggagctaaaagaacaacaacagcagtgcaatgtacaacagatccaaagagtgaagcaagaccacaactagggaaaaataattgacagtgaagtcagaggctggagaaaaagaaaaggtagtaaagtagtttaagaattggtcagaactggtggttctatggtcaactattttgggtagtgccagcactatcctgaagtgatagttgcacattgaagtgacaacgggagcgtgcagggattgtaaagcaaaaaaaaaaaaaaaaaaaaccttaaattgtcctactctttgcccttaattgctgtagtttctttggtatttattccattttttttggcacaggaga

SEQ ID NO: 692290 - DNA, 2343 bp, Homo sapiens
ttggtaatattgtgggaaaggacagaggttatcaatgaagaaggagtgaaaataatagttgcttcatttgataaattatttttcatttttattttaaaaatttaataaattaacttgataaacaaaaattacatatatttatatgtatagtgtatatatgtatatatttatagtgtacatggtgtatttatatatttatatataaactttcccacattttccttcctatataaaagtttatatatttatagtgtacatggtgtattaacgtatgtatacattgttgaatgctaaatcaaattaattaacatatgcattacctcacatagttatcattttttttgtagtgagaacccttaaaatctatgctgctagtaattttcaagtatataatatattgttattaactatagctgacatggtgcactgatgcagtagtgaatactcttctcttatgagaagtgggtggtattaaaaagtatcgtgctaatgatgcattgctcagagccgcggaaaactaacccttaataatagactcctgtgttccttgctggacactctcacaacttttcacatcttttattctcacagcactgtgtgtgtaaaggagaaaactgaacctcacagaatctagacagttactgagcaatagagctttgatttgacagcatgactttggaccctggaatctgttaccattaattatgtcatagtgcctcaggtttacgcagaaaatcagcgatgaaatcaggatttaaaatccatgtaggaatctcagtaaaaggtagatcaaggggccttacagaaatagggcctgaatctttgtgacattcaagaaaatttgctctttctaaggaggagaagcttggataacatttcttgtctagtgcagtttgtccttgtatagccctgtggagttccttctcactctattcactgtttcttgatcatctactgcatttaatccatcctaatgaacattggtcgtgtaagagcttattagatctagagaataagaattctacacagtaaatatatgcaaattttcttctctcagatttgagaaatgttatattatgataagaattggaataatttcagcatcaaaagtgtcctttggaattcccaaatgtccttaattacaattcatttcaatgtcagagtaggggtatcataacttataaactgctaggatattaaaaaaagggttaaacatccattaggctgggtgttaacaatagatgtatattatttgtatttttctccattgtaaaaaagcaaagcgttttcattactttagcacagttaatttattattttcaagctggtgcctaaacttctgaaacacaaaattaatgggctcttggcaaccttctctaaattactccaagtcaatagtggttcttcccatctgtcatcttaatttgcagtatgcctcccagaagcactaaaacaaagatacacactccgtgattttccattcccgttggcactaagcaaaaatagccataaatkaattctttacatgaagactcccaagctggaagccatgatttaaaataaacttgggtgtcactcagccctgccaaccaactctttcagactgtaaatgccacatatatttatagagatatttagtgaataatagataaaagctcaatgagttattttctaaattagcaaccataaatgtcaactccataggttctgtttcatctgctttctattgaagtaattaaacctggaagtgataagaatatgttaatatttaatattatacccattttgttcatattgtgagagaagactcattatttttatccagaattatggaattcaattgagaataattcatggctcccatatagctttctatgatgagagggtaattgaaaagttgggtaagtaatttcagcatttttttgttgcttcatgctggaattgggcacaggttaccctgggagagatctcaaatcatagttgaatggtaaccaaggaaggagctaaaagaacaacaacagcagtgcaatgtacaacagatccaaagagtgaagcaagaccacaactagggaaaaataattgacagtgaagtcagaggctggagaaaaagaaaaggtagtaaagtagtttaagaattggtcagaactggtggttctatggtcaactattttgggtagtgccagcactatcctgaagtgatagttgcacattgaagtgacaacgggagcgtgcagggattgtaaagcaaaaaaaaaaaaaaaaaaaaccttaaattgtcctactctttgcccttaattgctgtagtttctttggtatttattccattttttttggcacaggaga

SEQ ID NO: 692291 - DNA, 2343 bp, Homo sapiens
ttggtaatattgtgggaaaggacagaggttatcaatgaagaaggagtgaaaataatagttgcttcatttgataaattatttttcatttttattttaaaaatttaataaattaacttgataaacaaaaattacatatatttatatgtatagtgtatatatgtatatatttatagtgtacatggtgtatttatatatttatatataaactttcccacattttccttcctatataaaagtttatatatttatagtgtacatggtgtattaacgtatgtatacattgttgaatgctaaatcaaattaattaacatatgcattacctcacatagttatcattttttttgtagtgagaacccttaaaatctatgctgctagtaattttcaagtatataatatattgttattaactatagctgacatggtgcactgatgcagtagtgaatactcttctcttatgagaagtgggtggtattaaaaagtatcgtgctaatgatgcattgctcagagccgcggaaaactaacccttaataatagactcctgtgttccttgctggacactctcacaacttttcacatcttttattctcacagcactgtgtgtgtaaaggagaaaactgaacctcacagaatctagacagttactgagcaatagagctttgatttgacagcatgactttggaccctggaatctgttaccattaattatgtcatagtgcctcaggtttacgcagaaaatcagcgatgaaatcaggatttaaaatccatgtaggaatctcagtaaaaggtagatcaaggggccttacagaaatagggcctgaatctttgtgacattcaagaaaatttgctctttctaaggaggagaagcttggataacatttcttgtctagtgcagtttgtccttgtatagccctgtggagttccttctcactctattcactgtttcttgatcatctactgcatttaatccatcctaatgaacattggtcgtgtaagagcttattagatctagagaataagaattctacacagtaaatatatgcaaattttcttctctcagatttgagaaatgttatattatgataagaattggaataatttcagcatcaaaagtgtcctttggaattcccaaatgtccttaattacaattcatttcaatgtcagagtaggggtatcataacttataaactgctaggatattaaaaaaagggttaaacatccattaggctgggtgttaacaatagatgtatattatttgtatttttctccattgtaaaaaagcaaagcgttttcattactttagcacagttaatttattattttcaagctggtgcctaaacttctgaaacacaaaattaatgggctcttggcaaccttctctaaattactccaagtcaatagtggttcttcccatctgtcatcttaatttgcagtatgcctcccagaagcactaaaacaaagatacacactccgtgattttccattcccgttggcactaagcaaaaatagccataaattaattctttacatgaagactcccaagctggaagccatgatttaaaataaacttgggtgtcactcagccctgccaaccaactctttcagactgtaaatgccacatatatttatagagatatttagtgaataatagataaaagctcaatgagttattttctaaattagcaaccataaatgtcaactccataggttctgtttcatctgctttctattgaagtaattaaamctggaagtgataagaatatgttaatatttaatattatacccattttgttcatattgtgagagaagactcattatttttatccagaattatggaattcaattgagaataattcatggctcccatatagctttctatgatgagagggtaattgaaaagttgggtaagtaatttcagcatttttttgttgcttcatgctggaattgggcacaggttaccctgggagagatctcaaatcatagttgaatggtaaccaaggaaggagctaaaagaacaacaacagcagtgcaatgtacaacagatccaaagagtgaagcaagaccacaactagggaaaaataattgacagtgaagtcagaggctggagaaaaagaaaaggtagtaaagtagtttaagaattggtcagaactggtggttctatggtcaactattttgggtagtgccagcactatcctgaagtgatagttgcacattgaagtgacaacgggagcgtgcagggattgtaaagcaaaaaaaaaaaaaaaaaaaaccttaaattgtcctactctttgcccttaattgctgtagtttctttggtatttattccattttttttggcacaggaga

SEQ ID NO: 692292 - DNA, 588 bp, Homo sapiens
gcgggaaaaatgggcacgtaggtcaccggctctaagatatggtggaggaaggcatcttatgtgcatggcggctgtgcacactcctaaaccccctgctcacctggacatcttgttctgccagattatagtcaatgattccagagtagctgtcacggcccccctaggaggagaaactgttcttagagggctctttgaagggcacctttttatcttcagaccaacaagcgaaggctggtctcccctaaagccctctcttgtccrttacaggacagcaatgctccctgctccagcgtgtctccttgcctggtgaacgtgactcccttccttgcaggtcagtcctcctcaccttggccagggccaacagcaggtcctgcaagatgccactggtctcagatgtgatgtcatccacagcctccacctggaaatctggggtggggtgaggagctctctgaatcctcctgagttttcctagtgtagatatccccaggacctgccaaatgcctgacccgctataccctgccagccctgctagcccctgcttggagtagcttgatggctgctaattcccaggatgtaaggcacaagtac

SEQ ID NO: 692293 - DNA, 666 bp, Homo sapiens
ctgggactacaggtgcgcacctaccactctcagctaattttttgtatttttagtagagatagggtttcaccatgttggccaggatggtctagatctcttgacttcgtgatccgcctgcctcggcctcccaaagtcccaggcatgagcaccacgctgagtcagggtccctcttaaacttgtatttttaaggtctggtgtccctcttacttaatcttttttttttttttttttcttttttgagacagagtcttgctctgtcacccaggctggcagtggcacggcctcggctcactgaaacgtccgcctcctgggttcaagtgattctcctgcctcaacctcctgagtagctgggactacaggcacctgccaccatgtctggctaagttttgtatttttggtatagaygggggcggaggcagggggttggggaggggaggggggattttgctttgttgcccggagctcgaagtgatctgcccacctctgctctcaaagtgctaggattacaggcctgcaccactgcacccagctgctgtaaagccttatttccacacagctgagacatgttttaggaagtttgcgaaaaggcctctggagacctcctcattgtggcctccctgttgtcgtgtttaatttgattgatcttttctgccctcctgcttttca

SEQ ID NO: 692294 - DNA, 3146 bp, Homo sapiens
cagtgagagacgcccttgtagtaagagaggctcttctctctctacctggtgagttattttcatctctttggtacccatttcctcatgtttaaacttaggagtgaaaccacacgtcccctaagatccttttctcttagctgttctgtgagttaattaatgagatttgttttcccattagcatatatccaaaaaggtaatcaggataggttttccatgtttcctggaatcttgtaattgccccaaatgaagtgggagtatttggaggagaatcccttccttgcttcctttatttcatttttagagacaaaatctctctgtcacccaggctggagagcagtggtgcaatcctggctcactgcaacctccaattcttggcctcaagtgatgctcccatcccagcctctggagtagctgggacaacaggctcacaccaccatgccgagctatttttttttttttttgagaccgagtctcgctctgtcgaccaggctggagtgcagtggcgtgatctcggctcactgcctcactgcaagctccgcctcccaggttcacgccattttcctgtctcagcctcctgagtagctgggactacaggcacccgccaccatgcccagctaattttttgtatttttagtagagacagggtttcaccatgttagccaggatggtctcgatctgctgaccttgtgatccgcccgcctcggcctcccaaagtgctgggattacaggcgtgagccaccacacccggccaaccagctaatttttaaaattattttgttgagacagggtctcactatgttgcccaggctggtctcaaactcctggcctcaagtgatccttctgctgcagcctcccaaagtgctgggattacaggcatgagacattgtgcctggcccttcattgctttttaataaccttaattcttttgaatatctttagaactacagtggttttgtcttttgaggctagagttgatttccataaatagtcattttgagccaggtcttttgaataaagtgagtggccagagaagatgccacaactttggcgaaaagagtttcccaaggattacaccatgaactctaaaatgctgtgtgccggtcactgggccacagttcactcttcttgccaaattcagaattgcagatgagaactttattttattttattttatttatttatttaattttttagacagagtcttgctctgtcacacaggctggagtgcagtggtgtgatctcagctcactgcaacctccgcctcccgggttcaagagattctcctgcttcagcctcccatgtaactgggattacaggcatgtgccaccatgcccagctaatttttgtagtttatttatttatttatttatttattttttgagatggagtcttgccctgtcaccccagctggagtgcaatggtgcgatctcagctcactgcaacctctacctcctgggttcaagtgattctccctgcctctgactcctgagtagctgggattacaagtgcccaccaccacacccggctaatttttgtatttttattaaagacaaggtttcaccatgttggccaggctggtctcaaactcctgatctcaagtgatccgcccgccttggcctcccaaagtgctaggattacaggcatgagccackgcacctggcctaatttttggacttttagtagatacagagtttcaccatgttggtcaggctggtctccaactcctgacctcaaatgatctgcccaccttggtctcccaaagtgctgggattacaggcatgagccactgtgcccggccgattttttctgatatcaaaggaatcaccaaggtcttccctttcttttgattcatttattttcttggttctgaaatattttttaaaatatggaatgcttcatgaatttgtttgtcatcctttcacagggactatgcttatcttctccatgtcatgccaatttttgtatatgtgctgccgaagtgagcactggttctggattgattgattgatttgtttgtttatctgtttttgagacagggtttcactgtgtcttccaggctggaatactgtggtattatcgtggctcactgcaacctctgccccccagggctcaagcagtcctcctgcatgggcctcccaaagtgttgagattacaggcatgagccactgtgcccagcctggaatgtttaactgctgactttgatgcctggttttggttgtactagacattcccactacttttttctttaaaaagtactggtttctttagctccttaaaaagatctttggtgttttatatatcaaaatatgtgaggccaggtgtggtggctcatgcctgtaatcccagcatttgaggaagccaaggtgggaggatctcttgagcccaagagttcaaaaccagtctgggcaacatagtgagacccctgtctgtataagaactaaaaaattagctgggcacgatggtgcatgcatgtagtcccagctcttggaaggctgaggcaggaagatcgcgtaagccaagagggtgaggctatagtgagccatgatcatgacactgcagtccagcttgggtgacagagtgagaccctgtctcaaaaaaaaaaaaaagattaataattgcagaaacattttctatgctccagattactttaaaaattggacctaatcttggccaggcatggtggcttacacctgtaatcagcactttaggagaccaaggcaggtggatcacttgaggtcagaagttggagaccagtctggccaacatgatgaaagcctgtgggtgaaagtaaagttgggtgcagtggctctccctggattccttgatgcttttaataccctgagtcctctaccccactctgagccacactgacacttgtgcaccaaggtgcgtggtgtggccccagtgcccacaggatcgcttgtaagaactgctccttcagcccccacctgtggcctttcctccagggtgaagtctggttcctgatgttcacaccatgctccttctcaccagggtgcacgggcatcactgcctacaaaacatttgattgaaacctgttccttggggggccaccttacctgtccaggatggctttctctgaagccagttctcccaccacagtgggaagtaaagaaaattatgaaaat

SEQ ID NO: 692295 - DNA, 3146 bp, Homo sapiens
cagtgagagacgcccttgtagtaagagaggctcttctctctctacctggtgagttattttcatctctttggtacccatttcctcatgtttaaacttaggagtgaaaccacacgtcccctaagatccttttctcttagctgttctgtgagttaattaatgagatttgttttcccattagcatatatccaaaaaggtaatcaggataggttttccatgtttcctggaatcttgtaattgccccaaatgaagtgggagtatttggaggagaatcccttccttgcttcctttatttcatttttagagacaaaatctctctgtcacccaggctggagagcagtggtgcaatcctggctcactgcaacctccaattcttggcctcaagtgatgctcccatcccagcctctggagtagctgggacaacaggctcacaccaccatgccgagctatttttttttttttttgagaccgagtctcgctctgtcgaccaggctggagtgcagtggcgtgatctcggctcactgcctcactgcaagctccgcctcccaggttcacgccattttcctgtctcagcctcctgagtagctgggactacaggcacccgccaccatgcccagctaattttttgtatttttagtagagacagggtttcaccatgttagccaggatggtctcgatctgctgaccttgtgatccgcccgcctcggcctcccaaagtgctgggattacaggcgtgagccaccacacccggccaaccagctaatttttaaaattattttgttgagacagggtctcactatgttgcccaggctggtctcaaactcctggcctcaagtgatccttctgctgcagcctcccaaagtgctgggattacaggcatgagacattgtgcctggcccttcattgctttttaataaccttaattcttttgaatatctttagaactacagtggttttgtcttttgaggctagagttgatttccataaatagtcattttgagccaggtcttttgaataaagtgagtggccagagaagatgccacaactttggcgaaaagagtttcccaaggattacaccatgaactctaaaatgctgtgtgccggtcactgggccacagttcactcttcttgccaaattcagaattgcagatgagaactttattttattttattttatttatttatttaattttttagacagagtcttgctctgtcacacaggctggagtgcagtggtgtgatctcagctcactgcaacctccgcctcccgggttcaagagattctcctgcttcagcctcccatgtaactgggattacaggcatgtgccaccatgcccagctaatttttgtagtttatttatttatttatttatttattttttgagatggagtcttgccctgtcaccccagctggagtgcaatggtgcgatctcagctcactgcaacctctacctcctgggttcaagtgattctccctgcctctgactcctgagtagctgggattacaagtgcccaccaccacacccggctaatttttgtatttttattaaagacaaggtttcaccatgttggccaggctggtctcaaactcctgatctcaagtgatccgcccgccttggcctcccaaagtgctaggattacaggcatgagccacggcacctggcctaatttttggacttttagtagatacrgagtttcaccatgttggtcaggctggtctccaactcctgacctcaaatgatctgcccaccttggtctcccaaagtgctgggattacaggcatgagccactgtgcccggccgattttttctgatatcaaaggaatcaccaaggtcttccctttcttttgattcatttattttcttggttctgaaatattttttaaaatatggaatgcttcatgaatttgtttgtcatcctttcacagggactatgcttatcttctccatgtcatgccaatttttgtatatgtgctgccgaagtgagcactggttctggattgattgattgatttgtttgtttatctgtttttgagacagggtttcactgtgtcttccaggctggaatactgtggtattatcgtggctcactgcaacctctgccccccagggctcaagcagtcctcctgcatgggcctcccaaagtgttgagattacaggcatgagccactgtgcccagcctggaatgtttaactgctgactttgatgcctggttttggttgtactagacattcccactacttttttctttaaaaagtactggtttctttagctccttaaaaagatctttggtgttttatatatcaaaatatgtgaggccaggtgtggtggctcatgcctgtaatcccagcatttgaggaagccaaggtgggaggatctcttgagcccaagagttcaaaaccagtctgggcaacatagtgagacccctgtctgtataagaactaaaaaattagctgggcacgatggtgcatgcatgtagtcccagctcttggaaggctgaggcaggaagatcgcgtaagccaagagggtgaggctatagtgagccatgatcatgacactgcagtccagcttgggtgacagagtgagaccctgtctcaaaaaaaaaaaaaagattaataattgcagaaacattttctatgctccagattactttaaaaattggacctaatcttggccaggcatggtggcttacacctgtaatcagcactttaggagaccaaggcaggtggatcacttgaggtcagaagttggagaccagtctggccaacatgatgaaagcctgtgggtgaaagtaaagttgggtgcagtggctctccctggattccttgatgcttttaataccctgagtcctctaccccactctgagccacactgacacttgtgcaccaaggtgcgtggtgtggccccagtgcccacaggatcgcttgtaagaactgctccttcagcccccacctgtggcctttcctccagggtgaagtctggttcctgatgttcacaccatgctccttctcaccagggtgcacgggcatcactgcctacaaaacatttgattgaaacctgttccttggggggccaccttacctgtccaggatggctttctctgaagccagttctcccaccacagtgggaagtaaagaaaattatgaaaat

SEQ ID NO: 692296 - DNA, 2311 bp, Homo sapiens
gtaactcaagatagattaaaaactgaacatgaagtttcaagctatgaaaatcctatatgaacacctagaaagtactcttgtggacactggcctctgaaaacaatttgagactaacaccttaaaagtaaatgcaacaaaaatataaattgacacctaattaaactagatctcctgcacagcaaaagaaatttgacaaagtaaatggacaagctacagcatggagaaaaatatttgcaaactgcatacaacaaaaaaattaatatacaaaatctataagaaatgtaataggaaaaaagcacagaatatatcaatagatacttctcaaaggaagatataaaagctgtcaagaaacatgcaaaaagttgcccaacatctcaagccattaaagagattaaatcaaaatgacaatgtgataccatctcacaccagttaaaatggctgttattaaaaagtaaaaaaaaaaatagcatgttgtggagaatagggaatgtttacacagtctttgtgagaatgcaaattaattcagccttttgttgattaattcagcctcttgttggagcctctacttcaacaaaagatgccatgaatttcaagttattatgctgacacakatattgtctctagaagggttctggtttttttgcaatcaaggtgtagcatttctggcttcccttgtgctgctttgtttgtgtgaaataggaaggtaggaagtaaaaccaagtaaaccatgacatttctattttctacagccacagcatctgaattctagtgttatgtcaactagaaataatgtcagtatttcaaaactgacaaaaagaaattgatactttatctttttaaatgtttttatagattataaaaatttatagtttctgaattatataagttaaacaacctgaacatgcagatacctaaaagttttacctagataatagtattaatattttaataggttatgattgtgagtcacagttgccccattgagtttactggaaagcggttatttatcttctgagtgtatgtagagaataggctttcataatcctaaacaaagagatcttttaagattagcactatatttagatttgaataaaattcataggcttgtagtaacagaaattttaatatattttctaatagaaaaaagtcaatcgaaataagttattcagatgagttttaaaaaacttcacgtgttcattaaataacatttaaaattacattgtaagtgactgatttgtaattccaatctatttcattttagtcactgagaaaacaatatccttaaattattcaatcagaaaaagtattcttatattagtgtttctgaaactttcagaaactgtagaccactcagtggatggggaggcatatgcagaccacaaattttctatgtaataataggttcatcttagctttaatataaaaattaaatatatttcaaaagtaaaattagtggcttttttaagtcatgagagacatattattgttagaacccatttgccaaattatttgtgttaggcttagtaataagtgctttcaaccaaaaatcaagttctacatactatctcagggtaaaaagaaagtggtttttatcttatttatttttaccaataaaatatttttatttttaaactgttattttagatttagagggggtacacctagcctttctagacttccttagtaattggtaaatttctctttttattttgtcattattactttttctgcactcaggctggagtgcaatggcgcaaacattgctcattgcagccttgaacttctgggcttaacatattctccctcctcagcctcccgaatagctgagaccacaagcacaagcctgtgtgcccagcccattattattacttttaatgtctgctagttcctggggtgcacagagatttaaaggtcacattcttccagggtttgggcataacatgagcactggaattaaataggtaggtcccacagggaaaggcagtgcccaggagaatagaatctaggtgtgggtgtgaccactctccttctcaacttggctctttcttcttgtttgaagagacagagtaatactgggaggcaaaaaaggaccattggcttggggtcagagggtgtgatttgaggtctggagttgatctcttaaaggctatgtgaagttggcactgtctccaacctttctcctgcaaaatgagaaaacaaggctggatgaactgagttcgctttcagtcttttttttttttttaagttttttatttccataaattttgtttaacaggtggtatttggttacatgagtaaattctttagtggt

SEQ ID NO: 692297 - DNA, 2311 bp, Homo sapiens
gtaactcaagatagattaaaaactgaacatgaagtttcaagctatgaaaatcctatatgaacacctagaaagtactcttgtggacactggcctctgaaaacaatttgagactaacaccttaaaagtaaatgcaacaaaaatataaattgacacctaattaaactagatctcctgcacagcaaaagaaatttgacaaagtaaatggacaagctacagcatggagaaaaatatttgcaaactgcatacaacaaaaaaattaatatacaaaatctataagaaatgtaataggaaaaaagcacagaatatatcaatagatacttctcaaaggaagatataaaagctgtcaagaaacatgcaaaaagttgcccaacatctcaagccattaaagagattaaatcaaaatgacaatgtgataccatctcacaccagttaaaatggctgttattaaaaagtaaaaaaaaaaatagcatgttgtggagaatagggaatgtttacacagtctttgtgagaatgcaaattaattcagccttttgttgattaattcagcctcttgttggagcctctacttcaacaaaagatgccatgaatttcaagttattatgctgacacatatattgtctctagaagggttctggtttttttgcaatcaaggtgtagcatttctggcttcccttgtgctgctttgtttgtgtgaaataggaaggtaggaagtaaaaccaagtaaaccatgacatttctattttctacagccacagcatctgaattctagtgttatgtcaactagaaataatgtcagtatttcaaaactgacaaaaagaaattgatactttatctttttaaatgtttttatagattataaaaatttatagtttctgaattatataagttaaacaacctgaacatgcagatacctaaaagttttacctagataatagtattaatattttaataggttatgattgtgagtcacagttgccccattgagtttactggaaagcggttatttatcttctragtgtatgtagagaataggctttcataatcctaaacaaagagatcttttaagattagcactatatttagatttgaataaaattcataggcttgtagtaacagaaattttaatatattttctaatagaaaaaagtcaatcgaaataagttattcagatgagttttaaaaaacttcacgtgttcattaaataacatttaaaattacattgtaagtgactgatttgtaattccaatctatttcattttagtcactgagaaaacaatatccttaaattattcaatcagaaaaagtattcttatattagtgtttctgaaactttcagaaactgtagaccactcagtggatggggaggcatatgcagaccacaaattttctatgtaataataggttcatcttagctttaatataaaaattaaatatatttcaaaagtaaaattagtggcttttttaagtcatgagagacatattattgttagaacccatttgccaaattatttgtgttaggcttagtaataagtgctttcaaccaaaaatcaagttctacatactatctcagggtaaaaagaaagtggtttttatcttatttatttttaccaataaaatatttttatttttaaactgttattttagatttagagggggtacacctagcctttctagacttccttagtaattggtaaatttctctttttattttgtcattattactttttctgcactcaggctggagtgcaatggcgcaaacattgctcattgcagccttgaacttctgggcttaacatattctccctcctcagcctcccgaatagctgagaccacaagcacaagcctgtgtgcccagcccattattattacttttaatgtctgctagttcctggggtgcacagagatttaaaggtcacattcttccagggtttgggcataacatgagcactggaattaaataggtaggtcccacagggaaaggcagtgcccaggagaatagaatctaggtgtgggtgtgaccactctccttctcaacttggctctttcttcttgtttgaagagacagagtaatactgggaggcaaaaaaggaccattggcttggggtcagagggtgtgatttgaggtctggagttgatctcttaaaggctatgtgaagttggcactgtctccaacctttctcctgcaaaatgagaaaacaaggctggatgaactgagttcgctttcagtcttttttttttttttaagttttttatttccataaattttgtttaacaggtggtatttggttacatgagtaaattctttagtggt

SEQ ID NO: 692298 - DNA, 421 bp, Homo sapiens
cttcattttgaaattgtgaagacaggcagtgagagtgagtgagttgtccaaattcaggccgcaagctggagagcatgcgattcctggccttttgcagccagagtgtgtgggccagctgtgtggtggtgtgcactcccctctccgtctggtatatggcagtatatatggtatatacggtatatggcactaccatataccaggtctggccttgtcacctggagacctgggagtcttcttttgttttccctgacttttgtcaccagatctgcttacttacaagtccygttggttgtgcccctcccagcctttcccgtcttcctcctttttatcttggtcattatttcaacccagctagaatcatatctggcccagattactgcattagttcctagttggagtcctttaaactctcttttttaaa

SEQ ID NO: 692299 - DNA, 1139 bp, Homo sapiens
gatggttttacaaaggggagtttccctgcacaagctctctcatcttgtctgctgccatgtgagactgcctttcaccttccaccatgattgtgaggcctacccagccatgtggaactgtgcatctattaaacctctttcttctagaaattacccagtcgggcatgtctttaccagcggtgtgaaaatggacaaatacagtagcacacctcatagggctgaacaaaacggagaagatgagtggggagcaagagagagaaaaggggtctgtgggactccagcctttattgggcccagaacagtacccaaataagttttccacggggctctagtcggtggggtgagtgccagcaggcacatttcttggcttccgctgcaactgagcaggtcactctggcgtgtgggggctgtccaagtgggctgtgaggtctgtggggtgagtcatgcagattgtatccaacggttccatrgcgggtagtcaccagggggaggcaactgtgtagggtcagtatctgggccagccacactgaggaactgtgagggttagaactggaaattgtcaagggaatctgaacccagctaccatatgagagagttcaacttacattcaatgtgaatgccatggcaatattaaaaggtaagaattcactccatacgtgcttgaggtaaataggagaaacctagaatttatgtaaacagtgagaagattagatgcgttttctgtcacatattttaatactggcagcatattatatatgtcaatccatcaggcattcagaattacatgcttatgaaaattttttgcaccatcagacaaacgacaagggtagaagacatttttaaccctataaacgctagtaaattaaaaatttatgtcctaatatttctatgttgtgaaaggctgccctgtgaaatacaggatttcttaaacatattttaaaaatcataggtgtcaatattttttagaaatccatttaaattttctcttgctattttacagtgcctatttatttagtggttctgctgattttgatgtatatcctaaactttacattttctttaaagtatgttttatacaactttatgtaaaatgtttcagtatcttcacattctctccctgtccttttgttttgctcttatat

SEQ ID NO: 692300 - DNA, 618 bp, Homo sapiens
tcctatggactaagagtttttaaggatttagggtgggagaatttatcagaggcttggactgcttctgtgtttctttgttgtgcttatttgggagtgagagttgtatgtctgttcccatacatctttctacagctgcaggcatacccaccgagtctgcttttagtttccctaacttagtgcacctgaatataagtgcaccttcctaataaaggaatgtgcttattaaggcccacttttactggggcccatgtatgagggtgaagtgtggaagttacccaagagactccccccccggctccccatgtccaaactgtctgatctgtgttctactgtctgctctttctggctccttgttgttaaaagagwagtaattttcttgaaatgcatgaggctaggatagaagctggaacttgtccgaaagctggtgtttgtctgaaatactggtgctctgctctgtcatagctttatagtaagctttgaaattgagtcttgtgaattctccacctttgctctgattcataattgttttggctccttggttccttaacctaaatacaaattttgtatataggaatattgaaaaattttgtaaactgctattgaatcttcctactcagc

SEQ ID NO: 692301 - DNA, 571 bp, Homo sapiens
acttgcaggtcacactctgttttgttcaactttgtatctccagatcctgacatgaaatatttctcagataatttgttcatatgagattgtgaaagagtaacagtcatttaaattatgataaaaaatttaattaaattactataaaagaaatttatcttaagaagaaaataaagaggtgataggtgaaagtaatatatatccaaggataatataaacatttacagagaaggattggggttcaggagacctcattccaaatctgaccatatgaccatacactaactcacagagtaattttgggcatgttgtttctggtggattaacatttatcacaaattctttgacatccsttttactcagaagtggagttccttctccacccctggttctgggctggcctttgactgatttgtccagtgaaatatggcagaaatgacgccctcccagttactaccctagtctttaagaggactgacaagcttcaccttggtctccggaagtcctaagctagctactatataagaagttcagctacctagccagagagaagacatagagatcccctgagact

SEQ ID NO: 692302 - DNA, 2196 bp, Homo sapiens
gccttttatgtatggttgcatcaatctgggcagagctcatactacacccgggcttcccaatatcccattacctgtaaccacccaatgaattcatttggcccactgcccagatagagccaacttatcaagacagaggattgcaacagaggaagaatttaattcacacagagccggctgaattggaggctggagttttattactcaaatcagtctccatgaaaatttggaagctagggttttcaargggtagtttggcaggctagggaatggatgctgctgattggttggggtgcaatcataggagtgtggaaaatggtcctcttgtgggctcagtcttcttctgggtggaaccatctgtcatcagaaatgcaaaaatctgaaaagacacctcacaaggccaatcttagcttctacaagtgtgatgttatttgcaggagtaattggggaacttgcaaatcctgtgacctctagaataatggctggatatcatttatgtctacaccttaccagaattcaggctccttatcctccaaacctggtgctctgtcctcagttttacaaacacggtttagtttggaggaagggctattatcatttaaactatagactaaatgtctcctgaagttagcttggctcaaggccaggaaggattaagggcagtttggaggttaaagacaagatggggactggtcagatcagatcgttttaactatcatcattttctcactgttataatttttgcaaaggtgatttcacactgatcctgctaagctgcatatggtcacccaaggtcactttgtatggggcctggtgagagatgcctgttgcagctgtacccttcctgaggtcaagggcaaatgcctccctgtgttcctctgatcttgtctcacctcttccatttccccattcttgatttcttacccacaacctttttcatttttcctcaatgggttcatctattaaggaccccaattcataacttattcaagtgtgtgtacctgtttatttagtttgcagatagcacaatacactatatggtgagttctaacatgttctggaagcctgaaaactatctctctgtaatactggtgtttctttaaagcctttctaccttggattgtctccacctcatctctgaggtggcagaggtagaacattccttcttagagctcccaagatggggcaggctgctcccaagatggtggcaagccttgtgttctctgacctggggttcctggcctcacggattccaaggaatgaaaccttgggccatagggtgagtgttatagctatattagaagccgtgggtcacggaagagaaccatggaacccagcgactagtgtttagctcagttaggacaaacctgggcacttagccgtgcaggaacaatggcgagcctttagcccaattgggagcagcaatgggcacctcactggatgggtagcacagcggacaccctgccaaatccagaggggtggaagtcagtggtgggtctgcgaccgcagcaaacagcagtggtggatggcaagcgaaagctcagctcgagccgtaataaacacggaccagaaaagtgtgcagttgcaagatttaatagagtgaaaacagagctcccatacaatgggaggggacccaaagggggttgccactccctgttgaatgcttgaatgcctgggtttatatcctgatcattgtcccttcccctctgctctcaggcgatatatgatttgactatttcgttacctcctgctttagcctaatttgtattttagtgagccctctgtagtacctgactggttgggtgtgagccaagttacaagccccgtgtttaaaggtaggtgtggtcaccttccccagctaggcttaggaattcttagttggcctaggaaatccagctagtcctgtctctcaagggtaccaaattagaaagaattaagcaacagaaatgtcccaagcataggggaatggttgacacatggtacatctatataatggaatattttaaaaccattaactaagttttcaaacaagtacttactgactgtaatgactttgggaaatgctcacaataaaccattcagggataagcagaaagtacttttgtggaatttcagtaaatttcagattgatgcaatcttaggcaaaaggacttctctttgttcagtaggggtttgggttctctagtccccttccagttg

SEQ ID NO: 692303 - DNA, 2196 bp, Homo sapiens
gccttttatgtatggttgcatcaatctgggcagagctcatactacacccgggcttcccaatatcccattacctgtaaccacccaatgaattcatttggcccactgcccagatagagccaacttatcaagacagaggattgcaacagaggaagaatttaattcacacagagccggctgaattggaggctggagttttattactcaaatcagtctccatgaaaatttggaagctagggttttcaaagggtagtttggcaggctagggaatggatgytgctgattggttggggtgcaatcataggagtgtggaaaatggtcctcttgtgggctcagtcttcttctgggtggaaccatctgtcatcagaaatgcaaaaatctgaaaagacacctcacaaggccaatcttagcttctacaagtgtgatgttatttgcaggagtaattggggaacttgcaaatcctgtgacctctagaataatggctggatatcatttatgtctacaccttaccagaattcaggctccttatcctccaaacctggtgctctgtcctcagttttacaaacacggtttagtttggaggaagggctattatcatttaaactatagactaaatgtctcctgaagttagcttggctcaaggccaggaaggattaagggcagtttggaggttaaagacaagatggggactggtcagatcagatcgttttaactatcatcattttctcactgttataatttttgcaaaggtgatttcacactgatcctgctaagctgcatatggtcacccaaggtcactttgtatggggcctggtgagagatgcctgttgcagctgtacccttcctgaggtcaagggcaaatgcctccctgtgttcctctgatcttgtctcacctcttccatttccccattcttgatttcttacccacaacctttttcatttttcctcaatgggttcatctattaaggaccccaattcataacttattcaagtgtgtgtacctgtttatttagtttgcagatagcacaatacactatatggtgagttctaacatgttctggaagcctgaaaactatctctctgtaatactggtgtttctttaaagcctttctaccttggattgtctccacctcatctctgaggtggcagaggtagaacattccttcttagagctcccaagatggggcaggctgctcccaagatggtggcaagccttgtgttctctgacctggggttcctggcctcacggattccaaggaatgaaaccttgggccatagggtgagtgttatagctatattagaagccgtgggtcacggaagagaaccatggaacccagcgactagtgtttagctcagttaggacaaacctgggcacttagccgtgcaggaacaatggcgagcctttagcccaattgggagcagcaatgggcacctcactggatgggtagcacagcggacaccctgccaaatccagaggggtggaagtcagtggtgggtctgcgaccgcagcaaacagcagtggtggatggcaagcgaaagctcagctcgagccgtaataaacacggaccagaaaagtgtgcagttgcaagatttaatagagtgaaaacagagctcccatacaatgggaggggacccaaagggggttgccactccctgttgaatgcttgaatgcctgggtttatatcctgatcattgtcccttcccctctgctctcaggcgatatatgatttgactatttcgttacctcctgctttagcctaatttgtattttagtgagccctctgtagtacctgactggttgggtgtgagccaagttacaagccccgtgtttaaaggtaggtgtggtcaccttccccagctaggcttaggaattcttagttggcctaggaaatccagctagtcctgtctctcaagggtaccaaattagaaagaattaagcaacagaaatgtcccaagcataggggaatggttgacacatggtacatctatataatggaatattttaaaaccattaactaagttttcaaacaagtacttactgactgtaatgactttgggaaatgctcacaataaaccattcagggataagcagaaagtacttttgtggaatttcagtaaatttcagattgatgcaatcttaggcaaaaggacttctctttgttcagtaggggtttgggttctctagtccccttccagttg

SEQ ID NO: 692304 - DNA, 2196 bp, Homo sapiens
gccttttatgtatggttgcatcaatctgggcagagctcatactacacccgggcttcccaatatcccattacctgtaaccacccaatgaattcatttggcccactgcccagatagagccaacttatcaagacagaggattgcaacagaggaagaatttaattcacacagagccggctgaattggaggctggagttttattactcaaatcagtctccatgaaaatttggaagctagggttttcaaagggtagtttggcaggctagggaatggatgctgctgattkgttggggtgcaatcataggagtgtggaaaatggtcctcttgtgggctcagtcttcttctgggtggaaccatctgtcatcagaaatgcaaaaatctgaaaagacacctcacaaggccaatcttagcttctacaagtgtgatgttatttgcaggagtaattggggaacttgcaaatcctgtgacctctagaataatggctggatatcatttatgtctacaccttaccagaattcaggctccttatcctccaaacctggtgctctgtcctcagttttacaaacacggtttagtttggaggaagggctattatcatttaaactatagactaaatgtctcctgaagttagcttggctcaaggccaggaaggattaagggcagtttggaggttaaagacaagatggggactggtcagatcagatcgttttaactatcatcattttctcactgttataatttttgcaaaggtgatttcacactgatcctgctaagctgcatatggtcacccaaggtcactttgtatggggcctggtgagagatgcctgttgcagctgtacccttcctgaggtcaagggcaaatgcctccctgtgttcctctgatcttgtctcacctcttccatttccccattcttgatttcttacccacaacctttttcatttttcctcaatgggttcatctattaaggaccccaattcataacttattcaagtgtgtgtacctgtttatttagtttgcagatagcacaatacactatatggtgagttctaacatgttctggaagcctgaaaactatctctctgtaatactggtgtttctttaaagcctttctaccttggattgtctccacctcatctctgaggtggcagaggtagaacattccttcttagagctcccaagatggggcaggctgctcccaagatggtggcaagccttgtgttctctgacctggggttcctggcctcacggattccaaggaatgaaaccttgggccatagggtgagtgttatagctatattagaagccgtgggtcacggaagagaaccatggaacccagcgactagtgtttagctcagttaggacaaacctgggcacttagccgtgcaggaacaatggcgagcctttagcccaattgggagcagcaatgggcacctcactggatgggtagcacagcggacaccctgccaaatccagaggggtggaagtcagtggtgggtctgcgaccgcagcaaacagcagtggtggatggcaagcgaaagctcagctcgagccgtaataaacacggaccagaaaagtgtgcagttgcaagatttaatagagtgaaaacagagctcccatacaatgggaggggacccaaagggggttgccactccctgttgaatgcttgaatgcctgggtttatatcctgatcattgtcccttcccctctgctctcaggcgatatatgatttgactatttcgttacctcctgctttagcctaatttgtattttagtgagccctctgtagtacctgactggttgggtgtgagccaagttacaagccccgtgtttaaaggtaggtgtggtcaccttccccagctaggcttaggaattcttagttggcctaggaaatccagctagtcctgtctctcaagggtaccaaattagaaagaattaagcaacagaaatgtcccaagcataggggaatggttgacacatggtacatctatataatggaatattttaaaaccattaactaagttttcaaacaagtacttactgactgtaatgactttgggaaatgctcacaataaaccattcagggataagcagaaagtacttttgtggaatttcagtaaatttcagattgatgcaatcttaggcaaaaggacttctctttgttcagtaggggtttgggttctctagtccccttccagttg

SEQ ID NO: 692305 - DNA, 2196 bp, Homo sapiens
gccttttatgtatggttgcatcaatctgggcagagctcatactacacccgggcttcccaatatcccattacctgtaaccacccaatgaattcatttggcccactgcccagatagagccaacttatcaagacagaggattgcaacagaggaagaatttaattcacacagagccggctgaattggaggctggagttttattactcaaatcagtctccatgaaaatttggaagctagggttttcaaagggtagtttggcaggctagggaatggatgctgctgattggttggggtgcaatcataggagtgtggaaaatggtcctcttgtgggctcagtcttcttctgggtggaaccatctgtcatcagaaatgcaaaaatctgaaaagacacctcacaaggccaatcttagcttctacaagtgtgatgttatttgcaggagtaattggggaacttgcaaatcctgtgacctctagaataatggctggatatcatttatgtctacaccttaccagaattcaggctccttatcctccaaacctggtgctctgtcctcagttttacaaacayggtttagtttggaggaagggctattatcatttaaactatagactaaatgtctcctgaagttagcttggctcaaggccaggaaggattaagggcagtttggaggttaaagacaagatggggactggtcagatcagatcgttttaactatcatcattttctcactgttataatttttgcaaaggtgatttcacactgatcctgctaagctgcatatggtcacccaaggtcactttgtatggggcctggtgagagatgcctgttgcagctgtacccttcctgaggtcaagggcaaatgcctccctgtgttcctctgatcttgtctcacctcttccatttccccattcttgatttcttacccacaacctttttcatttttcctcaatgggttcatctattaaggaccccaattcataacttattcaagtgtgtgtacctgtttatttagtttgcagatagcacaatacactatatggtgagttctaacatgttctggaagcctgaaaactatctctctgtaatactggtgtttctttaaagcctttctaccttggattgtctccacctcatctctgaggtggcagaggtagaacattccttcttagagctcccaagatggggcaggctgctcccaagatggtggcaagccttgtgttctctgacctggggttcctggcctcacggattccaaggaatgaaaccttgggccatagggtgagtgttatagctatattagaagccgtgggtcacggaagagaaccatggaacccagcgactagtgtttagctcagttaggacaaacctgggcacttagccgtgcaggaacaatggcgagcctttagcccaattgggagcagcaatgggcacctcactggatgggtagcacagcggacaccctgccaaatccagaggggtggaagtcagtggtgggtctgcgaccgcagcaaacagcagtggtggatggcaagcgaaagctcagctcgagccgtaataaacacggaccagaaaagtgtgcagttgcaagatttaatagagtgaaaacagagctcccatacaatgggaggggacccaaagggggttgccactccctgttgaatgcttgaatgcctgggtttatatcctgatcattgtcccttcccctctgctctcaggcgatatatgatttgactatttcgttacctcctgctttagcctaatttgtattttagtgagccctctgtagtacctgactggttgggtgtgagccaagttacaagccccgtgtttaaaggtaggtgtggtcaccttccccagctaggcttaggaattcttagttggcctaggaaatccagctagtcctgtctctcaagggtaccaaattagaaagaattaagcaacagaaatgtcccaagcataggggaatggttgacacatggtacatctatataatggaatattttaaaaccattaactaagttttcaaacaagtacttactgactgtaatgactttgggaaatgctcacaataaaccattcagggataagcagaaagtacttttgtggaatttcagtaaatttcagattgatgcaatcttaggcaaaaggacttctctttgttcagtaggggtttgggttctctagtccccttccagttg

SEQ ID NO: 692306 - DNA, 1373 bp, Homo sapiens
ggcattcttgtcccaacctttcctactccccttattgtaatcaaggattagtcattccgtgtgttccatccccagggattttgctcgctgttgataacagtgggtgctgagagttaatcagtgatttcaggtcagtgccgcaagctgagctgacacaggaaaggccgtcctccttttccaatgcatacacatggtagatcaatcaaacagccacaacaactacaacagtaacaataaaggtttatttatagagctgagtttctttcttttttttttttttttttttttttttttgcgawggagtctcgctctgtcacccaggctggagtgcagtgtcacgatctcggcttactgcaagctccgccttccgggttcacgccattcttctgcctcagcctcctgagtagctgggactacaggcacccgccaccacacccaactaattttttttttggtattcttttagtagagacagggtttcaccatgttagccaggatggtctcgatctcctgaccttgtgatccacccacctcagcctcccaaagtgctgggattacaggtgtgagccaccgtgcccggccgagctgagtttcttaagacagagaaatcctcaggcaaaaagatgaaacacaaaatcagaatgatgcttgactatggggggagatggatcttcacatctgtgcagacaggtagctggggccatggtcagcgtgcatgaggactggaagatagctagctgcataaatccacaggttacaaaatgctgccccatacgtgaagtcatggaagactgttgtctactcacttggggaagccacagggaaccctgacatttggtgaggtcaagggtgaaaaagaaaccctgcacttccctgtacttcacaggtgtggtcacctgaactcacgctaagtacacagatcagggaccctacgttgacaagtaacagaagctggtcctgggtgggtagaacccatggatctcttggaaaaagcaagcatggactcctctgtgcgggtgtttccatgcaccagggcactcagagcacccacaggaatggtcagcactgaatgtgagtttaaacaaatagctaaaaacaaataaaagattcagccattttttttaaaggaagaatggcaaacacagatgatttgctgcctaacaatggaaggtaatagaatctttataatatatacttaaaatgttaaaagaaatgaataaaaccataaagcaagaacgtgatattataaaacacaataggcttattttaaacataaccaaaaagtaattctggaaacaaaagaacgcttaatgtcaaaaatgcttgatgtaattaataggagacagctaaactaaacaatgaataatagacag

SEQ ID NO: 692307 - DNA, 660 bp, Homo sapiens
tcattgctgtttcctgtgcaatctgttgttagtggcaaaatggtcacttggaagtggttaggtactgttgaaagaataactgactagtcttttaagctctaagataggaagcaaactcataggctgtaaggtttacagtacaactctctggaggggtgaatggcataaatacaaatcattattggacctaatagacctaatagcatttgcttccatacatttcgcacgtgaatggcactgtagcaatgtttaaccatgcctgattgcttcaygttcttgcaaccactgctgctggtaggctgtgtttcattaccattctgctggctgtcagcattttcatgatacaattagaggcatgtaattcccagaacaaatgagctatttcgaatattgtgagatgtgtaattcaatattacatgggcctgtagaataaatgagtttagagaaacaaatatgcaggagtttgggctgaacaacctgtcagatgaatgacctgccagtccccttgccttctgatgcaatcacgggtggggacgtggcatataaggagagtgactattaaaacacaacagatacctgctgttcctttgatgccgtgtgaatgctgtacttgcctattaagaactaggatttcatttctcccttgcaactttggacagt

SEQ ID NO: 692308 - DNA, 660 bp, Homo sapiens
tcattgctgtttcctgtgcaatctgttgttagtggcaaaatggtcacttggaagtggttaggtactgttgaaagaataactgactagtcttttaagctctaagataggaagcaaactcataggctgtaaggtttacagtacaactctctggaggggtgaatggcataaatacaaatcattattggacctaatagacctaatagcatttgcttccatacatttcgcacgtgaatggcactgtagcaatgtttaaccatgcctgattgcttcatgttcttgcaaccactgctgctggtaggctgtgtttcattaccattctgctggctgtcagcatttycatgatacaattagaggcatgtaattcccagaacaaatgagctatttcgaatattgtgagatgtgtaattcaatattacatgggcctgtagaataaatgagtttagagaaacaaatatgcaggagtttgggctgaacaacctgtcagatgaatgacctgccagtccccttgccttctgatgcaatcacgggtggggacgtggcatataaggagagtgactattaaaacacaacagatacctgctgttcctttgatgccgtgtgaatgctgtacttgcctattaagaactaggatttcatttctcccttgcaactttggacagt

SEQ ID NO: 692309 - DNA, 660 bp, Homo sapiens
tcattgctgtttcctgtgcaatctgttgttagtggcaaaatggtcacttggaagtggttaggtactgttgaaagaataactgactagtcttttaagctctaagataggaagcaaactcataggctgtaaggtttacagtacaactctctggaggggtgaatggcataaatacaaatcattattggacctaatagacctaatagcatttgcttccatacatttcgcacgtgaatggcactgtagcaatgtttaaccatgcctgattgcttcatgttcttgcaaccactgctgctggtaggctgtgtttcattaccattctgctggctgtcagcattttcatgatacaattagaggcatgtaattcccagaacaaatgagctatttcgaatattgtgagatgtgtaattcaatattayatgggcctgtagaataaatgagtttagagaaacaaatatgcaggagtttgggctgaacaacctgtcagatgaatgacctgccagtccccttgccttctgatgcaatcacgggtggggacgtggcatataaggagagtgactattaaaacacaacagatacctgctgttcctttgatgccgtgtgaatgctgtacttgcctattaagaactaggatttcatttctcccttgcaactttggacagt

SEQ ID NO: 692310 - DNA, 660 bp, Homo sapiens
tcattgctgtttcctgtgcaatctgttgttagtggcaaaatggtcacttggaagtggttaggtactgttgaaagaataactgactagtcttttaagctctaagataggaagcaaactcataggctgtaaggtttacagtacaactctctggaggggtgaatggcataaatacaaatcattattggacctaatagacctaatagcatttgcttccatacatttcgcacgtgaatggcactgtagcaatgtttaaccatgcctgattgcttcatgttcttgcaaccactgctgctggtaggctgtgtttcattaccattctgctggctgtcagcattttcatgatacaattagaggcatgtaattcccagaacaaatgagctatttcgaatattgtgagatgtgtaattcaatattacatgggcctgtagaataaatgagtttagagaaacaaatatgcaggagtttgggctgaacaacctgtcagatgaatgacctgccrgtccccttgccttctgatgcaatcacgggtggggacgtggcatataaggagagtgactattaaaacacaacagatacctgctgttcctttgatgccgtgtgaatgctgtacttgcctattaagaactaggatttcatttctcccttgcaactttggacagt

SEQ ID NO: 692311 - DNA, 662 bp, Homo sapiens
gatgaygtaaaagattaatcagtttgactgtatgaaaacagtagttccactagaaaaaaaataacctaaacacagaaaatggacaagagacagagaaaatattagcaactcaccccagacaaaatgttaatatttctactaagaatttgtataacccaaaaggataaagactaacattccaatagaaaaatgtccagcctcattacctttaaaaaaaataaatgtggccgggtgtggtggctcacaccgtgtaatctcagcactttgggaggctaaggcaggcgaatcatgaggtcaggagttcaagaccagcttggcaaacatggttaaaccctgtctctacttaaaatacaaaaagtagccgggcgtggtggcaggcgcctgtaatcccagctacttgggaggctgaggcaggagaatcgcttgaacccgggaggcggacattgcagtgagccaagattgtgccattgcactctagcctgggggacaagagggagactttgtctcaaaaaaaaaaaaaagaaaggaaaagaaagaaaaataaatataaacctacattgaaatatcttctttatctaagtttgccaaagacccaggtatttcatagcaccatgtttttgagagtgtaatgaaacagcatatatactgttgtttgacatata

SEQ ID NO: 692312 - DNA, 658 bp, Homo sapiens
tcatgaagacaacaccaaggggatggtgttacagcattcatgagatagattctgcctccatgacccagtcacctgtttccatcaggccttacctccagcattggggattgcaattccacctgagatttggcaaggacacagatccaaactgtatcagggcttttttcttttttccatctgtgttcattggtgtttctgggttgctggcttgtttagctccaagtctggaatttataaggcaaaagaaaacccaggcaattcaccaccatcttgtttcttgggttccgaggtcccaagccagtgcacctacttcttttcacctttcagaagtgaaattcttggtctgctgtattttgagcagttctctaagtaacgccgatttcactgaaattcgaggactactgaatttgcatctgagtcccatgttccctgggtcaaggcctgagtctcccgtgtttacaacacatgccctgagcagagcacaggcggtcctggtcagtcctcacaagggtcccccaaacccttgcagggtctcccaagcagcctcgcccatgcwcagtgctgcacacattcagcggctgactcgcccactcctcagtcccctcctgctgagcttcttcttgtttcctcaagcaagagctcagactctcccctgagg

SEQ ID NO: 692313 - DNA, 585 bp, Homo sapiens
tgcaggccatgtgccatctagccccacatcctcctcatctcatctctttctccaacccagacactcctgaagataccagacatattccacccatcctgaggacttcgtgttggctgtcccctcgacctggaagtctgcacagcatttcatgatggggccacttcttattcattgattgcctgtctccactgcaatatgagccccagggaacatcaycccggcctttgctgaggctgcaccccctgcccccacccatccatggcctgccacgtggtcaccctcattccacagtgcagatcctcggcctcagcctggcacaaggctgggtcccagaatcagctgcgcccttgtcaccccacctggggccccacacacaggacaaatgacaggcgtgtctcctcgggtgctggggaccagccctggagtgtcccccattgttcccagaaattagcagcggttgccgcattcaggggaagcactccaccccacgggctatggcacttgggggagaagagaaaaaagacaagcaagatcaccaggcgggccaatgccggtgccttttccctgcctgcgatgcacacttca

SEQ ID NO: 692314 - DNA, 854 bp, Homo sapiens
ttgctccaaagaacacagtgaagaagtttgagaaagaagcttacattgtcagtaacacttcagcaataaataatgtgatgtcatcctgtagaaataatttaagaattgaggaaatttttactccattcttatatctgtaataggcttttatttttcaaaggaagattttttttttttagaattattgccttataaaagttgttatttgtctctgttatctgacacagaaatgttatagcaaagtgtttgagacacacaaaacctgaagtttttattcagaaagatgcaatgaattttacagttttctgtaccaataaaaagggcaaattggctgggcatggtggctcacacctgtaatcccagtattttgggaggccgaggcagatggatcacctgaggttaggagttcatgaccagcctggcccacatggtgaaaccctgtctctactaaaaatacaaaaattagctgggcgtggttgtgagcacctatgatcccaactattcaggaggctgaggcagtagaattgcttgaacccaggaggcggaagttgcagtgagccaagatcacgccattgcactccagcatggggtggggaagagcaagactttgtctcaaaaaaataaaaaaaggcaaattaaagtaacttaaaratgtatctaagctgaggacagttcttcctttaacctaatccttttatttattttatatattatgtgcccaagtgtatgctaagtgctttacatcaatttttatcatattgggacaactctgaatgattgattccttttttttgtatatggagtctcactctgacacccaggctagagtgcagtggtgtgatctcagctcactg

SEQ ID NO: 692315 - DNA, 607 bp, Homo sapiens
gcaccctagttcttaatgtgttcctcatcagaatttgaatagtgagaatgtaatcctacacatttaaaaaattaaataaataaaaggcagctatcctttatgaataataccatgaaattgagtctgagttagatttccaaaatatggaaaaatgaggtttctttttgcctatcattactatgatgacaattatgaattgatctataatgaatattaattaaatgaatattaagtaatgacactgatgaaacatttattgagagctgcaatatgctttatcctgctctttcaacaaaaaagaacgttgcataggcacaaacctttggtagatgacataggatttcaaggaaatagatgacttcagtaactttgcttaaaggttaaagaggtaaatttaaaagaagggtgaaacagccataatgatgtgaaataaagactgaagctcagtgcagcaagayacatccttagttagttatatgttcgcacctccccaccagactctgcatttctggaagttttataactagcctaggaataatattacagagaattcaaaattcaaatttcagaatcacagaagatttgaatatctcccaccctccttgaa

SEQ ID NO: 692316 - DNA, 657 bp, Homo sapiens
tttcaaatagttttgttgtcctttctgtgaactaacaagcttcataatttatcttgatggtatttttattaactctattcttcttttttaaactttactttaaagttctgggatacatgcgcagaatgtgcaggtttgttccacaggtatacatgtgccatggtggtttgctgcacctatcaacccatcatctaggtttcaagccccacatgcattaggtatttgtcctaatgttctccctcmcctaaccccctaccactcgacaggccctggtgtgtgatgttcccttccctgtgcccatgtgttctcattgtattaactctattcttaaaggctcatcagatattataacaagagagtgtattccaggaagaacacaccataactggtctaaagggctatggtgctgaacatattcattgtttcacatcctatcatttcctgctaatggacagtaataatatggttaagttcaaaagtgagataaattaccctgggcagtatggcaattttcacgatattgattcttcctacccatgagcatggaatgttcttccatttgtttgtatcctcttttatttccttgagcagtagtttgtagttctccttgaagaggtccttcacatcccttgtaaggtggattcctaggtattttat

SEQ ID NO: 692317 - DNA, 657 bp, Homo sapiens
tttcaaatagttttgttgtcctttctgtgaactaacaagcttcataatttatcttgatggtatttttattaactctattcttcttttttaaactttactttaaagttctgggatacatgcgcagaatgtgcaggtttgttccacaggtatacatgtgccatggtggtttgctgcacctatcaacccatcatctaggtttcaagccccacatgcattaggtatttgtcctaatgttctccctcccctaaccccctaccactcgacaggccctggtgtgtgatgttcccttccctgtgcccatgtgttctcattgtattaactctattcttaaaggctcatcagatattataacaagagagtgtattccaggaagaacacaccataactggtctaaagggctatggkgctgaacatattcattgtttcacatcctatcatttcctgctaatggacagtaataatatggttaagttcaaaagtgagataaattaccctgggcagtatggcaattttcacgatattgattcttcctacccatgagcatggaatgttcttccatttgtttgtatcctcttttatttccttgagcagtagtttgtagttctccttgaagaggtccttcacatcccttgtaaggtggattcctaggtattttat

SEQ ID NO: 692318 - DNA, 583 bp, Homo sapiens
tggatgcatcaagaacgtgccatccttgaagcagataataagccttaccagacaacaaatctgttgatgtcttgaccttggacttcccagcctccagaaatgtgagaaataaatacctgtcatttataaattatccagtttcagttattttcatatagcagcacaaatgaactaaagtaatctgtttctgattttttttctataggagttaagtttttaataaataacatattttacttaaatatcctcccatttactgttatgtaagtgtacatagtaaaattactggctcaaattyacctccagccccaggcagttaactgatgatagcttaccaataagtaaaaataagaaaacccatagcagatgaattggttcaaaacatttattcaatggctaccagatgccaggaacaatctcatcactgccaatccactctgaacaaaacggataataactcttgccctcacagccttatattttagtgatggaaaacatatattaaactaataaacaggtgaaatatacatatattagcagggaatgtaaacaaggagtgtgcattgttggtgagggtttcgtg

SEQ ID NO: 692319 - DNA, 583 bp, Homo sapiens
tggatgcatcaagaacgtgccatccttgaagcagataataagccttaccagacaacaaatctgttgatgtcttgaccttggacttcccagcctccagaaatgtgagaaataaatacctgtcatttataaattatccagtttcagttattttcatatagcagcacaaatgaactaaagtaatctgtttctgattttttttctataggagttaagtttttaataaataacatattttacttaaatatcctcccatttactgttatgtaagtgtacatagtaaaattactggctcaaattcacctccagccccaggcagttaactgatgatarcttaccaataagtaaaaataagaaaacccatagcagatgaattggttcaaaacatttattcaatggctaccagatgccaggaacaatctcatcactgccaatccactctgaacaaaacggataataactcttgccctcacagccttatattttagtgatggaaaacatatattaaactaataaacaggtgaaatatacatatattagcagggaatgtaaacaaggagtgtgcattgttggtgagggtttcgtg

SEQ ID NO: 692320 - DNA, 583 bp, Homo sapiens
tggatgcatcaagaacgtgccatccttgaagcagataataagccttaccagacaacaaatctgttgatgtcttgaccttggacttcccagcctccagaaatgtgagaaataaatacctgtcatttataaattatccagtttcagttattttcatatagcagcacaaatgaactaaagtaatctgtttctgattttttttctataggagttaagtttttaataaataacatattttacttaaatatcctcccatttactgttatgtaagtgtacatagtaaaattactggctcaaattcacctccagccccaggcagttaactgatgatagcttaccaataagtaaaaataagaaaacccatagcagatgaattggttcaaaacatttattcaatggctaccagatgccaggaacaatctcatcactgccaatccactctgaacaaaacggataataactcttgccctcacagccttatattttagygatggaaaacatatattaaactaataaacaggtgaaatatacatatattagcagggaatgtaaacaaggagtgtgcattgttggtgagggtttcgtg

SEQ ID NO: 692321 - DNA, 1465 bp, Homo sapiens
gaaaatgcggtacatatatagcatggaatactacacagccattacaaaagaatgaaatcatgtcctttgcagcaatatggatggagatggaggccatttccctaagagaattaacacagaaacagaaaaccaaatactgcatgtactgcacgaaatgttaagcagcagctaaacattgagaacacacacacttaaacatgggaacagtagacatgggggactaccagagtggggaaggaagaagtggaggaagatatgaaaaaaactacctgttgggtactacgcttgctacctgagcataatatactcatgtaacaaacctgcacatgtacctcctgtatctaaagtaaaagttgaaattaaaaagatttttttaaagttaagggatatatttaaacctaaattggttttatatacatgtgaaaatatgattattttataaacaaattcttatgatatttactgataaaactctccaaattcagtatgtaatatctgctcatatcacctagagttgttctcaataccctcttttccctggcacctgaacctactagtggacaactctgtgccttcctaaaagaaaacctaggaaataccctatctgacgttgtccttggcaacaaacttaaaaaataatgcctatcaaacctggcctattctatcccactgcacttacttaagcgtcttcaagctctttcaccagctttataaatttcttggcaatccagccttcctctatactgttgtctaagtacagccatgccttatccatgatgcaaagtttatgccagtgtccagttattcacaatataaaattaagacatcttcacaattcagccacagtttctctctcatctttcccctctttttccttacattgtcatcccggtaaattcctcttggttgacaccctgccatttcacaagtctgcctttctccttctttcattgggcaaacatctaccatataataacctataaagaagctccttcttctctaaagacttcttggtcttcagagatagttatctccttctctgaactttgatagcacttttatcttaaacatttctacttcaacctgtaatatatggtattgcaacagatctatttatgtccctgcctctctgcacgactgtgtattatgcctcttattcccagtcactagtagagtttggattcaactaggcattgctgtctgaacacatatgtgaacattttcagacttattgattgatatggaaaagtttatgtggatttatgattctgtgaccttttgcaacttatctaacatatcaaagtcaaaaaagccaaaaaatttggaaaggaaaacactgaacgggatcaccttgtgaaaggtgcctcttatgcaggcagaaaaattatgtttgcattgaaaacagatcmcctttaaaacatatttacatttcatttgacttcgcgtggtcccagtcaatgaataa

SEQ ID NO: 692322 - DNA, 2252 bp, Homo sapiens
aatctgaactttcaaagaatcattaggaaaatggtgcagacattctcaaccttatctgcacattagaatcactcggggagtttctaaaaatcttgatcctcaaaccacattccagaacaattagattagaaagaggaagaagatgagggctagatattagtgtacttttgaaagttcttcatgagattccaatgtgtggttaagattgaaagctactggattagagagacccatcctcaatttaaaggagttaacttttagatgatggttaaattacaagatatgtgtgttttcagaagtagagagttagrtataactttagagtgatttctcttggcaaatagcctacaattcccttggattatcactgtttgaagataccgacactaggatatgatgtattggcttccatgtggatttagattgctgttttttctgcaagcaatagtatcagccatgataataacttgtctgtcaaatatgcacgtttcaaacctggaaatgattcccatcatcagttaaattttatcatgtaggggtaattaaaacattttgcagtaagaataatttaaagtaaaggaaattgtattaaatttcccatggctaagattattagacaactagtaaagtttttagaggcagtgacatgaaggaaatgaaagaatgattaaataactttacagtttttctaaactctcagcccacccagtatatagctctatgtggtaataataaattatctttaagattaattttctgtgcccaggattatgttcccaaaataatgaaaattgtctgaattccaccttttctactatcaaataggtgtttacaaagtatattagtccattttcatactgctatgaagaaacacccaagactgggtaatttatttaaaaaaaaaaaaggtttaatggactcatagttccacatggctggggaggcctcacaatcatggcagaaggtgaaggaagagcaaaggcacctgttacatggcatcaggcaagagaatgtgtgcagaagaactgctctttgtaacaccatcagatctcatgagacttattcactaacatgagaacagtgtggggaaacctgccctgtgattcaattacctcccactgggtccctcctacaacatgttgggattataggagctaaaattcaagatgagatttgggtggggacacagccaaaccatatcacaaaggaagtggagaattttgtatgcatatatgtattgttttcaagatttttatttttatttttttaagatggggcctcactctgttgcccaggcactacagccttcaactcctaggttcaagcaattctcccaccttagtgtctgtttgtgcttctgactagctgggactacaggcaagtgccaccatgactggctacaagatgtcttccttacccaaaaagtactttcaaatcctacttatcagggacttataaaatggctgccttccttctgttgttcccattcttatcattccatatctgtctggggatatcaatacattttagctttccaaatcagaaactttcaagtcatctttgactttttgttctgttccattcctaaactccagggccattaaaataaatgatttatccctttggaatatctttcagatgttgtgcatcgtctacatttcagctgccactttgtagaataggcctttattaccgaacttcctagctggtctcccagccttcatcactctctctgttttgaattaaccctgcttttctatgaatttgaccttcatggtgatccctttcagcaaagccacaaattctaaatcccttagcctgcctcttaaggcccttcataagcagatttttctctgagtctccatattatttcctgctattccaacactcatctgggctgacaatgtagattttccataggaaagtcttaaaaatttttttaaagaagagaggatgcttacagataattattaggtagcttgaaaattgttttcaatgcagcacaattccctgaagatgcagtctagttgatatacaaaatgcaatttatttatttcccctagaaccaattgctctgtgccttgggtaaatcacttggccacttgccttgattataaagaaatgatagtaactcctgattcccatttatttcttgtaacaatgagcaatcaaaggagatggtaggcaaatagatgtgggactcatgagaagttgataagtcaaaaagttgttattgttggctttgaaatgca

SEQ ID NO: 692323 - DNA, 2477 bp, Homo sapiens
ttgaaggcagcatgctcgttaagagtcatcaccactccctaatctcaagtacccagggacacaaacactgcggaaggccgcagggtcctctgtctaggaaaaccagagacccttgttcacatgtttatctgctgaccttccctccactattgtcctatgaccctgccaaatccccctctccragaaacacccaagaatgatcaataaatactaaaaaaaaaaaagaaaaaggttaaaaactaaaaaaaaaaaaaaggtgctaacatgtatatttaatactactcggaattttttttctttttttttttgagatggagtctcactctgtcacccaggctggggtgcaatggtgcaatctcagctcactgcatcctctgcctcctgggttcaagtgattctcctccctcagcctcctgagtagctgggattacaggtgcctgccacctgcagagacagggtttcaccatgttggccaggctgttctcgaactcctgacctcaggtgatctgcctgcctcggcctcccaaagtgctgggattacaggcgtgagccactgcacctggcctcacttggattattttttaattgtggcgctgtttctccctacaacatgactcttacagatagcttcaaaagcctggctggatggataacaccatggtacaatacacgttttcagacagccacacagtagacttttaggcatcatacacttgagttttccttggctagttttgactataatcaagtttttcatgctgagatgaagctttacatggaaagctgctaactgccaatttacaactgtgtcatttgaaattccataaacatttcttcttttggcagcatttataaataacaaaaaagttgtattctagcttctaaccatcctttgtgaataagaagtgtggcattgtggaggtacagaagacttcagctctcatatatagtacctgccataaattaaagtatgctaaaattttttttttttttaactttatagagatgaggtctcactgtgttgcccaggctggtctcaaacccctagcctcaagcaatcctcttgcctcagccccctaaagtgttgggattacaggcatgagccaccatgcccagctgaatgttatactttgtagctcagtaaattgaactatgctagtttgttaaattttaccattattcacttagagaaaatcacaaacaaaatttaaaatctcaattttctttgaggcaagggtcttgctatattgtccaggctggtcttgaacttgtggctcaggtgatccaaccacctcagcctctgagtagctgggattctcaccctttttgagtacagaagtaaataagtacttgcactaaaattttgtattttttcttaaacatggttaagattattgttttcatcataattaacctatcatgtctatttgatcccatagagccaattgaaatctggagaaatttggtcagttaacctgttggtttttatatatggcaccaactgatctctaccagattgacacagtagatcagctgttttaatgctgaaaagagaagcttatataaatacagtgcacatctattaatgcttctcacgtctgtagttctgtttcaggcagaggttttttggcataggacctgtattcagctcacactttcctaggctggctatgagtagaatgcctcgtggcagtagctacactcatacataggcattgatcttagatctgtgtagagttttaaatcattggcatcttttaggcctaaattttatatttgctggattttttttttttttttttttgagatggagtcttgctctgtcacccaggctggagtgcagtggtgcatctctgctcactgcaagctccgcctcccgggttcacaccattctcctgcctcagtgtcccacgtagctgggactacaggcacccgccaccactcccggctaattttttgtattttttcagtagagacggggtttcatcgtgttagccagcatggtctcaatctcctgacctcatgatccacctgcctcggcctcccaaagtgctgggattacaggcgtgagccaccacacccagcctggaatttttttaaagcagtaaatgtaaacgctaactttagaaaatattaataatatgattaattttagccagaataaaataatttgccatctttatagaaatctggccacgtaggaattagcattcttaaaattggcactgaagccagaagatggatagtgaaattggtcacatgcatagacagctaccaagtccagtgtttaatggtgcccagtgaagaggattgaagcacacaccagagaagcagctgtaactgggtcagaagaaaagtgtcaggctgagacttagttttaggtagaaaaatgagctgcttgcctctacattcattattggctcatctcataaactcaaatgaggggatcagaagctggcagaagggacggactcatg

SEQ ID NO: 692324 - DNA, 2477 bp, Homo sapiens
ttgaaggcagcatgctcgttaagagtcatcaccactccctaatctcaagtacccagggacacaaacactgcggaaggccgcagggtcctctgtctaggaaaaccagagacccttgttcacatgtttatctgctgaccttccctccactattgtcctatgaccctgccaaatccccctctccgagaaacacccaagaatgatcaataaatactaaaaaaaaaaaagaaaaaggttaaaaactaaaaaaaaaaaaaaggtgctaacatgtatatttaatactactcggaattttttttctttttttttttgagatggagtctcactctgtcacccaggctggggtgcaatggtgcaatctcagctcactgcatcctctgcctcctgggttcaagtgattctcctccctcagcctcctgagtagctgggattacaggtgcctgccacctgcagagacagggtttcaccatgttggccaggctgttctcgaactcctgacctcaggtgatctgcctgcctcggcctcccaaagtgctgggattacaggcgtgagccactgcacctggcctcacttggattattttttaattgtggcgctgtttctccctacaacatgactcttacagatagcttcaaaagcctggctggatggataacaccatggtacaatacacgttttcagacagccacacagtagacttttaggcatcatacacttgagttttccttggctagttttgactataatcaagtttttcatgctgagatgaagctttacatggaaagctgctaactgccaatttacaactgtgtcatttgaaattccataaacatttcttcttttggcagcatttataaataacaaaaaagttgtattctagcttctaaccatcctttgtgaataagaagtgtggcattgtggaggtacagaagacttcagctctcatatatagtacctgccataaattaaagtatgctaaaattttttttttttttaactttatagagatgaggtctcactgtgttgcccaggctggtctcaaacccctagcctcaagcaatcctcttgcctcagccccctaaagtgttgggattacaggcatgagccaccatgcccagctgaatgttatactttgtagctcagtaaattgaactatgctagtttgttaaattttaccattattcacttagagaaaatcacaaacaaaatttaaaatctcaattttctttgaggcaagggtcttgctatattgtccaggctggtcttgaacttgtggctcaggtgatccaaccacctcagcctctgagtagctgggattctcaccctttttgagtacagaagtaaataagtacttgcactaaaattttgtattttttcttaaacatggttaagattattgttttcatcataattaacctatcatgtctatttgatcccatagagccaattgaaatctggagaaatttggtcagttaacctgttggtttttatatatggcaccaactgatctctaccagattgacacagtagatcagctgttttaatgctgaaaagagaagcttatataaatacagtgcacatctattaatgcttctcacgtctgtagttctgtttcaggcagaggwtttttggcataggacctgtattcagctcacactttcctaggctggctatgagtagaatgcctcgtggcagtagctacactcatacataggcattgatcttagatctgtgtagagttttaaatcattggcatcttttaggcctaaattttatatttgctggattttttttttttttttttttgagatggagtcttgctctgtcacccaggctggagtgcagtggtgcatctctgctcactgcaagctccgcctcccgggttcacaccattctcctgcctcagtgtcccacgtagctgggactacaggcacccgccaccactcccggctaattttttgtattttttcagtagagacggggtttcatcgtgttagccagcatggtctcaatctcctgacctcatgatccacctgcctcggcctcccaaagtgctgggattacaggcgtgagccaccacacccagcctggaatttttttaaagcagtaaatgtaaacgctaactttagaaaatattaataatatgattaattttagccagaataaaataatttgccatctttatagaaatctggccacgtaggaattagcattcttaaaattggcactgaagccagaagatggatagtgaaattggtcacatgcatagacagctaccaagtccagtgtttaatggtgcccagtgaagaggattgaagcacacaccagagaagcagctgtaactgggtcagaagaaaagtgtcaggctgagacttagttttaggtagaaaaatgagctgcttgcctctacattcattattggctcatctcataaactcaaatgaggggatcagaagctggcagaagggacggactcatg

SEQ ID NO: 692325 - DNA, 2582 bp, Homo sapiens
ctgtttggaagagttgagtcaaggcagcatgtaggggaagatacgtgcttacgaagggtctctggtgatgctgggtggaggtggcatcatggaggagggataaagtctgcctacccctcctgcttttggcaggcaccagatattgctggatgagtactgggctctacatacctggaaggcaaattatagaagtctcactgcctgaagctgctgcctctgccgacctgaaggtaaggccatgccccacctcaccatgtaacatggaagccaaaggctcttcctagcacagtcagtatcttatttgattctcacaaagccctgttggtaatacagagcaggtgattttacccttgttttaaggatgaagtaactaaggtgcagaaaagctgattgattgattgatcgattgaaatgtatagagctaatacaaataagtgcccaggactcaaacctaactaatttctggctcttaagttttgtgcttttgacctacatcctagagtagggaataagaggtatcaaatggaaggtaacctagcacagagtaggcattcagtaaatcggagttcactgttcatctccgtatccattcccatggtagcacaaggtctttctgacttcagcttcttccccatgacatccaagaccattcctcaattgcccagttcaccttccctctgtcactttcacatagaacccatttgcaaagttagtttgctgtccttccctatccccttgggggtcactgtgatggttagcatctattctgtgcctgtacctatcctggaacttgattagcataaacccagggaaaagaatcctaggactctaccaagtacctgcccaggaagagggcttggagaaaccctccactatcttagccagatcacaccacctcccactgggccctctctctgatcagcaaaaggcagggttccctctgccccattccaaatgccagaatcaccaccatgagataggcgatcaagtgttctatttgttagcaacaccaggagaccgggtgtgggagtcagccctcctcagaattggccttacaggttacacctggcacttctcacattaatgtctatctaacatgacccattatggagctgtttgaatgctttgggaaaatatttatatatacttcagtccatatgccccaaggaatgctacagtttcttggggtatcacacatggttcatctgtggtgggaaggctgggctcgcttgggttcatggctgaatgacccatcctgagtcccttgctgggctctcttcttccacccactcgtgccccatggtgactccttgagggggggatctttctgctccagatacagattggctgccacacagatgacctgaccagggccagcaagcttttccgaggcccactcgtaattaaccggtgctgcttggacaaacccacaaaatcgatcacgtgcctctggggtggactcctctatataattgtgcctcagaacagcaaactgggttctgtgcctgtcaccgtgaagggggctgtgcatgctccatactacaagctgggtgagtgggagctctgggtgcccctgagggaaggggaagaactgagatgaggattccagagagcatgggagtccaggaggtgactagagtctgtttggtgcagaaggagagagacacgggctaacagaggaataagggtcagcttccttagattcagctttggggttgtacagataaagaccaaaccacatccttggagacttcatagaaggatagagaaaagggatatagcctcagcaaactaacacaggaacagaaaaccaaacaccacgtgttctcacttgtaagtgggagctgaacaataagaacacatggacacagggaggggaacaacacacattggggcctgtcagtggggtgggtagcgggggtggatggagggagaccatcaggataaatagctaatgcatgctgggcttaatayctaggtgatgggttgatgggtgcagcaaaccaccatcacacatgtttacctatggaacaaacctgcacgtcctgcacatgtatcccggaactttacattttttaaaaaagaggagggatatggcagttcatgattttgttgttctcttcctggagtctaagttgtatgttgtaatttaagggatttgggaaaggatttcaagctccatggtctctcttcctaggggagaccaccctggaggagtggaagaggcgtatccaggagaatccagggccctggggagagctggccacggacaacatcattctgaccgtgccgaccgcaaatcttcgtactctggagaaccctgagccgttctccgcctctgggatgaggtgatgcaggctgtggcgcgactgggagctgagcccttccctttgcgcctgcctcagaggattgttgccgacgtgcagatctcagtgggtgggtgctccaagcaaaccctctgtgcatgctgcctctgagcgccttcctgtctttcatcagccatgcagtgggcagccagtaggggaaacatattttgctagcaagacatatagatgtatccttgttatttaaatgggaaggaa

SEQ ID NO: 692326 - DNA, 726 bp, Homo sapiens
atgcttttcaaaccgcaggtcactaacaatcagtagtctgtgaaggtagtttagcaggttgtgatcagcttcttgttaacaaaagagaattcatccaggctggaacaaaatagaattgaattgaaaaaaatactttctcacatgtaatatggctgagtgttgttttgtgaaagttcgttttaattatatgtaaatgggctttttgagcacataatgaaatatgatataaaaagtatttgttattataggtcacagtgtttyaaaaaaaaccaatggcctacaatattgattctcaggaatccacccaaaatttccaggaaataaaaataccagaagaaaacaatgaactggaaaaacaatgaaagagaagcaaagagagaaccaatgaccaaagagttgttcctttgaaaaaagtccataaattaatagtgactagccatatcggccaagataaaaagagagaagacacaaattatcaattttaggaatgaaggttagaaaattatttcagatccttcctagtcatttataaacataaaaataaatcatacatgtgtcatacatggcacagcagcaatactcactgaagaagaaataggtatcttgaataagctactatacattaaagaaattgaatttgtggcttacaattctcaaagaaaaatcttcaagtccagctggctgtactaacacgtttttcctaacatttcagaaaaatgtaatata

SEQ ID NO: 692327 - DNA, 641 bp, Homo sapiens
acagcaggatgtgagcagcgggtgagcaaataaagcttcatctgtatttacagccactccccatcacttgtgttaccacctaagctccgcctcctgttagatcagtggcagcattagagtctcataggggcacgaaccctattgcaaactgctcatgcaaagggtctaggtagtgtgctccttatgagaatctaatgcctgatgatctgtcactgtctcccatcaccttcaggtggggctatctagttgcaggaaagcaagctcagggctcccactgattctacattatggtgggttgtataattagttcattatatgttacaatgtactaataatagaaataaagtgtgccataaatgtaatgcacttgaattatcctgaaacccctgccaggtccatggaaaaattgtcttctataaacaggtccctggtaccaaaaggttagggaccactgatttaacatattcattttttgcttgtattttctgtataatacaaattaaaagttagatctcgattttaggtcaggattgacaaactgaggmcagcccctgtttttgtgaatgaagttttgttggagcacagccatgcccattcattcacaaactgtggctgctttcaagctacagtgtctgccattg

SEQ ID NO: 692328 - DNA, 586 bp, Homo sapiens
cttaacattagagatcaacaaatatttgtaaactatataaattaatgaaaaaatatgaatgaayacacatccaaaaccataacaagagaaaagacagcctcatatactactgttaatcctgcagacaacttcctactatggaatatagggctgggggttgcgccagagccttccagcctcagccaacaatagagccagagggaaccaactccttgagagtctcagaaggtcagagtctgagtctctggctcagattcctcccgccttcagagcaagtcccattagaggttttcagtgaacattcctgccacaaatattggtcaaaggcgcttggactgacccagcaggttccttaactttaaatctcggctggaaggccctggagcttcttaagagaattgattgctggcctgccccaactctgcctgccaaggagtggggcagtctctaaacaccaacaaaagctcctctcacaccctatccccaagggcacacctatgtttatataacaggagtatactgcagttgctttaatatttaaaagcaaatccaaaggcacttgctacctttataccatgacagaaga

SEQ ID NO: 692329 - DNA, 586 bp, Homo sapiens
cttaacattagagatcaacaaatatttgtaaactatataaattaatgaaaaaatatgaatgaatacacatccaaaaccataacaagagaaaagacagcctcatatactactgttaatcctgcagacaacttcctactatggaatatagggctgggggttgcgccagagccttccagcctcagccaacaatagagccagagggaaccaactccttgagagtctcagaaggtcagagtctgagtctctggctcagattcctcccgccttcagagcaagtcccattagaggttttcagtgaacattcctgccacaaatattggtcaaaggcgcttggactgacccagcaggttccttaactttaaatctcggctggaaggccctggagcttcttaagagaattgattgctggcctgccccaactctgcctgccaaggagtggggcagtctctaaacaccaacaaaagctcctctcacaycctatccccaagggcacacctatgtttatataacaggagtatactgcagttgctttaatatttaaaagcaaatccaaaggcacttgctacctttataccatgacagaaga

SEQ ID NO: 692330 - DNA, 595 bp, Homo sapiens
ctcacaaatgttcaggaaattgtgcatttgtgtgcatcattgtgtgtaagaagacagaggagggaaaggaggaaattttatgaaatgttaacattagaagaaaaccaagygaaggatctgtgaaaattacactactttttgcaaattttctgcaattcctaagttgttaaaataaaatttctaaaaactaactttatgtcagactgattctgaattacatagtaagttacatggtttcttttctttcttttcaagaaatagttaacaaagaaaaaaacattcaaacttatcttctgttaagcccttttccttttctagtattccatttcttaaaatccttcctaggcttttcttaggttccagatttctagcttccacagaaagcatgatctcactatccttggaacacaattgcctgctctttgctctgagttctaacattacagtctttataaaacaacctagcattcaataatgtaatgttttatgtttatcctacattatttcacttagatataatgtcttcatcaattaatcagagaaaatttctttcattttcttcctctctccaaaaattcctgcaatttcaattcta

SEQ ID NO: 692331 - DNA, 595 bp, Homo sapiens
ctcacaaatgttcaggaaattgtgcatttgtgtgcatcattgtgtgtaagaagacagaggagggaaaggaggaaattttatgaaatgttaacattagaagaaaaccaagcgaaggatctgtgaaaattacactactttttgcaaattttctgcaattcctaagttgttaaaataaaatttctaaaaactaactttatgtcagactgattctgaattacatagtaagttacatggtttcttttctttcttttcaagaaatagttaacaaagaaaaaaacattcaaacttatcttctgttaagcccttttccttttctagtattccatttcttaaaatccttcctaggcttttcttaggttccagatttctagcttccacagmaagcatgatctcactatccttggaacacaattgcctgctctttgctctgagttctaacattacagtctttataaaacaacctagcattcaataatgtaatgttttatgtttatcctacattatttcacttagatataatgtcttcatcaattaatcagagaaaatttctttcattttcttcctctctccaaaaattcctgcaatttcaattcta

SEQ ID NO: 692332 - DNA, 529 bp, Homo sapiens
cccaccttggcctctcaaagtgctggaattacaagcatcagccatcaagcccggcctatattttgaaataattatagattcacaaggagttgcaaaaaaygtgtactaagaggttatgtgtaccttttacccagtttctccagtggtaacatcttgcgtaactataatacaatatcaaaactagggaacttgcattggtacagtccatattttattcaaatttcaccaaggttacttgcactctatgttagtgtgtgcagttctgtgtagctctgtctcatgtgtagctttgtgtaactaccaccacagtgaaagacccagaactattccgtcaccacacagcttcctgtgctgcttctataaccacatccacaccacccctaatcccgtgcaacccctaatttgttctccatctctgtgattttgttaacattaaattgattgttttgacccagtgattgtcatttctggcagtgtggagaaacctgcgaccatttctttttgatacagactggcaaagactcagaca

SEQ ID NO: 692333 - DNA, 3066 bp, Homo sapiens
attagccaggcatggtggcatgcacctgtaatcccagctacttaggaagctggggcaggagaattacttgaacccagggggcggaggttgcggtgagccgagactgggccactgtactccagcctgggcaacacagcaagactccatctcaaaaaaaaagtattatacatgtgattactgtaaaaagaccttcagaaaatataggcctttaaagtaaggactgtttattctgaagacaaacatttcaaacataaagaggattgtagtacctttacttgtaatatagattttattgtacacattttatattaaaggaaaaccctgaagcagatgctcaaactttggtgaacgtcagagaatttatatttgagagaaagcctgaaaatgtaatgaatgtgaaagaacatttgttcaaaaactacagcttagaaaacaccagtttctactaaaaaatatttttgcagatgtagcaaatggggaaaatatatttaatcaaaaattaagtctatataaacatttgagaattcacagtagaaagaatgaaggcactgaaacttcagacattacactaaatcagggtgctagttataaaaatgatccaaagctaacattatatacattttaacgaagtagtttttttttttggagatttataattacatccgaggtatgcttctttttctgtaaaaaaaatatacattttctgaaaagcaaataataatgtaacccaagtctcgagttacctcatgttgattctttcttcccattgtttgtgaaagtatttgatgaattgttgcatcagagatatgagagattattttttataggtgtccattattcatgaactttcctatgaaagagtaaggacattaggttgtaacatgcataatgaaaaatctaaatgaagaggctctttgtggttgacttataaaattgttttagtgacgtataaggtgggtgttcacagtaatattctgaattctagtgagaggaaaacctttcaatgttagtaataaattattttatcaattgtacctttgtgtaataaaatgcaataaatttaaaattttttaaagattatgtatgaacttaattttttcattaaacaaaattgtttttaatgtgttaagacttgtgctttgaaagaagggttgatttgctatcaattttaacgtgtcccatcttacttaaggttctaggttaaagatggtaacaatatagtatttgttaatgtaggggaatgacatgtctagtaatctcttttttgccagtgtgtgtttgtttgtttgttttgagacagagtcttgctctgtcacccaggctggagtgcagtggcgcaatctcggctcactgcaacctccacatcctgggtccaagcgattctcctgcctcagtctcccaagtagctggaactacaggcacatgccaccacacctggctaatttttgtatttttagtacagatgggtttcaccatgttggccaggctagtctcgaactcctgacctcaggtgatccacttgccttggcctcccaaaatgctgggatacatgtgtgagccaccatgccttgcctgccagcggttttagactgcaaataagttgaagaattttgttcccataggtcaaatttgtattcttttttatcttatttaaaatttttttaacttttgtgggtagatagtgtgcatacacacttatggcatgtatgagatattttaacacagacatacaatatttaattataacagcagagtaaatgaggtattcatcacctcgagcatgtatttatcctttgtattacaaacaatcaacttttagttatctcagtatgtgcaattgaattattaaccatagggtcattttgtgatcataaaaattacatgagtataattaatatccatacatttctgagttgattatttttttaaatttgttttatatattttttacatgtgacctctctgctgacaaacaaaaacagacttttagtttttatttacatagagttatatatacaaatatactaaagatacaccagctgggtgcagtggctcatgcttgtaatcccagcactttgggaggctgaggtgagtgggtcatttgaggtcaggaattcaagacaagcctggccaacatggtgaaaccccatctctactaaaaatacaaaaattaactggccatggtggtgcgtgcctgtagtcccagctactcaggaggctgaggcaggagaatcgcttgaacccgggaggtggaggttgcagtgagctgagatggcaccactgcactccagcctgggtgacagagtgagacaccatctaaaaataaataaataaaagatataccttaagtgtaagaaagttatktagcaagtgagtgtgtttgtgagtttgtatgcattttcagaagaaaagaacaatattgaaacaaaaaagatcattttaataaggtggataattaactagaaaccaagaaacctcagagattctgaaaaaaatacatacatattctgtgccctgtattgaatttgtaactttaagatcttatacacccaaatcttatctcaaattgtaatccccacatgtcaaggaagggacttggtgggaggtgattggaatatgggggtaattttcccccatgctgttctcatgatagtaagtgagttctcaaaagatctgatggttttataaatggtggttttttctgctttcctgctctcttgctgcctagtgaggaaggtatttgcttctcctttgccttccaccataattgtaggtttctttagaccctccccagccatgcagaattgtgagtaaattaaacctcctttctgtataaattacccattctttggtagtatctttatagtagtgtgaaaacagactaatatagaaaattaatactgggagtttggggcactgctataaagataattgaaaatgtggaagtgaatttggaactgagtaataggcagaagttgaaagtttagggagctcagaaaaagaaatgtgggagagtttggaacttcctagagacttgttgaatgcttttgaccaaaatgctaatag

SEQ ID NO: 692334 - DNA, 3066 bp, Homo sapiens
attagccaggcatggtggcatgcacctgtaatcccagctacttaggaagctggggcaggagaattacttgaacccagggggcggaggttgcggtgagccgagactgggccactgtactccagcctgggcaacacagcaagactccatctcaaaaaaaaagtattatacatgtgattactgtaaaaagaccttcagaaaatataggcctttaaagtaaggactgtttattctgaagacaaacatttcaaacataaagaggattgtagtacctttacttgtaatatagattttattgtacacattttatattaaaggaaaaccctgaagcagatgctcaaactttggtgaacgtcagagaatttatatttgagagaaagcctgaaaatgtaatgaatgtgaaagaacatttgttcaaaaactacagcttagaaaacaccagtttctactaaaaaatatttttgcagatgtagcaaatggggaaaatatatttaatcaaaaattaagtctatataaacatttgagaattcacagtagaaagaatgaaggcactgaaacttcagacattacactaaatcagggtgctagttataaaaatgatccaaagctaacattatatacattttaacgaagtagtttttttttttggagatttataattacatccgaggtatgcttctttttctgtaaaaaaaatatacattttctgaaaagcaaataataatgtaacccaagtctcgagttacctcatgttgattctttcttcccattgtttgtgaaagtatttgatgaattgttgcatcagagatatgagagattattttttataggtgtccattattcatgaactttcctatgaaagagtaaggacattaggttgtaacatgcataatgaaaaatctaaatgaagaggctctttgtggttgacttataaaattgttttagtgacgtataaggtgggtgttcacagtaatattctgaattctagtgagaggaaaacctttcaatgttagtaataaattattttatcaattgtacctttgtgtaataaaatgcaataaatttaaaattttttaaagattatgtatgaacttaattttttcattaaacaaaattgtttttaatgtgttaagacttgtgctttgaaagaagggttgatttgctatcaattttaacgtgtcccatcttacttaaggttctaggttaaagatggtaacaatatagtatttgttaatgtaggggaatgacatgtctagtaatctcttttttgccagtgtgtgtttgtttgtttgttttgagacagagtcttgctctgtcacccaggctggagtgcagtggcgcaatctcggctcactgcaacctccacatcctgggtccaagcgattctcctgcctcagtctcccaagtagctggaactacaggcacatgccaccacacctggctaatttttgtatttttagtacagatgggtttcaccatgttggccaggctagtctcgaactcctgacctcaggtgatccacttgccttggcctcccaaaatgctgggatacatgtgtgagccaccatgccttgcctgccagcggttttagactgcaaataagttgaagaattttgttcccataggtcaaatttgtattcttttttatcttatttaaaatttttttaacttttgtgggtagatagtgtgcatacacacttatggcatgtatgagatattttaacacagacatacaatatttaattataacagcagagtaaatgaggtattcatcacctcgagcatgtatttatcctttgtattacaaacaatcaacttttagttatctcagtatgtgcaattgaattattaaccatagggtcattttgtgatcataaaaattacatgagtataattaatatccatacatttctgagttgattatttttttaaatttgttttatatattttttacatgtgacctctctgctgacaaacaaaaacagacttttagtttttatttacatagagttatatatacaaatatactaaagatacaccagctgggtgcagtggctcatgcttgtaatcccagcactttgggaggctgaggtgagtgggtcatttgaggtcaggaattcaagacaagcctggccaacatggtgaaaccccatctctactaaaaatacaaaaattaactggccatggtggtgcgtgcctgtagtcccagctactcaggaggctgaggcaggagaatcgcttgaacccgggaggtggaggttgcagtgagctgagatggcaccactgcactccagcctgggtgacagagtgagacaccatctaaaaataaataaataaaagatataccttaagtgtaagaaagttatgtagcaagtgagtgtgtttgtgagtttgtatgcattttcagaagaaaagaacaatattgaaacaaaaaagatcattttaataaggtggataattaactagaaaccaagaaacctcagagattctgaaaaaaatacatacatattctgtgccctgtattgaatttgtaactttaagatcttatacacccaaatcttatctcaaattgtaatccccacatgtcaaggaagggacttggtgggaggtgattggaatatgggggtaattttcccccrtgctgttctcatgatagtaagtgagttctcaaaagatctgatggttttataaatggtggttttttctgctttcctgctctcttgctgcctagtgaggaaggtatttgcttctcctttgccttccaccataattgtaggtttctttagaccctccccagccatgcagaattgtgagtaaattaaacctcctttctgtataaattacccattctttggtagtatctttatagtagtgtgaaaacagactaatatagaaaattaatactgggagtttggggcactgctataaagataattgaaaatgtggaagtgaatttggaactgagtaataggcagaagttgaaagtttagggagctcagaaaaagaaatgtgggagagtttggaacttcctagagacttgttgaatgcttttgaccaaaatgctaatag

SEQ ID NO: 692335 - DNA, 640 bp, Homo sapiens
acacacacacacacacacacacacacacacacacaggcccatgtgcataaatttgcaatcagccaatcagccaagcctgccctactcaatcttgaagcttcttatagtcacaccaaagcatcacacaaggctgggcgyggtggctcacacctataatcccagcactttgggaggccaagatgagtggatcacctgtggtcaggagttcgagaccagcctggcaaacatggtgaaaccctgtctctactaaaaatacaaaaattagccgggcgtggtggcgctcatctgtaatcccagctactccagaggctgcagggggagaatcacttgaacctggaaggtagaggctgcagtgaactgaaactgtgccactgcactccagcctgtgtgacagagcaaggccctatctcaaaaacaaacaaacaaacaaacaaaaaacaaaaaaacaaacaaaccctcaaacaaagcatcacacagtatgatctgactggaggtagtcacaatacacaaataaatccttatcagataagaattcatttaaattcctttcaaagcttttcaagaggcagaaaagcctgtcttcggagataccctcctctggattaatgacttgggttaccctctttatcacaagttaaag

SEQ ID NO: 692336 - DNA, 640 bp, Homo sapiens
acacacacacacacacacacacacacacacacacaggcccatgtgcataaatttgcaatcagccaatcagccaagcctgccctactcaatcttgaagcttcttatagtcacaccaaagcatcacacaaggctgggcgtrgtggctcacacctataatcccagcactttgggaggccaagatgagtggatcacctgtggtcaggagttcgagaccagcctggcaaacatggtgaaaccctgtctctactaaaaatacaaaaattagccgggcgtggtggcgctcatctgtaatcccagctactccagaggctgcagggggagaatcacttgaacctggaaggtagaggctgcagtgaactgaaactgtgccactgcactccagcctgtgtgacagagcaaggccctatctcaaaaacaaacaaacaaacaaacaaaaaacaaaaaaacaaacaaaccctcaaacaaagcatcacacagtatgatctgactggaggtagtcacaatacacaaataaatccttatcagataagaattcatttaaattcctttcaaagcttttcaagaggcagaaaagcctgtcttcggagataccctcctctggattaatgacttgggttaccctctttatcacaagttaaag

SEQ ID NO: 692337 - DNA, 640 bp, Homo sapiens
acacacacacacacacacacacacacacacacacaggcccatgtgcataaatttgcaatcagccaatcagccaagcctgccctactcaatcttgaagcttcttatagtcacaccaaagcatcacacaaggctgggcgtggtggctcacacctataatcccagcactttgggaggccaagatgagtgsatcacctgtggtcaggagttcgagaccagcctggcaaacatggtgaaaccctgtctctactaaaaatacaaaaattagccgggcgtggtggcgctcatctgtaatcccagctactccagaggctgcagggggagaatcacttgaacctggaaggtagaggctgcagtgaactgaaactgtgccactgcactccagcctgtgtgacagagcaaggccctatctcaaaaacaaacaaacaaacaaacaaaaaacaaaaaaacaaacaaaccctcaaacaaagcatcacacagtatgatctgactggaggtagtcacaatacacaaataaatccttatcagataagaattcatttaaattcctttcaaagcttttcaagaggcagaaaagcctgtcttcggagataccctcctctggattaatgacttgggttaccctctttatcacaagttaaag

SEQ ID NO: 692338 - DNA, 640 bp, Homo sapiens
acacacacacacacacacacacacacacacacacaggcccatgtgcataaatttgcaatcagccaatcagccaagcctgccctactcaatcttgaagcttcttatagtcacaccaaagcatcacacaaggctgggcgtggtggctcacacctataatcccagcactttgggaggccaagatgagtggatcacctgtggtcaggagttcgagaccagcctggcaaacrtggtgaaaccctgtctctactaaaaatacaaaaattagccgggcgtggtggcgctcatctgtaatcccagctactccagaggctgcagggggagaatcacttgaacctggaaggtagaggctgcagtgaactgaaactgtgccactgcactccagcctgtgtgacagagcaaggccctatctcaaaaacaaacaaacaaacaaacaaaaaacaaaaaaacaaacaaaccctcaaacaaagcatcacacagtatgatctgactggaggtagtcacaatacacaaataaatccttatcagataagaattcatttaaattcctttcaaagcttttcaagaggcagaaaagcctgtcttcggagataccctcctctggattaatgacttgggttaccctctttatcacaagttaaag

SEQ ID NO: 692339 - DNA, 640 bp, Homo sapiens
acacacacacacacacacacacacacacacacacaggcccatgtgcataaatttgcaatcagccaatcagccaagcctgccctactcaatcttgaagcttcttatagtcacaccaaagcatcacacaaggctgggcgtggtggctcacacctataatcccagcactttgggaggccaagatgagtggatcacctgtggtcaggagttcgagaccagcctggcaaacatggtgaaaccctgtctctactaaaaatacaaaaattagccgggcgtggtggcgctcatctgtaatcccagctactccagaggctgcagggggagaatcacttgaacctggaaggtagaggctgcagtgaactgaaactgtgccactgcactccagcctgtgtgacagagcaaggccctatctcaaaaacaaacaaacaaacaaacaaaaaacaaaaaaacaaacaaaccctcaaacaaagcatcacacagtatgatctgactggaggtagtcacaatacacaaataaatccttatcagataagaattmatttaaattcctttcaaagcttttcaagaggcagaaaagcctgtcttcggagataccctcctctggattaatgacttgggttaccctctttatcacaagttaaag

SEQ ID NO: 692340 - DNA, 640 bp, Homo sapiens
acacacacacacacacacacacacacacacacacaggcccatgtgcataaatttgcaatcagccaatcagccaagcctgccctactcaatcttgaagcttcttatagtcacaccaaagcatcacacaaggctgggcgtggtggctcacacctataatcccagcactttgggaggccaagatgagtggatcacctgtggtcaggagttcgagaccagcctggcaaacatggtgaaaccctgtctctactaaaaatacaaaaattagccgggcgtggtggcgctcatctgtaatcccagctactccagaggctgcagggggagaatcacttgaacctggaaggtagaggctgcagtgaactgaaactgtgccactgcactccagcctgtgtgacagagcaaggccctatctcaaaaacaaacaaacaaacaaacaaaaaacaaaaaaacaaacaaaccctcaaacaaagcatcacacagtatgatctgactggaggtagtcacaatacacaaataaatccttatcagataagaattcatttaaattcctttcaaagcttttcaagaggcagaaaagcctgtcttcrgagataccctcctctggattaatgacttgggttaccctctttatcacaagttaaag

SEQ ID NO: 692341 - DNA, 633 bp, Homo sapiens
atcagaacgactataacacaccatctcaaactcgttaggatggctattatcaaaaagtcaagagataacaaatgtgggcaagggtgtagaaaaaagggaactctcgtatgttgttggtgaaaaatatagattggtacagccattatggaaaacagtatggagatttttaaagaaattaaaattagaactactatatgacccacaatccctttttcagatatatatccagatgaaatgaaatcactaccttggaaagaaatctacactctcatgttcattgcagcattattcaaatagccaagatatggaaacaacctaagtgtcagacgacagaggaaatgaataaactgtggtacctatatacaatggaatattatttagccctaaaaatgaataagatcttgccatttgccacaacatggatragcctggaagacattttgctgagtgaaaaaagccaaatagaaaaagtatagttccaggaatctaacgtacaacatgacaactctaggtaataaaattatactttacatggaaaaaataaatacagaatgtgataatattttttatttttgtagagatgggggtctcattttgttccccaaactggtctcaaactcctggcctcaagtg

SEQ ID NO: 692342 - DNA, 618 bp, Homo sapiens
ccaggaacttacattttagtgggagagatacacataacaaataggtagatgatatgataagcagggtaagtagatggagagcagatttttaagacttctgtgagctaagacctgattgaagagaggttgtaattttgtggtgtcagcatgatcaggccaagtaatcacttcctattgcccatatattttttaatcatttgtttaaaaatataatgcaaagagatagttctcagactgttttctcatatagaagatacttatttcttagattcttagtactactcattttaataagctatatgagtccacaacattaaaaaatttactctagaaagtaaagctgggtaaagtgacctcagtgtagaaaacttttattatatggccacaaaaggcactgaaaacgaaatttctagagggccttaggggattaaaagggaaatgtttagaagacattaaacctctggaggtttaattttgcaacttccccaaatacttagacgacttcaaaaataattttgcttttgtctaaactcagaaattatattgttcttttttscccttgctggccctcagaagagtattaattctcattttgggaaggaattattttaatcatgc

SEQ ID NO: 692343 - DNA, 599 bp, Homo sapiens
tgagacagagtttcgcacttgttgcccaggctggagtacaatggcacgatcttggctcactgcaacctctgcctcctgggttcaagcaattctcctcagcctccaaagtggctggtattataggcacccaccaccatgcccagctaatttttgtatttttagtgcagatggggtttcaccatgttggctaggctggtcttgaactcctgacctcaggagatccacccacctcggcctcccaaagtgctggaatttcattttaagtcagttaaggttttctttgttcttgtactttaaaaatagtactgtgtataagtctttaatccatctggcatttagttttgtgtgaggatccacatcayattccttccctcctcctttttttttttttttttacttcaatggcaaacagtttccccacagccaattgttaaatcacacttttctttagtcttggaatgtacttaaaattaccagccaataaacaatttttaagtgctttttaaatgtacacaactatgctaaccacttaagacataaagattgatgatgcttttgtgcttaggaagaccatagctgacaaacggagacacaaacaa

SEQ ID NO: 692344 - DNA, 599 bp, Homo sapiens
tgagacagagtttcgcacttgttgcccaggctggagtacaatggcacgatcttggctcactgcaacctctgcctcctgggttcaagcaattctcctcagcctccaaagtggctggtattataggcacccaccaccatgcccagctaatttttgtatttttagtgcagatggggtttcaccatgttggctaggctggtcttgaactcctgacctcaggagatccacccacctcggcctcccaaagtgctggaatttcattttaagtcagttaaggttttctttgttcttgtactttaaaaatagtactgtgtataagtctttaatccatctggcatttagttttgtgtgaggatccacatcatatyccttccctcctcctttttttttttttttttacttcaatggcaaacagtttccccacagccaattgttaaatcacacttttctttagtcttggaatgtacttaaaattaccagccaataaacaatttttaagtgctttttaaatgtacacaactatgctaaccacttaagacataaagattgatgatgcttttgtgcttaggaagaccatagctgacaaacggagacacaaacaa

SEQ ID NO: 692345 - DNA, 632 bp, Homo sapiens
taaacgatttgtcagttcatagactttgttcaatttcctctgatagcatttttaaattagtaatttggaagagctcttcactgacaattgtaaatacttctagatcatatatattttaattgttttttaaaattagaatatcatttcttattttattatgattatagtcattttgggggcatatctttcctaccataagatgtatgaatatagatgcctccatattttcttcagaacattttttattattgaataacttttaattacatttaattataaattagttcagactgatcatttaattacataatgatttagttayagattagttcaaattggcttctttaacttagcaatatgcattagagtttctcccatacttttcatggcttaatagttcatttcattttagcactgagtaatattccattgtctggacatgccacagtttattcttttacctactgaaaagtgtcttgtttgttggaagtttcagaattactaataaagctgctacaaacatcagtgtgtcggtttttgtatagacataaggtttcaactcctttgggtaaacaccaagaggtgtgattgctggatcgtatggtaagagtatggtgagttttgtaagaaac

SEQ ID NO: 692346 - DNA, 632 bp, Homo sapiens
taaacgatttgtcagttcatagactttgttcaatttcctctgatagcatttttaaattagtaatttggaagagctcttcactgacaattgtaaatacttctagatcatatatattttaattgttttttaaaattagaatatcatttcttattttattatgattatagtcattttgggggcatatctttcctaccataagatgtatgaatatagatgcctccatattttcttcagaacattttttattattgaataacttttaattacatttaattataaattagttcagactgatcatttaattacataatgatttagttatagattagttcaaattggcttctttaacttagcaatatgcattagagtttctcccatacttttcatggcttaatagttcatttcattttagcactgagtaatattccattgtctgsacatgccacagtttattcttttacctactgaaaagtgtcttgtttgttggaagtttcagaattactaataaagctgctacaaacatcagtgtgtcggtttttgtatagacataaggtttcaactcctttgggtaaacaccaagaggtgtgattgctggatcgtatggtaagagtatggtgagttttgtaagaaac

SEQ ID NO: 692347 - DNA, 641 bp, Homo sapiens
aaactcctaacctcaggtgatctgcctgccttggccttccaaagtgctgggattacaggtgtgagccaccatgcttggcctatttttttcttcttataataaatttaaatatgttttgactgtaagcttattttgttacccatgcttaaatgagacggattttcctaaactaccaggagaacactgaggggaggttgkgataggacaggactcttttccagctttacaaatccagggcttcctcctctattattactatgaggtgctcgggtacgtgcactttttttttctctttttctttttttctttctttctttctttcttttttttttttgccacatctgtatctctcagggctaagcctattttggagttcacttccctgtaactttgcattgtccagatccccatggaccttgctttccaagctggtggcattggctgtaaattctctgttttgcaaagttattacttccagagatctacctcttctgaaaccagtgtctgaataatgtgtctcttctgtacccacagtatctctgacttcagctcctggcagtatatcttcagagagtgttgtgcattatttctggaatgcccaagagcttaagtcgtcgtactgtttgatcttttcacagccc

SEQ ID NO: 692348 - DNA, 641 bp, Homo sapiens
aaactcctaacctcaggtgatctgcctgccttggccttccaaagtgctgggattacaggtgtgagccaccatgcttggcctatttttttcttcttataataaatttaaatatgttttgactgtaagcttattttgttacccatgcttaaatgagacggattttcctaaactaccaggagaacactgaggggaggttgggataggacaggactcttttccagctttacaaatccagggcttcctcctctattattactatgaggtgctcgggtacgtgcactttttttttctctttttctttttttctttctttctttctttyttttttttttttgccacatctgtatctctcagggctaagcctattttggagttcacttccctgtaactttgcattgtccagatccccatggaccttgctttccaagctggtggcattggctgtaaattctctgttttgcaaagttattacttccagagatctacctcttctgaaaccagtgtctgaataatgtgtctcttctgtacccacagtatctctgacttcagctcctggcagtatatcttcagagagtgttgtgcattatttctggaatgcccaagagcttaagtcgtcgtactgtttgatcttttcacagccc

SEQ ID NO: 692349 - DNA, 1612 bp, Homo sapiens
ggcatcacctctgtaggggtgtcagacatgaggtagatttgaagaacaaaaacaaaaaagcatattcctagataatttgtcacatttcaaatgtttactgttcggttctgttctcaaaagatccaccarcgttaatagcagccaggcgcagtggctcatgcctgtaatcccagcactttgggatgccaaggcaggcggatcacttgaagccaggagtttgagaccaacctgctcaatatggaaaacccatgtctactgaaaatacaaaaattagccaggcatgatggcacaagtctgtagtctcagctacttggaaggcagaggcaggagaattgctgaacccgagaggtggaggttgcagagagccaaaatcatgccactgcaccccagcctgggcgacagagagagaccctgtctcaaaataataattaatcataataatattgatagcaaacagtagtattacggttaaagccagggccagcttcgtagccatccagttcgcactggttcctatgcttagaaagatcccacatctggtttagtgctgtgctgttgccatcttgggatttctagaaattttaaacaaggagcctcacgttttcattttccactcgacccttcaaattatgtcaaaagtcctggttagagtggcttatatacaaagtttgtagggagtagatttagtgaacttgatgaagttttatagttcattctcccgaaggagacttgttagtcactgaagagtcgcttcacagtatttatttttctttttaacttcccaactcttttggggacagctaagtaaacacagcctctagcagtatggtattacttgggacaatattagcttcataacaatgacacacaaaagcaacatccaatttcaaaacgtgattgttctctagatcaagaattttgttctgaaatataattttcagatataggtgtgcttgctgatagttctaaaatattgagcttgatataaaggcaaacctgtctaaacatatggaattcttttggtagtcttagccatgctaacaaatatgttttctgactacagcttttttttccccactgataaaggaatattttcaataaggaaatgatagcaagtcttgtagttactctttggtatttgcaaggtaataaccagctaacagcaatgtatcaatgattgcatttgtgtagacatcttgaccaaagtcacacagacagtagcagaaagtcacttgtcactgtgcagctggcactcttgcataataaggattaggatagccgatgttttgtcacagtgccaaagttaatcatggtctaaggacattgaaaaaaagctgagaagtgagtgaattaatcatcattaaaaacagatttaaaaagtaatcctgaaggggaacttttaagaaaaaaatactactttgaataatacaaagttctttcaatattaaaaaaatgaaagatgcttctagaagggactccttcctctaagacatcagtattataactgtaggcaggaaatcattttctagaaattaacctttcagggcaattccatcaaatcatgagtttttattgctccaaagaaataaacccttcatcagaataggattct

SEQ ID NO: 692350 - DNA, 1612 bp, Homo sapiens
ggcatcacctctgtaggggtgtcagacatgaggtagatttgaagaacaaaaacaaaaaagcatattcctagataatttgtcacatttcaaatgtttactgttcggttctgttctcaaaagatccaccagcrttaatagcagccaggcgcagtggctcatgcctgtaatcccagcactttgggatgccaaggcaggcggatcacttgaagccaggagtttgagaccaacctgctcaatatggaaaacccatgtctactgaaaatacaaaaattagccaggcatgatggcacaagtctgtagtctcagctacttggaaggcagaggcaggagaattgctgaacccgagaggtggaggttgcagagagccaaaatcatgccactgcaccccagcctgggcgacagagagagaccctgtctcaaaataataattaatcataataatattgatagcaaacagtagtattacggttaaagccagggccagcttcgtagccatccagttcgcactggttcctatgcttagaaagatcccacatctggtttagtgctgtgctgttgccatcttgggatttctagaaattttaaacaaggagcctcacgttttcattttccactcgacccttcaaattatgtcaaaagtcctggttagagtggcttatatacaaagtttgtagggagtagatttagtgaacttgatgaagttttatagttcattctcccgaaggagacttgttagtcactgaagagtcgcttcacagtatttatttttctttttaacttcccaactcttttggggacagctaagtaaacacagcctctagcagtatggtattacttgggacaatattagcttcataacaatgacacacaaaagcaacatccaatttcaaaacgtgattgttctctagatcaagaattttgttctgaaatataattttcagatataggtgtgcttgctgatagttctaaaatattgagcttgatataaaggcaaacctgtctaaacatatggaattcttttggtagtcttagccatgctaacaaatatgttttctgactacagcttttttttccccactgataaaggaatattttcaataaggaaatgatagcaagtcttgtagttactctttggtatttgcaaggtaataaccagctaacagcaatgtatcaatgattgcatttgtgtagacatcttgaccaaagtcacacagacagtagcagaaagtcacttgtcactgtgcagctggcactcttgcataataaggattaggatagccgatgttttgtcacagtgccaaagttaatcatggtctaaggacattgaaaaaaagctgagaagtgagtgaattaatcatcattaaaaacagatttaaaaagtaatcctgaaggggaacttttaagaaaaaaatactactttgaataatacaaagttctttcaatattaaaaaaatgaaagatgcttctagaagggactccttcctctaagacatcagtattataactgtaggcaggaaatcattttctagaaattaacctttcagggcaattccatcaaatcatgagtttttattgctccaaagaaataaacccttcatcagaataggattct

SEQ ID NO: 692351 - DNA, 1612 bp, Homo sapiens
ggcatcacctctgtaggggtgtcagacatgaggtagatttgaagaacaaaaacaaaaaagcatattcctagataatttgtcacatttcaaatgtttactgttcggttctgttctcaaaagatccaccagcgttaatagcagccaggcgcagtggctcatgcctgtaatcccagcactttgggatgccaaggcaggcggatcacttgaagccaggagtttgagaccaacctgctcaatatggaaaacccatgtctactgaaaatacaaaaattagccaggcatgatggcacaagtctgtagtctcagctacttggaaggcagaggcaggagaattgctgaacccgagaggtggaggttgcagagagccaaaatcatgccactgcaccccagcctgggcgacagagagagaccctgtctcaaaataataattaatcataataatattgatagcaaacagtagtattacggttaaagccagggccagcttcgtagccatccagtycgcactggttcctatgcttagaaagatcccacatctggtttagtgctgtgctgttgccatcttgggatttctagaaattttaaacaaggagcctcacgttttcattttccactcgacccttcaaattatgtcaaaagtcctggttagagtggcttatatacaaagtttgtagggagtagatttagtgaacttgatgaagttttatagttcattctcccgaaggagacttgttagtcactgaagagtcgcttcacagtatttatttttctttttaacttcccaactcttttggggacagctaagtaaacacagcctctagcagtatggtattacttgggacaatattagcttcataacaatgacacacaaaagcaacatccaatttcaaaacgtgattgttctctagatcaagaattttgttctgaaatataattttcagatataggtgtgcttgctgatagttctaaaatattgagcttgatataaaggcaaacctgtctaaacatatggaattcttttggtagtcttagccatgctaacaaatatgttttctgactacagcttttttttccccactgataaaggaatattttcaataaggaaatgatagcaagtcttgtagttactctttggtatttgcaaggtaataaccagctaacagcaatgtatcaatgattgcatttgtgtagacatcttgaccaaagtcacacagacagtagcagaaagtcacttgtcactgtgcagctggcactcttgcataataaggattaggatagccgatgttttgtcacagtgccaaagttaatcatggtctaaggacattgaaaaaaagctgagaagtgagtgaattaatcatcattaaaaacagatttaaaaagtaatcctgaaggggaacttttaagaaaaaaatactactttgaataatacaaagttctttcaatattaaaaaaatgaaagatgcttctagaagggactccttcctctaagacatcagtattataactgtaggcaggaaatcattttctagaaattaacctttcagggcaattccatcaaatcatgagtttttattgctccaaagaaataaacccttcatcagaataggattct

SEQ ID NO: 692352 - DNA, 1294 bp, Homo sapiens
tagtgagggtgttttatgttatctaagttttcctaggtatgattatgattacaattatattctcaagtctggcaaaagataaacaatgcctcctatttttaagtgttagagtccatgaaatactaatttgccctatgagcagacatgtgtttgttgctgttattattttgattattattattattattattatttttgtctaacaggtatctttccctttgggaatttttgtttttgttttcggtatggatcagatgggctcaaccctgccacctcacccctcatccacaggtatgagttcagtatccagattcattcaacaaraatagcatgtctccttgcttattggttcagtgatggattcataatccaaacaaggccaatcagaaccttccctgttaatgtgtgtgatacagggacattgggagaaagtatgactctgttcttctcaaatcaatagctaccataaactagaactgctgacagccatcttctacggctacatggaagtgactatctaaaggaagataaaattaagccaaaacacaggaaaaagagaggtgagagccagagagataaaaataaaccctggaccaaactgttgacactctatttatactgggcactacaattcctttttttttttcttgtacttaagatataaattattattctgtcattttcaatacaaagggtctttactaatacacctcaaagcagcaagaaactgctgcagaagaagataaaagtaaggcagtagaagataaaagtaaaacaaaaaccttgatgatcagtacaattattcctaattaaatattcatattccagaacaacttttaattttattaacatacatcctcatataactatgaaagaattcacccacaaatatccaaactctcaaatatccattcttttcatcaacagttccaagttataaaaaatgtatttataggtagtgactctgatattagaagaaaaagaaaacttggctatgctctttatcctctaaatttggtatttcctatcccaaatttacaaacagaataaatggatctctcctctttctttccattgattcccaaatagcccactccttcagatgtgtatcctattcaatatcctaaaattctcagcagtctttggattcaaagttcaaaacaaagtgaaactgaaaattctcaagaggggacaataatgtgatggaaaggaagaaatgttactgttattcctgccatggataaaagtagagcctactctcttacattcatgtaaaatggtttttgtttctgtc

SEQ ID NO: 692353 - DNA, 610 bp, Homo sapiens
tcctagccccagaaataatcacatttgctgctaatttattactgattatgcatattttcagatttatttatcacatactcatacatatgttaatcttttactttgtggcttactgagaaaagtctacatcaaagctacaaaagtactctcatattttcagagtttataatatttagacatttaattcttctggaatttattttttatttatttatttgtttatttttgagatggagtttcactcttgttgcccaggatggagtgcaatcttggctcaccacaagttccacctttcaagttcaagcgattctcttgcctcagcctcccaagtagctgggattacaggcrtgcgccaccatacctgtctaatttttttgtatttttagtagaaacagggtttctccgtgttgttcaggctggtcttgaactcccgacctcaggtgatccaccctcctcagcttcccaaagtgctgggattataggcatgagccacagcaccggacggaatttattttcatatagtataaggtagggcttaatctgattaccttcttaataaatgcccaattgttcaaagccacttactaaatccatactttatttgactgga

SEQ ID NO: 692354 - DNA, 673 bp, Homo sapiens
agggatcaatcagtacactatattttaggtgcatttttgcctataaaaccatttcttggggtggattacctgagattaggagtttgagaccagcctggccaacatagtgaaattctgtctctactaaaaatacaaaaattagctgagtgtggtggtgcacacctgtaatccaagctactcgggaggctgaggcaggagaatcacttgaacccaggaggcagaggttgcagtgagcagagaccatgccactgcactccagcctgagtgacagagtgagattccatctcaaaaaaaaaaaamaaaaaacaaaactttattcaaaaaggaagaattttaaacagtacatgtctattatgtgcagatgattttgcctttttccacttgttatttctgaaataatctctcaaaaagtcactttgaagataactgtcttgaaagccatcctattcagtgttaacttttctggttctgcaaaacctgaaggaatgaggttaatactcatctccttttccaaaaggtataaacatcagtagattttgtcattatataaaacaaatgttccaactatgatagaataatgcagatttggttctgaagcaaataattaggtctcagaatatcatgtatgccccaaagaaagagattggtatacattattaggcagaatcgtcaa

SEQ ID NO: 692355 - DNA, 673 bp, Homo sapiens
agggatcaatcagtacactatattttaggtgcatttttgcctataaaaccatttcttggggtggattacctgagattaggagtttgagaccagcctggccaacatagtgaaattctgtctctactaaaaatacaaaaattagctgagtgtggtggtgcacacctgtaatccaagctactcgggaggctgaggcaggagaatcacttgaacccaggaggcagaggttgcagtgagcagagaccatgccactgcactccagcctgagtgacagagtgagattccatctcaaaaaaaaaaaacaaaaaacaaaactttattcaaaaaggaagaattttaaacagtacatgtctattatgtgcagatgattttgcctttttccacttgttatttctgaaataatctctcaaaaagtcactttgaagataactgtcttgwaagccatcctattcagtgttaacttttctggttctgcaaaacctgaaggaatgaggttaatactcatctccttttccaaaaggtataaacatcagtagattttgtcattatataaaacaaatgttccaactatgatagaataatgcagatttggttctgaagcaaataattaggtctcagaatatcatgtatgccccaaagaaagagattggtatacattattaggcagaatcgtcaa

SEQ ID NO: 692356 - DNA, 665 bp, Homo sapiens
tcttatgatatattatgatatacacttacgatatctcctactatttggatgtcatatcttctacatttatcttttgtttgtctcatttgttttctttttttgttttgttttgtaagctatttttttttaacttttattttaggttcaggggtacatgtgcaggtttattatatagacaaactcctgccatggggcttgttgtgcagattatttcaacacccaggtactaagcctaatacccaataattattttttctgcccctctccctcctcccagcctttgccctcaggtaggccccagtgtgtgctgttcccctccatgtgtccatgtgttctcattatttagctcccatttatatgtggtatttgattttctgttcctgcattagtttgctaaggataatggactccwgctccatccatgtccttgcaaaggacatgatctcattcttttttatggctgcatagtattccatggtgtatatgtaccacattttctttatctagtctactgttgatagacatttagagagttgattccatttctttgccattttgaataatgctgcaatgaacatatgtgtgcatgcatccttgtgataaaatgattcatattcctctgggtatatagccaggaatgggattgctgggttgaacggtagttc

SEQ ID NO: 692357 - DNA, 665 bp, Homo sapiens
tcttatgatatattatgatatacacttacgatatctcctactatttggatgtcatatcttctacatttatcttttgtttgtctcatttgttttctttttttgttttgttttgtaagctatttttttttaacttttattttaggttcaggggtacatgtgcaggtttattatatagacaaactcctgccatggggcttgttgtgcagattatttcaacacccaggtactaagcctaatacccaataattattttttctgcccctctccctcctcccagcctttgccctcaggtaggccccagtgtgtgctgttcccctccatgtgtccatgtgttctcattatttagctcccatttatatgtggtatttgattttctgttcctgcattagtttgctaaggataatggactcctgctccatccatgtccttgcaaaggacatgatctcattcttttttayggctgcatagtattccatggtgtatatgtaccacattttctttatctagtctactgttgatagacatttagagagttgattccatttctttgccattttgaataatgctgcaatgaacatatgtgtgcatgcatccttgtgataaaatgattcatattcctctgggtatatagccaggaatgggattgctgggttgaacggtagttc

SEQ ID NO: 692358 - DNA, 606 bp, Homo sapiens
agtgtgttacccgtattgggtactgacttatcctcaagcacatgaaccactgaccattgctagcacccagcaaggtcaatccttaccactgagagtgcttcagaattaatccagtgccatcctaaagactctcctctgccattctgctgtgactggggaaagtggtcaggcagggcaggattgaggtcgtgctgtcatttgtcccctttaggactcattatctcacaagcatgcacctgcacacacacccctgtccctgagcactagcagcctgttgggaacttagtacttagcatgttttggaaacaagaatcaggcttctctacttcccctgaggacggctgtgtgaacatgtaatgtggaacagttcttatgttyctcacattcctcccttcctctgtctgtttctatcctcttctcactttctgttaccttgctggcattccttcctttcattctcctttcttcattcatccatctccccttcaaactgtggttcttagtcttttgagaggtcacagatgcctttgagactccagcaaaagctgtggatctcctcccccttaaaatagacagatcacacacccattcctgaatgtgtatgca

SEQ ID NO: 692359 - DNA, 642 bp, Homo sapiens
tactcctagtgctcaacagagtgccctttctctaacagtgtttgtggaatacagaaagaaagaataaatcttgtgccttctagttctacctttcacagtgaagtcacagttgcatttttgaaatgcaaatctaatcctttggatttttctttaaactttccaatggtttcctactttctaaggttgaagctttaaacttttagaaaaatatgtaaaatctttcattactgcctatctttttctcccatctctgcactcaacttctgctccatgattacagaaacactggtgattcccgccagactttgaacatgctatcycatatatcttgaaagttctgctttccacccaacccttcagcttctgacatgtgactagcagatatctactccctctttaataggtcatttaatagttctgtgctaatcctcaaggacctcttccgtaatactttgtcttccggaatactcccaaatagaattacattatcctttgcctatgttctcactgcattttgttcatactcttattataacgattattatattacattcattgtttattttggcttctggcttcctactggattatagtcaccttaagatcaggaatgaatttcatctacgtattttcagtttttaa

SEQ ID NO: 692360 - DNA, 547 bp, Homo sapiens
aaaaactttttattttcccrttctttgctttttcattaatgctattttctttgccccaaagttatagagtggaaaaactcccaatctctttttcttctctcttgtattttcaggtagatgcattctattactatattctatctatccgttcattccatctataatctatcatctattccatatatctatccaccatctatctatctattccatctatcatctatctacctacctattattgtctatctgtctatctttctatcatctattcattatctatctattctatctacctatcattaatctgtcatctattccatctaacatctatctacctattgtctatctttctatcatctatcgtctatctacatttacctatattgttctctctgtcaatcatctatctatccatctatgtatatatgtatttatgaatgtatgtgtgtaattttctatcttctagttatccatctgtctatctatccatccgtccatctatttctcttatgtatacagataaatatataatctatatatcttacat

SEQ ID NO: 692361 - DNA, 1115 bp, Homo sapiens
tataattcactagatgagcattagaagttaaattttggtgagtatatagaagagaaaggattgtgttcaatcaatattttaccttaagctgaaatgtaaaaatactaacatactaaattatactgtgctaatgaaaggtaaaaggaaaaaaataaagtcaatctttaccccattccactttattttccaccatactttcagttttgctaatatttacagattgaagaaaatgtccagaaaaaccatgaaattcagcacatattaaagaatggcattgtatttagtgtatcccggtcatgactcactttgaagacacagagataaattacaaattacccacaggtgtaaagtgtttgaatagcagtattgcatttgaatatgactatatgtacatataatttttcataaaataaactttatttgctccctttgtctagccctcctccttctctctgggaagaacaacatctctccctctcttctcactataaaacaatttgaacctccttccaaacatgagatttttacttagagtttccagtcaaaaatgattttccttctttaaaaaataatggaataagtaaccttagccactcataataccaattgcctttgcatttagtgcttactccagggtaaacatatgcccatgatgggtctgggtcaggtagaagcccatttttgtatcaagtggtttaactggagacatgatcccacagctgttgatggccatccaycacaatgtgtacacagagatagctagagaacagaataaaaccagcacacctaacaagcaaagatccaattctgagacaagtcatactggttataccatatgcctggatacctttgctccaagcaaaattgattttatgagccccaaaccctgtctttcacatacatgaatttgagttggattgttgttgcttgtaacataaatagttctaattaatttagaaagtgggatctggaaataggaaaactgctaggccacaggatgagatttgttcatcccagatatgaagatagcaatccatattacaggttacacatattaatattgaacagtttcctaaattattattggtatgtctaaaaataattcactcctagga

SEQ ID NO: 692362 - DNA, 1115 bp, Homo sapiens
tataattcactagatgagcattagaagttaaattttggtgagtatatagaagagaaaggattgtgttcaatcaatattttaccttaagctgaaatgtaaaaatactaacatactaaattatactgtgctaatgaaaggtaaaaggaaaaaaataaagtcaatctttaccccattccactttattttccaccatactttcagttttgctaatatttacagattgaagaaaatgtccagaaaaaccatgaaattcagcacatattaaagaatggcattgtatttagtgtatcccggtcatgactcactttgaagacacagagataaattacaaattacccacaggtgtaaagtgtttgaatagcagtattgcatttgaatatgactatatgtacatataatttttcataaaataaactttatttgctccctttgtctagccctcctccttctctctgggaagaacaacatctctccctctcttctcactataaaacaatttgaacctccttccaaacatgagatttttacttagagtttccagtcaaaaatgattttccttctttaaaaaataatggaataagtaaccttagccactcataataccaattgcctttgcatttagtgcttactccagggtaaacatatgcccatgatgggtctgggtcaggtagaagcccatttttgtatcaagtggtttaactggagacatgatcccacagctgttgatggccatccatcacaatgtgtacacagagatakctagagaacagaataaaaccagcacacctaacaagcaaagatccaattctgagacaagtcatactggttataccatatgcctggatacctttgctccaagcaaaattgattttatgagccccaaaccctgtctttcacatacatgaatttgagttggattgttgttgcttgtaacataaatagttctaattaatttagaaagtgggatctggaaataggaaaactgctaggccacaggatgagatttgttcatcccagatatgaagatagcaatccatattacaggttacacatattaatattgaacagtttcctaaattattattggtatgtctaaaaataattcactcctagga

SEQ ID NO: 692363 - DNA, 1596 bp, Homo sapiens
cgcaccaggggctgcaggtggagctgcctgccagtcctgcgccaccagcgggcactcctcagcccttgggtggtccatgggactgggcgccttggagcagggggccgccctcgtctgggaggctggggccgcacaggagcccacggagtagggggaggctcgggcatggtgggctgcagatccggagccctgccccgaggcaaggcagctaaggccaggcaagaaattgagcacagcaactgctggcccaggtgctaagcccctcactaccccggccgatcggtcgctccgagtgcagggtcctccgagcccactcccacccagaactcgcgctggccctcaagcaccgcgcgcagcccgggttcccgcccgcgcctctccctccacacctccsagcaagctgagggagccggctccggccttggccagcccggaaagggactcccacagtgcagcggcgggctgaagggctcctcaagtgccgccaaagtgggagcccaggcagaggaggcgccgagagcaagcgagggctgtgaggactgccagcacgctgtcacctctcaatggcagcaagagaaattgggaaggtgaggttctgacttctactttctgagacaagagcccaaagaagagggattccacaaatctaagagagctattgaaaggttccacatggctaaaaagcatgacaacttcaccttgctcttttttgtttttgtttttattgttgttgttcttttgatccccatcaagctaatcaaatggtgtttactcaggagtttctagaagcagaaaacctgaagaagttctaatggcagaaattgcaggatcaataaaaaaacacaaactgttggacttctccactgcctctattcctccctctctctgggtaggtgaatttgtgtgttttatactggacaagcatagtattgtactatgctaataacatatgcattgattgattaaacattaattgaattccagaacatatgcaaggaacaagaagtattaatgcaaatgtaagtaagatctgtaccttttattctgagaattcacatcctaattagcaattaggaagtatcatgtaaacccctaattataggcagcatgagaagagctttaacagggaaggcactgtgcacataggtaatgtttaaagacacaaattcttacccctgtcatagaaaacccaaggttaaaggtattgtcagtcatacctatatcataaacatattggtgagtgtattttgtcaaacaggtgactggagatatgtcaatagactgttctgttttactgataagctcagacttcactgtatgctttcaatttttattcagattaaagttttttgatctttcattgccttcaaataatcatttcaagcgttgttgttattcacacactgtaaaatgaaattttagattatagaatgtccttgaaaatagaaacttgttactacaatactaatgttttaatttctagtcttaaaatattatcgcttttaatttacatttcttatgtatactcattttatttacaacttttaattcagtaatcacatttttcccttaagcttgattagaacattattgtaa

SEQ ID NO: 692364 - DNA, 1596 bp, Homo sapiens
cgcaccaggggctgcaggtggagctgcctgccagtcctgcgccaccagcgggcactcctcagcccttgggtggtccatgggactgggcgccttggagcagggggccgccctcgtctgggaggctggggccgcacaggagcccacggagtagggggaggctcgggcatggtgggctgcagatccggagccctgccccgaggcaaggcagctaaggccaggcaagaaattgagcacagcaactgctggcccaggtgctaagcccctcactaccccggccgatcggtcgctccgagtgcagggtcctccgagcccactcccacccagaactcgcgctggccctcaagcaccgcgcgcagcccgggttcccgcccgcgcctctccctccacacctccgagcaagctgagggagccggctccggccttggccagcccggaaagggactcccacagtgcagcggcgggctgaagggctcctcaagtgccgccaaagtgggagcccaggcagaggaggcgccgagagcaagcgagggctgtgaggactgccagcacgctgtcacctctcaatggcagcaagagaaattgggaaggtgaggttctgacttctactttctgagacaagagcccaaagaagagggattccacaaatctaagagagctattgaaaggttccacatggctaaaaagcatgacaacttcaccttgctcttttttgtttttgtttttattgttgttgttcttttgatccccatcaagctaatcaaatggtgtttactcaggagtttctagaagcagaaaacctgaagaagttctaatggcagaaattgcaggatcaataaaaaaacacaaactgttggacttctccactgyctctattcctccctctctctgggtaggtgaatttgtgtgttttatactggacaagcatagtattgtactatgctaataacatatgcattgattgattaaacattaattgaattccagaacatatgcaaggaacaagaagtattaatgcaaatgtaagtaagatctgtaccttttattctgagaattcacatcctaattagcaattaggaagtatcatgtaaacccctaattataggcagcatgagaagagctttaacagggaaggcactgtgcacataggtaatgtttaaagacacaaattcttacccctgtcatagaaaacccaaggttaaaggtattgtcagtcatacctatatcataaacatattggtgagtgtattttgtcaaacaggtgactggagatatgtcaatagactgttctgttttactgataagctcagacttcactgtatgctttcaatttttattcagattaaagttttttgatctttcattgccttcaaataatcatttcaagcgttgttgttattcacacactgtaaaatgaaattttagattatagaatgtccttgaaaatagaaacttgttactacaatactaatgttttaatttctagtcttaaaatattatcgcttttaatttacatttcttatgtatactcattttatttacaacttttaattcagtaatcacatttttcccttaagcttgattagaacattattgtaa

SEQ ID NO: 692365 - DNA, 1749 bp, Homo sapiens
tctgtgggcctccatctgcatgagcacatatacgctaactgaacagggttgtgacgaggattgaatgagataatacacccaacacttagcccactgcagtgctcagcatcacagtgttgcctttattcttccagtgatcagatcaaagcaaccaggctgtgctataacattaaaatcccattccatcggcaccctgtgtagttagtaaactcttgacatatcacagtgattggattgacactaagtaatttacatctgagaagagggtaggaaaaaaacactaaagattgactggattaaaattaaaatcttcctaagacaagtcagtgctcaaaccagtttaaactgaatgccacagtcagtcattaggtactagagttaatataagcgcaatttttccttgctaaagttagcacgaacttacttggagagcacgtacttcaggtagtcactgcaccaccctatcagaaaaagctcagcaaccacgcgtgagtcatttttgctccacttcatttattaacgctaagcttaagggtgtcacatccacaagactcaacacagcttctcttaaagaagaaagtgtcataacatattgccatgtgaaagaaagaaaaaaggtcagactgcaaaatatatgatcctattaaatcaaaacaaaaagagtgggtgagtatgcatgtatgtgatgcatatcttcatatatgcagaaattttaaaaacccaaaaaactaggatatataccaaatcattaactgtaattcccttccactagtgtgatcaaaaaattttttttctttgggtttcctgtgtttttaaaacattaaccatgtatttcctttgaacaaggaaaaaagtcaatgaaatttaaaaacaaatatattattttgggtcctaaaagaattctccccaacccccagctttttttttttttttttttttttttgcaatagggacatcacgctgccatttttagagcattctcatttaaatagatgggagaataatacctttaatttaactaagaagccaaacaagctttgaatttgaaaagctaaagattaaaaccaataattaaggttcaaaattgctccagggaaacgaagttctccttttcatacatctcctgtaacacaaggaattctccaggcaggtctaggcatgaaccttctgcagagaggtgtcatgggaaaagcaggaagaggacacacaaaggctccaaagcctacctctgttacttattttattattattattattatttttgagacagagtctcactctgtcacccaggctggagtgcagtggcgcaatctcagctcactgcagcctcagcccccaggcccaagcaattctcctgcttcagcctcccaagtagctgagattacaggtgcacgccaccaagcccagctaatttttgtatttttagtagagacagggtttcacyatgttggccaggctggtcttgaactcctgacctcaagtgatctgcctccctcagcctccaaaagtgctggaattacaggcgtgagccaccatgcccagcctctattacttattaagtagcaagacaccttggacaatgaccacctctctcagagcctgaatctcctcatgtgtaaaactggaagcatcaaactcctggatggttatgaagctgaattagataacttttataaagcagtggtctctaaacttttctggctttccaccttatctctaaaaacatatacaatcagccctctatatcca

SEQ ID NO: 692366 - DNA, 1749 bp, Homo sapiens
tctgtgggcctccatctgcatgagcacatatacgctaactgaacagggttgtgacgaggattgaatgagataatacacccaacacttagcccactgcagtgctcagcatcacagtgttgcctttattcttccagtgatcagatcaaagcaaccaggctgtgctataacattaaaatcccattccatcggcaccctgtgtagttagtaaactcttgacatatcacagtgattggattgacactaagtaatttacatctgagaagagggtaggaaaaaaacactaaagattgactggattaaaattaaaatcttcctaagacaagtcagtgctcaaaccagtttaaactgaatgccacagtcagtcattaggtactagagttaatataagcgcaatttttccttgctaaagttagcacgaacttacttggagagcacgtacttcaggtagtcactgcaccaccctatcagaaaaagctcagcaaccacgcgtgagtcatttttgctccacttcatttattaacgctaagcttaagggtgtcacatccacaagactcaacacagcttctcttaaagaagaaagtgtcataacatattgccatgtgaaagaaagaaaaaaggtcagactgcaaaatatatgatcctattaaatcaaaacaaaaagagtgggtgagtatgcatgtatgtgatgcatatcttcatatatgcagaaattttaaaaacccaaaaaactaggatatataccaaatcattaactgtaattcccttccactagtgtgatcaaaaaattttttttctttgggtttcctgtgtttttaaaacattaaccatgtatttcctttgaacaaggaaaaaagtcaatgaaatttaaaaacaaatatattattttgggtcctaaaagaattctccccaacccccagctttttttttttttttttttttttttgcaatagggacatcacgctgccatttttagagcattctcatttaaatagatgggagaataatacctttaatttaactaagaagccaaacaagctttgaatttgaaaagctaaagattaaaaccaataattaaggttcaaaattgctccagggaaacgaagttctccttttcatacatctcctgtaacacaaggaattctccaggcaggtctaggcatgaaccttctgcagagaggtgtcatgggaaaagcaggaagaggacacacaaaggctccaaagcctacctctgttacttattttattattattattattatttttgagacagagtctcactctgtcacccaggctggagtgcagtggcgcaatctcagctcactgcagcctcagcccccaggcccaagcaattctcctgcttcagcctcccaagtagctgagattacaggtgcacgccaccaagcccagctaatttttgtatttttagtagagacagggtttcaccatgttggccaggctggtcttgaactcctgacctcaagtgatctgcctccctcagcctccaaargtgctggaattacaggcgtgagccaccatgcccagcctctattacttattaagtagcaagacaccttggacaatgaccacctctctcagagcctgaatctcctcatgtgtaaaactggaagcatcaaactcctggatggttatgaagctgaattagataacttttataaagcagtggtctctaaacttttctggctttccaccttatctctaaaaacatatacaatcagccctctatatcca

SEQ ID NO: 692367 - DNA, 1377 bp, Homo sapiens
caagaatgctttaagaacttttttcttccctgagatggggtctcactctcacccaggctggagtgccacctggtacgatcttggctgactgcaacctccgcctcccaggctcaagtgatcctcccaccacagcctcctgagtagctgggaccacaggggtccgccaccatgcccggctaacatatatatatattttatttttggtagagatggggttttgccatattgcccagggtgatttcaaactcctgagctcaagtgatccacctgccttggcctcccaaagtgctgggattactttgggaggtgtgagccactgcacctggcctggaatggtttaagaacttttaaaagcagacatgaatggtaaataaatattccaacaaatgactctaatatgatgtgcttgcattcagatgagggtaagaagactattttagcattaagtgtaggagaaatttgcttttgtaacaatgattcagcaggcagaacgtgacctgaaaacctggggacacgggcaactcccaaaacttggagcaaagaccaaccggttacgtgacaggtgagtcaggaggcccctgccttgcaagactgaaagatgaaattcacagttactagaaaggttgtcttccccttggggactaacatagcaacaatgagcacacggggacatacactgccccatgagcaccatcttccactgtaacccagctaaatgctacttaatctagaggaatgcrgttacagggccctttcttttgtagtcttgacaaatggttaagacttagctgtaggcatttcactgaaaatactttctataaccatgtgccctggctggtgctcaagaacaaaaccagaaattgaggagtgggataatctttgatgcctttaaataggagtaagcaggcagtcctgagaggttctctgggaaagggggctggaggcacgcatacgaagggtctattccacatcatgttgagaggttgtccagtggtaaccagtggcacccgattattaacgagcccctataaaactggcacttcaggctgggcacagtgtctcacgcctgtaatcccagcactttgggaggctgaggcaggcggatcacttgaggccaggagttcaagaccagcctggccatcatggtgaaacctcgtctctactaaaaatacacaaattagctaggcatggtggtgcgcacctgtagtcccagctgctaggtacgctgaggcacgagaatggcttgagcctggggggcagaggttgcagtgagccgcgatcgccctactgcactctagcctctgtctcaaaagaagaagaagaaaaaaaaaaaaaaccctggcacttcatgcagcaacacgagtgacaatgtagtaa

SEQ ID NO: 692368 - DNA, 1377 bp, Homo sapiens
caagaatgctttaagaacttttttcttccctgagatggggtctcactctcacccaggctggagtgccacctggtacgatcttggctgactgcaacctccgcctcccaggctcaagtgatcctcccaccacagcctcctgagtagctgggaccacaggggtccgccaccatgcccggctaacatatatatatattttatttttggtagagatggggttttgccatattgcccagggtgatttcaaactcctgagctcaagtgatccacctgccttggcctcccaaagtgctgggattactttgggaggtgtgagccactgcacctggcctggaatggtttaagaacttttaaaagcagacatgaatggtaaataaatattccaacaaatgactctaatatgatgtgcttgcattcagatgagggtaagaagactattttagcattaagtgtaggagaaatttgcttttgtaacaatgattcagcaggcagaacgtgacctgaaaacctggggacacgggcaactcccaaaacttggagcaaagaccaaccggttacgtgacaggtgagtcaggaggcccctgccttgcaagactgaaagatgaaattcacagttactagaaaggttgtcttccccttggggactaacatagcaacaatgagcacacggggacatacactgccccatgagcaccatcttccactgtaacccagctaaatgctacttaatctagaggaatgcggttacagggccctttcttttgtagtcttgacaaatggttaagacttagctgtaggcatttcactgaaaatactttctataaccatgtgccctggctggtgctcaagaacaaaaccagaaattgaggagygggataatctttgatgcctttaaataggagtaagcaggcagtcctgagaggttctctgggaaagggggctggaggcacgcatacgaagggtctattccacatcatgttgagaggttgtccagtggtaaccagtggcacccgattattaacgagcccctataaaactggcacttcaggctgggcacagtgtctcacgcctgtaatcccagcactttgggaggctgaggcaggcggatcacttgaggccaggagttcaagaccagcctggccatcatggtgaaacctcgtctctactaaaaatacacaaattagctaggcatggtggtgcgcacctgtagtcccagctgctaggtacgctgaggcacgagaatggcttgagcctggggggcagaggttgcagtgagccgcgatcgccctactgcactctagcctctgtctcaaaagaagaagaagaaaaaaaaaaaaaaccctggcacttcatgcagcaacacgagtgacaatgtagtaa

SEQ ID NO: 692369 - DNA, 1377 bp, Homo sapiens
caagaatgctttaagaacttttttcttccctgagatggggtctcactctcacccaggctggagtgccacctggtacgatcttggctgactgcaacctccgcctcccaggctcaagtgatcctcccaccacagcctcctgagtagctgggaccacaggggtccgccaccatgcccggctaacatatatatatattttatttttggtagagatggggttttgccatattgcccagggtgatttcaaactcctgagctcaagtgatccacctgccttggcctcccaaagtgctgggattactttgggaggtgtgagccactgcacctggcctggaatggtttaagaacttttaaaagcagacatgaatggtaaataaatattccaacaaatgactctaatatgatgtgcttgcattcagatgagggtaagaagactattttagcattaagtgtaggagaaatttgcttttgtaacaatgattcagcaggcagaacgtgacctgaaaacctggggacacgggcaactcccaaaacttggagcaaagaccaaccggttacgtgacaggtgagtcaggaggcccctgccttgcaagactgaaagatgaaattcacagttactagaaaggttgtcttccccttggggactaacatagcaacaatgagcacacggggacatacactgccccatgagcaccatcttccactgtaacccagctaaatgctacttaatctagaggaatgcggttacagggccctttcttttgtagtcttgacaaatggttaagacttagctgtaggcatttcactgaaaatactttctataaccatgtgccctggctggtgctcaagaacaaaaccagaaattgaggagtrggataatctttgatgcctttaaataggagtaagcaggcagtcctgagaggttctctgggaaagggggctggaggcacgcatacgaagggtctattccacatcatgttgagaggttgtccagtggtaaccagtggcacccgattattaacgagcccctataaaactggcacttcaggctgggcacagtgtctcacgcctgtaatcccagcactttgggaggctgaggcaggcggatcacttgaggccaggagttcaagaccagcctggccatcatggtgaaacctcgtctctactaaaaatacacaaattagctaggcatggtggtgcgcacctgtagtcccagctgctaggtacgctgaggcacgagaatggcttgagcctggggggcagaggttgcagtgagccgcgatcgccctactgcactctagcctctgtctcaaaagaagaagaagaaaaaaaaaaaaaaccctggcacttcatgcagcaacacgagtgacaatgtagtaa

SEQ ID NO: 692370 - DNA, 1377 bp, Homo sapiens
caagaatgctttaagaacttttttcttccctgagatggggtctcactctcacccaggctggagtgccacctggtacgatcttggctgactgcaacctccgcctcccaggctcaagtgatcctcccaccacagcctcctgagtagctgggaccacaggggtccgccaccatgcccggctaacatatatatatattttatttttggtagagatggggttttgccatattgcccagggtgatttcaaactcctgagctcaagtgatccacctgccttggcctcccaaagtgctgggattactttgggaggtgtgagccactgcacctggcctggaatggtttaagaacttttaaaagcagacatgaatggtaaataaatattccaacaaatgactctaatatgatgtgcttgcattcagatgagggtaagaagactattttagcattaagtgtaggagaaatttgcttttgtaacaatgattcagcaggcagaacgtgacctgaaaacctggggacacgggcaactcccaaaacttggagcaaagaccaaccggttacgtgacaggtgagtcaggaggcccctgccttgcaagactgaaagatgaaattcacagttactagaaaggttgtcttccccttggggactaacatagcaacaatgagcacacggggacatacactgccccatgagcaccatcttccactgtaacccagctaaatgctacttaatctagaggaatgcggttacagggccctttcttttgtagtcttgacaaatggttaagacttagctgtaggcatttcactgaaaatactttctataaccatgtgccctggctggtgctcaagaacaaaaccagaaattgaggagtgggataatctttgatgcctttaaataggagtaagcaggcagtcctgagaggttctctgggaaagggggctggaggcacgcatacgaagggtctattccacatcatgttgagaggttgtccagtggtaaccagtggcacccgatyattaacgagcccctataaaactggcacttcaggctgggcacagtgtctcacgcctgtaatcccagcactttgggaggctgaggcaggcggatcacttgaggccaggagttcaagaccagcctggccatcatggtgaaacctcgtctctactaaaaatacacaaattagctaggcatggtggtgcgcacctgtagtcccagctgctaggtacgctgaggcacgagaatggcttgagcctggggggcagaggttgcagtgagccgcgatcgccctactgcactctagcctctgtctcaaaagaagaagaagaaaaaaaaaaaaaaccctggcacttcatgcagcaacacgagtgacaatgtagtaa

SEQ ID NO: 692371 - DNA, 1377 bp, Homo sapiens
caagaatgctttaagaacttttttcttccctgagatggggtctcactctcacccaggctggagtgccacctggtacgatcttggctgactgcaacctccgcctcccaggctcaagtgatcctcccaccacagcctcctgagtagctgggaccacaggggtccgccaccatgcccggctaacatatatatatattttatttttggtagagatggggttttgccatattgcccagggtgatttcaaactcctgagctcaagtgatccacctgccttggcctcccaaagtgctgggattactttgggaggtgtgagccactgcacctggcctggaatggtttaagaacttttaaaagcagacatgaatggtaaataaatattccaacaaatgactctaatatgatgtgcttgcattcagatgagggtaagaagactattttagcattaagtgtaggagaaatttgcttttgtaacaatgattcagcaggcagaacgtgacctgaaaacctggggacacgggcaactcccaaaacttggagcaaagaccaaccggttacgtgacaggtgagtcaggaggcccctgccttgcaagactgaaagatgaaattcacagttactagaaaggttgtcttccccttggggactaacatagcaacaatgagcacacggggacatacactgccccatgagcaccatcttccactgtaacccagctaaatgctacttaatctagaggaatgcggttacagggccctttcttttgtagtcttgacaaatggttaagacttagctgtaggcatttcactgaaaatactttctataaccatgtgccctggctggtgctcaagaacaaaaccagaaattgaggagtgggataatctttgatgcctttaaataggagtaagcaggcagtcctgagaggttctctgggaaagggggctggaggcacgcatacgaagggtctattccacatcatgttgagaggttgtccagtggtaaccagtggcacccgattattaacgagcccctataaaactggcacttcaggctgggcacagtgtctcacgcctgtaatcccagcactttgggaggctgaggcaggcggatcacttgaggccaggagttcaagaccagcctggccatcatggtgaaacctcgtctctactaaaaatacacaaattagctaggcatggtggtgcgcacctgtagtcccagctgctaggtacgctgaggcacgagaatggcttgagcctggggggcagaggttgcagtgagccgcgatcgccctactgcactctagcctctgtctcaaaagaagaagaagaaaaaaaaaaaamaccctggcacttcatgcagcaacacgagtgacaatgtagtaa

SEQ ID NO: 692372 - DNA, 934 bp, Homo sapiens
cctggaaaggcaagggatagagctgatttgggagaccacagatgctgagttctcgggatgacactctcctaatcatgccctatgtctctcttcccccctatctcttgcttctcattctctgtgcttattggcatcattcttatgtgcttcaaacatgtctctccattggaaaactgagaaaagggtcaggagtagctctggaattgtccatatgatcagaaacagcatcccccatgggctccagttagaaacatttcagggaagcttctagtgacccatccctgggctaatttctgtggccaaggaggatgtgtactgtgattggtgatctccagtgcaactaccatgatggcgtgtggaggagatcatttccccaaagagagacaaagtggtactggccagacaagcttcacaggtgggaagtgatggagacagcacttcagctcttgtcagcctgactctaatgccgatactctcattcactaagcaacacaacctgctgatcacagtataaggtcagtatcctgcaaggagagcacaaaccaccaactcagttgctcactccatttttggaaaggatggtgtaactaatagatgttccctgcagaggaaagaataaaaagaaaacagttaatggattgaatggacttctagcctgggtctacagaggctatttgaatagcctctacacagacaggtactagatcacaccgtggtcaataccaggatgttctaagccagattggaaagaakgaagtgcagatcaatcactgcaagcagatggcatccacctgagagagctgcaggagctcatggatgaaactgggatggttgattggcaggaatgtgggaactgtcagcccagaaggccactatagtggagaggatgtcagctcacagatgtgaccctggccataagagtggctcagagggg

SEQ ID NO: 692373 - DNA, 1947 bp, Homo sapiens
tttttcttatagaaatgcaatccaatgtttgtgattctgaacatgtagggacaaaggttaaaaaatggctatgaataaaagcaataaaaccattgcattttaatagacactaccaggcacaactcattgtgaccatcttcaccctgtaatgagcatgggccaaagtggccatattttatgttatgtgatcccattctgattctccccaaccaccacctttgatcacaagcaaccaatcaagaatatgcacctgacccaagagtaacaaatatatgccctatgcattaactaatgatccaagctaatcaaattatttctttggagattttgaatcaagaagtctccaattgttcaaaatgggagaaaggtggaagaatattcttataaaaatatttgaatagcaaaaaccatttctattaatagctttagtctccatgaatctttcatctatttaaactcttggttatacatttcctatatctaaaaatataataaaatttgtattactgttgtttgagaagtagtattctagcaattaaacaagtctaaagaaaacatggagaaggcataaaaatgttagctaaaacttaacatatttaatattcagactgtggtaaaatgaatggaggtaaaatgaagaaggracagggatgattaaaaaaaaaaaaaaagaactttgctcagtgaatagcacagtactaaataagataaagtttttactttaccctaagagatgcagcatagcataatggttaaatttacgggcttaaggcaaaaactactgtcatggtttgaatatttgtcccctctgaaactcatgttaaaaacttaattaccaatgtggcgatgttaaaaggtgatgcctttgagaggtgattgggtcataagagctctgctttcgtaagtggattaatccatttatggattaacggattaataggttaatggattaatgggttatcacaggagtgggactggtgactttattagaagagaaaaagagaccagagttagtgttcagcccccttaccatctgatgccctgtgccacctcaggactctgcagcgagtcctcattggcaagagggccctcaccagattcaccccccgaccttggacttcacagttttcattcagaactgtaagaaatacattttgtttctttataaccagtttcaggaattctattaaaagcaacagaaaatgaactaagataactatttttattaaaaacctggttctaacatgtatcagctgggaataagttacttaacctttctgtggttctattaccttatctgcaaaatagagaaaataacaatacttttatacggttggtgtgaggattaaacaagtaaatagataagcagttcttagtagagtacctggcatttgaataaaaatcttagcattgaaaaaatgtttttattattattaaaagctggaaaattaaatagatctgttcatggatacctgattcataaatatcacaagaaaaattggtgtctaactttaaaaacatgtttttatggaaaatgattgtaccttttgatacagaattggttagagggtacagaagtttcacccagtgtgcgcattcccattatcttatgaggagtctagatatgccaaatgaatttcagaacaagcaaaaatgttaaggaacattatttaaaagcatttttattgcactgacaatgtatgttaaattgaaagtgtaagtaataaaccatagagaaatggcaaacttctaccaattatattttgttgttgcatgttatagtacaatttatactttgttgtggtctcagattcagaaggagagtaaataaaaagattccttttgtgggggtaaaatgtacctatctttatttcatcgtttatcattttgtgtgagtcttgtccatagatacttctgtttctttttttttttttttcagacggagtc

SEQ ID NO: 692374 - DNA, 1947 bp, Homo sapiens
tttttcttatagaaatgcaatccaatgtttgtgattctgaacatgtagggacaaaggttaaaaaatggctatgaataaaagcaataaaaccattgcattttaatagacactaccaggcacaactcattgtgaccatcttcaccctgtaatgagcatgggccaaagtggccatattttatgttatgtgatcccattctgattctccccaaccaccacctttgatcacaagcaaccaatcaagaatatgcacctgacccaagagtaacaaatatatgccctatgcattaactaatgatccaagctaatcaaattatttctttggagattttgaatcaagaagtctccaattgttcaaaatgggagaaaggtggaagaatattcttataaaaatatttgaatagcaaaaaccatttctattaatagctttagtctccatgaatctttcatctatttaaactcttggttatacatttcctatatctaaaaatataataaaatttgtattactgttgtttgagaagtagtattctagcaattaaacaagtctaaagaaaacatggagaaggcataaaaatgttagctaaaacttaacatatttaatattcagactgtggtaaaatgaatggaggtaaaatgaagaaggaacagggatgattaaaaaaaaaaaaaaagaactttgctcagtgaatagcacagtactaaataagataaagtttttactttaccctaagagatgcagcatagcataatggttaaatttacgggcttaaggcaaaaactactgtcatggtttgaatatttgtcccctctgaaactcatgttaaaaacttaattaccaatgtggcgatgttaaaaggtgatgcctttgagaggtgattgggtcataagagctctgctttcgtaagtggattaatccatttatggattaayggattaataggttaatggattaatgggttatcacaggagtgggactggtgactttattagaagagaaaaagagaccagagttagtgttcagcccccttaccatctgatgccctgtgccacctcaggactctgcagcgagtcctcattggcaagagggccctcaccagattcaccccccgaccttggacttcacagttttcattcagaactgtaagaaatacattttgtttctttataaccagtttcaggaattctattaaaagcaacagaaaatgaactaagataactatttttattaaaaacctggttctaacatgtatcagctgggaataagttacttaacctttctgtggttctattaccttatctgcaaaatagagaaaataacaatacttttatacggttggtgtgaggattaaacaagtaaatagataagcagttcttagtagagtacctggcatttgaataaaaatcttagcattgaaaaaatgtttttattattattaaaagctggaaaattaaatagatctgttcatggatacctgattcataaatatcacaagaaaaattggtgtctaactttaaaaacatgtttttatggaaaatgattgtaccttttgatacagaattggttagagggtacagaagtttcacccagtgtgcgcattcccattatcttatgaggagtctagatatgccaaatgaatttcagaacaagcaaaaatgttaaggaacattatttaaaagcatttttattgcactgacaatgtatgttaaattgaaagtgtaagtaataaaccatagagaaatggcaaacttctaccaattatattttgttgttgcatgttatagtacaatttatactttgttgtggtctcagattcagaaggagagtaaataaaaagattccttttgtgggggtaaaatgtacctatctttatttcatcgtttatcattttgtgtgagtcttgtccatagatacttctgtttctttttttttttttttcagacggagtc

SEQ ID NO: 692375 - DNA, 1947 bp, Homo sapiens
tttttcttatagaaatgcaatccaatgtttgtgattctgaacatgtagggacaaaggttaaaaaatggctatgaataaaagcaataaaaccattgcattttaatagacactaccaggcacaactcattgtgaccatcttcaccctgtaatgagcatgggccaaagtggccatattttatgttatgtgatcccattctgattctccccaaccaccacctttgatcacaagcaaccaatcaagaatatgcacctgacccaagagtaacaaatatatgccctatgcattaactaatgatccaagctaatcaaattatttctttggagattttgaatcaagaagtctccaattgttcaaaatgggagaaaggtggaagaatattcttataaaaatatttgaatagcaaaaaccatttctattaatagctttagtctccatgaatctttcatctatttaaactcttggttatacatttcctatatctaaaaatataataaaatttgtattactgttgtttgagaagtagtattctagcaattaaacaagtctaaagaaaacatggagaaggcataaaaatgttagctaaaacttaacatatttaatattcagactgtggtaaaatgaatggaggtaaaatgaagaaggaacagggatgattaaaaaaaaaaaaaaagaactttgctcagtgaatagcacagtactaaataagataaagtttttactttaccctaagagatgcagcatagcataatggttaaatttacgggcttaaggcaaaaactactgtcatggtttgaatatttgtcccctctgaaactcatgttaaaaacttaattaccaatgtggcgatgttaaaaggtgatgcctttgagaggtgattgggtcataagagctctgctttcgtaagtggattaatccatttatggattaacggattaataggttaatggattaatgggttatcacaggagtgggactggtgactttattagaagagaaaaagagaccagagttagtgttcagcccccttaccatctgatgccctgtgccacctcaggactctgcagcgagtcctcattggcaagagggccctcaccagattcaccccccgaccttggacttcacagttttcattcagaactgtaagaaatacattttgtttctttataaccagtttcaggaattctattaaaagcaacagaaaatgaactaagataactatttttattaaaaacctggttctaacatgtatcagctgggaataagttacttaacctttctgtggttctattaccttatctgcaaaatagagaaaataacaatacttttatacggttggtgtgaggattaaacaagtaaatagataagcagttcttagtagagtacctggcatttgaataaaaatcttagcattgaaaaaatgtttttattattattaaaagctggaaaattaaatagatctgttcatggatacctgattcataaatatcacaagaaaaattggtgtctaactttaaaaacatgtttttatggaaaatgattgtaccttttgatacagaattggttagagggtacagaagtttcacccagtgtgcgcattcccattatcttatgaggagtcyagatatgccaaatgaatttcagaacaagcaaaaatgttaaggaacattatttaaaagcatttttattgcactgacaatgtatgttaaattgaaagtgtaagtaataaaccatagagaaatggcaaacttctaccaattatattttgttgttgcatgttatagtacaatttatactttgttgtggtctcagattcagaaggagagtaaataaaaagattccttttgtgggggtaaaatgtacctatctttatttcatcgtttatcattttgtgtgagtcttgtccatagatacttctgtttctttttttttttttttcagacggagtc

SEQ ID NO: 692376 - DNA, 626 bp, Homo sapiens
aaggaaaactttacagcatgatgctcgagtggaaacttgaagggcaagtaggagtttgccggatcaatttagaatgagctagaggtgtctgcgaaatgcagagaatgactgaccatgcagaacttcagacactagtttacagagctactactgtggatgagatgctgaagccttttcacatatgcctcatttgttgtctcaagctttttataagttagacattataattcttaagaaaagtgaagctagaagaaattaagtgatttgtccaaaatgaaataatatggaatagagcacaacttaaatgtggttttctattctaaatccagttatttttctattccaaaaactgctttcctggtagggggaagaagggtacaaaaagacattctttttttttgaacatgtttacakagatgggaatttggctttaggtagcagtgtttgaattttgttagttatgtacaatagaaatcctaatataatccagtaagaagtattggaagggactcttattgcacgaagtaatgattttttacatctaaatttcttagaaatttattgaaagcattatttcctaaagaagagctttcccttgtgatttgcctatttctttaattacatca

SEQ ID NO: 692377 - DNA, 1449 bp, Homo sapiens
aagtcctgtgcttcttgttagtgaccttgctctctctttggcactcacagatctggtctcagcagtgattataagggcaacatcctcctttgtggtacccaatccagaaagaattggggcatgttgtcagtgcagtaccaggaagtgtactagggaattccatattctaccttttaaaaatacttttgagactgtctcacagttctttgtagggatagattgctgtcaatccattgtggtatatcatcagtgattatggaaaccctcctgttacttaatactgttttctgaagaactgtagatgtttccattaatgtaggttaaggaatttccttgattcccagataataaaatacagcatttccaaacaagctttcctccttaattcactcattcagtaaatgcttattgctgacaggtagttcccaatcttgttcaaaacaccgtgctaatttataatatagaaaaggtgagctagaacctctgcctgtccaatcagagacattatagggtctagagtatagatcaggggttgctgaacaatggccctcaggccaaatacagctcgctgcctgtttttgtaaatcaagtttcattggaacaaatgttatattcgctaacatattgtccatgcctgttttgtgctgcaagtacagagttgaatagttgcaacagagatcatatggcctgtaagcctaaactatttactgtctgatcctttagaggaaatgtttgctgacccttgctatagagatggaaacataaattattacataacatcacagaagaaacagtaccttatggtgggagcagcatgaattttgaaccatgcctatttcaaatcttgcttctatcatttactagccttacagccttcatcatgttacttagtaattctgagctttatttttttcttttgcaaaatgcaattagtaatatctatactgcaggtttaattttagtagtaggagaggttatttatatgtaaggccctcagagtataacaatagtcaataaatgttcacttgtcaaaataataggatgacacataagtaggatgactatatatcctagagccaccttggtttacacctgctgtcccagtttaattattaataacccccttcactcttaagtgtcctaatttgggtaatagattgcatggtcacactatgcttagggaatttcttaaagtttcatttgtgattatcttattttgatgaggaaccaaatttattttaaaactgtaagttttatttaaaacttattttaaagctgtaagtactatgataagaaagtaaattactttgtattggtcattgctgacctaaccacacaaacgttttggttcctatattattaaactttgttcctttaagcaagaaacatttattaacccaatartaatgttttcaaaatctcattacggagacttagaaataactaaac

SEQ ID NO: 692378 - DNA, 639 bp, Homo sapiens
ttaaaataatttcccatgtatgaactgagttctagtctcagattgtcttcacttgcttccatatgaccttggacaaggcaaaaactgaagtttttcctctgtaatgtgagggacagataaatagccactacttataataggagattgctttgagggctaaatgagttaagtatatttgtttatttattttttagagacagggtctcactctgtggcccaggctggagtgtagtggcatgatcatctcattgcagcctcgaactcctggcctcacttgatcctcccaccttaggctcccaagttgctgggaccacagatgtgtgccactacactgactaatttttttattttttggtagagatggggtcttgctatgttgtccaggttggtctcaaacacytagcctcaagagatcttcttgcctccacctcccaaagtgctgggattacagggatgagccactgtccctagctaaatgaattaaatgtacataaaagctttttgcaaaacataatgtgatttccaaactacagatgttgttactgctactaattatcataaaattgaaatgaaaaattaatatactatgtgaaatgatgagacatattttaggtatacaacattaaaacacacacacac

SEQ ID NO: 692379 - DNA, 1160 bp, Homo sapiens
aaagtaacctatgcagtatggaaaataataatcccttgtcattgcacatcacactacccgtaggtaactactgtgagaaatttgataaattatcctttgagatttcttttctggaaatgtatatttgttcttcatttatttgggtttttttaaaaaaatgattaagccattttcccaacaccatcrattgtggaagtcttcctttccctactgatttggaatgacatctttattaaatgtaaaattatcatacaaaccagtgtgcattaaaggtgcctgtccactactgatggttgcctcagtcagatgtcaggtggttccagaaatacgcttattattagcaactttaaaaaataaatcccctgtccctatgcttcctttttaaaaccacctatctatttcttcttatatgcgaacttcagaattattttatttgactctctactgaaaagaaattcattggtttgctattaaaattaaattcatttctttaaccaatattaagtatttaccatgtgtgaagccctatgtaaggtgctaaaaaatgtacaaatgaataaggtgggtatggtctctgccattatgaaggttaaatataataaattcagttctttccaaactgatcaccattttgaaaactttaccatgtcttttctcttattccagaaacataggtgtttctattccttttttctaaataatatccttccatttcatcatgtgtaatgctgctatgttttgtttttagccttctttttgcaatttactaaatgcttatgatcctacaaactatttgcccagtatttctttatattatttttatcacttaatttgaatttatcatcaaattgatagtagtttagaactagctatggatgaactgattttagagattacttttttttacatgttgagtttttaattttgagccattaattttgagttgccttcataagtcagtgtagaatatattcaagtaaaagataaggccgggcacagtggctcacccctgtaatcccagcactttgggaggctgaggctggcggatcagttgaagtcaggagtttgaggccaacttggccaacaaggcgaaaccccctctctactaaaaatacaaaaataagccgggcgtggtggcgcacacctgtaatctcagctat

SEQ ID NO: 692380 - DNA, 1160 bp, Homo sapiens
aaagtaacctatgcagtatggaaaataataatcccttgtcattgcacatcacactacccgtaggtaactactgtgagaaatttgataaattatcctttgagatttcttttctggaaatgtatatttgttcttcatttatttgggtttttttaaaaaaatgattaagccattttcccaacaccatcgattgtggaagtcttcctttccctactgatttggaatgacatctttattaaatgtaaaattatcatacaaaccagtgtgcattaaaggtgcctgtccactactgatggttgcctcagtcagatgtcaggtggttccagaaatacgcttattattagcaactttaaaaaataaatcccctgtccctatgcttcctttttaaaaccacctatctatttcttcttwtatgcgaacttcagaattattttatttgactctctactgaaaagaaattcattggtttgctattaaaattaaattcatttctttaaccaatattaagtatttaccatgtgtgaagccctatgtaaggtgctaaaaaatgtacaaatgaataaggtgggtatggtctctgccattatgaaggttaaatataataaattcagttctttccaaactgatcaccattttgaaaactttaccatgtcttttctcttattccagaaacataggtgtttctattccttttttctaaataatatccttccatttcatcatgtgtaatgctgctatgttttgtttttagccttctttttgcaatttactaaatgcttatgatcctacaaactatttgcccagtatttctttatattatttttatcacttaatttgaatttatcatcaaattgatagtagtttagaactagctatggatgaactgattttagagattacttttttttacatgttgagtttttaattttgagccattaattttgagttgccttcataagtcagtgtagaatatattcaagtaaaagataaggccgggcacagtggctcacccctgtaatcccagcactttgggaggctgaggctggcggatcagttgaagtcaggagtttgaggccaacttggccaacaaggcgaaaccccctctctactaaaaatacaaaaataagccgggcgtggtggcgcacacctgtaatctcagctat

SEQ ID NO: 692381 - DNA, 614 bp, Homo sapiens
acaaagtgtatgccctcacttgcctatgttcatctgagttttcttgaaagaaaaacacatggctattgattctctaatcacagaaggaggtagtgttggagctgaaatggacgttagcagacattgagtccagcagtcagtaaactgtttctgtaaatggctaatagagtctgggtaatagagtcakggttttgcaggacatatggtcttcattgccactgctcaagcctgttgtcatagcaaaacagcagccatacaccataagcatggctgtgttccaataaactttatttgtggacagcgaaatttgaatttcttgtaattctcacatgtcattaaatattcttcttttttaccagctattaaaaaacacaaaaccaattcttagctctcaggtcatacaaaagagacagcaagccagatttggcccaaaagccatagtaagccaatcccaatttgtccagtcatcacattcacagacgaggctactgacatcatgtctgaattcttccagctcttgtcgtctgtatcaagatcatttgtaatgacaaccaattatttcaaattttgcttctccaaataagtctagttacttgaagtcaagaactgtattt

SEQ ID NO: 692382 - DNA, 660 bp, Homo sapiens
tcactttggtgactgtgactccctgaagcaaagagatgggacccagyggcttaagaaataaaaagcactgtgcacacaggatggggctggcgttacatgcctgtactcccttcttctctgtgtgaaatttaacagtgaacctgaaggtgacaccattgcgcttgatctcagcaaagtgctgactaattggaaactggacggcgtttagaattattttggtcacatttattttacgagcctatttatatagcagtgtttgactctgggtttcctggagcctaattcaaactctaggaatatttcatcccgccctagcctgtttctgcatttctggctgtcaatgtagttcaagctctttcaggatggtaacttaagctgccattttaacttggaaaaaaaaatgattaaatgtggttgagttgattgtcgttcccatccccaggaggacagtaggggtcccatcttgctcagtgtctatgttacattcagacttcatgatttgaggggttccaggttcctgaacacccactttttccccatgcctggataaaagtgcctgaaatcccttccttgcacggccatccctgagggttggcacatcatagctgcacgaatggctttgagtccacctgggaaataagagtgagtgtggcagggcct

SEQ ID NO: 692383 - DNA, 660 bp, Homo sapiens
tcactttggtgactgtgactccctgaagcaaagagatgggacccagcggcttaagaaataaaaagcactgtgcacacaggatggggctggcgttacatgcctgtactcccttcttctctgtgtgaaatttaacagtgaacctgaaggtgacaccattgcgcttgatctcagcaaagtgctgactaattggaaactggacggcgtttagaattattttggtcacatttattttacgagcctatttatatagcagtgtttgactctgggtttcctggagcctaattcaaactctaggaatatttcatcccgccctagcctgtttctgcatttctggctgtcaatgtagttcaagctctttcaggatggtaacttaagctgccattttaacttggaaaaaaaaatgattaaatgtggttgagttgattgtcgttcccatccccaggaggacagtaggggtcycatcttgctcagtgtctatgttacattcagacttcatgatttgaggggttccaggttcctgaacacccactttttccccatgcctggataaaagtgcctgaaatcccttccttgcacggccatccctgagggttggcacatcatagctgcacgaatggctttgagtccacctgggaaataagagtgagtgtggcagggcct

SEQ ID NO: 692384 - DNA, 2144 bp, Homo sapiens
agtaacttgggcaagtactatcttgaagttatgaccaagacccatgatttattttaacattgtgacgaagtatcaacataaatttctgggaggattatggccattatacaattaactaaagagacattgagactcacgttgagtagaggtaaagagctgtgcagtgaaggatcttcagtgacaggagtgaaggcagagcatgttcacagatgcagagcagttggaatatttcttgaagaaaggtgagttttttcttctgttactcccttttctgtaaaatagatggcagagtatcagcttgatgcaagaggcaaggagatgttagaggtttgatgagagaaaacgttcatattggaagtatttgagagttcataacctagggggaaaataggaggactgcttagtagaaattataaattgcatgagatatataagtatctccattcacataaaatgaaaacagtgagcacagctgtttcaatttttcccaattgtatacttcttgcatacagttgctgaagaggaaattaattggttttaatcattaaaattagagatgagagaatttcccagcaagtataagaaatgtagagcagggaaagaaaatgatgaagccctgtctttatgttgggtaaagaagaaaggaagaaaatgataggtgtggtgaagtttaaaaactggtagtgtcagtaaattagatgatgcaaagtgttggaatagtatctggagtgagaatattggagtaagtaatcttgaaaaacagatgaatgcagtcagtagctaaatgttttaaataattttggaagtgaaacatttattgataactatatatatgtgtgtctgtatatacacacatacacacacacgagtgcacacatgtgcacatactagtgtaccagggtacactgtggaatagtgcaaattaataagacaggatgtggatgatctgatgacatttttatttttcttggatgagaagtaatatatatcctgtcaatctcttcgaaatagggaggaaatctgtctcaccaactcacctgcctgttttgtagctgactgagtgacagaatatatatccatcatctaatagtactcagggaagcattatcctgaagctgtaaccaaaattgtgctattattcttatttatcataattactattccatgtctacagaatgtttgttgaaatcttccatttggagtcaggaaaagttcttctattgtcattcctgtgtagcctgaagttagtcacctttgtaaaaactaggagaagactatttatccactggccgctactgtttctcctattccacacccataaaatattagcatagtgatcatggcaaacccccaatataaaaaagagatactcaattgtgtcaataattgagagaataaacatgtaataaataaaagtgtgttattctaataactgtttttgtcttatttaattttggctgccataacaaagcatcatagactacatggcttataaacaataggaatttatttctgagttctagaggctagaagtctgagatcagggcaccagcatggtcaggttctgctgagggtcctcttctggactatagattgcagacttctcattgtatatttattgtatcctcttgtggcagaaagaaggctcgagaattctatttttttttttttaatagaggcactagtgacattcatgagggcaccaccataccaagtaatttctttccaaagacttcatcttctaaaatgatcacattggggatttggatttcaatatataaattccaaggtgacacaattgttcaggccattgcagttaacataatttttwatttagaaatttaattgcactctttgaaatatttaagaagaaatatgagaagaaagaatacgcccatagtaatgcattttagtgaagattaaaactgttattaaatagcagaatggagaagtagattgtgtaatgccagggggcaatggaataaataaactatagctttttcacaacatcgataaatttcacaaatgttcatatggaaatgtacacaagtcataagtatgcagcttagtgaattattacagtgtagaatggaagattacctcaccaattaagaaagaataagtaaaaaaggatatttgaatta

SEQ ID NO: 692385 - DNA, 1998 bp, Homo sapiens
tccatgatatacaaaggttagtgcacaaaatagagaaaaaaggatgatgtaaaatgcaaaaaaaaaaaaaaagttaactttgctcaatctgctcttgcccatgatatcagcatcaatatgtgctcactactcttccttgactctctataaccctgtagaggagagattataagtgcaaatggcccacagtgatcatgtacccccacacaccaccataggacagtagaactcaaaagcgaaattaataagaaggcagtgacacaatggaactgatttctttaaggcctaatcactctaacatcctttttcaaaatttcttactgtaaaacaaggaaagaaagaaaccaaagctgaatttaaaacaaactctgaggccaggcacgacggctaaagcctgtaatcccagcactttgggaggccgaggcaggtggatcacgaggtcagaagttcgagaccattctggccaacgtagtgaaaccccgtctctactaaacatagaaaaaattaaccagctgtggtggtgtgcgcctataatcccagctactcaggaagctgaggcaggagaatcatttgaatcagggaggcagaggttgcagggagccgagatcgcgccattgcactccagcccagcgacagtgaaaaaaaaaaaaaaaaagaaagaaagaaaaaaagaaacaacaactctgtttactacaaaataaagcaatgtcatttggtctcagtggagcaagttatccagtcacagtctaatgcagtgaagaattaaggtgctcattgctcctgcaatcagatcatctgggtttgaatcccaatgtcacctcttaccttggataaatcactttcagctgtccaaactccataaaatggagatggtagtagtaaattctccatataatagttgagattaaatgagaattgaatgtgataatccttataaagttctmagcctctgtctgctactacctaaatgttaagtaatagtgtctaaatttcattgggttgaatcttgatcctgttttacaggctgcctgtgccctacagtgagagggtatccccaaagggctatgaaagtgtaggggaacgaggagcctttcctgaagctagatacagtggtgaaagcaaagttagttttggtcaggcaggcaagatgagaatataaagcttggacagatgatagacagaaaactggagcaggctgctatagaagaaaggggtaattaagacaggaaagtgaggaggaaggcatggcagcagttggcctggagccaagatggttcctgctgcatgcagaaggtacttacttgcctgtgtcaaaacttccagctgggcaactggctacggtgctactggttatccactgatggtcctgccctagggtagttcttcccagtctttaaaggagtctggctccttgaatagcgacttcaaagagaaacagccaggagactaaagaaactcaggcctttcttaggaaggggagaaattcagtcctttcattcattcagtcagtatttattgaatatcaactaggggacaagaacggggccaaatgatgaggatataattgatacaaactggcaaacagaacatgagaaactcgtctttgagaagtttgctgtccagtagaggaagacaaacttaaacatgtgagtaagcaagtgaatatataatcacaaattgcaagcagtactatgaagaaaaaaataggatgctatataagagaacaggagaaagattcttatttatactcttaggttggtgatgatgcgggggtagggttaggaaaggcttctctgaggaggtgacagtcaagttaagcactaatggataaaggagatattagatagagttgtaagaaaaactcccatagagaggacacatcagttgcatagaccctgaggtaggaatgagcctaataggatccaggaactgcaaataaactgcagacccatgtgccaggggcagcagtgacacaggatggagccagaagtataggca

SEQ ID NO: 692386 - DNA, 1998 bp, Homo sapiens
tccatgatatacaaaggttagtgcacaaaatagagaaaaaaggatgatgtaaaatgcaaaaaaaaaaaaaaagttaactttgctcaatctgctcttgcccatgatatcagcatcaatatgtgctcactactcttccttgactctctataaccctgtagaggagagattataagtgcaaatggcccacagtgatcatgtacccccacacaccaccataggacagtagaactcaaaagcgaaattaataagaaggcagtgacacaatggaactgatttctttaaggcctaatcactctaacatcctttttcaaaatttcttactgtaaaacaaggaaagaaagaaaccaaagctgaatttaaaacaaactctgaggccaggcacgacggctaaagcctgtaatcccagcactttgggaggccgaggcaggtggatcacgaggtcagaagttcgagaccattctggccaacgtagtgaaaccccgtctctactaaacatagaaaaaattaaccagctgtggtggtgtgcgcctataatcccagctactcaggaagctgaggcaggagaatcatttgaatcagggaggcagaggttgcagggagccgagatcgcgccattgcactccagcccagcgacagtgaaaaaaaaaaaaaaaaagaaagaaagaaaaaaagaaacaacaactctgtttactacaaaataaagcaatgtcatttggtctcagtggagcaagttatccagtcacagtctaatgcagtgaagaattaaggtgctcattgctcctgcaatcagatcatctgggtttgaatcccaatgtcacctcttaccttggataaatcactttcagctgtccaaactccataaaatggagatggtagtagtaaattctccatataatagttgagattaaatgagaattgaatgtgataatccttataaagttctcagcctctgtctgctactacctaaatgttaagtaatagtgtctaaatttcattgggttgaatcttgatcctgttttacaggctgcctgtgccctacagtgakagggtatccccaaagggctatgaaagtgtaggggaacgaggagcctttcctgaagctagatacagtggtgaaagcaaagttagttttggtcaggcaggcaagatgagaatataaagcttggacagatgatagacagaaaactggagcaggctgctatagaagaaaggggtaattaagacaggaaagtgaggaggaaggcatggcagcagttggcctggagccaagatggttcctgctgcatgcagaaggtacttacttgcctgtgtcaaaacttccagctgggcaactggctacggtgctactggttatccactgatggtcctgccctagggtagttcttcccagtctttaaaggagtctggctccttgaatagcgacttcaaagagaaacagccaggagactaaagaaactcaggcctttcttaggaaggggagaaattcagtcctttcattcattcagtcagtatttattgaatatcaactaggggacaagaacggggccaaatgatgaggatataattgatacaaactggcaaacagaacatgagaaactcgtctttgagaagtttgctgtccagtagaggaagacaaacttaaacatgtgagtaagcaagtgaatatataatcacaaattgcaagcagtactatgaagaaaaaaataggatgctatataagagaacaggagaaagattcttatttatactcttaggttggtgatgatgcgggggtagggttaggaaaggcttctctgaggaggtgacagtcaagttaagcactaatggataaaggagatattagatagagttgtaagaaaaactcccatagagaggacacatcagttgcatagaccctgaggtaggaatgagcctaataggatccaggaactgcaaataaactgcagacccatgtgccaggggcagcagtgacacaggatggagccagaagtataggca

SEQ ID NO: 692387 - DNA, 1998 bp, Homo sapiens
tccatgatatacaaaggttagtgcacaaaatagagaaaaaaggatgatgtaaaatgcaaaaaaaaaaaaaaagttaactttgctcaatctgctcttgcccatgatatcagcatcaatatgtgctcactactcttccttgactctctataaccctgtagaggagagattataagtgcaaatggcccacagtgatcatgtacccccacacaccaccataggacagtagaactcaaaagcgaaattaataagaaggcagtgacacaatggaactgatttctttaaggcctaatcactctaacatcctttttcaaaatttcttactgtaaaacaaggaaagaaagaaaccaaagctgaatttaaaacaaactctgaggccaggcacgacggctaaagcctgtaatcccagcactttgggaggccgaggcaggtggatcacgaggtcagaagttcgagaccattctggccaacgtagtgaaaccccgtctctactaaacatagaaaaaattaaccagctgtggtggtgtgcgcctataatcccagctactcaggaagctgaggcaggagaatcatttgaatcagggaggcagaggttgcagggagccgagatcgcgccattgcactccagcccagcgacagtgaaaaaaaaaaaaaaaaagaaagaaagaaaaaaagaaacaacaactctgtttactacaaaataaagcaatgtcatttggtctcagtggagcaagttatccagtcacagtctaatgcagtgaagaattaaggtgctcattgctcctgcaatcagatcatctgggtttgaatcccaatgtcacctcttaccttggataaatcactttcagctgtccaaactccataaaatggagatggtagtagtaaattctccatataatagttgagattaaatgagaattgaatgtgataatccttataaagttctcagcctctgtctgctactacctaaatgttaagtaatagtgtctaaatttcattgggttgaatcttgatcctgttttacaggctgcctgtgccctacagtgagagggtatccccaaagggctatgaaagtgtaggggaaygaggagcctttcctgaagctagatacagtggtgaaagcaaagttagttttggtcaggcaggcaagatgagaatataaagcttggacagatgatagacagaaaactggagcaggctgctatagaagaaaggggtaattaagacaggaaagtgaggaggaaggcatggcagcagttggcctggagccaagatggttcctgctgcatgcagaaggtacttacttgcctgtgtcaaaacttccagctgggcaactggctacggtgctactggttatccactgatggtcctgccctagggtagttcttcccagtctttaaaggagtctggctccttgaatagcgacttcaaagagaaacagccaggagactaaagaaactcaggcctttcttaggaaggggagaaattcagtcctttcattcattcagtcagtatttattgaatatcaactaggggacaagaacggggccaaatgatgaggatataattgatacaaactggcaaacagaacatgagaaactcgtctttgagaagtttgctgtccagtagaggaagacaaacttaaacatgtgagtaagcaagtgaatatataatcacaaattgcaagcagtactatgaagaaaaaaataggatgctatataagagaacaggagaaagattcttatttatactcttaggttggtgatgatgcgggggtagggttaggaaaggcttctctgaggaggtgacagtcaagttaagcactaatggataaaggagatattagatagagttgtaagaaaaactcccatagagaggacacatcagttgcatagaccctgaggtaggaatgagcctaataggatccaggaactgcaaataaactgcagacccatgtgccaggggcagcagtgacacaggatggagccagaagtataggca

SEQ ID NO: 692388 - DNA, 1998 bp, Homo sapiens
tccatgatatacaaaggttagtgcacaaaatagagaaaaaaggatgatgtaaaatgcaaaaaaaaaaaaaaagttaactttgctcaatctgctcttgcccatgatatcagcatcaatatgtgctcactactcttccttgactctctataaccctgtagaggagagattataagtgcaaatggcccacagtgatcatgtacccccacacaccaccataggacagtagaactcaaaagcgaaattaataagaaggcagtgacacaatggaactgatttctttaaggcctaatcactctaacatcctttttcaaaatttcttactgtaaaacaaggaaagaaagaaaccaaagctgaatttaaaacaaactctgaggccaggcacgacggctaaagcctgtaatcccagcactttgggaggccgaggcaggtggatcacgaggtcagaagttcgagaccattctggccaacgtagtgaaaccccgtctctactaaacatagaaaaaattaaccagctgtggtggtgtgcgcctataatcccagctactcaggaagctgaggcaggagaatcatttgaatcagggaggcagaggttgcagggagccgagatcgcgccattgcactccagcccagcgacagtgaaaaaaaaaaaaaaaaagaaagaaagaaaaaaagaaacaacaactctgtttactacaaaataaagcaatgtcatttggtctcagtggagcaagttatccagtcacagtctaatgcagtgaagaattaaggtgctcattgctcctgcaatcagatcatctgggtttgaatcccaatgtcacctcttaccttggataaatcactttcagctgtccaaactccataaaatggagatggtagtagtaaattctccatataatagttgagattaaatgagaattgaatgtgataatccttataaagttctcagcctctgtctgctactacctaaatgttaagtaatagtgtctaaatttcattgggttgaatcttgatcctgttttacaggctgcctgtgccctacagtgagagggtatccccaaagggctatgaaagtgtaggggaacgaggagcctttcctgaagctagatacagtggtgaaagcaaagttagttttggtcaggcaggcaagatgagaatataaagcttggacagatgatagacagaaaactggagcaggctgctatagaagaaaggggtaattaagacaggaaagtgaggaggaaggcatggcagcagttggcctggagccaagatggttcctgctgcatgcagaaggtacttacttgcctgtgtcaaaacttccagctgggcaactggctacggtgctactggttatccactgatggtcctgccctagggtagttcttcccagtctttaaaggagtctggctccttgaatagcgacttcaaagagaaacagccaggagactaaagaaactcaggcctttcttaggaaggggagaaattcagtcctttcattcattcagtcagtatttattgaatatcaactaggggacaagaacggggccaaatgatgagkatataattgatacaaactggcaaacagaacatgagaaactcgtctttgagaagtttgctgtccagtagaggaagacaaacttaaacatgtgagtaagcaagtgaatatataatcacaaattgcaagcagtactatgaagaaaaaaataggatgctatataagagaacaggagaaagattcttatttatactcttaggttggtgatgatgcgggggtagggttaggaaaggcttctctgaggaggtgacagtcaagttaagcactaatggataaaggagatattagatagagttgtaagaaaaactcccatagagaggacacatcagttgcatagaccctgaggtaggaatgagcctaataggatccaggaactgcaaataaactgcagacccatgtgccaggggcagcagtgacacaggatggagccagaagtataggca

SEQ ID NO: 692389 - DNA, 1998 bp, Homo sapiens
tccatgatatacaaaggttagtgcacaaaatagagaaaaaaggatgatgtaaaatgcaaaaaaaaaaaaaaagttaactttgctcaatctgctcttgcccatgatatcagcatcaatatgtgctcactactcttccttgactctctataaccctgtagaggagagattataagtgcaaatggcccacagtgatcatgtacccccacacaccaccataggacagtagaactcaaaagcgaaattaataagaaggcagtgacacaatggaactgatttctttaaggcctaatcactctaacatcctttttcaaaatttcttactgtaaaacaaggaaagaaagaaaccaaagctgaatttaaaacaaactctgaggccaggcacgacggctaaagcctgtaatcccagcactttgggaggccgaggcaggtggatcacgaggtcagaagttcgagaccattctggccaacgtagtgaaaccccgtctctactaaacatagaaaaaattaaccagctgtggtggtgtgcgcctataatcccagctactcaggaagctgaggcaggagaatcatttgaatcagggaggcagaggttgcagggagccgagatcgcgccattgcactccagcccagcgacagtgaaaaaaaaaaaaaaaaagaaagaaagaaaaaaagaaacaacaactctgtttactacaaaataaagcaatgtcatttggtctcagtggagcaagttatccagtcacagtctaatgcagtgaagaattaaggtgctcattgctcctgcaatcagatcatctgggtttgaatcccaatgtcacctcttaccttggataaatcactttcagctgtccaaactccataaaatggagatggtagtagtaaattctccatataatagttgagattaaatgagaattgaatgtgataatccttataaagttctcagcctctgtctgctactacctaaatgttaagtaatagtgtctaaatttcattgggttgaatcttgatcctgttttacaggctgcctgtgccctacagtgagagggtatccccaaagggctatgaaagtgtaggggaacgaggagcctttcctgaagctagatacagtggtgaaagcaaagttagttttggtcaggcaggcaagatgagaatataaagcttggacagatgatagacagaaaactggagcaggctgctatagaagaaaggggtaattaagacaggaaagtgaggaggaaggcatggcagcagttggcctggagccaagatggttcctgctgcatgcagaaggtacttacttgcctgtgtcaaaacttccagctgggcaactggctacggtgctactggttatccactgatggtcctgccctagggtagttcttcccagtctttaaaggagtctggctccttgaatagcgacttcaaagagaaacagccaggagactaaagaaactcaggcctttcttaggaaggggagaaattcagtcctttcattcattcagtcagtatttattgaatatcaactaggggacaagaacggggccaaatgatgaggatataattgatacaaactggcaaacagaacatgagaaactcgtctttgagaagtttgctgtccagtagaggaagacaaacttaaacaygtgagtaagcaagtgaatatataatcacaaattgcaagcagtactatgaagaaaaaaataggatgctatataagagaacaggagaaagattcttatttatactcttaggttggtgatgatgcgggggtagggttaggaaaggcttctctgaggaggtgacagtcaagttaagcactaatggataaaggagatattagatagagttgtaagaaaaactcccatagagaggacacatcagttgcatagaccctgaggtaggaatgagcctaataggatccaggaactgcaaataaactgcagacccatgtgccaggggcagcagtgacacaggatggagccagaagtataggca

SEQ ID NO: 692390 - DNA, 604 bp, Homo sapiens
tctgctgcccaggctgtctttttttttttttttttttgagaaggagtctcgctgtgctgcccaggctggagtgcagtggcgcgatctgtgctcactgcaagcyccgcctcccaggttcacaccattctcctgcctcagcttccggagtagctgggactacaggcgcccgccaccacgcccggctagttttttgtatttttagtagagacagggtttcaccgtgttagccaggatggtctcgatctcctgatattgtgatccgcccgcctccgcctcccaaagtgctgggattacaggcgtgagccaccgcgcccggccaatttttaaattcttgatggtttaggtaggaatgtttacttcatattcaaatattttctagtattcggtattatgccccttattgactttttgcctatacctctttggtttatttctagttgttgttgtatgcatccttaacttatcacagtttacatggaacatctcttcacatatagcattaagaacttgcgacagtatgtatatttctatcacttcctctctttttgatatatttattatgtatttatgctaattttgtcttagtcaaatgcctttcgaaaac

SEQ ID NO: 692391 - DNA, 1231 bp, Homo sapiens
tagggacatggatgaaactggaaaccatcattctcagcaaactatcacaaggacaaaaaaccaaacaccaattgttctctcataggtgggaactgaacaatgagaacacatggacacaggaaggggaacatcacactccagggactgttgtgggttggggagggggagggatagcattaggagatatacctatatacctaatgctaaatgacgagttaatgggtgcagcacaccaacatggcacatgtatacatatgtaacaaacctgcacattgtgcacatgtaccctaaaacttaaagtataataataaaataaaatwaaattaaaaattaaaaaaagagacatattgttgctataagtttaatgatggccaaaagtccctctcaaatatctcacagggtctacactatgtgttcacttagcagtatggtgaaacctggcctaagatttccaaccatggcctgggaattactgggtctgtatgacaatgagacctaaaaatgctggttgccctagggacaagaccactcaacatagatgcaaccttaaaacaatgcttaccctcacaagaatgctaatacttcctttatgaaagaaacacctggcaactgacctggactgaatagtatgaaaaaggagaaagaatcccccaaactctgagaatggtccccagatggagactctcccagtcatctgactcctgactctatctggcccatgccaccagcctgctcccgctatctgtcttgtaagagcacttctggaataaactgtccaaacatcagacaatgtctaagactcgtctttggaagctagaagagactgatgtcttcaaaatattgagggaaaaatattttcaacctgaaattctgtgcccaaccaaactacccatcatgaataataaataaagttactataaattatgctctatcaaaatcaagaataagataggggatagaggaaacaggacattcaaataggtgacaggcaaaaagaattcctggatggtgctaaagtgaagacccagcataatagctgagggctcagccttcagagcaatcagttctgcctagagaatagagagcatcagaggcaaagtcaccaggggaaaaaattaattgatagattacctgatgtgtttgattgttttgataagtaattcattgatctgttggagtatttagggattaaaaattggtgacaggtacatagaaaatcaagcaattttaa

SEQ ID NO: 692392 - DNA, 1231 bp, Homo sapiens
tagggacatggatgaaactggaaaccatcattctcagcaaactatcacaaggacaaaaaaccaaacaccaattgttctctcataggtgggaactgaacaatgagaacacatggacacaggaaggggaacatcacactccagggactgttgtgggttggggagggggagggatagcattaggagatatacctatatacctaatgctaaatgacgagttaatgggtgcagcacaccaacatggcacatgtatacatatgtaacaaacctgcacattgtgcacatgtaccctaaaacttaaagtataataataaaataaaattaaatwaaaaattaaaaaaagagacatattgttgctataagtttaatgatggccaaaagtccctctcaaatatctcacagggtctacactatgtgttcacttagcagtatggtgaaacctggcctaagatttccaaccatggcctgggaattactgggtctgtatgacaatgagacctaaaaatgctggttgccctagggacaagaccactcaacatagatgcaaccttaaaacaatgcttaccctcacaagaatgctaatacttcctttatgaaagaaacacctggcaactgacctggactgaatagtatgaaaaaggagaaagaatcccccaaactctgagaatggtccccagatggagactctcccagtcatctgactcctgactctatctggcccatgccaccagcctgctcccgctatctgtcttgtaagagcacttctggaataaactgtccaaacatcagacaatgtctaagactcgtctttggaagctagaagagactgatgtcttcaaaatattgagggaaaaatattttcaacctgaaattctgtgcccaaccaaactacccatcatgaataataaataaagttactataaattatgctctatcaaaatcaagaataagataggggatagaggaaacaggacattcaaataggtgacaggcaaaaagaattcctggatggtgctaaagtgaagacccagcataatagctgagggctcagccttcagagcaatcagttctgcctagagaatagagagcatcagaggcaaagtcaccaggggaaaaaattaattgatagattacctgatgtgtttgattgttttgataagtaattcattgatctgttggagtatttagggattaaaaattggtgacaggtacatagaaaatcaagcaattttaa

SEQ ID NO: 692393 - DNA, 1231 bp, Homo sapiens
tagggacatggatgaaactggaaaccatcattctcagcaaactatcacaaggacaaaaaaccaaacaccaattgttctctcataggtgggaactgaacaatgagaacacatggacacaggaaggggaacatcacactccagggactgttgtgggttggggagggggagggatagcattaggagatatacctatatacctaatgctaaatgacgagttaatgggtgcagcacaccaacatggcacatgtatacatatgtaacaaacctgcacattgtgcacatgtaccctaaaacttaaagtataataataaaataaaattaaattaaaaattaaaaaaagagacatattgttgctataagtttaatgatggccaaaagtccctctcaaatatctcacagggtctacactatgtgttcacttagcagtatggtgaaacctggcctaagatttccaaccatggcctgggaattactgggtctgtatgacaatgagacctaaaaatgctggttgccctagggacaagaccactcaacatagatgcaaccttaaaacaatgcttaccctcacaagaatgctaatacttcctttatgaaagaaacacctggcaactgacctggactgaatagtatgaaaaaggagaaagaatcccccaaactctgagaatggtccccagatggagactctcccagtcatctgactcctgactctatctggcccatgccaccagcctgctcccgctatctgtcttgtaagagcacttctggaataaactgtccaaacatcagacaatgtctaagactcgtctttggaagctagaagagactgatgtcttcaaaatattgagggaaaaatattttcaacctgaaattctgtgcccaaccaaactacccatcatgaataataaataaagttactataaattatgctctatcaaaatcaagaataagataggggatagaggaaayaggacattcaaataggtgacaggcaaaaagaattcctggatggtgctaaagtgaagacccagcataatagctgagggctcagccttcagagcaatcagttctgcctagagaatagagagcatcagaggcaaagtcaccaggggaaaaaattaattgatagattacctgatgtgtttgattgttttgataagtaattcattgatctgttggagtatttagggattaaaaattggtgacaggtacatagaaaatcaagcaattttaa

SEQ ID NO: 692394 - DNA, 616 bp, Homo sapiens
agtacattaagttttttttaatcaagtttcagatttcagaatatcaagacagaatcacaatgaaactagaagaaggctggacttcaccccaagaggctgaacttgaagctagatacaatagctaaagtattcttggttgtgcataagataaatttatttatattagaatgaggcatttaaaaacctaaatgcatgaaaattcatatgtgatgtagggggagggtaagtgagcctcaaagtggtggaatrtggatctattctttttgcctgccaagcatccctatccttttatatttgttaatcaaaccttttgtttctgtctatcataatccccttaaacctccattcctgatcagtggttgggcacagaattcaatctctatttcctgggaatttaaatcttgggtacaatcacaaaaatatgaaaagtgatgccagtatccccaaagagccgaagacagaactggtagcagattaattacattggatcccctctgtcatgaaaggggcagcaatttaaaatcactataattgatacttattctggatcttctggatctaggtttgctgtccctgcctgctatgcttctgccagcaaaactatccctggtcttat

SEQ ID NO: 692395 - DNA, 1335 bp, Homo sapiens
caattttcatagctacaatagacagcttcttagctccactagagattcaaacatgagaattaaagcagattttctgagtcaatactaatgggttagatatgattcttgggagatatgatttcttgatttttagaaattatctaattaattgtccacaaaacttccttaggtagatcagggcttgatattctctgtcagattctagctgatcatatactctttgacacattgcatttaaaattgtctttgattaagagaaaggggttaaattcatactggtatgagttaaagccagacatcagaaagcaaaacaaggtgcttctatgaatgatagagattctccagagtgtggggtaatagtagagacacacagctaaaaggttctaactttgttcatgccccagtcgtccctagaatgatatgacaaaccatgttacagatgcctagaaaacccaggctctataacagcatttacccaagtaattactcagttttcggaatgatactaaggtagtagaagaaatgttttatttattaaaatgtctgggaaatactgagtactatccccacttagacatttaccagcataatggcatcatggctctgagaaagccagagtgtttaactttgtttatactaaacttctttgtccacagaactatagtttggcacgttacttatgagcaccctggtgaagtggaccaccaaggaacacactttggggaatatggctccattggactcacatcaaacttgcatcatggagatttatctgacttgctaaatggagactatctgatcgtggaaaaagcaaaattcaggtacaacaaaacctcactgtgtgaatgaaatttaagttaagacctattccgttgaaactatagaccgttttggaagatgtaaaactttgttgtatttattggcatagagtaactaggtctaccagttaaaccttctcaagttggcattgcaaccaagcctgcttactgaacgtgtaccactcttctacagagcatctgttgttagaaattaaaatrcaaattaaaatatcctaactactgtaaatattcctcactaagtcttatctgcacacttcttatcttccctctggagctctttttctatcacatggcttcatttcccaagtttctttttctctcctgctacatacacttaggctctctgtgttctacagacacagtcttatccacagcccctgaccacatgtcctataaaaatgcctcctagtcaccatggaaactccatgagaggttataaatggatcagcagaaaggcatccccacaaatagaaaaatacatccaaagcacgtgtta

SEQ ID NO: 692396 - DNA, 606 bp, Homo sapiens
tcatttgttttttcttttgtatgaagatgttaataatttggggtctagttatgtattatgtttattgttgatttatatcttatattctatgtatttcccctttgtcattaacttttaaaccatctttctgatgttcttgatcttacagaagttgaaatgtttatatagttaaatccatccatttttccttttttttttaattctttgatttctgcaagttgtttgttgttttttgtgattctacttatgagttatagtctaaatagggtattatctcattaaaaaaagtaaccttataaaaaccaagatagactccaaccaatgatgcactgagatggtccaaggaaagtaacttctgtctgttatgtttgtacaacttagactttaaagtatttattgcaacattgtcccattcttgtgaagttaaagttatctcttcttttggatctcagatcattcataatttcataagacggatccagaccaaaattaaagatcttctgcagcaaatggaagaagggctgaagacrgctgatccccatgactgctctgcttatactggctggacaggtgaggctgtggggtctaaatcactgatacatttta

SEQ ID NO: 692397 - DNA, 539 bp, Homo sapiens
ccctgggaagctcacaatcatggcagaaggcaaagggggagcaggcatgtcatatggccaggggaggagtaagatagtgaagggggggtggggtgctgcacacttttgaacaaccagatctcatgaaatcactcactatcataaggacatcaycaatgaaatggtgctaaactgttcatgagaaatccactcccacgatccaatcaccttccaccaggtcccacttccaacaatggggattacatttcagtaagagaattgggcagggacatggattcaaactctatcaggctccaaagaaaaatgggaacagatcaagatagcacacacctaataatgtggtttaaaatgtacaatgtattccccttaaacaggggtcctgtcataatccctttccagcctagctgcagacttgcctccatgaggcaggagcatccaagtgtcccaccagacataactggattcctccatgtctggaccaagagggtggggctctgagtggggcaggagtcctcactcctgtctatatggtccagctg

SEQ ID NO: 692398 - DNA, 1514 bp, Homo sapiens
ctgatttagtgtcttttgagggcctgtttcttgttgcttcgtgggatggtgtaaggaacaaagcaactttctgggccatcttttataaaggcactaataccatgcacaagggctctgcacttacgatctaatcacctaccagaggccccacctcctgatatcatcaccttgagarcgaggatctcaacatataaattttaggagaacacaaatagaccatagtcaccaacaactgcaaagtcaagtagatatgaggctgcacctctggggagcagcaagtaatgtggtctagctggggagaagggtaaggaaggaataatgtaggaggtgagcctgaagaaagagaggcaatggtcagatcataaagcctcaaatgcttccctgagaagtttgcattttattctgaagattataggagggcactgtagatttccaaacatggctagttttgtattttacaaggattactctggtattaagatattagcaagactggggataagggaccagttaagaagagaaaaagaaggaatgaagatgccctcccttcatctccatctttttaatggaaagatggttgtgcttctacctgaaaatggaaataatgagaagaagcgactttcttctttgggaggtggaggatgaagagaaaggccaagttcaatgtgagtattccagtttcaaaggcatatacaacatgtaaattggacagtgagataaaaaggggataggagcttagagaaagtatggcttagaaatagatcattggcattatgatcatatgggtattagtcttattagttctggcaacctccatttctatcaggcttatgctgtatgagtgctctgttatgggtttgcctattttcactgttggtaagaatcatctaaggtattcactataagaggttctttttttttttttttttgagatggagtctcgctctgtcgcccaggctgaggtgcagtggcgccatctcagttcactgcaacctccacctcctgggttcaagcaactctctgcctcagcctcccgagtagctgggattacaggcgccagccaccatgcccggctgattttttgtattcttagtagagatggggtttcaccatcttggccaggctggtcttgaactcctgaccttgtgatccacccacctcagcctcccaaagtactttaaaaaagaaatgaagatattatcagttctattcccagaatgagtgaatcaaaatctccaagaaaaggcctggagacatgcttgtcttattttgttttataaataacaccttcagaggattttgccagcatggaattctgggatctgcttgtgtagtagcaacatttgttaagcacctactgtgttgtaggcacatgactcaaagatttatacacataaggactctatcccttacaatagctgtccctaacctttttggcaccagggactggttttgtggaagacaatttttccacggactgggtggtggggtggttttgggataattcaaatgca

SEQ ID NO: 692399 - DNA, 1514 bp, Homo sapiens
ctgatttagtgtcttttgagggcctgtttcttgttgcttcgtgggatggtgtaaggaacaaagcaactttctgggccatcttttataaaggcactaataccatgcacaagggctctgcacttacgatctaatcacctaccagaggccccacctcctgatatcatcaccttgagagcgaggatctcaacatataaattttaggagaacacaaatagaccatagtcaccaacaactgcaaagtcaagtagatatgaggctgcacctctggggagcagcaagtaatgtggtctagctggggagaagggtaaggaaggaataatgtaggaggtgagcctgaagaaagagaggcaatggtcagatcataaagcctcaaatgcttccctgagaagtttgcattttattctgaagattataggagggcactgtagatttccraacatggctagttttgtattttacaaggattactctggtattaagatattagcaagactggggataagggaccagttaagaagagaaaaagaaggaatgaagatgccctcccttcatctccatctttttaatggaaagatggttgtgcttctacctgaaaatggaaataatgagaagaagcgactttcttctttgggaggtggaggatgaagagaaaggccaagttcaatgtgagtattccagtttcaaaggcatatacaacatgtaaattggacagtgagataaaaaggggataggagcttagagaaagtatggcttagaaatagatcattggcattatgatcatatgggtattagtcttattagttctggcaacctccatttctatcaggcttatgctgtatgagtgctctgttatgggtttgcctattttcactgttggtaagaatcatctaaggtattcactataagaggttctttttttttttttttttgagatggagtctcgctctgtcgcccaggctgaggtgcagtggcgccatctcagttcactgcaacctccacctcctgggttcaagcaactctctgcctcagcctcccgagtagctgggattacaggcgccagccaccatgcccggctgattttttgtattcttagtagagatggggtttcaccatcttggccaggctggtcttgaactcctgaccttgtgatccacccacctcagcctcccaaagtactttaaaaaagaaatgaagatattatcagttctattcccagaatgagtgaatcaaaatctccaagaaaaggcctggagacatgcttgtcttattttgttttataaataacaccttcagaggattttgccagcatggaattctgggatctgcttgtgtagtagcaacatttgttaagcacctactgtgttgtaggcacatgactcaaagatttatacacataaggactctatcccttacaatagctgtccctaacctttttggcaccagggactggttttgtggaagacaatttttccacggactgggtggtggggtggttttgggataattcaaatgca

SEQ ID NO: 692400 - DNA, 599 bp, Homo sapiens
ttaatttggcccatcccttcgtttcccgtaagggatacttttagttaatttaatatctatagaaacaatgctaatgactggtttgctgttaatcaatatgtgggtaaatctctgtttggggctctcagctctgaaggctgtgagacccatgatttcccacttcacacttctatatttctgtgtatgcgtctttaattcctctagcgccactgggttagggtctccccgaccgagctggtctcagcatataatatattgctaaataaaaaataaaatcaagctaaaaaagaatatgttggcatgatacaagttcaaaaatacctatatctatataagtgtgtgcagcaaatttcagtggcagattcctaagaccccagctcaagctgttgtataaaatagagactcttagggcattaatcgcaagtccagagggcatgagcggtttgaaaactactggtccaggaacttagagatttttraagagtcaggttttggtgacttccagccttgctccacacaatgtcagactcaccactacataccaaacaagttgtagaattcccagtattgtttttattccttcacgtgcagagggaaaa

SEQ ID NO: 692401 - DNA, 599 bp, Homo sapiens
ttaatttggcccatcccttcgtttcccgtaagggatacttttagttaatttaatatctatagaaacaatgctaatgactggtttgctgttaatcaatatgtgggtaaatctctgtttggggctctcagctctgaaggctgtgagacccatgatttcccacttcacacttctatatttctgtgtatgcgtctttaattcctctagcgccactgggttagggtctccccgaccgagctggtctcagcatataatatattgctaaataaaaaataaaatcaagctaaaaaagaatatgttggcatgatacaagttcaaaaatacctatatctatataagtgtgtgcagcaaatttcagtggcagattcctaagaccccagctcaagctgttgtataaaatagagactcttagggcattaatcgcaagtccagagggcatgagcggtttgaaaactactggtccaggaacttagagatttttaaagagtcaggttttggtgacttccagccttgctccacacaatgtcagactcaccactacataccaaacaagttgtagaattcccagtattgtttttattccttcacrtgcagagggaaaa

SEQ ID NO: 692402 - DNA, 600 bp, Homo sapiens
gatttgttcaactttcctaactcttatagaattgtttttgtctgtttcataaaaataaaaaatatgacctaggtttccaaatatgtttgcatagaattgagtttrtattttttaaaattctcagtagattttcttactttccattgacttcactaacattacaaaattgctactttctcctttttatttttatttaaattccctaaatcatttatattatttgttttttaaagaatttctttctcttttgtaactcactgattttcatttgtatctttattaatttttcatcctatttttcttatacttattgcgttacttttcttcccaaacttcttaagtagaattctcaatatatttatatacattttctccttttacaataatggaagtatttaataatataaattttatttaaaatattgatatccatattttgcattattttgtttgtttaaaaaatattatataaaatgatttcattcttcaaggaatatttcaagacagtagtattattaaattaagcttttgtttaaaattgtttgattaacttgtggttgtattgcattgtgtcgagagaatatttcctgacctacttat

SEQ ID NO: 692403 - DNA, 866 bp, Homo sapiens
tatatttttaacttcgattatagaaaattaatataaaacatgctttaatgactattgtcatcaawggaatgatatacaatttccatttttgaaaatgtttccaattctatattctttactcatgtatagaccttcatgctaaaatactcaatgtatgtccttcaagtcattaaatatgcatttatatacatatatgaggatccttgaaaatgcatacttcgcttttgtagcatcaaaaaattaacacagatgtttctccctttcccactgactggctgcagcatttaattcattaaatatttctgactttgtggtagggcctttgaccttgctccatcattattcttggtcctggaaaaccacattcatgatggaacatgtttttgtccacagcacaatatatatgtattttttctggttcagagaagagactgcagcctcagagatgtttatgtctcaggactttcttgggaaactagggcttttaaactttcatctacatggtgaggaaaagcaagggagtgtggggtggccacagacaaatgtggaaatgccatttggtgtcagaacatgcaagttatcttaaggcatgtcagggagataggagtagcccttgcagctctgtggagcacagagtctagctgggagaagcttgatgctgaggcaaaagaggagccgatgccgctgtgccactgagaggggccaagagcagccacaacagaaacaaagagcaggacacagactgaggaaccctggggagggtggcagagtctgcacgatgttgccaacaattagaggttttctccaagctcagaaacacggtgaacagaactgtcaattagtgtcagtacatgtcacagcttgaa

SEQ ID NO: 692404 - DNA, 1076 bp, Homo sapiens
aaggccagggggcggggcgacggcgaagccggagcccaaaagacttccggttgagggcgggttgggccactgctgtgctgagtgcacccccggaagtgagttggctgccagtagtgaagctcagcgtggtcccggcaggccttcgctccgtgtttgtggttcctgggtcatgcaaacggtgtctgcggctacttatattcagcttgaggtggtcataggttgaagtaatttatcgtatttaaaatgccaggaattagccgggcatggtggcgggcgcctgtaatcctagctactcgggaggctgaggtaggagaatcgcttgaacccgggaggcggaggttgcagtgagccgagatcacaccactgcactgcagcctgggcaacaagagcgaaaatctgtctcaaaaaaaaaaaaaaaaggcaggaatcccgcttcagtaaggaagaaagtgcaatattcagtgcaagtggagtagggaaagagggaaaggcgatttgtgcaaaaacaagtccaacctactctgccaacattagagaagccttccaggctgggcggggtccgtttgtaccttgtcagttctgctggaaaaaaaacgaggcattggggatgggtgttggtgccagttacactaagatttcgagaacacttttttgaagaatcagctttttggcaggtcttcctaaggtggatttcactccctttagttcatatgcctactgcttctcaaaaggcaggagaatttctggaatttctatcaagtgtttgtataatttgccgtcactacaacctctgctaacatatgcttcgaagtayagttttcattaaaatgaatgcatttaaaatattctcaatattcgtgtaatttcattcaatccttgttaacaagcatactcccttattcattttgccaatcccttcacctccttgattcctttctagttgtcaatcaaaactgccacactgtagtagaatacagtaagtggacttaggaatttgatagctggaaatgctacacataagtccctgagaagtgactgactagagtgaccagctcaattagtgacagcgccatgaa

SEQ ID NO: 692405 - DNA, 1287 bp, Homo sapiens
tataattcacgtatgaacaaactaaagaagaaaaaccatatgctcatctcaacggatgagcagaaaaaaagaacacttgacaaaattcaaccctctttaacataagaaaggatatctcctaaaagcctacagtaaggattagatttactgggaaatattagaagtattccatttagaacagggaacagataagaaatgtctgctatcactgcttctattaaatattgtgctagaggacctagtcctaaccactgaaacaagacaatgcaatgggataaaagttataaagtttgaaaagggagagaagaaaattgccagtatttgaagctgataaatagggaagcatattcagatactgcctctacctagccaccactccaaccaaagaacagtgacacatgagtatctggccaggctgaccagagatttataaacaatagaaatgaggggtgcagaatgaaatactggcttgtctgagtctgaaaatagcctatagttttctattcttgagtctttgacactgaagaagtgttagagaagggtgagtaaggcctggtaacacccatgtttccataatggaaagtgactctcaggcatatatgacagagctcccttcacccgcctgggctgctcatggttcccatgggtggcctctgtgatctgcaaatgctggaaatgtgctactctgcactcccacctgcacctgtctcaggtgtgttctgtagatcggtatcccccatgggcttttgtttcgtagaagtgttattttgctaaaacagttttgattctgtggcctggaccaagaagggaagggtgttctggcagtgacagagttggcacaaaaccacatcagacactttgttatcaaatgtggagatgacagaggagccatcggtgcatgtgtcgggaagcaggcaccctcctccaggctcctcgggaagacactgcaggaggggaggagggcggaggccccctcccartagctgacttgagggtggctctgccacgcatgcagggtgcagcaccaccttcaggcccaggctggccttacagaggctggtgtcacaggctgcttctgccaccagctcagcactatgggccactgaacttcctgccacccccttgagccctgggctccccacagacagagctgtgctatcagatgacctgtggattgaggcatcagcagccaggagtgtctctgaaatgggccaccctctggaacccttctttggctgaattgtttcaggatgagtgtcatttaatcaatctgcctaacgtcaggaa

SEQ ID NO: 692406 - DNA, 621 bp, Homo sapiens
cttattttcttgtaataaatattctaaaatttatatatactaaaaaccattatccatcaagcattcatcttaaaaagtttttgtaacaatagtattattgaaagcattaaaatttgccctttggaactgcccttagggatttggtgctttcttttagggcatgccacccacacggttccatggtgccaaacaatttttttttgtgggcgaatgtgctttttaagaactactggttcattctgaaccaagtctgggaaaggtgagtgacaaactccttgaagacaacgcctgaaaagaggtcattttggagcaaatattttaccctactggtagtaaactcagagaattctctttccccaagaggtgaaatcatttgaaaatatacaatgaaaacgatgggtttatatgaatatatacatcttaggcctataayggcttaagatggcttacaaggtgaactgagatgctcaaaatattaatacttgtttaaattgtacggctgatcatacagaggaccacaggtctctctccctacccctagccccactcccaaggataggttttgtgactgtatagtaagaaacaaaacactgagtttgataatacagttgcacataagta

SEQ ID NO: 692407 - DNA, 582 bp, Homo sapiens
tccctaataaataccctgtcatacatacatatatcgtattagttctgtccccctggagaaccccgaccaatacgcctctggarcctgtgttcctttgtcctctaaacaagcttctcatcctgaacctgttgcagaacaataccatgtggcttgtgctcctgcaatgctgtgccattcactgcagtctgctggaagcatgccatcgtgagatagcacagttcctcaatcttcagcgcatcaaagcttacccctctttttgccaacaacactttaagatgatttcatcttcagtttaaaaatgttgcgacctttctgtttatgagtttggcttgcttacatgcaaaagttataaaggaaaaaaaagcagcacaatacgtatttgttaaatttatggaaacattattttatgggtaagttacagatattcgcacaatatataaaagaaagtcaccttggtaaagtgcccatgaggacagcgaagggcattctctaaaaatgttaagaataagttggctggaatgggacccagatgtacgataccaagtgtaatttatgtgccaaggcaggacccagagtgtgaag

SEQ ID NO: 692408 - DNA, 582 bp, Homo sapiens
tccctaataaataccctgtcatacatacatatatcgtattagttctgtccccctggagaaccccgaccaatacgcctctggagcctgtgttcctttgtcctctaaacaagcttctcatcctgaacctgttgcagaacaataccatgtggcttgtgctcctgcaatgctgtgccattcactgcagtctgctggaagcatgccatcgtgagatagcacagttcctcaatcttcagcgcatcaaagcttacccctstttttgccaacaacactttaagatgatttcatcttcagtttaaaaatgttgcgacctttctgtttatgagtttggcttgcttacatgcaaaagttataaaggaaaaaaaagcagcacaatacgtatttgttaaatttatggaaacattattttatgggtaagttacagatattcgcacaatatataaaagaaagtcaccttggtaaagtgcccatgaggacagcgaagggcattctctaaaaatgttaagaataagttggctggaatgggacccagatgtacgataccaagtgtaatttatgtgccaaggcaggacccagagtgtgaag

SEQ ID NO: 692409 - DNA, 1146 bp, Homo sapiens
gatttttctttaattctgaaacaaatatatatgtatatatttaaggtcaggatactcacataaagaagtttaaacaaaccatgtttacatcacrcttttaaaaaaatatggttaaaatgaactcaaaaaatcaaatctctgctgacaagttttctctgaactgtgaatgtaatattggcagttgttatgagaagcagttctatgaaattgagttgtatgggtgtcgtaagaatactgttgaagacataaaactttttcttttgtacaaagacctccagagtcatccctttcaaatgctttttaccaagagctgctgtacatttcttgagcaattgctcacctttaccgactctgttattttgaacctgaccatgttgcctttcttttttttttttttttggttgctatgaagctgtggttgacactattattgtccttcagctttattctcccttcatgcactacaatagaatttttgctacaatagaatttatagaatttttagcaagacccatgtctgtccagaatgaggattgcgttttccagcttctcttgcagctaggagtggcacatcactaagttctgggtgagatgagatgggatcagaactatccagtggcaatttctggtaacgcttcttaggaaatgattgaatggtgattctggttccttctttgtaccctttctccagtctcctgcccagaataggaaagctgccatcttaaactatgggaataaggttgacgttgagaaggcagaggggtgagctggaaggagcctggatccctgagaactgggtggagttgagctcccatatcaattccagactgcacattttctaaacctttctgtgtgagagaaataaactcatatatgttgaatctctgttccttgaatctaatactaataaacacagagcttacggaaaaatttgacaccagtatcaggctataattatatatattttaactcattttcttggctcctttttgtctcatctttgatttttcattttcttttgcttaatatagatgtaagtagtttaattaatgcaacaaaatttagtttaaatgtaattaaatgttatgttctctaaactttcataggcttcctaaaatctttgaaataagaccagatgtaaactaa

SEQ ID NO: 692410 - DNA, 1146 bp, Homo sapiens
gatttttctttaattctgaaacaaatatatatgtatatatttaaggtcaggatactcacataaagaagtttaaacaaaccatgtttacatcacacttttaaaaaaatatggttaaaatgaactcaaaaaatcaaatctctgctgacaagttttctctgaactgtgaatgtaatattggcagttgttatgagaagcagttctatgaaattgagttgtatgggtgtcgtaagaatactgttgaagacataaaactttttcttttgtacaaagacctccagagtcatccctttcaaatgctttttaccaagagctgctgtacatttcttgagcaattgctcacctttaccgactctgttattttgaacctgaccatgttgcctttcttttttttttttttttggttgctatgaagctgtggttgacactattattgtccttcagctttattctcccttcatgcactayaatagaatttttgctacaatagaatttatagaatttttagcaagacccatgtctgtccagaatgaggattgcgttttccagcttctcttgcagctaggagtggcacatcactaagttctgggtgagatgagatgggatcagaactatccagtggcaatttctggtaacgcttcttaggaaatgattgaatggtgattctggttccttctttgtaccctttctccagtctcctgcccagaataggaaagctgccatcttaaactatgggaataaggttgacgttgagaaggcagaggggtgagctggaaggagcctggatccctgagaactgggtggagttgagctcccatatcaattccagactgcacattttctaaacctttctgtgtgagagaaataaactcatatatgttgaatctctgttccttgaatctaatactaataaacacagagcttacggaaaaatttgacaccagtatcaggctataattatatatattttaactcattttcttggctcctttttgtctcatctttgatttttcattttcttttgcttaatatagatgtaagtagtttaattaatgcaacaaaatttagtttaaatgtaattaaatgttatgttctctaaactttcataggcttcctaaaatctttgaaataagaccagatgtaaactaa

SEQ ID NO: 692411 - DNA, 668 bp, Homo sapiens
tctcctgaaccattagaaaattctaataataaaaaacacaagttgtcaagttttgtcacgtgtcaataaaacactttaaccatattagaggtactgtgcttcaatatgactgatgtgttcagttaaaatgctgaagtttatgaatcttaccgtaaagcttgaagaagaacagtggagatacattacatgctatctgtgaaaaatggtaaaaataaaaagctaaaatgaaaatattgaatctttgagagagaaatgcaggcaccgaaatgtgctatcatctcatcactattctctataggcttgtggattagacaagtcrtatatgtctaaaactgcatagagggtgtttcagaactagagatgtaaaaaacttactttaaaataagaatagagctctccagtaaacctaatcattctcacagggcagatcggctttaaacgaatgtcacacttatctatatatagtccacagttccccaggggtgcccaagccccttaccccacaagaagcttgatatatatttcaacacacagaataacatatactttgccctaagacttccttttatgcttgctaacttcaggatcctcacaatggctgcaaactcctaatatttcaaagactgtctacattaatatctttcaaagcctcaaaccctggcaaggaa

SEQ ID NO: 692412 - DNA, 273 bp, Homo sapiens
aacatacaacaaatatctatatgctcctcatacagtcaaagagaaataacatgacctttatatttcagaattgctctttactcctctgggattccatcccatcgtgtccaccgctgcagtaattactgtcctaaattttgtgtccctgattaccttgcttttcactatacttytattgcatatcttagtatcacagaaaaatgtattatttggttttttgtttttcaaatttacgtaagtgaaataatgctgcatatattgctcaaaatttag

SEQ ID NO: 692413 - DNA, 598 bp, Homo sapiens
ccatctaactcacttcgcttgtccaaaatgctaaagtttcagtgaccagaaatttgttatattccatttatacaatgctatttttgcttcagcataaaactctgacatggtgccaagttgttgagtgaggtctaatcctcccaagtgggatggattgagcaacttgtgagtgataacattgatccctggataccattgctccattgccttataatatgcttggccaattaatcaggggtttctagctagctactggattgcttgtctttcgctatcagggagcaaattttagctatctcagtaacaaaatttgtgtcttcatttacatatatgttcaaaatgtaattacccttgggtttatgaagacattgatttcaaatctgagtttttaattcacctggggagaattttcaattgtaacaaatcacttgcaagtttcttgcccctttatcgttggatgactgagrtatcatgtgagttttgttatctatctctaagtgctttccttcaggtggatttatatgtaggcacttataggtggctagcacgatactagaaaccccccagtgaaggcagtaagggttgttatttcttctca

SEQ ID NO: 692414 - DNA, 1402 bp, Homo sapiens
gtgatcagtcattacgatgctgatgacaggcatttttcactgttttcagttctacttttttttttttttaattcactcacttaacatcytgaagactcaaatccttgaatcagtccactgagcaggaaggacacgggcagcaagcagacaaaccagttcctcagcttgctgtctcaaggttgcaaacacaaattgaatcctcctatctattatttttgcaagcattttttaaagaagaagttttatgggagtggaagtaaattttccgaagccttgacacgcccagtgtcagatatacatccattcatttaatatttactgagggtgtaccatgcacaaagccccagggaagaatatttaccaccttgagaatggtttgcagtccagctacagacatggatgtgcaaacaaccaataatgccaagagatgctgcgtgactcctcgagcttacatctgaatgcatcctgagctactggtgaggaagaactctaaatattgcctagcatgcaggactctcttagaggccctatgtttgtctgtgcccataacccagcttcagccccagggaaacttggtctttttgtctttattttttaacaagtttgtattttgtgaagttttcttctttctccttggatcagagtatattgtatatattttcccttttccactatagtggaagctaaaacagtaggaatggcagtgtctctcaatctcattcatatgtataaatacagagtgcttagtgcagatgtttgaatggatttccccattaacacatttatgtaacagcataagtggttcagtagcttttgttggaagaagagattgattttcttatgaaaggagtaaatcccctcatagggaacactttacccaaaagtgataaaactaacttgcccttagttatgtgggaagtgtggctctatccacttcacctgttctcttccttccttgaaaccaatcttgcaaaactgattctaaaaatttattcaccattttcttctcatctatcgaagtttgaaaaagagatggaggttgagatagatgacattttttcttctgaaactggaaggatttgtctataaaacaggttgtgtaagtgatggcttctcaaatttagcaaatcacaagtcaaggagcatcagactgggaaaggatctttccttacatccatgaatatttttacaatggctatgatcagttgggctatttttgggctctcttggtgatggagagctccctctctttcaatgtgcacattctctgacacacagggaaaaatcaagcaagttggagccttgtgacaaatgagccgcagttatcctgcctcatccctttgcagtttcttctttgttttactcaaatagggaagtatcatttaaaagagtaccaagcata

SEQ ID NO: 692415 - DNA, 1402 bp, Homo sapiens
gtgatcagtcattacgatgctgatgacaggcatttttcactgttttcagttctacttttttttttttttaattcactcacttaacatcctgaagactcaaatccttgaatcagtccactgagcaggaaggacacgggcagcaagcagacaaaccagttcctcagcttgctgtctcaaggttgcaaacacaaattgaatcctcctatctattatttttgcaagcattttttaaagaagaagttttatgggagtggaagtaaattttccgaagccttgacacgcccagtgtcagatatacrtccattcatttaatatttactgagggtgtaccatgcacaaagccccagggaagaatatttaccaccttgagaatggtttgcagtccagctacagacatggatgtgcaaacaaccaataatgccaagagatgctgcgtgactcctcgagcttacatctgaatgcatcctgagctactggtgaggaagaactctaaatattgcctagcatgcaggactctcttagaggccctatgtttgtctgtgcccataacccagcttcagccccagggaaacttggtctttttgtctttattttttaacaagtttgtattttgtgaagttttcttctttctccttggatcagagtatattgtatatattttcccttttccactatagtggaagctaaaacagtaggaatggcagtgtctctcaatctcattcatatgtataaatacagagtgcttagtgcagatgtttgaatggatttccccattaacacatttatgtaacagcataagtggttcagtagcttttgttggaagaagagattgattttcttatgaaaggagtaaatcccctcatagggaacactttacccaaaagtgataaaactaacttgcccttagttatgtgggaagtgtggctctatccacttcacctgttctcttccttccttgaaaccaatcttgcaaaactgattctaaaaatttattcaccattttcttctcatctatcgaagtttgaaaaagagatggaggttgagatagatgacattttttcttctgaaactggaaggatttgtctataaaacaggttgtgtaagtgatggcttctcaaatttagcaaatcacaagtcaaggagcatcagactgggaaaggatctttccttacatccatgaatatttttacaatggctatgatcagttgggctatttttgggctctcttggtgatggagagctccctctctttcaatgtgcacattctctgacacacagggaaaaatcaagcaagttggagccttgtgacaaatgagccgcagttatcctgcctcatccctttgcagtttcttctttgttttactcaaatagggaagtatcatttaaaagagtaccaagcata

SEQ ID NO: 692416 - DNA, 601 bp, Homo sapiens
ccgcgtgcacgcgcaggtgcagctgtggggagactggcatgggcacaggcaccatggtccctctgcccccacccctgccctgccccatcctcccgggccccacctcggagatgagcagcttcaggaagttggccttgtgccgcagcgggtcatgcaccaggccgtcacagaaggacaccacgccatgggggaagttgtgctgggccagccacgccaccacccgctgcttctgcatgtcgggccggcccgtcacgtagatgatgaggtagcccaggtcctgccagtgcctgggggtgaggtgtcgtctcatggycaccccttcctccctcctgggcctccctgtctcctgcccagccagggcccacttgggccattggaaagcacatctctgattgagctcagacagtaacgacgacaatggttgacaatgacgtgctgcagcaggcccttgggtgcccgcactgggcggcagatgcccctgctgctgtgtccctggcttaccagcctcaccttccagatgcgggaattgaaagccgacattgagaagtgacatcgcttgcccaaggtgacacggctaataattgggggtgctgggctctga

SEQ ID NO: 692417 - DNA, 569 bp, Homo sapiens
taaagatctaaccacaaatatggatgtgcctctgagtgtctccttccaaagagaaggaaatggagctctactaccttttatcagttttagaagtttgaatgcttttgtatatgaaatcaaaaactattcttccttagttatttttcataaattcatgacaaagtgaacctacattagttgtttatatctttaacagtagtccaaaatcccaaatgaaggcaaaattttactggtaaattagcatttgatttgactcaaaacatgtctcactaaacaatcttaatatgttgcattrgatgaatggtgctgataaatttacctgttgaggaacgctcctaaataaaacttctgaaatgttttcccaatttttttttccttctattctctgtatagaccatgtggtaggtaggtagaataatggactcccaaagatatccatgtcttttttttctttttttttttttctttttttgagatggagtcttgttctgtccccccaggctggagtgcagtggtgtagtctcagctcaatgccacctctgcctccaggttcaagtgattctcctgcc

SEQ ID NO: 692418 - DNA, 590 bp, Homo sapiens
ttcccatgttgctttctgtagcagtgcagcactgattcccacaatcactttcttcccccttccccaagtacacagcttctctctccatgccatactgtgctgctgggagatgggggagggatggtattggcaattcaagactgtctttcctaccttcttcagtgcctctttcctttttatgatgttaaaagcaagtactgtgatagcttgcctgatttttgattcttacgaaggtgctttcttgtgtagatagttgttcaatttgtattcctcttggggctatggccattggagggttctatgtggccatcttgctttgcctccacttttccgttttttattaaacaaatattttattaggctttgattatttgctatgctttatacaagtctctgggtacatrgtgattaataaaatagtcacggaccctgccttcatggagttatgtgcaaaataagcaatataaaagtaaaacacagttcagtatacaattagaaagtataatgtgtgccagggaggaacagaataaattttttgatagtcataaaaaaacttcagccaaattaaatttaaatgagtttaattgagc

SEQ ID NO: 692419 - DNA, 596 bp, Homo sapiens
taggttgatttcatgaattcactattgtgaatggtgctgcaatgaacatgaacatgcatatgtctttataatagaatgatgtatattcctttgtgtatatacccagtattgctggcttacatggtacttctgcctccaggtctttgaggaatcatcacactgcttcccacagtggaagccatgatcctcagcaaaccatcgtgggaacggaaaaacaaataccacatgttctctcttataagtgggagctgaaggatgagaaaacatgaacacatgacggggaacaacgcacactggggcctgttgtagggtggggttgggaggagggagcacatcaggcagaatagttaatggatgctgggcttaatacttggtgatgggatggtctatgcagcaaaccaccatggtacacatttacctatacaacaaacctgcacatcctgcacatgtattgataaacttaaaacttaaaaaaaaaactcaaaaaggaatcaatgatctaaatataagagctaaggctctaggccacaaagaaaatctggcattgacccaatagcacttaaaaaaaaaaaaaakaaaaaaaaataaaaaaataa

SEQ ID NO: 692420 - DNA, 857 bp, Homo sapiens
tatcaaataaattcagtcagggctcaataattcattctaagataaatactatactctagtactcaagtgatctcatctaccaagtcctctgcctactttccaactttggcaagcgtcaactttaagatctgcgtctctccttcatggtttcattcatgttaacatcgggcaaggcaaaacatatttatttcaaccattggatgtgaatcttacacagttagttaacctctttgcctctctgtgacttagtgtggtccttttaaaatggaggaaatgacaccccaggaggctttgtgataattaaatgaagaaatgtatataaaacacattccccagaaccttatacgtcgtaagcagagaatcgatatcttctcttagtggaagtattaaattaggtgattatgtggtaagaaattggcctcatcttttcataataatgtagtatgtatacaagaatgttgtggaaagtagctaggcagccttggaacacggtgaaggtcaagtatatgaccaatttagctgtgagcgatggtaactggcttgctgtatgaggctgaagaaatattttgaaaacacacaagggaatcagggaagcactgtggcttttgcagcatgtaatcagatgctcatacaaactctgccatgaatactgcaatacagccttayaacaataccgtgggggtttctttttagacaatcgtttctctctggttcaatgaagactgtcaaaatgccccaggatggccaataagacattgaaagtgacttaagcaagagtttctgagagtttgcagtgctatgcacccacaaaaattaaacagagggaaagcacgcatatcttcttccttctctataaa

SEQ ID NO: 692421 - DNA, 595 bp, Homo sapiens
atttttatgtagtatacggacatcatgtagttttaaaaacatataaataggcttataacatatattattcttcaaattcttttatgacttagaaatatatgtcttagagacatttctatgtcaataactatggattatctcatttttaacttttgcagaggatttcatagtacttcagcttcataataatttaactctttcattctgataataggttacttctaactaaaatgtaataaacatctttgttgtatattttagatgtactgaggggtatttttggtaaaatggataactagaaatgtaattcttaaatcgaagggtatgcatacatattttacattctagtaggtacttttaaattatactctaaaaackggtattaaattacattcccaaaagtgtatgtgtttctccacaccctcaatgacactggatatcatcattttctataataagtttattcaattcaatgtgggtaacaacaacaaaatcaatgttttaatttgcattttcttgactatctgatgctgaaccagtgaagtttatcatccttttatatacaatatttctgcttctgcttccctgaattgtc

SEQ ID NO: 692422 - DNA, 624 bp, Homo sapiens
ttgagtagatactctaaacttgagaaaactcattgtcataatgggtagcatttagcaaacccttacttcatgcctgatatgctataccatatttaatccatataactgggactttccttagacttgggcaaaaggagcctgaggtttgagtcctgtattttagagatccctgaacatcacaagtataaaaacaaaacaaaaacaaaacagataatacctttgttatattctttggcacctttgatgttagatttactgttagattagatcaaggacaggcactcatcgaggacactgcatgggcctttagctttgaacatctgctctcacaactctagagcaatgtttttccacatatcctctctgtgtctctgatttgaatgatggtgcttccagtgctgggaggatgtgttgattgtgctgctattgacctcagagatgagccatggtttagagtatgggaagaatttaagtggtagaaagattcagataagagaaaagacactgattttgagtcaatatgtaaaaaattaataaaacatttccccacagagakcatgagtgcaaagatttttgcataataaacattgttccccagaagtattgaccttcatctttttcttt

SEQ ID NO: 692423 - DNA, 644 bp, Homo sapiens
tgatccgccygtctcagcctcccaaagtgctgggattacaggcgtgagccaccgcacctggccaggaaaaggtaaattttttaagatgacagtgaggacacttggtcaagatgaaacaatagtaagatcagggactatgtatgatgcctatatgtgccaggcactgttgtaatcattttatacacactaacttattcaatgaacacatagacacaaacccacacacctttgagctatatcccattgtgatcatcctgaggtacacagaaagtgctttgttcttgtcacagagctaggaagcagcagaggcaagagttgaaactagccagtctgtagagactcgcatatttcatgccaagatgtttggacaagagaggaactgaagcatgctaataatgtgattaatatccctagattctgactaagtttgtggaagttatttataaggaggaaagctggagaaccaaggcaacaggtcttcttggggtcagatgcagtagctcaagatagcagaaagaggtcagtgaagagactttgatctagaacactgagacctggtcactagcttcagtaagagtggacatggggaggactcactgtcacccttctgtctagtttaggtgaatgagtgagaatgaggagtt

SEQ ID NO: 692424 - DNA, 644 bp, Homo sapiens
tgatccgcctgyctcagcctcccaaagtgctgggattacaggcgtgagccaccgcacctggccaggaaaaggtaaattttttaagatgacagtgaggacacttggtcaagatgaaacaatagtaagatcagggactatgtatgatgcctatatgtgccaggcactgttgtaatcattttatacacactaacttattcaatgaacacatagacacaaacccacacacctttgagctatatcccattgtgatcatcctgaggtacacagaaagtgctttgttcttgtcacagagctaggaagcagcagaggcaagagttgaaactagccagtctgtagagactcgcatatttcatgccaagatgtttggacaagagaggaactgaagcatgctaataatgtgattaatatccctagattctgactaagtttgtggaagttatttataaggaggaaagctggagaaccaaggcaacaggtcttcttggggtcagatgcagtagctcaagatagcagaaagaggtcagtgaagagactttgatctagaacactgagacctggtcactagcttcagtaagagtggacatggggaggactcactgtcacccttctgtctagtttaggtgaatgagtgagaatgaggagtt

SEQ ID NO: 692425 - DNA, 644 bp, Homo sapiens
tgatccgcctgtctcrgcctcccaaagtgctgggattacaggcgtgagccaccgcacctggccaggaaaaggtaaattttttaagatgacagtgaggacacttggtcaagatgaaacaatagtaagatcagggactatgtatgatgcctatatgtgccaggcactgttgtaatcattttatacacactaacttattcaatgaacacatagacacaaacccacacacctttgagctatatcccattgtgatcatcctgaggtacacagaaagtgctttgttcttgtcacagagctaggaagcagcagaggcaagagttgaaactagccagtctgtagagactcgcatatttcatgccaagatgtttggacaagagaggaactgaagcatgctaataatgtgattaatatccctagattctgactaagtttgtggaagttatttataaggaggaaagctggagaaccaaggcaacaggtcttcttggggtcagatgcagtagctcaagatagcagaaagaggtcagtgaagagactttgatctagaacactgagacctggtcactagcttcagtaagagtggacatggggaggactcactgtcacccttctgtctagtttaggtgaatgagtgagaatgaggagtt

SEQ ID NO: 692426 - DNA, 644 bp, Homo sapiens
tgatccgcctgtctcagcctcccaaagtgctgggattacaggcgtgagccaccgcaccyggccaggaaaaggtaaattttttaagatgacagtgaggacacttggtcaagatgaaacaatagtaagatcagggactatgtatgatgcctatatgtgccaggcactgttgtaatcattttatacacactaacttattcaatgaacacatagacacaaacccacacacctttgagctatatcccattgtgatcatcctgaggtacacagaaagtgctttgttcttgtcacagagctaggaagcagcagaggcaagagttgaaactagccagtctgtagagactcgcatatttcatgccaagatgtttggacaagagaggaactgaagcatgctaataatgtgattaatatccctagattctgactaagtttgtggaagttatttataaggaggaaagctggagaaccaaggcaacaggtcttcttggggtcagatgcagtagctcaagatagcagaaagaggtcagtgaagagactttgatctagaacactgagacctggtcactagcttcagtaagagtggacatggggaggactcactgtcacccttctgtctagtttaggtgaatgagtgagaatgaggagtt

SEQ ID NO: 692427 - DNA, 667 bp, Homo sapiens
cataaaaataataagtataatttataaaagagggaataaaattgcaaagtacagaaaaaatataactgtagtagtcatcaaagaaatgctaatttaaacatggacacaatttttcattcagcaaaattattttgcaaccttttaaaaaataatatgcataataatttttaaaacatgcttaaggaatcaatcaataattataaatatataaataggatattagacatctaaaacaaacttaaaaaaatatataatgtagaaaaaagtactatatactaataagtgaaaggaactgtagaattataaattactatacgtatcatattatgaatatactataattatgttataaatgttaaaagtttaaactagattgaagtaactataccaacatgttcaattagcagtgtttaagttaacggtaggatttttactgtgtgtgcgtgtcgatgtgtgtgtgaatgtttgtgtggaagtcacgtctatcttttttagtaaaagcagttgcttttatcagaacaattcttgtcygaccaaatcaggaaactccaaaattcagctaaaatatgacatatgcaaaaaacaataggtgagaaaatactttccaaaaatactttatgtaagtggaagtgataattgttgtctttgcaatgatcaagaatgagcc

SEQ ID NO: 692428 - DNA, 631 bp, Homo sapiens
gggtagacttttttttaataatggaagaaaattccgtagrgctgggggtgagtcgagagtggcagggagtcaagttaccattcattttctcttttatttctgtttcctccaggattggctgttctgtttttataacgctgatgcttttctttcatggtgttaatattttttcctcagatatctggtggtttatggatgagggatgaagttggttagtatagagagctgtcgagggtttcttctgcagtgttttagcccccttttccccacagacctcttctgctggattggtttatgaccatgggctctctgtaggtaggtgaggtgttagatctcacttttgagtgggtggacagggagcaatggagaccccccatttgccatagtagggcctcaggaaatgttagagagtgttgtagaaggagtagcattagtggcgtgggcagaggatcagtggtgggcaggctgtctgctagtgtttactatatgccctgggaaggttttgggagctgtggcttccattgaaaagttgtagagggaatgggaattgtcagggtggagctagcccagacttatggcaaggtgacaacatggggacctatagaatgctgaggacacagaaagttggttt

SEQ ID NO: 692429 - DNA, 1962 bp, Homo sapiens
aagtgagtcctgcattttagaccactcataaaagtcacagcatttatctttcagatgagatagagttaaaacaaacaaacagaaaaagaagcattctccagaggtccaactactccaaacgagacacactccctcttcctcacaccactctcagtggaatgaaaagagggtctcagaactcagcagggtcctgggaagctcccagaatgagctctttccatttctggaggattctggcttctagcacactaccatgcttttcggcatgacttcagccaccattctcagtaatttccatatctaatgatcctcaaatcccctctgttactttatctcccttccatccaatgatattttcttccacctgcttgaatcacccatttctctggtcaaaatcttcattttgttttcattatcaatagctacaactttatgcacctcactcttcgatgaccaaccccactccttttctacagttccccaactctaatgactctttggccctaccaggccccacattccattctgccaacacctctttcttgtccccattgccctcgtgcccctggtccattcctggatgatctttcccttgaatacccactcaactctcttctcttctcacaatctatcatatattccactggcaaaagaaaaaaaaatctatccccagccaaattcagtgcttcagtcctcaggctgagctcagccctcctgctctcccacccctcaagagcatcatccagcaattctctcttttcccctctatcggttcattcctatcagcatgttattatctgccatcttaaaaaacacaagctgttcctgccataagtacaaaaccccaaatgcaatcacgaacagacatcaggcaaccccaaaattgagatagatagtctacaaaataagtgatctattcaaaaatcatgatgaaataaaaacaaagaccgttccagaacaaaggaaactaaagacaggacaactgaatgcaatacatgatccaagattttcttttgctgttaaggacattattagaacaattggcaaatctggaaaaagtctataggttaaataattctattgtattagtgttaattttctgattctaataattgtactgtggttatgttcaagaatgaccytgtttttcagaagtatacagtgaagtacagtcagcctttcgtaactgtgtgttaggcatccttggattcaataaaccatcgattgaaaaaatttagggaaaaaaatggatggttccatctgtgctgaacagggagagagggagggaagaaaggagagaggaaagatggaagggagggagggagggagggaaggaaggaagtaaagaaggaagcaaagaaggaaggaaggaaggaaggaaggaaggaaggaaggaaggaaggaaggaaggaaggaaggcaggcaggcaggcaggcaggcaggcacgcacgcatggtgattaacgcctataatcccagtatttagggaggctgaggccagaggatggcttgagcccaggagtttgaagctcaacgacagagcattttttgtctctaaaaaaataataataataataaagaaggaaaataaatccatatctcctgtctccgtttaggttcccctgcaacaaggacttgtatataggtggcttattcaggagatggtcccaggaagaaggagctgaggaggtggaaagaatgctgcagcgattaaaactggccatttataaactataacaacatatgaaatattaaaatatggcgctgacttttttaaatcagggagcacacgctctgaacaacatcactgcctgtatataaaatatgtacacagacagatgagggacgttcgtggaggtgcagaagctcctcttgtttcaaggtaacattattgtgaggtttttttaaatccaacaattagtaatttttatttcccatttaaaaataaggtaaaaaaacaaca

SEQ ID NO: 692430 - DNA, 688 bp, Homo sapiens
tatggaattgttcaaagacaataaatatataagtccacacatcttaagtcctcaagatggataaatatgaagaaacattccaggtgttgtagctcatgcctgtaatcccagcactctgggaagctgaggcaggtggatcacttgagctgaggagtttgggaccagcctgggcaacatggcgaaaccccacttgtgcaagaaatacaaattagccaggtgctgtggcattcacctgtagtcccagctacttgggaggcaaagtcaggagaatcacttgagcctggaagcaaaggttgcagtgaggtgagattgcaccattgcactagaaatcagttaagaagatgcaacaaccargtaaatccctaataatgcaagaaaatgtcacactcattgtgaaattttgtgacatttttctcattcactcttcatccccttcatggcacaatatgccactgtcaggaagatgtgtatcaatttcaagttcctccctcagtatacaagggaaaaaatagaacttgctggcaatatttggcttgcctaggggctgccgaagtgactggtttctgtcttgcctgatgtagagcacagatgagaaaagtggcatagtttggatgccaggttggaggccactgaaagcagcagtcagtcactgtggcatgttagagctgcagggagtctgcagacctgc

SEQ ID NO: 692431 - DNA, 1186 bp, Homo sapiens
gtgtgaaatatacctagagctcggcatagaggaaaatttattgtcttaaaagtacctattagaaaataagaaaatctgaaagtcaagaacaagaaaaagaacaacaatcacactaaatttactagaagaaagaaaataataaagataaaaaataaattaataaaataatatacatatttagtaaaaatattttttttaaattccgtttcttaataagactagttatatttytgtgacagtgcaagccttttcacagagatcagcccccagcaagggtctgtccaaagaaagtagagtggttaagcttacaggatccagagtgagacttcctggatttgcattcttgactttgatgcttaatacttttgagacctatgctaggaataaaatctttctgagcctcaattttctcatctgaaaatgaaatcataatggtacctatctcacaggttgaatgaggattaaacaagataatcatagaaagcacaataaatatttgcaattatcagtatcattgagacttctgaaccacaagcctgttgccactattgcatatcactctctgtagcctgtttctgaaaagagtcaaaagtgggcaataataagtgataatgaggacaggtagtataggagaaagttaaagtgtaggatgagtactcaacccagaagaacatggccaactcattggagaagttaccatcaacccaatactgctgctatacagaagagttttatagtgtaatctgtagaaaatgcaaaggcccatcttaccatatgtggatttgatactgagagctacagagggagtatctctggcagcctctaaaagtagcagtttaaaaaacagcatgaaataagaaaaggcaaggtcgtaatagccacagaaaaggaatgagaaactcccatttcctgtccaagtccctgacgtccaagatgcaggctttctaaggagaagctgataaccccactgtgatggagcagtgtcatggcatgctggaaaaccagggcagaagataattcccaaggagagatggaaatagacaaccagctctagagtaaaaaagcagaggtcagaagtgcaagttttacatgctggcatctttccaaaaagtagatctctggggaacaggaggactccctgtgaatcatacagttatgagtttgtaatatttatattttagggaat

SEQ ID NO: 692432 - DNA, 638 bp, Homo sapiens
cctccttcctgaagtggcagagcctaattttcctctccttgagtgtgggtggactcagtgacttccttctaatgcagaaagtagaaacaagaatatgtgacttctgagactaggtcatgaaaggcaccatggcttccttctctttcctggattactcactgcaagggaaagccagctgccatgttgtgaggatactcaagcaacccagtggagagatggtgagaaactgaagcctcctgccaatagctagcraagaaacgaggccttttgccaagagctgtgggaataagccatcttggaagccgaaccaccatccccagtcaagccttcggagaactgcagcccaggccaatgttttgtctgcaacctcattagagaccctaagccagaaccacccagccaagctgctgctgaatctctgattcacagaagctgtgagataccaaacgtttgttgttttaagctactaagttgtgggtcattttttaaatgcaatgatgggaaactaatacacaagtcaggagccacagccttcatcgacaagctgagtgggtaggtgagaggactgaggcaggcgtggtacccaaagacctggacagagaaccagcatttgtcaggatggagtgcagtgcttggat

SEQ ID NO: 692433 - DNA, 814 bp, Homo sapiens
ggtgatcctcccgcctcagcatcccaaagtgctgggattacaggcatgagccactgtgcctggcctcattttaattttaattatattaactttttgagaccctttcttgtttattacctagtacctatactttaaattttccatttttgctcatttttactatcaataaacacaacaacatattcaaacaattgcatcaacaggctatacaatatgagccaagtggaatagagatacttcaaaaatggggctgctggctggtagtttatgtcacctcatgacatcccaacatatttgccagtggatgtgaaaaagtccagatttggtgaagaaaaatcaatttaggaatgtcaaagtccaaacctataacagtggtgatggttcaaaagccaaaaatccttgaggctgggacgtatgtctgggttcatgtyaatgatcttgttggaagagcaatttgttaccatgaagtaggagacagatagtcttcactttgataacagacccattccaagagagctggctataaagaaactattcatagtgtgagtcacatttttttaaaaattccattataaaactaagacggtcttctaaaggaaaatggagagctttgaaaagttttggtggatagggccaggtctttgtcatgctgggattatggtgagagagatttgaaagcacttttagtaattgctgttccttcctgtagctgaagcttcaaggggagcttcttttcttttttcttttttttttaaacacaagtttccacttttattagttttatataatgatgcaccaaggttcgtcttgggcc

SEQ ID NO: 692434 - DNA, 1125 bp, Homo sapiens
ggaataagaaaatgtaggtcaaatctctatttaacggataaacatgaggacgtctatgtttaacaaaaactttctgttccagcagataacctatttattacaaatgttcatatgaattttttactataacaaagaaatatgaatggctattgggatttactggtaatttaaaatattccttgtttaatataacatacctgtctaggactcattctaagtggggtaccttgtaaacaaacataattgattattcctttgagcattttctcccaggactttgtaaagtacttctaattccatttgaaattacatatcaagttatggtcaaaaccccattgtctctaattcccacaccttttggttgaatcatatgaaattaccatttcatagataaarcaggtcaaatattagcaatttcatatggttcagtctaatcacttttccaatgagtgggacaactcttttgcaaagggcaagagatccatagaaaagggattggttgttgatgtgctaattttaagtcatgcattcataagtttaagaaatatcttagtaatgaatctgagccagagtatacattgacccttgattaacaagggtttgaagcaagcaagtccacttatgtgcaaattttctttcatctctgccacatctgagacagcgagactaacccccttcttcctcctcctcctcagcctatacaatatgaagaagaggatgaagacctttatgataatccacttccacttattgacactagttaataacttatttctcttctttatgattttcttaataacattttcttttctccagcttactttaagaatacagtatataatacataaaacatagaaaatatgtgtcactcaactgattatgttatcagtaaggcttctcctcaacaataggctattagtagttaagttttgcgggggtcaaagttgcataggcattttcaactgcgtgggtgtggggaggagttggtgccccgacccctgcattgttcgagggttgactgtattgctttggtggccacggcttcccatggactgcttgtggtccatgcagacaggcctctttgcgtttaacacaaataataaaaataatcacagagaccaactt

SEQ ID NO: 692435 - DNA, 610 bp, Homo sapiens
ggatgtgctatggaaaaaaatactgggaatactttctgaaataggatgaacaggaagaaacagatgtttgcaccgaaagagagtagtgaaaattttaagcaaatgttaagattttgaaagaatgtaagctacagatacactgctggatgtcactagtgttaatactggggaaatagaatctgtggagccagtttttggtttggggtcaaaaaacaacagggcttcttttcttgctgttgttgttttgactggttttggtcatgacaaattcttggtatttgacaacagttccagccattttagtccctagcattagaatatcccaaagtcttgaatgtgatggcattaggtaatcccatttcttccgggcctggaccatataatactaggatttgaagttgtctktgaagataacttaagtctagaatgaaccttctagaatttttcatgagttgagtgaactattttatgacctctttcaaaaaaaaccagctttattggtttttctgcaacacagatttgaattgtattagtaggaatatattaaaaatttggaatagctactgtcttagtccatttagtgttgctataactatagcctcagaatacc

SEQ ID NO: 692436 - DNA, 610 bp, Homo sapiens
ggatgtgctatggaaaaaaatactgggaatactttctgaaataggatgaacaggaagaaacagatgtttgcaccgaaagagagtagtgaaaattttaagcaaatgttaagattttgaaagaatgtaagctacagatacactgctggatgtcactagtgttaatactggggaaatagaatctgtggagccagtttttggtttggggtcaaaaaacaacagggcttcttttcttgctgttgttgttttgactggttttggtcatgacaaattcttggtatttgacaacagttccagccattttagtccctagcattagaatatcccaaagtcttgaatgtgatggcattaggtaatcccatttcttccgggcctggaccatataatactaggatttgaagttgtctttgaagataacttaagtctagaatgaaccttctagaatttttcatgagttgagtgwactattttatgacctctttcaaaaaaaaccagctttattggtttttctgcaacacagatttgaattgtattagtaggaatatattaaaaatttggaatagctactgtcttagtccatttagtgttgctataactatagcctcagaatacc

SEQ ID NO: 692437 - DNA, 628 bp, Homo sapiens
acaatttraacattttcattttcatagttcaaattactgaagatattattttcaaattcttgccatgttttgcgaggtagataccattatttctcaataatgagattgagataatgctggcctgtttgttccctaagtattgtcctgtgaccccttcctttgctgtaaaaaattagagagttccatcttcagcttaagcatattcaaattacttactatacagggaaggatgaaatactacttacggaagagaattgttgaatgagatgctaaatcatgtttctccttaaatacattcatatactgatatcggctccttgcttaaaacacgtctgtgtgtgtattagctctaggtacatatggattgttttaaagtggcaaaaaatagaatggtatttttaatcttacatgaaagaataatattcacagctttgaaatactaggatgatggaataatgacaccaaatttatgaagatgtaaaactcccgtaccatgaaatatataatcaagtagggaagttattacaaaaatgttagttaatgtctaaaatacatacagaaacttttaaatatatgaaagggaacttttaagtgtacaagaaaaacacttaaggtgctcctggataaa

SEQ ID NO: 692438 - DNA, 628 bp, Homo sapiens
acaatttaaacattttcattttcatagttcaaattactgaagatattattttcaaattcttgccatgttttgcgaggtagataccattatttctcaataatgagattgagataatgctggcctgtttgttccctaagtattgtcctgtgaccccttcctttgctgtaaaaaattagagagttccatcttcagcttaagcatattcaaattacttactatacagggaaggatgaaataytacttacggaagagaattgttgaatgagatgctaaatcatgtttctccttaaatacattcatatactgatatcggctccttgcttaaaacacgtctgtgtgtgtattagctctaggtacatatggattgttttaaagtggcaaaaaatagaatggtatttttaatcttacatgaaagaataatattcacagctttgaaatactaggatgatggaataatgacaccaaatttatgaagatgtaaaactcccgtaccatgaaatatataatcaagtagggaagttattacaaaaatgttagttaatgtctaaaatacatacagaaacttttaaatatatgaaagggaacttttaagtgtacaagaaaaacacttaaggtgctcctggataaa

SEQ ID NO: 692439 - DNA, 628 bp, Homo sapiens
acaatttaaacattttcattttcatagttcaaattactgaagatattattttcaaattcttgccatgttttgcgaggtagataccattatttctcaataatgagattgagataatgctggcctgtttgttccctaagtattgtcctgtgaccccttcctttgctgtaaaaaattagagagttccatcttcagcttaagcatattcaaattacttactatacagggaaggatgaaatactacttacggaagagaattgttgaatgagatgctaaatcatgtttctccttaaatacattcatatactgataycggctccttgcttaaaacacgtctgtgtgtgtattagctctaggtacatatggattgttttaaagtggcaaaaaatagaatggtatttttaatcttacatgaaagaataatattcacagctttgaaatactaggatgatggaataatgacaccaaatttatgaagatgtaaaactcccgtaccatgaaatatataatcaagtagggaagttattacaaaaatgttagttaatgtctaaaatacatacagaaacttttaaatatatgaaagggaacttttaagtgtacaagaaaaacacttaaggtgctcctggataaa

SEQ ID NO: 692440 - DNA, 609 bp, Homo sapiens
taatcttcatgatacccctatgtggtaggtattattaccctcattgtaggcaatacataggaaaaccacagggctagtaaacccagaaagtcttatcctgaactattattattattatttttgagatgggtcttgttatgttgccaaggctggtctcaaactcctgagctcaagtgatcctcccacctaagcctctcragtaccagggtttacaggtgtgcacatcaccacgccctgctctaaagcctgagcctgaattcaattttttttttggagacaggatctagccctgtcgctcaggctagagtgcagtggcaagatcttggctcactgcagccttgacctcccaggctcaagcaatcctcccaacctcagctttctaagtagctgggactgcaggcatgtgctatcacacctggctaattctgttcattttttatagaggtgaggtctcactgtgttgcccaggctgatcttgaactcctggactcaagcagtcctcctcctttggcttcccaaagtgctgggattacaggcatgagctactgtgcctagcaagcctgcattcttaacaccacattaaaagagagaagagacttagcttagagg

SEQ ID NO: 692441 - DNA, 609 bp, Homo sapiens
taatcttcatgatacccctatgtggtaggtattattaccctcattgtaggcaatacataggaaaaccacagggctagtaaacccagaaagtcttatcctgaactattattattattatttttgagatgggtcttgttatgttgccaaggctggtctcaaactcctgagctcaagtgatcctcccacctaagcctctcgagtaccagggtttacaggtgtgcacatcaccacrccctgctctaaagcctgagcctgaattcaattttttttttggagacaggatctagccctgtcgctcaggctagagtgcagtggcaagatcttggctcactgcagccttgacctcccaggctcaagcaatcctcccaacctcagctttctaagtagctgggactgcaggcatgtgctatcacacctggctaattctgttcattttttatagaggtgaggtctcactgtgttgcccaggctgatcttgaactcctggactcaagcagtcctcctcctttggcttcccaaagtgctgggattacaggcatgagctactgtgcctagcaagcctgcattcttaacaccacattaaaagagagaagagacttagcttagagg

SEQ ID NO: 692442 - DNA, 609 bp, Homo sapiens
taatcttcatgatacccctatgtggtaggtattattaccctcattgtaggcaatacataggaaaaccacagggctagtaaacccagaaagtcttatcctgaactattattattattatttttgagatgggtcttgttatgttgccaaggctggtctcaaactcctgagctcaagtgatcctcccacctaagcctctcgagtaccagggtttacaggtgtgcacatcaccacgccctgctctaaagcctgagcctgaattcaattttttttttggagacaggatctagccctgtcgctcaggctagagtgcagtggcaagatcttggctcactgcagccttgacctcccaggctcaagcaatcctcccaacctcagctttctaagtagctgggactgcaggcatgtgctatcacacctggctaattctgttcattttttrtagaggtgaggtctcactgtgttgcccaggctgatcttgaactcctggactcaagcagtcctcctcctttggcttcccaaagtgctgggattacaggcatgagctactgtgcctagcaagcctgcattcttaacaccacattaaaagagagaagagacttagcttagagg

SEQ ID NO: 692443 - DNA, 728 bp, Homo sapiens
aaatatcaatatgataatatctccaagcccaaaaatttgggaaatattcaagaaaagttgctcctagtgtgaaattgatcatccaaggaagacaaatgtctcattcctactctctgtgtgtatatattacattattagtttaaaaataaaattagtattttaactaagtgtattattagttctcatgctgctatgaagaaatacctgagactgggtaatttataaagaaaataggtttaattggctcactgttccacatggctggcaagtcctcaggaaacttaaaatcatggtggaaggcacytttcacagggtggcaggagagagaataagtgcaagccaaggaaatgccagacgcttacaaaaccatcaaatctcatgagaactcactcactatcacaagaacagcatgcaggaaaccactcccatgattcagttatctccacctgctcccacctttgacatgaggggattattacaattcaaggtgagatttgggtgaggatacagagccaaaccacatcactaaggatccagagttagaatctaagaactgagctgaaatcaacctttaaaatatggtatttctattctcttagtttacagaagagaaacctgagatttacaaagtccaaggtcactcaaaaagctagactcaggaacaaacttggagattcccagtccctggttcacagttcttttttttttttttatgtgatgctctttgt

SEQ ID NO: 692444 - DNA, 711 bp, Homo sapiens
tctgaccattccctcaatgctaatccataagaaaagaaaagtgacagtaggaaaacatcaggataaacacacataaagaaattcttagccagttctgacctctgcttatatggacsaagcagagtattacttaagaggagccacacaggccgagcgcggtggctcacgcctgtaatccgagcactttgggaggccaaggcggctggatcatgaggtcaggagatggagaccatcctggctaacacagtgaaaccccatctctcactaaaaatgcaaaaaaaaattagccgggagtggtggcaggcacctgtagtcccagctacttgagagggtgaggcaggagaatggagtgaacccgggaggcggagcttgcagcgagccaagttcgcgccactgcactccagcctgggcgacagagcgagacttcgtctcaaaaaaaaaaaaaaaaaaaaagaggaaccacacagaagaaatttaagggacactctttgtagttggagagatactgatcacaggtgtcactctgttacactcctttatattggcctctgtagcatctgttcaaagaaagtatcatatttaccaaaatttagccatctcatgaaacttaaaaactttaggaattctgccatagaactccaatgactaggaggctgtatcaggaagccttctattgtttgcagtggcaaaactatagtcaacaataattta

SEQ ID NO: 692445 - DNA, 711 bp, Homo sapiens
tctgaccattccctcaatgctaatccataagaaaagaaaagtgacagtaggaaaacatcaggataaacacacataaagaaattcttagccagttctgacctctgcttatatggacgaagcagagtattacwtaagaggagccacacaggccgagcgcggtggctcacgcctgtaatccgagcactttgggaggccaaggcggctggatcatgaggtcaggagatggagaccatcctggctaacacagtgaaaccccatctctcactaaaaatgcaaaaaaaaattagccgggagtggtggcaggcacctgtagtcccagctacttgagagggtgaggcaggagaatggagtgaacccgggaggcggagcttgcagcgagccaagttcgcgccactgcactccagcctgggcgacagagcgagacttcgtctcaaaaaaaaaaaaaaaaaaaaagaggaaccacacagaagaaatttaagggacactctttgtagttggagagatactgatcacaggtgtcactctgttacactcctttatattggcctctgtagcatctgttcaaagaaagtatcatatttaccaaaatttagccatctcatgaaacttaaaaactttaggaattctgccatagaactccaatgactaggaggctgtatcaggaagccttctattgtttgcagtggcaaaactatagtcaacaataattta

SEQ ID NO: 692446 - DNA, 711 bp, Homo sapiens
tctgaccattccctcaatgctaatccataagaaaagaaaagtgacagtaggaaaacatcaggataaacacacataaagaaattcttagccagttctgacctctgcttatatggacgaagcagagtattacttaagaggagccacacaggccgagcgcggtggctcacgcctgtaatccgagcactttgggaggccaaggcggctggatcatgaggtcaggagatggagaccatcctggctaacacagtgaaaccccatctctcactaaaaatgcaaaaaaaaattagccgggagtggtggcaggcacctgtagtcccagctacttgagaggstgaggcaggagaatggagtgaacccgggaggcggagcttgcagcgagccaagttcgcgccactgcactccagcctgggcgacagagcgagacttcgtctcaaaaaaaaaaaaaaaaaaaaagaggaaccacacagaagaaatttaagggacactctttgtagttggagagatactgatcacaggtgtcactctgttacactcctttatattggcctctgtagcatctgttcaaagaaagtatcatatttaccaaaatttagccatctcatgaaacttaaaaactttaggaattctgccatagaactccaatgactaggaggctgtatcaggaagccttctattgtttgcagtggcaaaactatagtcaacaataattta

SEQ ID NO: 692447 - DNA, 969 bp, Homo sapiens
gtattttagtagagacagggttttaccatgttggccaggctggtctggaactcctgaccttaactgattcgcccgcctaggcctcccaaagtgctgggattacaggcatgggccaccgcgcccggcctatcttgtacttttttgtaaagaaaataaatgcatttttcaggagtagaaaaatggagaaaagaacaaaaattatattaaatgttttatgcctacagatagtcattcttattaattatttctcattcatactgaaaatactggttttcctcaacatgactatattcatatttttaagcaatgttttgccttatatttatttagtaaaaatttttttaatgtgaccaatttttttgactcttttacattttaagttacaaagatcagcgaattctactttggtttatattatattttgattgcttctaaaagcaggaaacaatggtcaaagaatagtcttttcagacattaaaagaggcccagaacacttaaaatttatcaacttttgtgatatcagacaaatgaagagccatatttgtgattaatatctaaagcacaaatttaggttccttcataaatactggatcartttgtagcattccactcaaaaatagaacaaatgtgaccattaccatattagaaccatttgcctttgaagttcagtttgagtgcatgtactgcatattcagtgtgatttcactgaccgctgttaggaacatgtttagtggctatgcaacaaaatgtatcttaattaaccttatggtcttaattctatcatctcaaccactttaagtaactgagcaaaacatgcctggcaatagagtggacttttatagtttaaaacaatttaaaagattcacataggcaagcatgtacccaatactatacatatagtaacaagaatataaattatcatgtataatttctagagaaaataaaaacagatcctttgaaaggtaaaaa

SEQ ID NO: 692448 - DNA, 621 bp, Homo sapiens
ataaaacagtcaagttgttgaagctgttgccatatggtcccctacgtagggctgctcacataatatgtcatctggctgccccctagaaaagtgcaatctcaagacaaagccacaatttttgaatattctaatctcagaagtgacatcccatcatttttgtcatagtctattctttagaagtaagtcattaattctagtttatactcaagggaacacaaacaaatctccacttcttgaagagggaaaaaaatcatagcatgtgtgaacatgttttttaaaacacaacaatgacctatacagagtccaaaaacaactgaatatatgccagccacagacaaaaaaaaamcactccaattataaaaagatactaaaatattctgtgtttttacatctacacaaatatacacacagaaaactgtcacactcagttttacaaatttagccataggttaaaagagaagcacacaatttattttcaacaaaaactcacctgttgattgctttagctctctaatagaaaagtcaaggagtgcaaaacatatctgagacaaacttgttacggtttttcaatccaggggctgctctttactccacggggcacaaagctttgcttttgttttg

SEQ ID NO: 692449 - DNA, 621 bp, Homo sapiens
ataaaacagtcaagttgttgaagctgttgccatatggtcccctacgtagggctgctcacataatatgtcatctggctgccccctagaaaagtgcaatctcaagacaaagccacaatttttgaatattctaatctcagaagtgacatcccatcatttttgtcatagtctattctttagaagtaagtcattaattctagtttatactcaagggaacacaaacaaatctccacttcttgaagagggaaaaaaatcatagcatgtgtgaacatgttttttaaaacacaacaatgacctatacagagtccaaaaacaactgaatatatgccagccacagacaaaaaaaaaccactccaattataaaaagatactaaaatattctgtgtttttacatctacacaaatatacacacagaaaactgtcacactcagttttacaaatttagccataggttaaaagagaagcacacaatttattttcaacaaaaactcacctgttgattgctttagctctctaatagaaaagtcaaggagtgcaaaacatatctgagacaaacttgttacggtttttcaatccaggggctgctctttactccacggggcacaaagctttgyttttgttttg

SEQ ID NO: 692450 - DNA, 2091 bp, Homo sapiens
cagatattgtcattttttccccctcagcaatggtgacaggtttgtaccaatgcactcatactaccttgtctggcccctcttgtgaccagtaggatactatttgtcagacttctagtagtgcagactgcaccctgcggatgtgaatcagagcacagccatgagccctaaagtgggaagtcagccttgactcagtgcaatgcactaattaacagagctcaccagctacagactcatatgctgtctaatcaggcaaccggacaaaagggaacatgtcagcttagaacaattatgtcagagaagtgttaatctgctgcttaaacttttggaaaaaataaaacttgaaatgaaataatctaaatcacattgtagcaatttgaagtgagccatatgaacaaaagtatataataaatcactctatgtgattaaaatccatttatgttattaattagtaggaaaataaagagaactcctaaaataccagcagttaactaaaagaaaacaatgtatgattaacaaatacagtgcatacttccactaaattcctctacaattttgaaaaagtgatgtaacaatgcatgtccttccttaattctttttgtgtaaatatactcatatacatctctatagagactgttccaagcaaataagactagctatgagaaaattggaagtatactaagagaagaatgttagaggaactcaaaatgtattaacataattttaaattcaagctttgctcttttcattttttattcatttccttgatccaaatatttgagttacttattagagaataacagtgatcacttacattgaaattattttctaggtactatcatcacttattaaatgtccctaaaaatcccacgagattctactattattgccatgttactgataaaggagttgaagcaataaaaagttaattaacttgtccatgctcacaaaaccagttaactggtgaagtttatttttaaatcaaagcagtttgcctctatactgtgtttttaaccactgtgctgtagttcattgttaaaacacagaatgtgtgttaagtaattttatgactaaaggacagcacaatatgtatttattgagttaaaacaagacttgtgttccctgattttgccatctctgaccctggttagattcccctttttttgctttgatagtgctctttacagtctctctcattgattttgccatattggattttctaccattagtgctgatgtgtgtcgctcccactaaacagtgatccttttaatggctggagactgaaatcaaatcttgtcatttttttaaaaaaaacatcatgcctgatacagaatagggagacaatatttatttgtggaattaatgagtagattatttaccttatacttaaatgtctactttaatatagttataccatgatttccgttttatttcatgaaaggagaactccaagttttgagtgggtttttgaaaattttaatttcaaactcagtttcagatggataaagttattataagctcataattctggataaagatagtggataatttccacaccctgatttggaagtctaaaaatcaagagttcaattttagacatgrtaaaattggaacataaataagcgagcagttggatatatgggcctagatgggagatgcagaaatgtgcaaacaaacaaaagctatccaaacaccattcaaaaaatacttttctaagtaactatggcatcaaaaagaggaaacaactaataattatgatatcactaagaggaaaaatacttcagggagctaaaacggtatacagtgaagtatgtataaatattaaactttcattaaaacaaaataaggaattggccagatgtggtggctcatgcctgtaatccaagtactttgggaggccaaggtgggtgtatcacctgaggtcaggagtttgaaaccagcctggccaacatggcaaaaccccgcctctactaaaaatgaaaaaaataattagccaggcatggtggcacatacctgtaatcccagctacttgggaagctgaggcaggagaattgcttgaacctgggaggcagaggttgcagtgagctgagattg

SEQ ID NO: 692451 - DNA, 2091 bp, Homo sapiens
cagatattgtcattttttccccctcagcaatggtgacaggtttgtaccaatgcactcatactaccttgtctggcccctcttgtgaccagtaggatactatttgtcagacttctagtagtgcagactgcaccctgcggatgtgaatcagagcacagccatgagccctaaagtgggaagtcagccttgactcagtgcaatgcactaattaacagagctcaccagctacagactcatatgctgtctaatcaggcaaccggacaaaagggaacatgtcagcttagaacaattatgtcagagaagtgttaatctgctgcttaaacttttggaaaaaataaaacttgaaatgaaataatctaaatcacattgtagcaatttgaagtgagccatatgaacaaaagtatataataaatcactctatgtgattaaaatccatttatgttattaattagtaggaaaataaagagaactcctaaaataccagcagttaactaaaagaaaacaatgtatgattaacaaatacagtgcatacttccactaaattcctctacaattttgaaaaagtgatgtaacaatgcatgtccttccttaattctttttgtgtaaatatactcatatacatctctatagagactgttccaagcaaataagactagctatgagaaaattggaagtatactaagagaagaatgttagaggaactcaaaatgtattaacataattttaaattcaagctttgctcttttcattttttattcatttccttgatccaaatatttgagttacttattagagaataacagtgatcacttacattgaaattattttctaggtactatcatcacttattaaatgtccctaaaaatcccacgagattctactattattgccatgttactgataaaggagttgaagcaataaaaagttaattaacttgtccatgctcacaaaaccagttaactggtgaagtttatttttaaatcaaagcagtttgcctctatactgtgtttttaaccactgtgctgtagttcattgttaaaacacagaatgtgtgttaagtaattttatgactaaaggacagcacaatatgtatttattgagttaaaacaagacttgtgttccctgattttgccatctctgaccctggttagattcccctttttttgctttgatagtgctctttacagtctctctcattgattttgccatattggattttctaccattagtgctgatgtgtgtcgctcccactaaacagtgatccttttaatggctggagactgaaatcaaatcttgtcatttttttaaaaaaaacatcatgcctgatacagaatagggagacaatatttatttgtggaattaatgagtagattatttaccttatacttaaatgtctactttaatatagttataccatgatttccgttttatttcatgaaaggagaactccaagttttgagtgggtttttgaaaattttaatttcaaactcagtttcagatggataaagttattataagctcataattctggataaagatagtggataatttccacaccctgatttggaagtctaaaaatcaagagttcaattttagacatgataaaattggaacataaataagcgagcagttggatatatgggcctagatgggagatgcagaaatgtgcaaacaaacaaaagctatccaaacaccattcaaaaaatacttttctaagtaactatggcatcaaaaagaggaaacaactaataattatgatatcactaagaggaaaaatacttcagggagctaaaacggtatacagtgaagtatgtataaatattaaactttcattaaaacaaaataaggaattggccagatgtggtggctcatgcctgtaatccaagtactttgggaggccaaggtgggtgtatcacctgaggtcaggagtttgaaaccagcctggccaacatggcaaaaccccgcctctactaaaaatgaaaaaaataattagccaggcatggtggcacatacctgtaatcccagctacttgggaagctgaggcaggagaattgcttgaacctgggaggcagaggttgcrgtgagctgagattg

SEQ ID NO: 692452 - DNA, 922 bp, Homo sapiens
tatgtgaaaacaaaatatttattgatattattaagtaaacatcatttctaaggaatgtgtctgtcttggacatcttggtttgccctaatgcattgtgagctctataaatttaataaacaggaaaatttgctgtttacattacaaaaggtttcaccccaaaactgcctctctatccctttcactctacatttttttcttcatactattgattactatttggaatagaatgtgtaattgtctgtctgtttatgttctgtttccactacctagaatcttagctccttgaggagargcattttgcttggttcacagctgtacctccggtgcctgcaatggttcctggttacatagtgtgttgtcagtgaatatttgttgaatggatgaacagaaatttgagaagagcaggggtaccatgaaagatcagcaatcaactatctgcaaacatgtcactggttgttgctgctgcatttctagactgtgattgataatactgccgaggcacaagttgattccttgttcccaatttgattcccatttcagttgctcaggaccttttcctgctaagtcacataaggcatcctcttacttggatcatgacattcttacaaagaacacagagcaggtgtctttgctcttctctgacatttctctacaatgcctttagaactcaaactccagcaggagcattcatccctcctccaagcactcaaaactctttgggagacaatttttcactctagccaagtcccagctgggtggccaaaaaacaatacatttgatccacagaaagcagtggatttggaatgtctcccattactgggagtcaaacacaaaatcaaattgactaaatccttctggaattccacaacgcagcactttctctaactcccagctccaccacatttgctactttttatggctg

SEQ ID NO: 692453 - DNA, 993 bp, Homo sapiens
gggttcatgctgacagagcaggggtggcttgaccttctgtgggggccatgtaggccgcctcttactggttgttattttgggttctggaaagcctgactgccctgaaatatctctccctgccgtcttgccaggttctgtaattcctaccatgagagccatcctccagttaaggcatcatgtctccaggaggcccaggttatagagcagccacccacagccaacctcacacatttaacccgtaattgcccactagcctgcagcctggctgcagagaacagttaccagctgttggtaacccaacactgctttgctaagagaagctttttgacagcctcttcacataagtgggggaaatgggtgccacaaagctctggatcaggagcataatggcttccatgggagaggccaaatctctgcagtgatggtgcctccacttcctatcccagggcatgggaagattagactttggattccaggaggaatgtgaaaatgcaaatggaatcaaagatgtgtacctaagttcatggatgatggatccaatgtggaattaggcaatgcttgggttacaaccttaaccaggacttatctctaagggaacaagataaatgtctatccagcttgacctggtatcccaccgaatatcctgtcactggtcaggaaagatgcctgagggcttcactataattactcctttgggcacaggaggcacctgttaaaagttaaacatgttwtggagaggaaaaccaggtatttttcagaattgagagcattcatgggaatgagtctattttagatgatagcccgagggaaagcttggaagcttggcatgctgcagctgcgtgtaaggaatgcattctttgcacggtggtgaaactactgttggtacacaacagccttttctggtggtaagccagcttccttctaagtaagtgtggttagagggtcatgctctcttcatgaaactaaattcttaggattgtattcagggttgcc

SEQ ID NO: 692454 - DNA, 1696 bp, Homo sapiens
tactggggggctgccggctccctgggcccgtcctgaagggacattcaaattaaggcatgtgggtcctgggcaggcctcacccttccttcaccccctggccttcctcaccctcaccctttgggctcagaagagcctcttcctttgtggttttccttgctgttctctctcctccttccctgactccaccctggagacctaaggactcagcacagcaaagcccttcgcctgacacttcccacgtgaaacagccccgcacgccacactcccctcctcaacagggtcttaaggctgcccttctccatctcccgacagtcccgagtctcaacagcgtgcctccgcactcatcttccctttacaggaggtgtcaatggggggtttctaattgcaggataagacacgggatctcaagtccacgcagagcagcatagatttggggtggagagtggctttccagctgtctagcccgttctctactttaaacatgaagggactgacggccagagaaaggcagggcctgctggggcatccccgtcagctccgggcagagcagggatgaggcctcacaccagggtgtggcatcctgcagtgccagcggcttcttcactgactgtttttggactttaacaaagtagaaaaggaaacaataacacggttttactcaacaaacaaacaggagaaatgctggcctgaaggaggaagccacctcggtcctgttggagctgagagcaaaaaataaagacagcaaggacctcggcaattccaggcacaaaggacaagctgggccaaggcggggccctgttgtgggccttcctggcataaggcgacgcttagttcagaggcagctccagatgggacactcctcccttccgtcccgacacagcccgggcttcctggaggtggccactctttggctgagacctcagcagaccagctgccctggtgccagaatccaaatgaatgaaattaccaggaagagctgcgaggaagggtggggaggaggcgtccccgtgtgtggctgaagccgatctcctcctggtagaagctgcggtggtggttcttttaccggtagcactggaaaaaaacagaaaacgccagctgattctgcttttagagagtacaaacctctctgaggtttacagcagcctcagtaatttgcttggaggcaagtattccaatgaaagcaaacacagagccagtcccgagccccacgaccagcgctgtacccaatatgcacccagggtccagaaacgtccggcggtgaagagcctcagacacgtccccgtccatctcctcggggaccatgctgaggtcaggccggcatggttttataagctggcctcagacggctccgttccctgtctcctgtctgggtcagcccagctgccattccccggggacatgcttgcaggctgcatggccctccacctcctggctggggctcgccgcccagggatgggtccctgactcctgagcccacrgtgtgtcccaggtcacatggggtcaggaccatgagatgcagatgcggccttggagggagaaactgcccactcggaagtgctgggtggccgcgcggctccaccacagaggctgagaaccagagcagtctgtgataagaggggaacaaaccccatgcggggtgaagcagacgggggtgacggagcggggccgtctcttccccttactgtaaactcccccc

SEQ ID NO: 692455 - DNA, 1696 bp, Homo sapiens
tactggggggctgccggctccctgggcccgtcctgaagggacattcaaattaaggcatgtgggtcctgggcaggcctcacccttccttcaccccctggccttcctcaccctcaccctttgggctcagaagagcctcttcctttgtggttttccttgctgttctctctcctccttccctgactccaccctggagacctaaggactcagcacagcaaagcccttcgcctgacacttcccacgtgaaacagccccgcacgccacactcccctcctcaacagggtcttaaggctgcccttctccatctcccgacagtcccgagtctcaacagcgtgcctccgcactcatcttccctttacaggaggtgtcaatggggggtttctaattgcaggataagacacgggatctcaagtccacgcagagcagcatagatttggggtggagagtggctttccagctgtctagcccgttctctactttaaacatgaagggactgacggccagagaaaggcagggcctgctggggcatccccgtcagctccgggcagagcagggatgaggcctcacaccagggtgtggcatcctgcagtgccagcggcttcttcactgactgtttttggactttaacaaagtagaaaaggaaacaataacacggttttactcaacaaacaaacaggagaaatgctggcctgaaggaggaagccacctcggtcctgttggagctgagagcaaaaaataaagacagcaaggacctcggcaattccaggcacaaaggacaagctgggccaaggcggggccctgttgtgggccttcctggcataaggcgacgcttagttcagaggcagctccagatgggacactcctcccttccgtcccgacacagcccgggcttcctggaggtggccactctttggctgagacctcagcagaccagctgccctggtgccagaatccaaatgaatgaaattaccaggaagagctgcgaggaagggtggggaggaggcgtccccgtgtgtggctgaagccgatctcctcctggtagaagctgcggtggtggttcttttaccggtagcactggaaaaaaacagaaaacgccagctgattctgcttttagagagtacaaacctctctgaggtttacagcagcctcagtaatttgcttggaggcaagtattccaatgaaagcaaacacagagccagtcccgagccccacgaccagcgctgtacccaatatgcacccagggtccagaaacgtccggcggtgaagagcctcagacacgtccccgtccatctcctcggggaccatgctgaggtcaggccggcatggttttataagctggcctcagacggctccgttccctgtctcctgtctgggtcagcccagctgccattccccggggacatgcttgcaggctgcatggccctccacctcctggctggggctcgccgcccagggatgggtccctgactcctgagcccacagtgtgtcccaggtcacatggggtcaggaccatgagatgcagatgcggccttggagggagaaactgcccactcggaagtgctgggtggccgcgcggctccaccacrgaggctgagaaccagagcagtctgtgataagaggggaacaaaccccatgcggggtgaagcagacgggggtgacggagcggggccgtctcttccccttactgtaaactcccccc

SEQ ID NO: 692456 - DNA, 607 bp, Homo sapiens
tggacgaaggccttgcaaaatgggtggccgaggccgggcgcggtggctcacgcctttaatcccagcactttgggaggccgaggtgggcggatcacgaggtcaggagatcgagaccatcctggctaacacagtgaaaccccatctctactaaaaatacaaaaaattagctgggcgtggtggcgggcgcctgtagtcccagctactcgggaggctgaggcaggagaatggcgtgaacccgggaggcggagcttgcagtgagctgagatcacgccgctgcactccagcctgggcgacagagcgagacgccatctcaaaaaaaaacaaaaaaatgggtgggcgaggcgccgggaacgagatctcggggcatggagtaggaggagcctctcggagcgagtgggcggggccacgctcgctgggtgggcggcktctggcgggctcagggcgtcgctcagggcgtcggtgtgcaaagcagcgatggacccgagggtctggagctgggagtgctgatccgatcgacgtagtgaaagcctcactttgctgtctggacaagtactgccaggggccgcggggaccgggatcgctgtgcagaggccccactggccctcag

SEQ ID NO: 692457 - DNA, 591 bp, Homo sapiens
atatgcatgtaaatatatatacatttgtggactttcaaaaaatttaaaaacatttttattagagaaacgataaaactttatgataaaattgcattcaatttggatttagaaagggtaaaattatgtgtcttagaccattttgtgcttctaaaacagaataccatagattgagtaatttataaagaacagaaatttacttcttaccattctggtggctaggaagtccaagatcaagataccaggctctgaggtcttcttgatgcatcctcacatggtggaaggtggaaggggcaagagagaaccaactctctctgtcaagaccctttataaatcacctcatcccattcatgagrgaggatctctcatggcctaaacacctcttaaaggcctgacctcttaggactatcacattggcaacacttgaaatctggaggagattcattaaagccatgtcagtatccatttcttactaaaggtaaaaaataatttgaagtatgaagggaacacaaaatgaataatacctccaagaaatattcattcatttgtccactcactcactaaataaatattgagagactgacttgtaaaagc

SEQ ID NO: 692458 - DNA, 591 bp, Homo sapiens
atatgcatgtaaatatatatacatttgtggactttcaaaaaatttaaaaacatttttattagagaaacgataaaactttatgataaaattgcattcaatttggatttagaaagggtaaaattatgtgtcttagaccattttgtgcttctaaaacagaataccatagattgagtaatttataaagaacagaaatttacttcttaccattctggtggctaggaagtccaagatcaagataccaggctctgaggtcttcttgatgcatcctcacatggtggaaggtggaaggggcaagagagaaccaactctctctgtcaagaccctttataaatcacctcatcccattcatgagggaggatctctcatggcctaaacacctcttaaaggcctgacctcttaggactatcacattggcaacacttgaawtctggaggagattcattaaagccatgtcagtatccatttcttactaaaggtaaaaaataatttgaagtatgaagggaacacaaaatgaataatacctccaagaaatattcattcatttgtccactcactcactaaataaatattgagagactgacttgtaaaagc

SEQ ID NO: 692459 - DNA, 591 bp, Homo sapiens
atatgcatgtaaatatatatacatttgtggactttcaaaaaatttaaaaacatttttattagagaaacgataaaactttatgataaaattgcattcaatttggatttagaaagggtaaaattatgtgtcttagaccattttgtgcttctaaaacagaataccatagattgagtaatttataaagaacagaaatttacttcttaccattctggtggctaggaagtccaagatcaagataccaggctctgaggtcttcttgatgcatcctcacatggtggaaggtggaaggggcaagagagaaccaactctctctgtcaagaccctttataaatcacctcatcccattcatgagggaggatctctcatggcctaaacacctcttaaaggcctgacctcttaggactatcacattggcaacacttgaaatytggaggagattcattaaagccatgtcagtatccatttcttactaaaggtaaaaaataatttgaagtatgaagggaacacaaaatgaataatacctccaagaaatattcattcatttgtccactcactcactaaataaatattgagagactgacttgtaaaagc

SEQ ID NO: 692460 - DNA, 591 bp, Homo sapiens
atatgcatgtaaatatatatacatttgtggactttcaaaaaatttaaaaacatttttattagagaaacgataaaactttatgataaaattgcattcaatttggatttagaaagggtaaaattatgtgtcttagaccattttgtgcttctaaaacagaataccatagattgagtaatttataaagaacagaaatttacttcttaccattctggtggctaggaagtccaagatcaagataccaggctctgaggtcttcttgatgcatcctcacatggtggaaggtggaaggggcaagagagaaccaactctctctgtcaagaccctttataaatcacctcatcccattcatgagggaggatctctcatggcctaaacacctcttaaaggcctgacctcttaggactatcacattggcaacacttgaaatctggaggagattcattaaagccatgtcagtatccatttcttactaaargtaaaaaataatttgaagtatgaagggaacacaaaatgaataatacctccaagaaatattcattcatttgtccactcactcactaaataaatattgagagactgacttgtaaaagc

SEQ ID NO: 692461 - DNA, 663 bp, Homo sapiens
catagactgcttctgaaactcagtccttgcaactgctacctcagttcaccttagcaatgctcatcagacatagtgttcccaacctatcctcttcactctggcaaagtaagtctagggctgtttagggataagggatggaagcaggaagctgagcaaatrgacaatgttcctgtgatgaatcatttggttcctgggtaaacctctggttttccttagatctccatggccggatatctcagatcctactgttcctttttgccagtaactccaggcagggactctatgtctaaagccctggcaagacagcactgtctgcttttgttctgaaattaattgttttcacattctccccactggtgtcactgaaacagtaatactaaaagggcgtgggagcagacttcacctaattgtacatcttcccacctcttcacagaagcacatactgcgcaggaatgtgcgagaggagtgtgccttcactggccatgcattgatctgacctgcaattgtgaatggttcctgtcccagccattcagagcaaaccattttcccctagaggtctagggttgtggacaccaggctatctagacatctcattggatcacagttaaagatgtggagagagatcaaaagcaaagaaggacaagaggattaagaagcagttcc

SEQ ID NO: 692462 - DNA, 1718 bp, Homo sapiens
attttaagatgttaaactaacccctgagttttttttttaatagatgtagcagaacacaagtaaatctgggataattagtccagggattcaaacagtggtacgtgaaacagatatttactaaaacctgcctctttggagaaaatcctaaaatatttttagagttaatcacagaaacccaatttataatttatgtaatataatgttatagaaggtgtataattaatatttaagctgtttaggtaggaaaccaatttttaatatattaaattagcaatttcaagcaactaacagatttctgtgtatctattgtagtgagtattcctaaccaattaactgaatgttttaagttttgtctgtatgaataaataacaatcaagttgactgaggaaaataaaatacttcagtaacaccatgtttctggatactgagaaaatacgaattatttccaaagttaattgtatattgaaagcaatcacattctaaacacaaacagaatatttaagaaatatgctaagatagtgctaaatctcacttaaaccaagtaaggagattttttaaagttgaaaaatagtaacaattggaaattaacattagcatacattaaccatcttccagagctttggaaagtcaaacagtgtggtattagtgctgggaaaaaattgtaacagaatacataaaaatacaagaaaagacaataatttagtatacttaaggtttattttaagtgaactaaaaatatgatgaattgtattgaaatatttcattaagaattggaggaaaaactagtacaattcttacctcataccccacaccaaaattattctaagttgattaagttggataaaattttaaataacatctaaaaacaatagactttgttaaaagaatctctacatttcttttcattgtggaggcagataattgtcaagtatgtgaagtaaaatgggatgtatggtttttcttcctaatcactgtcatatctgtcatattgatttataaatctaatttccaaaaaaaacaaccaaagttccggatgcccttcccagccatatattctccgtcctaccaaggtgacactattcactttcttctctccataaacctaattccttctattgaaaaaaaaaaaaaaaaaacagtttctccagtcaaagcaaatgttgcctttactattaaggcccttggtggcgcataccttgcattttctcttagttagtccgcctgtcacyttcgttcatgtagcaaattaatttattcctctgtgctcaaagccaatgctttacaaactttgcaatttcggatcttgttaaaattcgaatcttgattcatacgtctagataggccccaagattctgtctttcttacaaatttttgggtgatgctaatgcagctgatctatggaccacactttcagtagcaaggctctattttatttacacatccattttctttccattgcctccttgactgtaaagcaggatgctaacatgctactgccttatttagagatttcacactcatattaactgattttattaggagatcaaaatatgactatccaagaacatcatatttcttcgtaatcaaatgagttaatgaatgtgaaaatattttataaactaaaagatattatatgcagcttattttaaatgttgacacatattaagtaacataattacttataaatataaaagtaaagtaaggttggctgtgtccaa

SEQ ID NO: 692463 - DNA, 1718 bp, Homo sapiens
attttaagatgttaaactaacccctgagttttttttttaatagatgtagcagaacacaagtaaatctgggataattagtccagggattcaaacagtggtacgtgaaacagatatttactaaaacctgcctctttggagaaaatcctaaaatatttttagagttaatcacagaaacccaatttataatttatgtaatataatgttatagaaggtgtataattaatatttaagctgtttaggtaggaaaccaatttttaatatattaaattagcaatttcaagcaactaacagatttctgtgtatctattgtagtgagtattcctaaccaattaactgaatgttttaagttttgtctgtatgaataaataacaatcaagttgactgaggaaaataaaatacttcagtaacaccatgtttctggatactgagaaaatacgaattatttccaaagttaattgtatattgaaagcaatcacattctaaacacaaacagaatatttaagaaatatgctaagatagtgctaaatctcacttaaaccaagtaaggagattttttaaagttgaaaaatagtaacaattggaaattaacattagcatacattaaccatcttccagagctttggaaagtcaaacagtgtggtattagtgctgggaaaaaattgtaacagaatacataaaaatacaagaaaagacaataatttagtatacttaaggtttattttaagtgaactaaaaatatgatgaattgtattgaaatatttcattaagaattggaggaaaaactagtacaattcttacctcataccccacaccaaaattattctaagttgattaagttggataaaattttaaataacatctaaaaacaatagactttgttaaaagaatctctacatttcttttcattgtggaggcagataattgtcaagtatgtgaagtaaaatgggatgtatggtttttcttcctaatcactgtcatatctgtcatattgatttataaatctaatttccaaaaaaaacaaccaaagttccggatgcccttcccagccatatattctccgtcctaccaaggtgacactattcactttcttctctccataaacctaattccttctattgaaaaaaaaaaaaaaaaaacagtttctccagtcaaagcaaatgttgcctttactattaaggcccttggtggcgcataccttgcattttctcttagttagtccgcctgtcaccttcgttcatgtagcaaattaatttattmctctgtgctcaaagccaatgctttacaaactttgcaatttcggatcttgttaaaattcgaatcttgattcatacgtctagataggccccaagattctgtctttcttacaaatttttgggtgatgctaatgcagctgatctatggaccacactttcagtagcaaggctctattttatttacacatccattttctttccattgcctccttgactgtaaagcaggatgctaacatgctactgccttatttagagatttcacactcatattaactgattttattaggagatcaaaatatgactatccaagaacatcatatttcttcgtaatcaaatgagttaatgaatgtgaaaatattttataaactaaaagatattatatgcagcttattttaaatgttgacacatattaagtaacataattacttataaatataaaagtaaagtaaggttggctgtgtccaa

SEQ ID NO: 692464 - DNA, 1718 bp, Homo sapiens
attttaagatgttaaactaacccctgagttttttttttaatagatgtagcagaacacaagtaaatctgggataattagtccagggattcaaacagtggtacgtgaaacagatatttactaaaacctgcctctttggagaaaatcctaaaatatttttagagttaatcacagaaacccaatttataatttatgtaatataatgttatagaaggtgtataattaatatttaagctgtttaggtaggaaaccaatttttaatatattaaattagcaatttcaagcaactaacagatttctgtgtatctattgtagtgagtattcctaaccaattaactgaatgttttaagttttgtctgtatgaataaataacaatcaagttgactgaggaaaataaaatacttcagtaacaccatgtttctggatactgagaaaatacgaattatttccaaagttaattgtatattgaaagcaatcacattctaaacacaaacagaatatttaagaaatatgctaagatagtgctaaatctcacttaaaccaagtaaggagattttttaaagttgaaaaatagtaacaattggaaattaacattagcatacattaaccatcttccagagctttggaaagtcaaacagtgtggtattagtgctgggaaaaaattgtaacagaatacataaaaatacaagaaaagacaataatttagtatacttaaggtttattttaagtgaactaaaaatatgatgaattgtattgaaatatttcattaagaattggaggaaaaactagtacaattcttacctcataccccacaccaaaattattctaagttgattaagttggataaaattttaaataacatctaaaaacaatagactttgttaaaagaatctctacatttcttttcattgtggaggcagataattgtcaagtatgtgaagtaaaatgggatgtatggtttttcttcctaatcactgtcatatctgtcatattgatttataaatctaatttccaaaaaaaacaaccaaagttccggatgcccttcccagccatatattctccgtcctaccaaggtgacactattcactttcttctctccataaacctaattccttctattgaaaaaaaaaaaaaaaaaacagtttctccagtcaaagcaaatgttgcctttactattaaggcccttggtggcgcataccttgcattttctcttagttagtccgcctgtcaccttcgttcatgtagcaaattaatttattcctctgtgctcaaagccaatgctttacaaactttgcaatttcggatcttgttaaaattcgaatcttgattcatacgtctagataggccccaagattctgtctttcttacaaatttttgggtgatgctaatgcagctgatctatggaccacactttcagtagcaaggctctattttatttacacatccattttctttccattgcctccttgactgtaaagcaggatgctaacatgctactkccttatttagagatttcacactcatattaactgattttattaggagatcaaaatatgactatccaagaacatcatatttcttcgtaatcaaatgagttaatgaatgtgaaaatattttataaactaaaagatattatatgcagcttattttaaatgttgacacatattaagtaacataattacttataaatataaaagtaaagtaaggttggctgtgtccaa

SEQ ID NO: 692465 - DNA, 1087 bp, Homo sapiens
catgagagccacagaccgtagctgcttctagtcagccatcttggccccacctctacaatgacattttcattttataacctttggaggtttcataactagggaaagcgtgctggtactgataattagtaaccttttacagtacttagtaaaaacattttaatgtcttttatttattttcttttttttttttttaacggatctcgctctgtcacccaggctggaagtgcagtggtgcgatctyggctcactgcagctccacctcccaggttcacaccattctcctgcctcagcctcccgagtagctgggactacaggcgcccaccaccacgcccagctaatatttggtatttttggtagagatggggtttcaccatattagccaggatagccttgatctcctgacctcgtgatccacccgcttcagcctcccaaagtgctgggattacaggcgtgagccactgcgcccggtccttttatttattttctacgttgcatattcactgtatggcctgggagaaaagacggctggtttttaaaattctcagattggtaatttgttcctccttctaagtctttgcctttggtttaaaagaaaacataccctttactttgtctaagttaaggtataatttcactgtatccatcagtaagtagtacttaatctaatatagaacttgaattaagtcatagagtgaggcttttttgctttaagaaaaaaatcttactgctttttcaaaacaacccagcttgtttcttgttactataataatccatacttataattactcatctaacctaaaggaagacaagagaatctggtgttttgtatgtaagatctataaaacctacagtcaattaatttcaccctgtaataattgtagataatctgaaaacatgaagtaatttatttataatccaaaaggatcatgtaggttaccatgtttatgtgatcaaattttagttgttataaatagatcatctacaaataaatctttaaaaataattatcaagtttttttctctgcctttcactttgtgttacttcatacagaataaaatctgtatagctataatctggcattgattga

SEQ ID NO: 692466 - DNA, 1832 bp, Homo sapiens
gactgacattttcgacttttttagcagaataaatttataaggtaaattagggggtgggagccttagtgtcctaggcagattcaaactggtaattacagaggacctaattatgtattcaccacggagccttctggaacagcgaaggctacaggatggctcttattcttcctgcagaggaccatctcccctggaagcttcacaaccaacctttgagagctgcgcttccagccccgggccatggcggcaaagcgcccttgtcatcggcacccacgtcctgatatctgcagagaacatcctgtccctgggcagggagccccagtgtcccccaatagttatgaggtcaaatattcttcagaccaggagtcctgacttggataaagtaaaagtcaaaattacaaggcagggtttggtttttgtttttctttttcatttttgtttttcattttttgttttgagacagagtctcgctctgtcacccaggctggagtgcagtggcacagtcttggctcactgcagtctccacctcctgggttcaagcgattctcctgcctcagccgcccaagtagctgggataacaggtgcccaccaccacacctagctaaggacagggttttttttttaatctggttctgttcgttttcccccaatcccccagagttctagatgacatcggcaggctgtggtatcagaaggatcatttccacggccttctctcctgcttgtctgggagctgccttctctcctgcttgtctgggagccaccttctctcctgcttgtctgggagctccttgggggcaggaaccgtgtcctttgcttctccatctcgtcagagctcagtttgggatctggcctcagtacagttgttgaatgaaggggagaatcaatagtcaacaaaaatgcacaatgaccctaggaagagaaaaaccctgggtttcggcaaagtggtaaactaagagactccctttctcacccaacacagcgccaygcagtgtttgaatacttagacacattttacatgcaaagccctcctttctgtggcctgttcgccctcgttttccaatgccctccctgctcccaaagcacctcatggttcacttggtaactacattgttaccaagcattgtgctctgttgtgggtcaaatcatgccccctacccccccataatatgttggagtcctaagccctgtacctgtgaatgtgccttagggtctttgcaaatgtaattagttaagatgaggtcatcctgggttagggtggaccttccatgcaatgactggtgtcctcctaaaaacacagccatgtgaacacagagacacacagggaggacgtctggtgacaacggaggcagacactggacccagacagctgccagaaacaccaaagaatgctggcaaccaccagaagctaggaagaggcaaggaaggatctctccctggagggggaacgtggcccagagacaccgtgatttcagacttctagcctccctagttgtcaatcagcacctcttgttgtaagccacacagctagcaatactttgttatgccaacccccagaaatgaatgtgtgtgcctgccctgtgctggataatgagccggggccaggccagcagagccaaggtacctggacacagacctctgcctcgggggctcaggggtcacaggtcttttctacgaagtcgtaaaacactgtggaaagtatccccaaggccggggcgcagtgcctcacacccgtaatcccagcactgtaggtgactgaggcaggaggaccttatgaggccaggagttcaaggccagcctaagcaacattgtgagacctcatctctacaaaaatt

SEQ ID NO: 692467 - DNA, 633 bp, Homo sapiens
taccctttgacgcagaaactccacttccgcagaaactccaaaagaactgaaagcaaggattcaagtagattattgtccacccacgttcttagctgtgccattcacaatagccaaaagcagcccaactgtccatcaatggatgggtggataagcaaaatgtggtctatccatatgatagaatattattcagcctcaagaaggaaggagattgtaacacgtgctacaacatggatggacctcgaagacactatactaagtgaaatgagctaggtacaaaaggacaagcactgtatgattccacttacctaaggaacctagagtagtcacattcagagagacagaacggagaatggrgggctggggagaggggaaatgggaagttagtgtttaatggtgccagagctctgtttgggatgatggtaaagctctggagatggacggtggtgatggctgcataacaattgcaatgtacttattgccaccgaactgtgcacttaaaaattgttaaaatggtaaatctaatgtttatcttaccacaattaaaaaaactcacaatcgaagcattgtgagaatcactggagatacacagaaagcccacagcacacagtggacccttgatcaatggtatttttt

SEQ ID NO: 692468 - DNA, 564 bp, Homo sapiens
agcagagcacagcagatttgttgagctaaagcaacaaaaattagagttcaaggaggactggggagaccacgtgtctttgattgactattgatctatacgtgcatagggtgagactctatgaggctgggcaaagaaaaccgtgggagacaaagcaattactgttgagtggtaagccaaacaactaccacaacccacagagttgtgaattattggagttccagccaaccagagtgaagggcccttgttcaacactgagagcattgagtagaaactctagaaaggccaygacttaagagcagggccaaatgaaccacagggtaaatcaagtctacacttaactctaacaaggttttctgacaagcctcaaaagggtaatggtaaactgcaagtaagttaactgcttgctagaacaaagtcaatgctctgaagaaagcaagcaaaatccagccactctacaatggaacactcacaatgtccagcagccagcaaataattactagatatgtgaaaaagcagagaataatactgcccatagccaggagaaaagggccagtcaatagagac

SEQ ID NO: 692469 - DNA, 676 bp, Homo sapiens
atcacatatatatatctagatttagatatatatatctctatctcccattttcttcatgtagtcatccatatacatatagctaggatatatgtactaatttatatatatatgtatctctgtatctatcacattatttttatggctgagtaatattccattgtggtgtaatacagccattaaaaggaatgtcgtaaaaaaaaatgaaatctggtcttctgcagtaacatgcatggaattcgaggcacactcttaagcgaagtaacacagaaaattacagactggaggtcattaacttaagtgaagtagctcagaaaatcaaagttaaataccacatgttcttacttgtaagttggaactgaataatgtacacatagacatagagtgatacagtgtagaataataggcattggatacttggagacttggaggcagccaggaaagggagggtaagggaggagaaattacttaacaggtacaatgtacaatgtttggttagggttacactaaaaccacacacttcaccactatgcaatatatccatgaacaaaactgcacttatacacctaartttatatgaatcatttttttaaagcatgtaattggaatgttcataacgtaaagaaatgataaatgcttgaggtgacagatactccaattttactgatttgatcattac

SEQ ID NO: 692470 - DNA, 668 bp, Homo sapiens
tttccaaggttaggctatgagtcttgataacaaactgtgccaggaagtacctgtcttttaagcctagtggagtgctctttttactctggatgtgaaatctattattttttttcctcaaaagaaatggaaggccgggcatggtggctaacagctgtaattgggaggcctacaagggtggatcacctgaggccgagaccttcctggccaacgtgatgaaaccctgtctctagtaaaaatacaaaaaattagcctggtctagtggcagaagcctgtaatcccagcttctcgggagactgaggcaggacaatcactggaaaccgggaggcggaggttgcagtgagccaagatcgtgccattgcactctgccctgggcaacaagagtgaaactccatctcaaaaaaagaaagaaagaaaagaaagaaagagagagagagagaaagaaagaaaaaaagaaagacagaaagaaagaaagagaagaaagaaagggaagcagtatgtttttttaagctccacaataaatcagcacaattaaacaaaaataaatgaatcaaacaaacaaagagtgaamatgtataagacacaactaggggtaaatgggtctgccctagagagactcataattttttggtgacagtaaatgtaagtcctaaaacagaagtatgaataag

SEQ ID NO: 692471 - DNA, 2982 bp, Homo sapiens
taggcatagcagttaaatgattttataggcatgtgtattttgaamtatgtaagacattcctcttgctgagaaacattctgttcatctggccttgtgttcatttattatttattgtaatttgcagtttgctgaattgtcgtgaagtccatttagagttttatacccctttaaaagacggttacataaaatcatctttgttgttgtttttgttttctaatttgagatgttagctttatttataggtagatagctaaaaaatataaaatataatgtattaaaagcatatacagaagtttcaattaagaatgtatttctggttatcatgaaatctttctagggcaatgaaacacaatatatacatttcctcttacaaatggaaacatgtaatccaaactaggatgcttaaaattttccacagcaattcacattttttcattctgtggttgtctaattagcagatttccaaagggaataggtgagtttataataaataatgcatttatattctgataagtaatattaagaaagaacatttatttccttctctttttgttctcttagcttcattcttcatttctctcactttttaaaataaaacattgttaactattatgagaatggcattcagtacaacttgggataatttaaatgttaacttttataaacttaactcttgttatagttgataaaatattccaaaacttctggcatagttgacatcacaactttgaagctgtgctcattttctggctgtgggcatttctaattagataattactactcttactccattctttcagatattctaacagagaagcattaacctccttataagattttttgttgttgttgctgactcaggatgtaatttctcattttactttttggttgatatattatttgtttttattatttgctatcagagaatagtttgtataattgctgctatttaaaatttactgcattaaaaaattgtctaatttgatatctagccattaaattatacctttcactctatatttaaaactatctcagtggattatgttctatcatacactaatataaagatgttaatcttataattattactcattctattattctttcattttaaacatgttttgcatatttatgttggtagtatattgtgtgacatttaaaagcacataaatgtcacatctttattatcaatataatacaatcatcttgatgttacttttaacttttgcctagaattttaatttgatttcatagtatcacacactcactttttgggagcatttaaatcatttaataaaaaaagttcttatatacctcacggtgctttatggagccaggctggaactggaggcataaggaaatatgtgaactctagcttttacagaagcaaattcatcaatctttttttcaaaatctatttccatgcttctctcattttgaattgagaaaacagacacgtttgacaatttctcctgattaagagacagtctgaaataattttaattagcttcagctgaagtaaaattatgattaaattctgttttgtgacaaattaaatatttaacataaggtttctgggggcaagatggccaactagaagcagctggaggatgcctcttccacagagaggcaccaaaatattgagaaaacctttgcaattcaaacagatcatttgagagaaaacacagaggattaatagttaggtgacacagacactatgcttgaagagggaggaagcatggcagcctgcctggagtcactgagcacctggactggcccctgcacccagattggacgtaaggaagaggtgagtaaaagaactccagaacaccatattgctgttgtggacacctgatatcctagctacaggagttcccatcaccctatggacatttagattggcagggagagacaactggagaacaagcagaggtgtagtttgaaccctcatggactccagagacttccctgtgctgtgcaactatagcaaaacacaacccataggcacccatctcccaaggctctccatcttgcacagagtggttgcagcacctgctgtctgccaggcttggaaattgcagggactggacatgttcttgtgcccatcaccaaggccccatcaccattgccatgggaccaaggtgcatctgatccacatgcccacttacttcctggcccctcctaagactgcctgcctggccactcctgcaagaagatgcccacagcacagcctccactgccccacacagaacacagtgcagtgcagtttcttacgctggcatgggagcaggatgctcttccttcacaaaactggactgggaagggcatggcttgatagtcaaggcttctcctccaggagtcccacccttggaacatctggaatagctcagcaatctgagtgcaggcttgggaaaagcctagccagtcaggcctgctgcagggtggatattggaaagagatgcaccaggtcaggggagcatgagctgagcagcctccatggatacctgctaggctgaaaagccaggctggagaagtcatactggttgcgtacacgtggccactgcctgtccagggatcttcgaactctgagccactgaatcaccagaccacctgcagacatacccaacacacaccgactctacaagcacaagacactggcaggtcactcaggagttgcaggttccctggtgttctaaccctgaggtaggggagagtgaggccctaaggtagggtagagcaaggcccactaaatccccccttggcacaaaggaagcctgggtacagctctagtcactgaagtaggcaccaccaaagcctggaaatggatttagaaaggcgggtcatctctcacgccctgcctcccctacccagtgcaatgtcatggttaggcagcagctcttctagttggggtaagtaagctgcagtggaagtggccacttctcgcagttctccagacactccaccctggctgaagatgagcat

SEQ ID NO: 692472 - DNA, 2982 bp, Homo sapiens
taggcatagcagttaaatgattttataggcatgtgtattttgaaatatgtaagacattcctcttgctgagaaacattctgttcatctggccttgtgttcatttattatttattgtaatttgcagtttgctgaattgtcgtgaagtccatttagagttttatacccctttaaaagacggttacataaaatcatctttgttgttgtttttgttttctaatttgagatgttagctttatttataggtagatagctaaaaaatataaaatataatgtattaaaarcatatacagaagtttcaattaagaatgtatttctggttatcatgaaatctttctagggcaatgaaacacaatatatacatttcctcttacaaatggaaacatgtaatccaaactaggatgcttaaaattttccacagcaattcacattttttcattctgtggttgtctaattagcagatttccaaagggaataggtgagtttataataaataatgcatttatattctgataagtaatattaagaaagaacatttatttccttctctttttgttctcttagcttcattcttcatttctctcactttttaaaataaaacattgttaactattatgagaatggcattcagtacaacttgggataatttaaatgttaacttttataaacttaactcttgttatagttgataaaatattccaaaacttctggcatagttgacatcacaactttgaagctgtgctcattttctggctgtgggcatttctaattagataattactactcttactccattctttcagatattctaacagagaagcattaacctccttataagattttttgttgttgttgctgactcaggatgtaatttctcattttactttttggttgatatattatttgtttttattatttgctatcagagaatagtttgtataattgctgctatttaaaatttactgcattaaaaaattgtctaatttgatatctagccattaaattatacctttcactctatatttaaaactatctcagtggattatgttctatcatacactaatataaagatgttaatcttataattattactcattctattattctttcattttaaacatgttttgcatatttatgttggtagtatattgtgtgacatttaaaagcacataaatgtcacatctttattatcaatataatacaatcatcttgatgttacttttaacttttgcctagaattttaatttgatttcatagtatcacacactcactttttgggagcatttaaatcatttaataaaaaaagttcttatatacctcacggtgctttatggagccaggctggaactggaggcataaggaaatatgtgaactctagcttttacagaagcaaattcatcaatctttttttcaaaatctatttccatgcttctctcattttgaattgagaaaacagacacgtttgacaatttctcctgattaagagacagtctgaaataattttaattagcttcagctgaagtaaaattatgattaaattctgttttgtgacaaattaaatatttaacataaggtttctgggggcaagatggccaactagaagcagctggaggatgcctcttccacagagaggcaccaaaatattgagaaaacctttgcaattcaaacagatcatttgagagaaaacacagaggattaatagttaggtgacacagacactatgcttgaagagggaggaagcatggcagcctgcctggagtcactgagcacctggactggcccctgcacccagattggacgtaaggaagaggtgagtaaaagaactccagaacaccatattgctgttgtggacacctgatatcctagctacaggagttcccatcaccctatggacatttagattggcagggagagacaactggagaacaagcagaggtgtagtttgaaccctcatggactccagagacttccctgtgctgtgcaactatagcaaaacacaacccataggcacccatctcccaaggctctccatcttgcacagagtggttgcagcacctgctgtctgccaggcttggaaattgcagggactggacatgttcttgtgcccatcaccaaggccccatcaccattgccatgggaccaaggtgcatctgatccacatgcccacttacttcctggcccctcctaagactgcctgcctggccactcctgcaagaagatgcccacagcacagcctccactgccccacacagaacacagtgcagtgcagtttcttacgctggcatgggagcaggatgctcttccttcacaaaactggactgggaagggcatggcttgatagtcaaggcttctcctccaggagtcccacccttggaacatctggaatagctcagcaatctgagtgcaggcttgggaaaagcctagccagtcaggcctgctgcagggtggatattggaaagagatgcaccaggtcaggggagcatgagctgagcagcctccatggatacctgctaggctgaaaagccaggctggagaagtcatactggttgcgtacacgtggccactgcctgtccagggatcttcgaactctgagccactgaatcaccagaccacctgcagacatacccaacacacaccgactctacaagcacaagacactggcaggtcactcaggagttgcaggttccctggtgttctaaccctgaggtaggggagagtgaggccctaaggtagggtagagcaaggcccactaaatccccccttggcacaaaggaagcctgggtacagctctagtcactgaagtaggcaccaccaaagcctggaaatggatttagaaaggcgggtcatctctcacgccctgcctcccctacccagtgcaatgtcatggttaggcagcagctcttctagttggggtaagtaagctgcagtggaagtggccacttctcgcagttctccagacactccaccctggctgaagatgagcat

SEQ ID NO: 692473 - DNA, 593 bp, Homo sapiens
ttcttctgtgcagctgtgggaattgcttctgtaggcccagttggggaagttgcctggctacttgcaattttgtcacatctgtcagctgtagctaaatggcaaatatagtaagaggtaacattacatagatttgggacattccctagagggtcttgtctccttgcagcagtgaataaattatatgaaagctgaaatgaaataccgtattgtatttgccaactcatgcaatttgaaagaatgaaaaaaaaaacttcactgcttagattcactatttaaattctccacaaccaacaagctcctwtctaccacgaccatattttctgatccaaaaatcagacctgtgttatctgtggcaggttgtattcttttctgatctgtaaatttttatgaaactattttacaaagaaataatcgtatcatatttagatacatacatacattcaacaaattgccattttggaaataatgaaattgtacagaatcagacatgccagcagatccacaatattaagtgtcagagtctatagaaggctaatataatgattataattatacagtaaaaacagtcaacagcttccagatcaactggggca

SEQ ID NO: 692474 - DNA, 593 bp, Homo sapiens
ttcttctgtgcagctgtgggaattgcttctgtaggcccagttggggaagttgcctggctacttgcaattttgtcacatctgtcagctgtagctaaatggcaaatatagtaagaggtaacattacatagatttgggacattccctagagggtcttgtctccttgcagcagtgaataaattatatgaaagctgaaatgaaataccgtattgtatttgccaactcatgcaatttgaaagaatgaaaaaaaaaacttcactgcttagattcactatttaaattctccacaaccaacaagctcctttctaccacgaycatattttctgatccaaaaatcagacctgtgttatctgtggcaggttgtattcttttctgatctgtaaatttttatgaaactattttacaaagaaataatcgtatcatatttagatacatacatacattcaacaaattgccattttggaaataatgaaattgtacagaatcagacatgccagcagatccacaatattaagtgtcagagtctatagaaggctaatataatgattataattatacagtaaaaacagtcaacagcttccagatcaactggggca

SEQ ID NO: 692475 - DNA, 593 bp, Homo sapiens
ttcttctgtgcagctgtgggaattgcttctgtaggcccagttggggaagttgcctggctacttgcaattttgtcacatctgtcagctgtagctaaatggcaaatatagtaagaggtaacattacatagatttgggacattccctagagggtcttgtctccttgcagcagtgaataaattatatgaaagctgaaatgaaataccgtattgtatttgccaactcatgcaatttgaaagaatgaaaaaaaaaacttcactgcttagattcactatttaaattctccacaaccaacaagctcctttctaccacgaccatattttctgatccaaaaatcagacctgtgttatctgtggcaggttgtattcttttctgatctgtaaatttttatgaaactattttacaaagaaataatcgtatcatatttagatacatacatacattcaacaaattgccattttggaaataatgaaattgtacagaatcagacatgccagcagatccmcaatattaagtgtcagagtctatagaaggctaatataatgattataattatacagtaaaaacagtcaacagcttccagatcaactggggca

SEQ ID NO: 692476 - DNA, 2417 bp, Homo sapiens
  misc_feature 839, 840, 841, 842, 843, 844, 845, 846, 847, 848, 849, 850,851, 852, 853, 854, 855, 856, 857, 858, 859, 860, 861, 862,863, 864, 865, 866, 867, 868, 869, 870, 871, 872, 873, 874,875, 876, 877, 878, 879, 880, 881, 882, 883, 884, 885: n = A,T,C or G
  misc_feature 886, 887, 888, 889, 890, 891, 892, 893, 894, 895, 896, 897,898, 899, 900, 901, 902, 903, 904, 905, 906, 907, 908, 909,910, 911, 912, 913, 914, 915, 916, 917, 918, 919, 920, 921,922, 923, 924, 925, 926, 927, 928, 929, 930, 931, 932: n = A,T,C or G
  misc_feature 933, 934, 935, 936, 937, 938: n = A,T,C or G
taacttaatagatttaaataaagaacaaaaatttaaaagttagctggttgaaactaagcatttcttgttaccgttctacttccacctaaattatttttgcattaagtgtttatatcaacatcataaaagtgtaagcaatgagcttctgtaaaacagtgagcaattcaagaatgaggaccatgttaaccatcagtggatctttaatgctaatgaaggtacgtccataataagttttgctgatcaaaattaattttacacatagaggaaataagaggcaaagcaatctttattaaatggcagagaattaaatcctttgaatgatgttacagaggctgccaaggtagcatgagcaatcactaagttgtatgattattggtttcttgggcaagaggagtgtgtcccatggagttcctatctgtagttaatactgcaatcttataccgactgtaaaacttgagtagggtctgtttagtaatttacatagtagtagattacataggcaaacgtgtatcatagtggtttgctgcacagaccatcctatcataagaaaaacagttttcttaggctggcatctttcctgcagtaagaccacttgtttgtgatgagaacaaatgtggttgacaaaagtgacaggtcctgactaataactaaagcaaggaagtttcattttaactgacaactcagaatatttatactgcagtttcttgtgagatttaatcatgaactgacaaaaatttagcctctgccagtgtaacctaaggaatctgacatttgaaagaatctaactgataagttcaatatctcactatttaagatgatccctatcttaattcagatcnnnnnnnnnnnnnnnnnnnnnnnnnnnnnnnnnnnnnnnnnnnnnnnnnnnnnnnnnnnnnnnnnnnnnnnnnnnnnnnnnnnnnnnnnnnnnnnnnnnnggggaggctactgagcgaggcgtgacgtgcagagaatggcactccaaggcccgtcaagcagtggctagtcgcaccagatagcgatggaggctgtggttgatctgcggtggtcgggaattcactgcctgtagggagctttgctgataatgcaagtcttttgcagtaactagagctgtagcaagacgacacacgatatacggcagcggcctgttagtcggcgatcaacagggcttcggcacatagagaccgttcagcgatgcgggtagaaacgagctggcaggagctagtggtgatatggaagattttagctaggacacttcatccccaggtcattctgcgacccatcaagtgccattgtctatccacttaacaaatactgttctgtattgttctaatcttgttatttattccattggccttaatatgcctattcttctgtgaatttcatgcatggcattaaaatgactatgaataaaaattaaccttcatttttactataaatcagttaatcccggagttgcaaattacttaaatacgtctgtcttagtcttttagcccttgtgccccacctttctttactttttggttcaatggggtaagatgtaagaagaaattgtaaactgtaataaaaagtaaaaaggatgatgagaaaacttctctaatttggtgagtctcacaatttataatcgacaatgtcactcagaggtgacagattgctaaagccaccgctaccgtcccccaacccccaagatttctgattcaatagtctggagtgagcagataatttgcatttctatcaaggtcccaggtaaactgatattgctggtctgcagatcacattttgagatctgtttaagtccaatgaagcrttgaatgaattaaaattactcttaatctttcattttctattccatgaaataaatcttttctctttccttcctgccttcttttttcttcttttctttctttctttcttctttctttcctctttcttctttctttctttatctctgtctttctcttctctctctctctttctttctttctctccttccttcctctctttctttctttctccttccttccttcctttcttccttcctcctctcctctcctctcctctcctctcctctcctctcctctccttttttttcaaatgctcactctgttgcccaggctggagtgcagtggcatgatcatggctcactacagccttgaccacctgggatcaagcaatcctcccacctctgcctcccaagtagctgggaccacaagtgtgcatcaccatgcccaacaattttttcttttatttcttgtagagacagggtatccttatattgcccaggctagtcttgaactcctgggctcaaatgatcctccagctttggcttctcaaagtgctgggattgcaggcatgagccactgcacctggccatttatctttttctactcactcagttcaatcactttaaataaata

SEQ ID NO: 692477 - DNA, 2417 bp, Homo sapiens
  misc_feature 839, 840, 841, 842, 843, 844, 845, 846, 847, 848, 849, 850,851, 852, 853, 854, 855, 856, 857, 858, 859, 860, 861, 862,863, 864, 865, 866, 867, 868, 869, 870, 871, 872, 873, 874,875, 876, 877, 878, 879, 880, 881, 882, 883, 884, 885: n = A,T,C or G
  misc_feature 886, 887, 888, 889, 890, 891, 892, 893, 894, 895, 896, 897,898, 899, 900, 901, 902, 903, 904, 905, 906, 907, 908, 909,910, 911, 912, 913, 914, 915, 916, 917, 918, 919, 920, 921,922, 923, 924, 925, 926, 927, 928, 929, 930, 931, 932: n = A,T,C or G
  misc_feature 933, 934, 935, 936, 937, 938: n = A,T,C or G
taacttaatagatttaaataaagaacaaaaatttaaaagttagctggttgaaactaagcatttcttgttaccgttctacttccacctaaattatttttgcattaagtgtttatatcaacatcataaaagtgtaagcaatgagcttctgtaaaacagtgagcaattcaagaatgaggaccatgttaaccatcagtggatctttaatgctaatgaaggtacgtccataataagttttgctgatcaaaattaattttacacatagaggaaataagaggcaaagcaatctttattaaatggcagagaattaaatcctttgaatgatgttacagaggctgccaaggtagcatgagcaatcactaagttgtatgattattggtttcttgggcaagaggagtgtgtcccatggagttcctatctgtagttaatactgcaatcttataccgactgtaaaacttgagtagggtctgtttagtaatttacatagtagtagattacataggcaaacgtgtatcatagtggtttgctgcacagaccatcctatcataagaaaaacagttttcttaggctggcatctttcctgcagtaagaccacttgtttgtgatgagaacaaatgtggttgacaaaagtgacaggtcctgactaataactaaagcaaggaagtttcattttaactgacaactcagaatatttatactgcagtttcttgtgagatttaatcatgaactgacaaaaatttagcctctgccagtgtaacctaaggaatctgacatttgaaagaatctaactgataagttcaatatctcactatttaagatgatccctatcttaattcagatcnnnnnnnnnnnnnnnnnnnnnnnnnnnnnnnnnnnnnnnnnnnnnnnnnnnnnnnnnnnnnnnnnnnnnnnnnnnnnnnnnnnnnnnnnnnnnnnnnnnnggggaggctactgagcgaggcgtgacgtgcagagaatggcactccaaggcccgtcaagcagtggctagtcgcaccagatagcgatggaggctgtggttgatctgcggtggtcgggaattcactgcctgtagggagctttgctgataatgcaagtcttttgcagtaactagagctgtagcaagacgacacacgatatacggcagcggcctgttagtcggcgatcaacagggcttcggcacatagagaccgttcagcgatgcgggtagaaacgagctggcaggagctagtggtgatatggaagattttagctaggacacttcatccccaggtcattctgcgacccatcaagtgccattgtctatccacttaacaaatactgttctgtattgttctaatcttgttatttattccattggccttaatatgcctattcttctgtgaatttcatgcatggcattaaaatgactatgaataaaaattaaccttcatttttactataaatcagttaatcccggagttgcaaattacttaaatacgtctgtcttagtcttttagcccttgtgccccacctttctttactttttggttcaatggggtaagatgtaagaagaaattgtaaactgtaataaaaagtaaaaaggatgatgagaaaacttctctaatttggtgagtctcacaatttataatcgacaatgtcactcagaggtgacagattgctaaagccaccgctaccgtcccccaacccccaagatttctgattcaatagtctggagtgagcagataatttgcatttctatcaaggtcccaggtaaactgatattgctggtctgcagatcacattttgagatctgtttaagtccaatgaagcgttgaatgaattaaaattactcttaatctttcattttctattccatgaaataaatcttttctctttccttcctkccttcttttttcttcttttctttctttctttcttctttctttcctctttcttctttctttctttatctctgtctttctcttctctctctctctttctttctttctctccttccttcctctctttctttctttctccttccttccttcctttcttccttcctcctctcctctcctctcctctcctctcctctcctctcctctccttttttttcaaatgctcactctgttgcccaggctggagtgcagtggcatgatcatggctcactacagccttgaccacctgggatcaagcaatcctcccacctctgcctcccaagtagctgggaccacaagtgtgcatcaccatgcccaacaattttttcttttatttcttgtagagacagggtatccttatattgcccaggctagtcttgaactcctgggctcaaatgatcctccagctttggcttctcaaagtgctgggattgcaggcatgagccactgcacctggccatttatctttttctactcactcagttcaatcactttaaataaata

SEQ ID NO: 692478 - DNA, 2417 bp, Homo sapiens
  misc_feature 839, 840, 841, 842, 843, 844, 845, 846, 847, 848, 849, 850,851, 852, 853, 854, 855, 856, 857, 858, 859, 860, 861, 862,863, 864, 865, 866, 867, 868, 869, 870, 871, 872, 873, 874,875, 876, 877, 878, 879, 880, 881, 882, 883, 884, 885: n = A,T,C or G
  misc_feature 886, 887, 888, 889, 890, 891, 892, 893, 894, 895, 896, 897,898, 899, 900, 901, 902, 903, 904, 905, 906, 907, 908, 909,910, 911, 912, 913, 914, 915, 916, 917, 918, 919, 920, 921,922, 923, 924, 925, 926, 927, 928, 929, 930, 931, 932: n = A,T,C or G
  misc_feature 933, 934, 935, 936, 937, 938: n = A,T,C or G
taacttaatagatttaaataaagaacaaaaatttaaaagttagctggttgaaactaagcatttcttgttaccgttctacttccacctaaattatttttgcattaagtgtttatatcaacatcataaaagtgtaagcaatgagcttctgtaaaacagtgagcaattcaagaatgaggaccatgttaaccatcagtggatctttaatgctaatgaaggtacgtccataataagttttgctgatcaaaattaattttacacatagaggaaataagaggcaaagcaatctttattaaatggcagagaattaaatcctttgaatgatgttacagaggctgccaaggtagcatgagcaatcactaagttgtatgattattggtttcttgggcaagaggagtgtgtcccatggagttcctatctgtagttaatactgcaatcttataccgactgtaaaacttgagtagggtctgtttagtaatttacatagtagtagattacataggcaaacgtgtatcatagtggtttgctgcacagaccatcctatcataagaaaaacagttttcttaggctggcatctttcctgcagtaagaccacttgtttgtgatgagaacaaatgtggttgacaaaagtgacaggtcctgactaataactaaagcaaggaagtttcattttaactgacaactcagaatatttatactgcagtttcttgtgagatttaatcatgaactgacaaaaatttagcctctgccagtgtaacctaaggaatctgacatttgaaagaatctaactgataagttcaatatctcactatttaagatgatccctatcttaattcagatcnnnnnnnnnnnnnnnnnnnnnnnnnnnnnnnnnnnnnnnnnnnnnnnnnnnnnnnnnnnnnnnnnnnnnnnnnnnnnnnnnnnnnnnnnnnnnnnnnnnnggggaggctactgagcgaggcgtgacgtgcagagaatggcactccaaggcccgtcaagcagtggctagtcgcaccagatagcgatggaggctgtggttgatctgcggtggtcgggaattcactgcctgtagggagctttgctgataatgcaagtcttttgcagtaactagagctgtagcaagacgacacacgatatacggcagcggcctgttagtcggcgatcaacagggcttcggcacatagagaccgttcagcgatgcgggtagaaacgagctggcaggagctagtggtgatatggaagattttagctaggacacttcatccccaggtcattctgcgacccatcaagtgccattgtctatccacttaacaaatactgttctgtattgttctaatcttgttatttattccattggccttaatatgcctattcttctgtgaatttcatgcatggcattaaaatgactatgaataaaaattaaccttcatttttactataaatcagttaatcccggagttgcaaattacttaaatacgtctgtcttagtcttttagcccttgtgccccacctttctttactttttggttcaatggggtaagatgtaagaagaaattgtaaactgtaataaaaagtaaaaaggatgatgagaaaacttctctaatttggtgagtctcacaatttataatcgacaatgtcactcagaggtgacagattgctaaagccaccgctaccgtcccccaacccccaagatttctgattcaatagtctggagtgagcagataatttgcatttctatcaaggtcccaggtaaactgatattgctggtctgcagatcacattttgagatctgtttaagtccaatgaagcgttgaatgaattaaaattactcttaatctttcattttctattccatgaaataaatcttttctctttccttcctgccttcttttttcttcttttctttctttctttcttctttctttcctctttcttctttctttctttatctctgtcttkctcttctctctctctctttctttctttctctccttccttcctctctttctttctttctccttccttccttcctttcttccttcctcctctcctctcctctcctctcctctcctctcctctcctctccttttttttcaaatgctcactctgttgcccaggctggagtgcagtggcatgatcatggctcactacagccttgaccacctgggatcaagcaatcctcccacctctgcctcccaagtagctgggaccacaagtgtgcatcaccatgcccaacaattttttcttttatttcttgtagagacagggtatccttatattgcccaggctagtcttgaactcctgggctcaaatgatcctccagctttggcttctcaaagtgctgggattgcaggcatgagccactgcacctggccatttatctttttctactcactcagttcaatcactttaaataaata

SEQ ID NO: 692479 - DNA, 631 bp, Homo sapiens
tatatatatatatayatacacacacacacacatataaaatgtatattctacttttaatagaaatacacaattcaaaaccacatttgttcctatgaaaattctctactactttaaactgccaagatatcaagatattattttctattttccatcccttttttgaagctgtgtctttgtaatcctaatgtcttaaaaaataacacacacatgcacacacacacatgtgcacacacacacacacaaatatacatagactttatccgacagacatctgaattatatgaaacctgtagtctatataatgaagtcaaacttcttttgagctcgcatttttgtgagctacacataactgactttattaatcattatttctatggaaattcttaataagaaaacaataggtagtacttttttttaattatcaaattccaaattgttaactttgggtttagtgagaaataatttagttctgccatcttactgaccttggagtggtggaatattttggaagagaaatatatgtgtccatcatacctaatatatatgataaattgtgtatatatgcatacatatataatgtgtatgctgaagacatttctacgtagttttaatatgttaagcttctgacttt

SEQ ID NO: 692480 - DNA, 631 bp, Homo sapiens
tatatatatatatatayacacacacacacacatataaaatgtatattctacttttaatagaaatacacaattcaaaaccacatttgttcctatgaaaattctctactactttaaactgccaagatatcaagatattattttctattttccatcccttttttgaagctgtgtctttgtaatcctaatgtcttaaaaaataacacacacatgcacacacacacatgtgcacacacacacacacaaatatacatagactttatccgacagacatctgaattatatgaaacctgtagtctatataatgaagtcaaacttcttttgagctcgcatttttgtgagctacacataactgactttattaatcattatttctatggaaattcttaataagaaaacaataggtagtacttttttttaattatcaaattccaaattgttaactttgggtttagtgagaaataatttagttctgccatcttactgaccttggagtggtggaatattttggaagagaaatatatgtgtccatcatacctaatatatatgataaattgtgtatatatgcatacatatataatgtgtatgctgaagacatttctacgtagttttaatatgttaagcttctgacttt

SEQ ID NO: 692481 - DNA, 623 bp, Homo sapiens
gcaaagacaaaataaaccaaaacagaaaatcaaaaccacagataaaagaaaaaaagagaaaccacaagaatcttgttcacatctatttgaagagggtggaggctacartaacaacacatttaaaatgcttttcaggcactttttctgatttctcattgtttatgctatttgacttcccatgagattatcctaattttttctgtcataagaatatcaaacaaggttgtttctgtttttggtgtcacttacctgttttttgcattgagtgactctgagatatttgcatctaacccacattgtatttttaaatacataagatgttatctatcggtttgaatattttccaaacaaaattttaataaaagaaagatttaaaaagcagaagccatgtaaactgttttataaaagttaaaaaaatagcaaaggaaacacatacacacaaacatgccatcaagtgccaccactagccagttcttatcccattaacatagttctttaataatttaaaaataaatgatgataaaggaagcataaaacctgtgagaagaggttacagtgaatctacagagattcctaatatacatattaggaaaatgaataaaaaatgctcaattcaagaaggt

SEQ ID NO: 692482 - DNA, 649 bp, Homo sapiens
agcgttttccatagttccatgtttctacaacccctgggaacatcagaatcatgtgtgtgtgggtgcttattaaatacaccaattcctgggctcactcccagtgactcccagtttgatgattgggggctcagctaggacctatgttttcaaaagctcccaggtgatctcatgcagccagactggctctggctctggctctgggagctgggttgggaactagtctttggtgctattctgctgaaacttcaagttgggctctttgactccatcttgtattgtcatcacttgtattcaggtctgttcttcctctggattgtaaactccttgatgtctgggtcatctcagctcatgagctgagctttcagtcggtgctcagtggaacaggtgctggatgcagtcaggctctagggaggccaacgtgtgttggtaagtgagtgaaaaaaatcattttaaaaagaaactttttgctcttcagttttgtttgccatgagtyaatgtgatttactgtagtggaagccagtgcagcttaagtggaggtcttgccctgaaatggagccaggttatggatcagcagagctgccgaaagcattttgggggaaatgtttctctgtcaccctcagttgactgaactcaagttttcactcccgtt

SEQ ID NO: 692483 - DNA, 1243 bp, Homo sapiens
aagtgggcatggcacctgccaaatcataggggccactattaacaccttcaccacacactcaggacatgaacactcctgtcttggggccctgcagggtgactttacccccacagtgctgctatgaagagacaaggatcccccagcgttcacctatggagatgggatatggagctgggcaaggggatgccatgaccagacagggcacaacatgggtccaagatacccaggttggactctgcccagaattggctatccttgggcaaaacagccaagagactgtggtgcagtatgaggctccagcccctgctacagacagagacwcccagccagcctctgtcctaccagcagcaggcatgacctgtgccattccacacccccaaggatgacgttcaaatctgttcatggcttcggcccatcagaacagacactgacatggatgccctgcaggactgtgcccatgtgtgttagctgtgtgtcactgcatgtgcccatctgtgggcagggagcatcctggagctgaacatgggcccactcgctgccttttgcaaacagggccctgttccccagcagcccagacctggggcctggactctggtactgagcagactgggttggggctgcaggcctgctcctctctatacaaagtcccatgtctgtatctatgccgtggatgtacaacaggccacttgctcctaccgcatgctccgtgaggcagagaccaaaacatatgctccaagtgtcacgaaaactatgacagggtaagctctgtcccctggtatgaaaagggagaatccctgatgtgtttttcatactgtccctaaggggtgtccacagagccccacacctgccccgtgtagccacgagatttcacactgaccctccagtgttgatggggccctgtgcccaccctgagttattaacggaatgtccatgacgtggaacccccacacctgtctccagggtgtccacgccctacccatctgcccccagtgtgtccatgagacttcccttccacccctggagtgtccacaggaagccccaccggcctccgccatgtccacaggacgctatgtgaccataggaccccatatctgtccctgggatgtctatgtctagccaaccacccacagatagccataaagaaccctgccccaccctcccagtgcccacagctatactcactgctgagtccagttttgttcagggtgctgcccacaccccaaagggcggctgccacacagag

SEQ ID NO: 692484 - DNA, 1243 bp, Homo sapiens
aagtgggcatggcacctgccaaatcataggggccactattaacaccttcaccacacactcaggacatgaacactcctgtcttggggccctgcagggtgactttacccccacagtgctgctatgaagagacaaggatcccccagcgttcacctatggagatgggatatggagctgggcaaggggatgccatgaccagacagggcacaacatgggtccaagatacccaggttggactctgcccagaattggctatccttgggcaaaacagccaagagactgtggtgcagtatgaggctccagcccctgctacagacagagactcccagccagcctctgtcctaccagcagcaggcatgacctgtgccattccacacccccaaggatgacgttcaaatctgttcatggcttcggcccatcagaacagacactgacatggatgccctgcaggactgtgcccatgtgtgttagctgtgtgtcactgcatgtgcccatctgtgggcagggagcatcctggagctgaacatgggcccactcgctgccttttgcaaacagggccctgttccccagcagcccagacctggggcctggactctggtactgagcagactgggttggggctgcaggcctgctcctctctatacaaagtcccatgtctgtatctatgccgtggatgtacaacaggccacttgctcctaccgcatgctccgtgaggcagagaccaaaacatatgctccaagtgtcacgaaaactatgacagggtaagctctgtcccctggtatgaaaagggagaatccctgatgtgtttttcatactgtccctaaggggtgtccacagagccccacacctgccccgtgtagccacgagatttcacactgaccctccagtgttgatggggccctgtgcccaccctgrgttattaacggaatgtccatgacgtggaacccccacacctgtctccagggtgtccacgccctacccatctgcccccagtgtgtccatgagacttcccttccacccctggagtgtccacaggaagccccaccggcctccgccatgtccacaggacgctatgtgaccataggaccccatatctgtccctgggatgtctatgtctagccaaccacccacagatagccataaagaaccctgccccaccctcccagtgcccacagctatactcactgctgagtccagttttgttcagggtgctgcccacaccccaaagggcggctgccacacagag

SEQ ID NO: 692485 - DNA, 1243 bp, Homo sapiens
aagtgggcatggcacctgccaaatcataggggccactattaacaccttcaccacacactcaggacatgaacactcctgtcttggggccctgcagggtgactttacccccacagtgctgctatgaagagacaaggatcccccagcgttcacctatggagatgggatatggagctgggcaaggggatgccatgaccagacagggcacaacatgggtccaagatacccaggttggactctgcccagaattggctatccttgggcaaaacagccaagagactgtggtgcagtatgaggctccagcccctgctacagacagagactcccagccagcctctgtcctaccagcagcaggcatgacctgtgccattccacacccccaaggatgacgttcaaatctgttcatggcttcggcccatcagaacagacactgacatggatgccctgcaggactgtgcccatgtgtgttagctgtgtgtcactgcatgtgcccatctgtgggcagggagcatcctggagctgaacatgggcccactcgctgccttttgcaaacagggccctgttccccagcagcccagacctggggcctggactctggtactgagcagactgggttggggctgcaggcctgctcctctctatacaaagtcccatgtctgtatctatgccgtggatgtacaacaggccacttgctcctaccgcatgctccgtgaggcagagaccaaaacatatgctccaagtgtcacgaaaactatgacagggtaagctctgtcccctggtatgaaaagggagaatccctgatgtgtttttcatactgtccctaaggggtgtccacagagccccacacctgccccgtgtagccacgagatttcacactgaccctccagtgttgatggggccctgtgcccaccctgagttattaacggaatgtccatgacgtggaacccccacacctgtctccagggtgtccacgccctacccatctgcccccagtgtgtccatgagacttcccttccacccctggagtgtccacaggaagccccaccggcctccgccatgtccacaggacgctatgtgaccataggaccccatatctgtccctgggatgtctatgtctagccaaccacccacagatagccataaagaaccctgccccrccctcccagtgcccacagctatactcactgctgagtccagttttgttcagggtgctgcccacaccccaaagggcggctgccacacagag

SEQ ID NO: 692486 - DNA, 237 bp, Homo sapiens
tggggtgctcagcctacctgcagtggccctggggcatgctgggagagaaaggggcacagggcttaccctaggaggagagggccctggagaagccatggcaaagctgtgaccrtgggtgggcagagctgatcagagtctgcagatttgagctgggcataagaggctgtgggatttggacacaggggccatccatactgttaccagaacgtggagaagagccagtaggaatactggcta

SEQ ID NO: 692487 - DNA, 1033 bp, Homo sapiens
atctgtccctggactcatttcgttcaacaaaagggatctcgcaagsctcctaagactttatttttcgtttctcctagttagttagttagagttaggatttcactctgttgcccaggctggagtgcactggctcgatcatagctcactgcagcctccaactcttggactcaagcgatcctcctgccttagccttccgagtacccagtattacaggcacgcaccaccatgcctggctattttctttttaattttttgtacagatgggggtctcaccatgttgctcaggctggcctcaaactcctggcctcaagtgaccctcctgcctcagcctcccaaagcgctggaattacaggtgtgagccaccacacccagccaagactcctaaggctttagaaatagttgccttgtcctctaataagaaacccccaaagagagctgtaattctgactggttttctcacttgggaatggttgtcttggaaggagcattgcagctgacatctctgtatttctaaactgttttgtgggctttctctatgaaatcaggagtcactgccacattcctcttcttccacttgcacagtagggcaaatgaaacctaagtccatgctggctatataaacacaacttgaaaggctcagttgttgaaattaacaggaataagcattttttccctattgaatcacctattggatcattcaaaattcacagtggggccaggcacagtggctcatgcctgtaatctcagcatttaaggaggccaaggctggagatcacttgagcccaggagtttgagataagcctgggcaaaatagtgagaccctatctctacaaaaaaaaaaaaaaaaaaaggattagctgggcatggtggtgagagcctatattcccagctacttgggaggctgaggtgggaggatcgcttgagcccaggaggtcgaggctgcagtgagccgagattgcaccactgcactccagctggggacttgtgctctctccctgctctctctgcctcttctctcccctagaagccctcc

SEQ ID NO: 692488 - DNA, 641 bp, Homo sapiens
cttatgaaatatttattgtattttattgagttgctctgaatcaaataaataagaatgtgaattctagttctaagataygaataattgtaaagttatttaagtataccttgtgtatcattctgattgtacgtgatttacttctgaattacttcacttccgagaagcatatttctgtgaatgaaaaatttatgtgtaatgtgtgtctgcgagtttatgagtgtgtattatatgtgtttttgatgaatagatccagttaattgaaagccagtcaatttttcgtactcctctgtaaatactgtttgattattcatagctcttcaaggaaaattttgcttgttatttccccattaaagtgggctggttataaactgagaagtcaaaaggtcctctacagctttaattagagtgcctgctaagttgctacaacaaaggaacacaaaaatctggcggctcaagcaaaatagaatttgtctctcatgtaagagtgggcagtctatggaggagaggtggctctgctgtataatatacaaaatatgtgttatctctgcttcataaagttgtatggagactcaggggccttctaccttgctgctctattaatccctaaagaagtaattctcaaactttacatgcatcagaat

SEQ ID NO: 692489 - DNA, 641 bp, Homo sapiens
cttatgaaatatttattgtattttattgagttgctctgaatcaaataaataagaatgtgaattctagttctaagatatgaataattgtaaagttatttaagtataccttgtgtatcattctgattgtaygtgatttacttctgaattacttcacttccgagaagcatatttctgtgaatgaaaaatttatgtgtaatgtgtgtctgcgagtttatgagtgtgtattatatgtgtttttgatgaatagatccagttaattgaaagccagtcaatttttcgtactcctctgtaaatactgtttgattattcatagctcttcaaggaaaattttgcttgttatttccccattaaagtgggctggttataaactgagaagtcaaaaggtcctctacagctttaattagagtgcctgctaagttgctacaacaaaggaacacaaaaatctggcggctcaagcaaaatagaatttgtctctcatgtaagagtgggcagtctatggaggagaggtggctctgctgtataatatacaaaatatgtgttatctctgcttcataaagttgtatggagactcaggggccttctaccttgctgctctattaatccctaaagaagtaattctcaaactttacatgcatcagaat

SEQ ID NO: 692490 - DNA, 641 bp, Homo sapiens
cttatgaaatatttattgtattttattgagttgctctgaatcaaataaataagaatgtgaattctagttctaagatatgaataattgtaaagttatttaagtataccttgtgtatcattctgattgtacgtgatttacttctgaattacttcacttccgagaagcatatttctgtgaatgaaaaatttatgtgtaatgtgtgtctgcgagtttatgagtgtgtattatatgtgtttttgatgaatagatccagttaattgaaagccagtcaatttttcgtactcctctgtaaatactgtttgattattcatagctcttcaaggaaaattttgcttgttatttccccattaaagtgggctggttataaactsagaagtcaaaaggtcctctacagctttaattagagtgcctgctaagttgctacaacaaaggaacacaaaaatctggcggctcaagcaaaatagaatttgtctctcatgtaagagtgggcagtctatggaggagaggtggctctgctgtataatatacaaaatatgtgttatctctgcttcataaagttgtatggagactcaggggccttctaccttgctgctctattaatccctaaagaagtaattctcaaactttacatgcatcagaat

SEQ ID NO: 692491 - DNA, 642 bp, Homo sapiens
ccaccactgctaccccatagatttttaccatcccttcttaggatgaaggcctctataaagtatttccctggggtttcataacagccttttgacgatccaggacaagaaaaaatccaccctgaaccaatcctracaaaagcaaacctgttctgtgtatgcaccctgcatggggtaaaaatggtctggcctggctagaagaatctgttcattccaatctagtttattagtctccagagcccttgagccttaataaatgattggaaattaaatgatgttctggtaatccacaagatagtgaacacaaagtatactgtgatatctcaagaggctgccatgaggcaatggttagtgatactcataaaaacaaaagaacagataaacatacatctctagaaagaaatcaatgtaaagcatttgaaaatgcagaagtcatggtttaaaagtggctgtagtggctgtcgcagtggttcacgcctgtaatcccagcactttgggaggctgaggcaggaggattgcttcaggtcaggaattcaagaccatcctggctaacaaggtgaaatcctgtctccactaaaactacaaaaaattagcttggcgtggtggtgcacgcctgcagtcctagctactcaggaggctgaggca

SEQ ID NO: 692492 - DNA, 600 bp, Homo sapiens
ggagattctgaatgctgtagagtgttcaaatacagtaaagatggaaatatgtccattwattctaacaatctggagggcagggtgactctggtgaagagtgttttagaaagtttaaatataataaagactgaaatatatccattgactttcaacctggagagctggatgaccttggtggggagaatttcagcgtagtgatcgagtgagacatattggagtgagtgagaaatgaagaaatgtagacatcaaggggcagaaactggttaaagaaatttggctgaagggctttagtttgcacaaaaatcaaaggaagtaggtattattcctaccatcttagggttgggcaaactgagttttatagaggttttattgtcaaaagccacatagtaaataccagagcaagaattcaaagatctgctgccttcaaagatccaaaatctacgctagatttacttaaattcaattataccacatcatcacatatcacatcagattaaaaatgtatattgaaaaaaacatatactgaagatgaagccattttatcatatgtaaatgatctctcaatgaaaattaaacattaataatatatagaaataaaca

SEQ ID NO: 692493 - DNA, 1187 bp, Homo sapiens
taacttcactttctcaattttctgtttaataattcttcacaacctgatttttgatggaatattttagaacaaataacagtttaaatactgttaagttgtatatgtgttcacaatgtcacaaagcttgcctgttagaaacttcatgagtgacatacatagtacagatctcattgtctgatcctttccccaggtttctggataatttagaaacaagcctgaattaaccaatgattctcagtgattctgccgattttaaatatgtaagcctcagctattataattttataactaaattttgtcacatctagctcattgacagtgaattcatcttaataggcacttggttgaattatctttaatcaaactgtatttgtttttgtgatttcatttaatcaaagagtaaaagaataatttaatgtttagattaaattcttccatgataaatggttatgctgttcaaataygaagttgctggccaactgtcatggctgctgggtgttcatagaagtatatatcatctgtctgaagagtctgggctttgtgttctgctatgttttatagcactcaatcaccatggggcttagtaatcagaatttggtgtttatggccaaaacttgaacagctacctcatcagaaagaatgatagtacttcaccttgaatctaacatacagtcattaattacaaagcagatgtatttttaaaaacaatggaagaagtaaggaaaataatttttatcatatttaaagcctgaagttaatgtctaattctcatcacagtatcagtttttacacgatttctcttctgaagttttggattttatggtcaattaaaattaacagtttaaaattacatccaaaatatccaaagcatgagttgctctacaataatttgtgttgtctgtagtttccattttgctatcttgcctttcccttgacattttggagattttgcattatttttaacttttttccaggaagcaacactaaagaaaaacactgctggtgtcaaaattccagctgagttttattcactttgatttaccccataactagactcagtgtctacaagcaatgtgaactagcgagttgaacagttagctactgaatattgtccctgaagctacttttctcccagttgtttcttagtgttatgattatcaccaaccatgacttcttcttttatagcg

SEQ ID NO: 692494 - DNA, 716 bp, Homo sapiens
aattggaccttaataaaattaaaaacttgcatattgtgaaaacccatgtaaagaggatgaaaacaagggtcccagactgggagaaaatatttgctaaacacttatacataaaaggactattgtctataatttacaagcactcacaaaggttgacattaacaaaraagataattcaatcagaaaaatgggcaaaagacgtactagtgggaattatagaaattatattattgaagacattacactatatttttatctgcaagttataagggtttctttcaaaattaaaaataggcttaccatacaacttggcaattgtgcccttgggtatttttccgagaaaaacaaaaactatgttcacacagaaatgtgtccgtgaaagtttatagcaatataactaatcatagcaaaaaattagaaactacacacatatcacctcttgaggtgggaatgtttaaagaaactgtgatacacatccgtaccatgaaatagtactcagtaataaaaaggaatgaaccatggatacacacaaaaacttgcataaacctctaattaactatattgaatgaaaaaagccaacatcaaaagtttaacactgagaatatgatctgacttatatagtgctcttgaaataacacagttatagagatggaaagcaagattaatggttgtcaacatttagaatgggagagcctggggtgtggctaccaaggagctta

SEQ ID NO: 692495 - DNA, 642 bp, Homo sapiens
atataatatatattatataatgtatatataatataatatayatattatatataatgtatattatattgtatatattacatataatatatattatataatgtatatataatataatatacaatatataatatagtatatattatatataatataatataatataatatgtaatattaatattatattatataatatataatataatataatattaatattatatataatatataatatatatattatatatacacaaaagaataaagcagaatgtccatagacttcctgtcagaaactatgcaagccagaggacatatgctattgacacagagtctgtatccagtgataatattcttgagggataaaaaagaaaaataagaattttatcaggaaggtaaaaagcagacataatccattaaataaacccattaaataaattattcctggaagtaaaatagaaccataacattattaatcattattaatattaaatatttgtaaatattaaataaagcaggaaaaatgaaaacagagaaaacaaatagtaaaatgatagatttaaactcgaccatatcatattacatgtcaatagtctaaatagtttaattaaaaggcagagatcatcagactggattataacaa

SEQ ID NO: 692496 - DNA, 642 bp, Homo sapiens
atataatatatattatataatgtatatataatataatatatatattatatataatgtatattatattgtatatattacatataatatatattatataatgtatatataatataatatacaatatataatatagtatatattatatataatataatataatataatatgtaatattaatattatattatatwatatataatataatataatattaatattatatataatatataatatatatattatatatacacaaaagaataaagcagaatgtccatagacttcctgtcagaaactatgcaagccagaggacatatgctattgacacagagtctgtatccagtgataatattcttgagggataaaaaagaaaaataagaattttatcaggaaggtaaaaagcagacataatccattaaataaacccattaaataaattattcctggaagtaaaatagaaccataacattattaatcattattaatattaaatatttgtaaatattaaataaagcaggaaaaatgaaaacagagaaaacaaatagtaaaatgatagatttaaactcgaccatatcatattacatgtcaatagtctaaatagtttaattaaaaggcagagatcatcagactggattataacaa

SEQ ID NO: 692497 - DNA, 634 bp, Homo sapiens
tccctgaggtttctcccttgcaatgacaactaaatccaacttgttgaaccacaggcatgttcctggtggtctttggtgcagagtattgaccactcttagctaaaaaagaacagacttcttcagatagaccacctgggttcgaatcccagctctgccacttcctccccaccatgtacttcctaggccaagttatgaaacttcactgggcctcaattttctcatttgctcatttgtaatatggtaatgagggaattttatctactgctttcagttttttttttgaaagttataaagtaatacatagaaagtttatataacataacatttaaaacacacaccaatcaaatcaatcctacttaaattgataaccaaagccatcactgtggataataaagcgtttgttaattgkctgctgcctacctttttagcctcaaagtacctcagttttctcctctataataggaggatgatagtatcaataataatagaaggataatgacatcaaatcaatagtattacaaagattaggtaaatttcacaactacactgggctgggtctttggaatacctctcaccttcagcacttagtaggcacacgacagatgttactttacctccctgatctgagcaaaca

SEQ ID NO: 692498 - DNA, 791 bp, Homo sapiens
tttttttctttttgagacagaatgtcgctctgttgcccaggatggagtgcagtggcgccatctcggctcactgcaagctccgcctcctgggttcacgccattctcctgcctcagcctcccaagtagctgggactacaggtgcctgccaccacgcccggctaattttttttgtatttttagtagagacggggtttcaccgtgttagccaggatggtctcgatctcctgacctcatgatccgcccgcctcggcctcccaaagtgctgggattagaggcatgagccaccacgcccagcctatagctaccttaaaaaattatatttacacacacacacacacacacacacacacacagccattacccatgacatctcggacaaattctgggggaggtcgaggtgcccattcactcattttctctggaattggaactgctttgtcctgcaacatttaaacatgaaagcatttaagtataaacctgttgacaaaattatatatctccctctctttttttagagacaggttcttgctctgttcctcaggctggagtgcagtggtgcaatcagagctcactgcagccttgaactcctgggctcaagtgatcctcccggttcagtctccagaatagttaggactcwcaggcgtacaccaccacaccaggcaatttttttatttttgtaaagacagggacccactatgttgcccaggctggtcttgaactccttcctggcctcggaccatcctcccgcctggcctcccaaagcgctgaaattacaggcaggggccacagca

SEQ ID NO: 692499 - DNA, 1473 bp, Homo sapiens
ctagttctatgcatgcccggactttggatttaatcaatgcctagcactcaatgctgtcctgcccccagagcacacaccgtatttctataggttgcaatgtatattttgttgtttgtgtcaggtatttttgagtaaacagaagaaagaaaatatttttgattttgtcttgttttgtttggattacgcttttgaaggcataaatggtgataagaacaatattgtaaactggttgtttgtcatttccttgccctcctaatggacaggttttgagtcagaagctccagcaggcaagttcatggaagcctttgtgagacttgaagcaccttcgcgatccaggtgattaaggccactggagtgggaagatggccatttcccctatttccatgtgagtgcccagaggtagcccccacaggcactgtgcagtggcaggacagtagcctccacccgctgagccaggcagagtggccagaacccctgtgtgttcagctcacctgtcctagtagcttccccaaattcctctagccagctagcttgcctggagtggaagaacattagtggatttactaagtatgtcagacaatcctaaggccctccctcaatatggttcatggtgatagggcccagagggaagttgcatgagaagctgaggtcctccagtcaaatgagcaggaacttagatagggtgatatttagggtagatgtagaagatgttgatgtggccacagttgtacttaaaaggttgctgatgcctttcagttacttatgcctacagagaacctcaaaacagaaaaacaaacaaaccaacaaacttgcaactagccttagaaaaaaactgtaggatcggaaggctgtttccaggattcctcctccttctcttgaatttccattttgatgtctttttcccttctttcattagttcgccaccctttagttctcagtattctcagtatgtaatattataactagcccctttacctggtgwtccatcaagctctgctgccagttaggctggacctttctgatctcttcttcctccttcaaaacttaactggcttagttcaacagaacagaagaaagagtccagaataagacgaaaatacatatggtaaattggcgttagtacgataaagtggcggtagcatgcctgtgaagggaaatgaatctttttcttggaaataataattgtatcactcagttatttcctgtaacaaaataaattctgaaaagataaaaattaaacataaaaagatgtgagaattttctagactaaaacatggagaaatatttagtaaaaaaattgattacatttgacttcaaagtaataatattctctgtggggaaaatcttgtataaagtcaaaagaaaatatttgttaaacgttatttgcaattaaaattattaaacaaaattcaaatttttcttaatataaaaatatcaactgcaactcaaaagaaaaacgttagtaacccaata

SEQ ID NO: 692500 - DNA, 1386 bp, Homo sapiens
atatatatatatatatatatayatacacacacacacacacacacacacacaaacacacacatacacataaagagagagattgattgtggaaagcagtacaaaatttattatcaaatgaatataaataataactcacttcaggccgggcttggtggctcacgcctgtaatccctgtactttcagaggccaaggtgggtggatcacctgaggtcaggagttcaagaccagcctggccaacatggtgaaaccccatctctactaaaaatacaaaaattagccagtcgcagtggcatgtgtctgtaaccccagctactcgggaggctgaggcaggagaatcacttgaacctgggaggtggaagttgtggtgagtgaagatcacgtgccactgcactccagcctgggcgacagagtgagcctccatctcaaaaaatagtaataactcacttcaggaacaaagtgatcactctaggtaggtggctttaaggtagcatttgttgagcccctgctttgtgccaggtttgtattcaaagttcccatgctcatttaatttttaacagctttttaaaggagtgcaggattaatgataagaggtaggagcataattaaggcctagggtggaacataatcaaagcaaagaacaagccatgcttaggggctcagaagtagcctactgtcactggagtaaaaggttacggtatgtagtggaagacaaggtcaaaaagtagcacatatgaagatgagcatgctaggtgaaggaatcggaactttatccaggagagcagtgagaagccaaggaaagattttgactagaggagtcaaagaacagctgtgctttaggaaggttaatctggaaagaagaggaaggccttttaggcaaagatcaattaggaggtgcttatagcaatgaaggtataaatgataaagtctgaagtcggtgatagcaaaggaaagacaaaaggataaatataatgcattttaaaggtacatgacaaatctagtcacagaggacagccaaaaaaaaaaaaattgaagatacctggccataaggatgactatgaccatgatttattcagtaaaagttttttaattaatttaaatcaaaattttactcatctttattttgtacattgcaaactcccaggataaagtaaactgattagaaattacttaacttgttttaattttttacttttataccacagattatctcaagaacatgagttggcaattaccttcttggtttaaatatcaattttatgttgatttcacttccatttgtgaaacaaaaacagtagataaatccactcttgcttaaaaaaaaaaagactagaataagaaaatacagtcattcctgggtatccacgtgagattggtagatatccggcc

SEQ ID NO: 692501 - DNA, 1386 bp, Homo sapiens
atatatatatatatatatatacatayacacacacacacacacacacacacaaacacacacatacacataaagagagagattgattgtggaaagcagtacaaaatttattatcaaatgaatataaataataactcacttcaggccgggcttggtggctcacgcctgtaatccctgtactttcagaggccaaggtgggtggatcacctgaggtcaggagttcaagaccagcctggccaacatggtgaaaccccatctctactaaaaatacaaaaattagccagtcgcagtggcatgtgtctgtaaccccagctactcgggaggctgaggcaggagaatcacttgaacctgggaggtggaagttgtggtgagtgaagatcacgtgccactgcactccagcctgggcgacagagtgagcctccatctcaaaaaatagtaataactcacttcaggaacaaagtgatcactctaggtaggtggctttaaggtagcatttgttgagcccctgctttgtgccaggtttgtattcaaagttcccatgctcatttaatttttaacagctttttaaaggagtgcaggattaatgataagaggtaggagcataattaaggcctagggtggaacataatcaaagcaaagaacaagccatgcttaggggctcagaagtagcctactgtcactggagtaaaaggttacggtatgtagtggaagacaaggtcaaaaagtagcacatatgaagatgagcatgctaggtgaaggaatcggaactttatccaggagagcagtgagaagccaaggaaagattttgactagaggagtcaaagaacagctgtgctttaggaaggttaatctggaaagaagaggaaggccttttaggcaaagatcaattaggaggtgcttatagcaatgaaggtataaatgataaagtctgaagtcggtgatagcaaaggaaagacaaaaggataaatataatgcattttaaaggtacatgacaaatctagtcacagaggacagccaaaaaaaaaaaaattgaagatacctggccataaggatgactatgaccatgatttattcagtaaaagttttttaattaatttaaatcaaaattttactcatctttattttgtacattgcaaactcccaggataaagtaaactgattagaaattacttaacttgttttaattttttacttttataccacagattatctcaagaacatgagttggcaattaccttcttggtttaaatatcaattttatgttgatttcacttccatttgtgaaacaaaaacagtagataaatccactcttgcttaaaaaaaaaaagactagaataagaaaatacagtcattcctgggtatccacgtgagattggtagatatccggcc

SEQ ID NO: 692502 - DNA, 1386 bp, Homo sapiens
atatatatatatatatatatacatacayacacacacacacacacacacacaaacacacacatacacataaagagagagattgattgtggaaagcagtacaaaatttattatcaaatgaatataaataataactcacttcaggccgggcttggtggctcacgcctgtaatccctgtactttcagaggccaaggtgggtggatcacctgaggtcaggagttcaagaccagcctggccaacatggtgaaaccccatctctactaaaaatacaaaaattagccagtcgcagtggcatgtgtctgtaaccccagctactcgggaggctgaggcaggagaatcacttgaacctgggaggtggaagttgtggtgagtgaagatcacgtgccactgcactccagcctgggcgacagagtgagcctccatctcaaaaaatagtaataactcacttcaggaacaaagtgatcactctaggtaggtggctttaaggtagcatttgttgagcccctgctttgtgccaggtttgtattcaaagttcccatgctcatttaatttttaacagctttttaaaggagtgcaggattaatgataagaggtaggagcataattaaggcctagggtggaacataatcaaagcaaagaacaagccatgcttaggggctcagaagtagcctactgtcactggagtaaaaggttacggtatgtagtggaagacaaggtcaaaaagtagcacatatgaagatgagcatgctaggtgaaggaatcggaactttatccaggagagcagtgagaagccaaggaaagattttgactagaggagtcaaagaacagctgtgctttaggaaggttaatctggaaagaagaggaaggccttttaggcaaagatcaattaggaggtgcttatagcaatgaaggtataaatgataaagtctgaagtcggtgatagcaaaggaaagacaaaaggataaatataatgcattttaaaggtacatgacaaatctagtcacagaggacagccaaaaaaaaaaaaattgaagatacctggccataaggatgactatgaccatgatttattcagtaaaagttttttaattaatttaaatcaaaattttactcatctttattttgtacattgcaaactcccaggataaagtaaactgattagaaattacttaacttgttttaattttttacttttataccacagattatctcaagaacatgagttggcaattaccttcttggtttaaatatcaattttatgttgatttcacttccatttgtgaaacaaaaacagtagataaatccactcttgcttaaaaaaaaaaagactagaataagaaaatacagtcattcctgggtatccacgtgagattggtagatatccggcc

SEQ ID NO: 692503 - DNA, 1682 bp, Homo sapiens
  misc_feature 254, 255, 256, 257, 258, 259, 260, 261, 262, 263, 264, 265,266, 267, 268, 269, 270, 271, 272, 273, 274, 275, 276, 277,278, 279, 280, 281, 282, 283, 284, 285, 286, 287, 288, 289,290, 291, 292, 293, 294, 295, 296, 297, 298, 299, 300: n = A,T,C or G
  misc_feature 301, 302, 303, 304, 305, 306, 307, 308, 309, 310, 311, 312,313, 314, 315, 316, 317, 318, 319, 320, 321, 322, 323, 324,325, 326, 327, 328, 329, 330, 331, 332, 333, 334, 335, 336,337, 338, 339, 340, 341, 342, 343, 344, 345, 346, 347: n = A,T,C or G
  misc_feature 348, 349, 350, 351, 352, 353: n = A,T,C or G
ggtagaacagctattacattgagtgcatcagaggctctacgtaaaagaaaaatataagctccatctctgtggtagatgatattatgatgttaaaatatttgcttcttatcacaggaaggattaagaaagcaagtaagtttttgagagagttgtatttccaatagccatcagtttgagccagaagagagtttgatgcttcagaatttacaataggctttgttcacccaacttcaaaggacaagaaacagactgannnnnnnnnnnnnnnnnnnnnnnnnnnnnnnnnnnnnnnnnnnnnnnnnnnnnnnnnnnnnnnnnnnnnnnnnnnnnnnnnnnnnnnnnnnnnnnnnnnncaccaggtgccaggaatgtgggattgatggttccagctctactcgctaacactgacaaagagaacaaggggaggtcactgggataacagggcagaaagcaggagggagcctgcgtacttacagcaatgcgacttcacacctccaggctcaggggaactttcttgatttcattttctcaacccttatttcacccttgccttctgtttgaaagagtttgaaaaactcaacactgcacctttgcagaatcccttttagacaaggtctaaatgtgaatttagttctgataattaaaagcactgggatgctatctgaaagggaggcacaggccttactgtggctcctgactaccataactggctaacagggctttgcattctgaagcactttcttgtgttcattcccagcttccagagggtcaagaagctgttgtgagcatggccagtttcttgctcagccatcctcacccctggatcaccgctttggaagggaagtccccagctccggtgtgttctgaggctgctgggggccagtgcagctctgcggtggcatcagaggcaggagctctcccagcccttgcagtgacctggtgggaaccgaaaccgctgaataaaacctttcctgctttagaatgggtgttcttttctgcactgaaccgtggctaagagagaatttgtttgatgtgggtgataaataaacttccattttatttgggccactgttattttcagctttctgtcacttgaagccaaatataattctaattcataagtcaacagatctctaacctggaaaatgattttgcaaatctagaagatgaattttgcaaaggagacctttaattttctttacatgggctctctttttttaatccaagtatataggtggaagttcaattcaatggcttcagtagaatatttgtgacttgctaataatttaactttgcataacttcacaggcaaccttgaaaatggcccatacaaaaactctcattttttcttaatttagatttatccaacacaatttttgattatgtttctataatccctaatatgcttaactcagaattaaccaaagtttttcaaactgtattgactctaaaaactattctggaatagaatttttaaaagcattttccatttgagtctatgccagggttattgtaattktcatctaaatatctcaacattctgtcctctatatgatttttcaaacaaatttacatagctgcttgaatcagataactaagagaattatgagcatgtgggtaattgaacattttgagctttgacctgctagtttgcttttttgcttgctatagactgaacttcc

SEQ ID NO: 692504 - DNA, 1455 bp, Homo sapiens
taatccttaccttgggctctgctttctgtgagacctaggctaggacaaccactaattacatagaacataacaattgcagggtgagtcgtttacatcccaattactccaaccttctctagacaaagggaaatgagggggaatgtaaactggagttagaataaagaagactcttgtgtgtcttggatatggtgattaggttatgatggtgtataggccaggcttgggagcatatttaaaaataataagagaaggactgagcttggagagagcaaaaaaaactcacctcaaatttgagactcacaaataaaaaataaggcctaaataatattttgaacaatggccactttacaatattgaatgcctggaaaaccattcatgtagtatctaatatgtattattctccataagtcatactatttttttcataatttaaaatcagggtcttttttctcagagttggggttacacgttggaactgctcccagctcttcttttcaatttagcactgtaattttgcatagtgttcaaaagtagtttctactataacctcagcaatatgccagatttgaatttactatatatagtttatataagaagatgaggaaaatgcaatcgtaaaaggataggtgtgcatctctttagttaactcttctccagcaatcagcttattccaatgaaatctgcattctttatacaaggcattaaaaaaaactaaaagcaaaaatactaaaaaaattaattaaaatcaaagaatgctgtaagaaacagcaccaaaaacctaattcttgattcactcaactctgtgtccagtgaaacatactaccaagatcaagaatacactttagggactaaagcagctcatggtataagtagtattaatagctaattatatacaaaggctaaacrtatgattgttttcttttattttctgcaagaaactgagaaataggtctggggtttgaggtgtgacctaaacattgaaattatgtgataaaaatatatttatagacatttacaagttttacaatgcaaagccaatcaaatcagttttgaaatctaaaaaactgtgccaaaataaattatcaagaaaggtgtatttatatatatatacaaacacacacacacatattttatatatattttatgtatatatatgtttttaatcctttattcatacccgtagtttctaaatcttatatatcaaatatattccacttgtgttatggagtatttcaatatctttaagtgtgtcccacagggatacagctcttcctttgctcaacaccagttgcagcattgaagtcctcagtaacaatcagatctgtaatggagtatgcataataaactttaaatgatcatagaaatgaagcaatgtattcaaacttccccacacaaatcagcaggggaatgtaagtgtgaagaaaaatcatatgcagcttgccagggaactagtgt

SEQ ID NO: 692505 - DNA, 1001 bp, Homo sapiens
ttatgaacatatccttgttattagaaaatgcacactgatttatttaactgtaaagaggcatcatatctgtaagtttctttcaaatgactgaaaaacaaagtatctgcatggatatcgataccagactgtattgttggaaaaaagaatcaagcaaataaggtgctgacaactggggaatgtgggtgaaaggactttgaggatttttgtgctagccttgcaaatgtccagtaggtttgaaataatattagaatttttaaaatttaaaaatctgtctttttcatgttccttttacygattgaggtgcctagtgttcttacaatcccccgtaagtcaagatatgatccatatataatgcacataattaatctttgaatctgtataattttctatttccgagaagtaaacctttaatttattccacataaattgttaaattgatattgtgatggtattcagaggttcatatttttattattttctcaacaataatataatcaagatttaaagttagaaaacagatccagaggttgaattttgagaccagaaaaccagagtcagagatacagccagtcacagagaaaaaaattcatattagcaatatgtgggaaaataacttcagtatatttgggttttagttaccctgagtatgaaacaaagatactgtactcattgaattctaaagcaccttcactttttctaggactatttgctggctgatgagaaaaatagaaaagtcaaaattgacacggagcctttgagtctggttaaattgtaattcttctcaaatataaggagaaaggtttaagaacaaaagaacttagaaacatcacagtaagttcaatgcatatatatatatatacatgtatacacatacacataatccatatatttataaaatccttgacttaaaatggagttacatcctaacaaactcatcatcagttgaaaatattgtaagtcaaaaatgcgttcaagacgtctaacttaccaaacatgataca

SEQ ID NO: 692506 - DNA, 1001 bp, Homo sapiens
ttatgaacatatccttgttattagaaaatgcacactgatttatttaactgtaaagaggcatcatatctgtaagtttctttcaaatgactgaaaaacaaagtatctgcatggatatcgataccagactgtattgttggaaaaaagaatcaagcaaataaggtgctgacaactggggaatgtgggtgaaaggactttgaggatttttgtgctagccttgcaaatgtccagtaggtttgaaataatattagaatttttaaaatttaaaaatctgtctttttcatgttccttttactgattgaggtgcctagtgttcttacaatcccccgtaagtcaagatatgatccatatataatgcacataattaatctttgaatctgtataattttctatttccgagaagtaaacctttaatttattccacataaattgttaaattgatattgtgatggtattcagaggttcatatttttattattttctcaacaataatatartcaagatttaaagttagaaaacagatccagaggttgaattttgagaccagaaaaccagagtcagagatacagccagtcacagagaaaaaaattcatattagcaatatgtgggaaaataacttcagtatatttgggttttagttaccctgagtatgaaacaaagatactgtactcattgaattctaaagcaccttcactttttctaggactatttgctggctgatgagaaaaatagaaaagtcaaaattgacacggagcctttgagtctggttaaattgtaattcttctcaaatataaggagaaaggtttaagaacaaaagaacttagaaacatcacagtaagttcaatgcatatatatatatatacatgtatacacatacacataatccatatatttataaaatccttgacttaaaatggagttacatcctaacaaactcatcatcagttgaaaatattgtaagtcaaaaatgcgttcaagacgtctaacttaccaaacatgataca

SEQ ID NO: 692507 - DNA, 1001 bp, Homo sapiens
ttatgaacatatccttgttattagaaaatgcacactgatttatttaactgtaaagaggcatcatatctgtaagtttctttcaaatgactgaaaaacaaagtatctgcatggatatcgataccagactgtattgttggaaaaaagaatcaagcaaataaggtgctgacaactggggaatgtgggtgaaaggactttgaggatttttgtgctagccttgcaaatgtccagtaggtttgaaataatattagaatttttaaaatttaaaaatctgtctttttcatgttccttttactgattgaggtgcctagtgttcttacaatcccccgtaagtcaagatatgatccatatataatgcacataattaatctttgaatctgtataattttctatttccgagaagtaaacctttaatttattccacataaattgttaaattgatattgtgatggtattcagaggttcatatttttattattttctcaacaataatataatcaagatttaaagttagaaaacagatccagaggttgaattttgagaccagaaaaccagagtcagagatasagccagtcacagagaaaaaaattcatattagcaatatgtgggaaaataacttcagtatatttgggttttagttaccctgagtatgaaacaaagatactgtactcattgaattctaaagcaccttcactttttctaggactatttgctggctgatgagaaaaatagaaaagtcaaaattgacacggagcctttgagtctggttaaattgtaattcttctcaaatataaggagaaaggtttaagaacaaaagaacttagaaacatcacagtaagttcaatgcatatatatatatatacatgtatacacatacacataatccatatatttataaaatccttgacttaaaatggagttacatcctaacaaactcatcatcagttgaaaatattgtaagtcaaaaatgcgttcaagacgtctaacttaccaaacatgataca

SEQ ID NO: 692508 - DNA, 595 bp, Homo sapiens
acttgaagtaaattgctaacaaactgagttcctcttccttccatgggaaactctgtaccttctcagtatctccaagaattttcatgggtgctacatttccccttattacctggcattcttattttyatgactcttctgtgtttcttatacctataacatatcccgcctcccatggttaacttctctcctctttttgtcctctgctggcccaataccttcattccttgaagcagaatcaacatcaagctcattttataaaatagccttttgctgaaagcaaaacagaaaaggcatcatcttaaaatttaatattctccattgttattctcaagttctgctactggacctgtgaaggaatttctcatttgctgaacatcacattttcagctcttcctccttctccttagagagcttttccttttcccctcttcagaattcaacctcagtttccaaatttctattatgttattgtcaagcatacttttgttctgtcttagaatcctaagattattatcctaagattagaatccagattatgacaagcgtttttagctttcacaaataaaaacattgcctctctggctgtttttttttt

SEQ ID NO: 692509 - DNA, 1528 bp, Homo sapiens
cccgcactgcacaaggacagagcctgagggcttcttcacggtccaggggcctcggataaatgtccagggttcagccttacccagggcttcatgtgagggcatccacagctcgggcaactgcctcgttcagacctggcccatgtccaggtgggcatggccaacatttcagagcactcagcttacagacctccttttgccaacagtgcctccrtttccctcctcagatcaccagtgccccactgcgtgtgagcctggggaaccaaacctcttccctgacctcagccctggggtgctattaggcatgcatgaggggcagagccctgccctggccggagcttggggtcctggcctggaacatctccccggagcaccctctgccctggccggagctcagggtcttgcccctggaacatctccctcgagcaccccctgccctggatggagctcggggtcctgcccctggaatatctccctcgagcaccccctgccctggatggagctcggggtcctgcccctggaatatctccctcgagcaccccctgccctggatggagcttggggtcctgcccctggaatatctccctcgagcaccccctgccctggacggagctcagggtcctgccccggacggagctcagggttctgcccctggaatatctctctcgagcactccctgccctggacggagctcggggtccttccctggaacatctccctcgagcaccccctgccctggatggagctcagggtcctgcccctggaatatctccctggagcaccccctgccctggatggagctcggggtccttccctggagcatctccctggaacaccctcattacactcagtcccttccagaatttgtggtagcctgagcgatggcctggctttgggactgactgacattcaggtggagctgaggccgtctgatgagaaaatgtttgacaacagccatcaaactggcagcactgggctctttgcaatacgtatttttggtgcttattctaattctgaaatttcccaagactctgcttcgctcattccttgctcccttctaaggaaaaagctttcatcttcattgacctgggaaactgacatttcaatgttgaattaaaacttcagcttttggttgaacgcagtgagcaattttgactgaagagaacactgcagattctgaccgatcgtcgtgtcgaaaacccctggcgtcccagggtggtgtgtgggtagcatccctgtccagagcctcagtggaactgctggaaaggcctcctgcgtagccctgggtgaggcaccctggagacccgctctgcccaacagcatagcctgagctgccgaaggtctcagcccactgggtgcccctagagccgggtgggacagtggccagaggtcagggtgaccaaggaggagcagcaggagccggtccaccagaggccactgctgagtcggcccaaggtcagggtctgaatctggattatttgatagtttggggagcaaacaatgttaaaaagcaaaatcctgcagcggcgtc

SEQ ID NO: 692510 - DNA, 1528 bp, Homo sapiens
cccgcactgcacaaggacagagcctgagggcttcttcacggtccaggggcctcggataaatgtccagggttcagccttacccagggcttcatgtgagggcatccacagctcgggcaactgcctcgttcagacctggcccatgtccaggtgggcatggccaacatttcagagcactcagcttacagacctccttttgccaacagtgcctccatttccctcctcagatcaccagtgccccactgcgtgtgagcctggggaaccaaacctcttccctgacctcagccctggggtgctattaggcatgcatgaggggcagagccctgccctggccggagcttggggtcctggcctggaacatctcccyggagcaccctctgccctggccggagctcagggtcttgcccctggaacatctccctcgagcaccccctgccctggatggagctcggggtcctgcccctggaatatctccctcgagcaccccctgccctggatggagctcggggtcctgcccctggaatatctccctcgagcaccccctgccctggatggagcttggggtcctgcccctggaatatctccctcgagcaccccctgccctggacggagctcagggtcctgccccggacggagctcagggttctgcccctggaatatctctctcgagcactccctgccctggacggagctcggggtccttccctggaacatctccctcgagcaccccctgccctggatggagctcagggtcctgcccctggaatatctccctggagcaccccctgccctggatggagctcggggtccttccctggagcatctccctggaacaccctcattacactcagtcccttccagaatttgtggtagcctgagcgatggcctggctttgggactgactgacattcaggtggagctgaggccgtctgatgagaaaatgtttgacaacagccatcaaactggcagcactgggctctttgcaatacgtatttttggtgcttattctaattctgaaatttcccaagactctgcttcgctcattccttgctcccttctaaggaaaaagctttcatcttcattgacctgggaaactgacatttcaatgttgaattaaaacttcagcttttggttgaacgcagtgagcaattttgactgaagagaacactgcagattctgaccgatcgtcgtgtcgaaaacccctggcgtcccagggtggtgtgtgggtagcatccctgtccagagcctcagtggaactgctggaaaggcctcctgcgtagccctgggtgaggcaccctggagacccgctctgcccaacagcatagcctgagctgccgaaggtctcagcccactgggtgcccctagagccgggtgggacagtggccagaggtcagggtgaccaaggaggagcagcaggagccggtccaccagaggccactgctgagtcggcccaaggtcagggtctgaatctggattatttgatagtttggggagcaaacaatgttaaaaagcaaaatcctgcagcggcgtc

SEQ ID NO: 692511 - DNA, 1528 bp, Homo sapiens
cccgcactgcacaaggacagagcctgagggcttcttcacggtccaggggcctcggataaatgtccagggttcagccttacccagggcttcatgtgagggcatccacagctcgggcaactgcctcgttcagacctggcccatgtccaggtgggcatggccaacatttcagagcactcagcttacagacctccttttgccaacagtgcctccatttccctcctcagatcaccagtgccccactgcgtgtgagcctggggaaccaaacctcttccctgacctcagccctggggtgctattaggcatgcatgaggggcagagccctgccctggccggagcttggggtcctggcctggaacatctccccgragcaccctctgccctggccggagctcagggtcttgcccctggaacatctccctcgagcaccccctgccctggatggagctcggggtcctgcccctggaatatctccctcgagcaccccctgccctggatggagctcggggtcctgcccctggaatatctccctcgagcaccccctgccctggatggagcttggggtcctgcccctggaatatctccctcgagcaccccctgccctggacggagctcagggtcctgccccggacggagctcagggttctgcccctggaatatctctctcgagcactccctgccctggacggagctcggggtccttccctggaacatctccctcgagcaccccctgccctggatggagctcagggtcctgcccctggaatatctccctggagcaccccctgccctggatggagctcggggtccttccctggagcatctccctggaacaccctcattacactcagtcccttccagaatttgtggtagcctgagcgatggcctggctttgggactgactgacattcaggtggagctgaggccgtctgatgagaaaatgtttgacaacagccatcaaactggcagcactgggctctttgcaatacgtatttttggtgcttattctaattctgaaatttcccaagactctgcttcgctcattccttgctcccttctaaggaaaaagctttcatcttcattgacctgggaaactgacatttcaatgttgaattaaaacttcagcttttggttgaacgcagtgagcaattttgactgaagagaacactgcagattctgaccgatcgtcgtgtcgaaaacccctggcgtcccagggtggtgtgtgggtagcatccctgtccagagcctcagtggaactgctggaaaggcctcctgcgtagccctgggtgaggcaccctggagacccgctctgcccaacagcatagcctgagctgccgaaggtctcagcccactgggtgcccctagagccgggtgggacagtggccagaggtcagggtgaccaaggaggagcagcaggagccggtccaccagaggccactgctgagtcggcccaaggtcagggtctgaatctggattatttgatagtttggggagcaaacaatgttaaaaagcaaaatcctgcagcggcgtc

SEQ ID NO: 692512 - DNA, 1528 bp, Homo sapiens
cccgcactgcacaaggacagagcctgagggcttcttcacggtccaggggcctcggataaatgtccagggttcagccttacccagggcttcatgtgagggcatccacagctcgggcaactgcctcgttcagacctggcccatgtccaggtgggcatggccaacatttcagagcactcagcttacagacctccttttgccaacagtgcctccatttccctcctcagatcaccagtgccccactgcgtgtgagcctggggaaccaaacctcttccctgacctcagccctggggtgctattaggcatgcatgaggggcagagccctgccctggccggagcttggggtcctggcctggaacatctccccggagcaccctctgccctggccggagctcagggtcttgcccctggaacatctccctcgagcaccccctgccctggatggagctcggggtcctgcccctggaatatctccctcragcaccccctgccctggatggagctcggggtcctgcccctggaatatctccctcgagcaccccctgccctggatggagcttggggtcctgcccctggaatatctccctcgagcaccccctgccctggacggagctcagggtcctgccccggacggagctcagggttctgcccctggaatatctctctcgagcactccctgccctggacggagctcggggtccttccctggaacatctccctcgagcaccccctgccctggatggagctcagggtcctgcccctggaatatctccctggagcaccccctgccctggatggagctcggggtccttccctggagcatctccctggaacaccctcattacactcagtcccttccagaatttgtggtagcctgagcgatggcctggctttgggactgactgacattcaggtggagctgaggccgtctgatgagaaaatgtttgacaacagccatcaaactggcagcactgggctctttgcaatacgtatttttggtgcttattctaattctgaaatttcccaagactctgcttcgctcattccttgctcccttctaaggaaaaagctttcatcttcattgacctgggaaactgacatttcaatgttgaattaaaacttcagcttttggttgaacgcagtgagcaattttgactgaagagaacactgcagattctgaccgatcgtcgtgtcgaaaacccctggcgtcccagggtggtgtgtgggtagcatccctgtccagagcctcagtggaactgctggaaaggcctcctgcgtagccctgggtgaggcaccctggagacccgctctgcccaacagcatagcctgagctgccgaaggtctcagcccactgggtgcccctagagccgggtgggacagtggccagaggtcagggtgaccaaggaggagcagcaggagccggtccaccagaggccactgctgagtcggcccaaggtcagggtctgaatctggattatttgatagtttggggagcaaacaatgttaaaaagcaaaatcctgcagcggcgtc

SEQ ID NO: 692513 - DNA, 1528 bp, Homo sapiens
cccgcactgcacaaggacagagcctgagggcttcttcacggtccaggggcctcggataaatgtccagggttcagccttacccagggcttcatgtgagggcatccacagctcgggcaactgcctcgttcagacctggcccatgtccaggtgggcatggccaacatttcagagcactcagcttacagacctccttttgccaacagtgcctccatttccctcctcagatcaccagtgccccactgcgtgtgagcctggggaaccaaacctcttccctgacctcagccctggggtgctattaggcatgcatgaggggcagagccctgccctggccggagcttggggtcctggcctggaacatctccccggagcaccctctgccctggccggagctcagggtcttgcccctggaacatctccctcgagcaccccctgccctggatggagctcggggtcctgcccctggaatatctccctcgagcaccccctgccctggatggagctcggggtcctgcccctggaatatctccctcgagcaccccctgccctggatggagctyggggtcctgcccctggaatatctccctcgagcaccccctgccctggacggagctcagggtcctgccccggacggagctcagggttctgcccctggaatatctctctcgagcactccctgccctggacggagctcggggtccttccctggaacatctccctcgagcaccccctgccctggatggagctcagggtcctgcccctggaatatctccctggagcaccccctgccctggatggagctcggggtccttccctggagcatctccctggaacaccctcattacactcagtcccttccagaatttgtggtagcctgagcgatggcctggctttgggactgactgacattcaggtggagctgaggccgtctgatgagaaaatgtttgacaacagccatcaaactggcagcactgggctctttgcaatacgtatttttggtgcttattctaattctgaaatttcccaagactctgcttcgctcattccttgctcccttctaaggaaaaagctttcatcttcattgacctgggaaactgacatttcaatgttgaattaaaacttcagcttttggttgaacgcagtgagcaattttgactgaagagaacactgcagattctgaccgatcgtcgtgtcgaaaacccctggcgtcccagggtggtgtgtgggtagcatccctgtccagagcctcagtggaactgctggaaaggcctcctgcgtagccctgggtgaggcaccctggagacccgctctgcccaacagcatagcctgagctgccgaaggtctcagcccactgggtgcccctagagccgggtgggacagtggccagaggtcagggtgaccaaggaggagcagcaggagccggtccaccagaggccactgctgagtcggcccaaggtcagggtctgaatctggattatttgatagtttggggagcaaacaatgttaaaaagcaaaatcctgcagcggcgtc

SEQ ID NO: 692514 - DNA, 1528 bp, Homo sapiens
cccgcactgcacaaggacagagcctgagggcttcttcacggtccaggggcctcggataaatgtccagggttcagccttacccagggcttcatgtgagggcatccacagctcgggcaactgcctcgttcagacctggcccatgtccaggtgggcatggccaacatttcagagcactcagcttacagacctccttttgccaacagtgcctccatttccctcctcagatcaccagtgccccactgcgtgtgagcctggggaaccaaacctcttccctgacctcagccctggggtgctattaggcatgcatgaggggcagagccctgccctggccggagcttggggtcctggcctggaacatctccccggagcaccctctgccctggccggagctcagggtcttgcccctggaacatctccctcgagcaccccctgccctggatggagctcggggtcctgcccctggaatatctccctcgagcaccccctgccctggatggagctcggggtcctgcccctggaatatctccctcgagcaccccctgccctggatggagcttggggtcctgcccctggaatatctccctcgagcaccccctgccctggacggagctcagggtcctgccccggacggagctcagggttctgcccctggaatatctctctcgagcactccctgccctggacggagctcggggtccttccctggaacatctccctcgagcaccccctgccctggatggagctcagggtcctgcccctggaatatctccctggagcaccccctgccctggatggagctcggggtccttccctggagcatctccctggaacaccctcattacactcagtcccttccagaatttgtggtagcctgagcgatggcctggctttgggactgactgacattcaggtggagctgaggccgtctgatgagaaaatgtttgacaacagccatcaaactggcagcactgggctctttgcaatacgtatttttggtgcttattctaattctgaaatttcccaagactctgcttcgctcattccttgctcccttctaaggaaaaagctttcatcttcattgacctgggaaactgacatttcaatgttgaattaaaacttcagcttttggttgaacgcagtgagcaattttgactgaagagaacactgcagattctgaccgatcgtcgtgtcgaaaacccctggcgtcccagggtggtgtgtgggtagcatccctgtccagagcctcagtggaactgctggaaaggcctcctgcgtagccctgggtgaggcaccctggagacccgctctgcccaacagcatagcctgagctgccgaaggtctcagcccactgggtgcccctagagccgggtgggacagtggccagaggtcagggtgaccaaggaggagcagcaggagccggtccaccagaggccactgctgagtcggcccaaggtcagggtctgaatctggattatttgatagtttggggagcaaacaatgttaaaaagcaaaatcctgcagmggcgtc

SEQ ID NO: 692515 - DNA, 1734 bp, Homo sapiens
tcatcctggccttactctagtttttgagcaatattattttttggaaactgaggtggggtgggggggcatcaaatccacaccttaccttaaggtgttgttgactgcgagacttgtgctaggaactctgaagggagggacagataacctctgtcctcaaggagcccacaaggtagccaggagggcagagtgacaagcattggagagtttacacatcactgaagcagacaagaaactctgattgcaaactcagaggtgaagagaatgtaactcgttttatttttctttattgcaacttagtttcttttgtgagctcctgttcctctagggacaaaacttaatcttagttccaggccccccctttctctgaagctgcactttcattccagagagattgcgtaatgccatgatcacaggagggggatccgtcagggtaggcgggcaaggctgcaataacaaacagcttccatccctctttggttttaaagaacaaacgtcattttcctatgcacgctacatgtccatggtggcccgtggtggtggacagtgaagagcccaggctgacggagaaggcaccgcctcgagctatgtgagggarggggtcagagaggacactgcactggaaatcatgtgctcagcccataagacacatgtcccttctgtacacaactcagtgcccagaaccagccccgtggcctcaagagccccgaggggcaggggtgtggacctcccctgtgcccgcgtgtggggcatctggaaataggtggcaccagtgacttccacagttccctggtattgtctccctccaccccatctgtcgagaccccttgcccatgcgcccatcctcccaggccttcgcttcacccacctcggttaatctctcataacccatgctcctcacctgcccctcaatcttagggggcagatgccaaggacagcaccggtctggtccctctgaaggtcaccgtgttgcaaagaggagcacccaaagtaaatgtctctgatgacagggccagagggacttcacattgtccgcagaagcatgttccaggtctgcccaggttaccgtgtgagagtttcagatgacagcagtggtgggaaaggggtgaggtctgagctggttgatgacacagattattgcaagatcagcttcatcatcgaggggctcatcattcatagacagctcatgtcatcctcacagcctagtgaggaaggcaactcattacgttcccatggtctgagcacagaatttcggctggttccttgtagatgcacagctggtcccgggcagccccaggaatagaacgaggtgtcttctggccccaaagcccacgctcttcccactcactgtcttctccatcttactgcccctctccttatcctcccacttaggaatgttttcttcttaaaaagccccacaaacgcactcacccagacttcatagctcctgcagctcattttggagaaagcagacagtgggccccaccctgttctcagaccctttgtccttacccatggcttggcctctgctggacacaggggtagatgcaggggaagaaatggcagaggagctcacatagggaaactcaaagtgacaggatgacaaaggcccacagtcactgctgggccccaactgtgcgcctcttccacagaggctgcctggtctccttctggataactttattgcccagacattctgcaatgcatttaagtccttttgacatttaaaaccaagta

SEQ ID NO: 692516 - DNA, 1734 bp, Homo sapiens
tcatcctggccttactctagtttttgagcaatattattttttggaaactgaggtggggtgggggggcatcaaatccacaccttaccttaaggtgttgttgactgcgagacttgtgctaggaactctgaagggagggacagataacctctgtcctcaaggagcccacaaggtagccaggagggcagagtgacaagcattggagagtttacacatcactgaagcagacaagaaactctgattgcaaactcagaggtgaagagaatgtaactcgttttatttttctttattgcaacttagtttcttttgtgagctcctgttcctctagggacaaaacttaatcttagttccaggccccccctttctctgaagctgcactttcattccagagagattgcgtaatgccatgatcacaggagggggatccgtcagggtaggcgggcaaggctgcaataacaaacagcttccatccctctttggttttaaagaacaaacgtcattttcctatgcacgctacatgtccatggtggcccgtggtggtggacagtgaagagcccaggctgacggagaaggcaccgcctcgagctatgtgagggaaggggtcagagaggacactgcactggaaatcatgtgctcagcccataagacacatgtcccttctgtacacaactcagtgcccagaaccagccccgtggcctcaagagccccgaggggcaggggtgtggacctcccctgtgcccgcgtgtggggcatctggaaataggtggcaccagtgacttccacagttccctggtattgtctccctccaccccatctgtcgagaccccttgcccatgcgcccatcctcccaggccttcgcttcacccacctcggttaatctctcataacccatgctcctcacctgcccctcaatcttagggggcagatgccaaggacagcaccggtctggtccctctgaaggtcaccgtgttgcaaagaggagcacccaaagtaaatgtctctgatgacagggccagagggacttcacattgtccgcagaagcatgttccaggtctgcccaggttaccgtgtgagagtttcagatgacagcagtggtgggaaaggggtgaggtctgagctggttgatgacacagattattgcaagatcagcttcatcatcgaggggctcatcattcatagacagctcatgtcatcctcacagcctagtgaggaaggcaactcattacgttcccatggtctgagcacagaatttcggctggttccttgtagatgcacagctggtcccgggcagccccaggaatagaacgaggtgtcttctggccccaaagcccacgctcttcccactcactgtcttctccatcttactgcccctctccttatcctcccacttaggaatgttttcttcttaaaaagccccacaaacgcactcacccagacttcatagctcctgcagctcattttggagaaagcagacagtgggccccaccctgttctcagaccctttgtccttacccatggcttggcctctgctggacacwggggtagatgcaggggaagaaatggcagaggagctcacatagggaaactcaaagtgacaggatgacaaaggcccacagtcactgctgggccccaactgtgcgcctcttccacagaggctgcctggtctccttctggataactttattgcccagacattctgcaatgcatttaagtccttttgacatttaaaaccaagta

SEQ ID NO: 692517 - DNA, 1734 bp, Homo sapiens
tcatcctggccttactctagtttttgagcaatattattttttggaaactgaggtggggtgggggggcatcaaatccacaccttaccttaaggtgttgttgactgcgagacttgtgctaggaactctgaagggagggacagataacctctgtcctcaaggagcccacaaggtagccaggagggcagagtgacaagcattggagagtttacacatcactgaagcagacaagaaactctgattgcaaactcagaggtgaagagaatgtaactcgttttatttttctttattgcaacttagtttcttttgtgagctcctgttcctctagggacaaaacttaatcttagttccaggccccccctttctctgaagctgcactttcattccagagagattgcgtaatgccatgatcacaggagggggatccgtcagggtaggcgggcaaggctgcaataacaaacagcttccatccctctttggttttaaagaacaaacgtcattttcctatgcacgctacatgtccatggtggcccgtggtggtggacagtgaagagcccaggctgacggagaaggcaccgcctcgagctatgtgagggaaggggtcagagaggacactgcactggaaatcatgtgctcagcccataagacacatgtcccttctgtacacaactcagtgcccagaaccagccccgtggcctcaagagccccgaggggcaggggtgtggacctcccctgtgcccgcgtgtggggcatctggaaataggtggcaccagtgacttccacagttccctggtattgtctccctccaccccatctgtcgagaccccttgcccatgcgcccatcctcccaggccttcgcttcacccacctcggttaatctctcataacccatgctcctcacctgcccctcaatcttagggggcagatgccaaggacagcaccggtctggtccctctgaaggtcaccgtgttgcaaagaggagcacccaaagtaaatgtctctgatgacagggccagagggacttcacattgtccgcagaagcatgttccaggtctgcccaggttaccgtgtgagagtttcagatgacagcagtggtgggaaaggggtgaggtctgagctggttgatgacacagattattgcaagatcagcttcatcatcgaggggctcatcattcatagacagctcatgtcatcctcacagcctagtgaggaaggcaactcattacgttcccatggtctgagcacagaatttcggctggttccttgtagatgcacagctggtcccgggcagccccaggaatagaacgaggtgtcttctggccccaaagcccacgctcttcccactcactgtcttctccatcttactgcccctctccttatcctcccacttaggaatgttttcttcttaaaaagccccacaaacgcactcacccagacttcatagctcctgcagctcattttggagaaagcagacagtgggccccaccctgttctcagaccctttgtccttacccatggcttggcctctgctggacacaggggtagatgcaggggaagaaatggcagaggagctcacatagggaaactcaaagtgacaggatgacaaaggcccacagtcactgctgggccccaactgtgcgcctcttccacagaggctgcctggtctccttctggayaactttattgcccagacattctgcaatgcatttaagtccttttgacatttaaaaccaagta

SEQ ID NO: 692518 - DNA, 1817 bp, Homo sapiens
  misc_feature 1241, 1375, 1376, 1377, 1378, 1379, 1380, 1381, 1382, 1383,1384, 1385, 1386, 1387, 1388, 1389, 1390, 1391, 1392, 1393,1394, 1395, 1396, 1397, 1398, 1399, 1400, 1401, 1402, 1403,1404, 1405, 1406, 1407, 1408, 1409, 1410, 1411, 1412: n = A,T,C or G
  misc_feature 1413, 1414, 1415, 1416, 1417, 1418, 1419, 1420, 1421, 1422,1423, 1424, 1425, 1426, 1427, 1428, 1429, 1430, 1431, 1432,1433, 1434, 1435, 1436, 1437, 1438, 1439, 1440, 1441, 1442,1443, 1444, 1445, 1446, 1447, 1448, 1449, 1450, 1451: n = A,T,C or G
  misc_feature 1452, 1453, 1454, 1455, 1456, 1457, 1458, 1459, 1460, 1461,1462, 1463, 1464, 1465, 1466, 1467, 1468, 1469, 1470, 1471,1472, 1473, 1474: n = A,T,C or G
tcggcacacacctggtcagccgaagataaaaagatggggccacctccccttcctgctcaggtagctgtgggccaggtgaggggttcatctgttcaggaacctggggttccactcctgtgcaggcctsagtcgagtcacataataaaaaatgagaggctcaggggaccccctgcctctgaccagggagccctgttgggagcccagatggccctggctattttttgctacaatgaccgtcaccctctctggttcctggaaaagcgaatatgactctgcagacatctccttcctctccttccctccctggggacctcgggcaagcaggggagagcctcagatttttgcccctgccaccctggccagaggccacgcccccttcccagggttctgccttagggatggggaccaggacagccctcatcagacatctctctctgcagtggggagcctgtctctgcacccaccaccatcttgattgtctgtgggaaaggtgccccgactggttctctgccctgtcctcaactagcatgatgtcaggtgtgccctgctcctagggcagaggcagggatgtccctaccccagaagccaagggaagggcccagggacgatgccaccttcctccagcatcagcagggagggcccagggatggtgccgacatctaccagcatctcctggccgcatgatctgctgggagtgccctgatttccaatcctggcagagccgtggccgagccatggagtgaaatagcaaaagcacatgtgaccctgcttcatggctggttataatagaggtgtgaccaggtgaaggcatacagacttcccagtggctgctgcccccttgaaaacctgcattctgcctcactcagtgttgccctaaatcctctgcgtgtggagggcagacgggatgcactcgtggggcaaggctggaggctggcactgccccctgttgacttgcaggagctgtctccctgcaggggctctgagactgtgtgatgccctgggtgagcctggctctccctgcaggggctctgagaccgtgtgatgccctgggtgagcctggccctccctggggggtttcagcctccacatgtctggagctggctcaggggatggagcagggatccaccgtcacgctgctgagttgctgcagagtctttgtccttgcaaattctgcccgagtgtccttcacttccttctccccagagggttcttaggagtgaggggcagcaccatgcatggcngggcgtgggctttgtgtttttcctgcctgtggcctggagcgctgacagcgcctgcccctctgctctctctgcagcctggagcaccgtcgtgggtctgctgtaccacagcatgcactactacctgaacacatcgnnnnnnnnnnnnnnnnnnnnnnnnnnnnnnnnnnnnnnnnnnnnnnnnnnnnnnnnnnnnnnnnnnnnnnnnnnnnnnnnnnnnnnnnnnnnnnnnnnnnggccagttcatcatgatggtttctagaccctgcttgatctcttcagcctcctgggcttccctggtctccccacagcaccagccccatcctctaccatgtccctcctggcttgggttccgctgtacactggagcctcgtccctcatggctcaccccctccatagcgcctgagtctcagactcaaacccccattcccccaccatggcttctgaggccccgcatgctccagccccagcccgtgcctctgacctgcctccatccaccctctcccttcatcatgggaaagcaagaccctccccgctcgggattggacttggggagctggttatgaaggtgagggaagc

SEQ ID NO: 692519 - DNA, 1954 bp, Homo sapiens
ttttttttaaagagactgggtcactccgtgtttcctaggatggagtacagtggttatttacaggtgtgatcattcatagctcactgtggccttgaactcctcctggcctcaagcaatcctgcctcagcttcctgtgtagccaattttctataaaaatatttaatagtttgtgttgtgtattttctttcacgttatatgatgaggcatagagtgtatgattgtttccctacttgtaatgttaaatttgatcagtgtgttctggtattgtcagcttgattcattctttatataattcctcagtaagttttttatctaatggtttagaagccattgagggtcattgcccaaattctttatttcattagggattgcaaaatggtgacatgtaaattctattatgccttctgcatttattagctgcaactctttaaaacaaaaacaaaaacaaacccaaaaagctttcccttatcaactattcggtgatgctgaaacatggatcttatgggaaaagtatgataaatggttgattctgtctcccctcaccctcctttttgttaccagtttccaaaaggtgagtagtgagcatttttaagtgtcattataaacacatgtatttttaaacatatttaatttatcatactgaatgctaatatttctgtacagatagcattctttaaatcatgggtatggatatgtaaatacaagtaatggaaggccagcgcagtggctcatgcctgtaatctcagcactttgggaggccaaggtgggaggatcacttgagcccaggagttccaggctgcagtgagctaggattgtgtcactgcactccagcctgggtgacaaagcaagacaatgcttctaaaaaaaaaaatgaaaagttaaacattaaacagagcaaaaaggactgtttagagctgcccagggagaaaggagacccattcagggagcagtggaaggctgatgagtaatgggcagactgaagagaatacagaactacggagccagcactgggcaactgcagtaagagtacttttagttggaactaaacaggtagttctgggagctggtgaggaaggcagagtgaacccaggatcaaagggagaaatatgagccagcaaacccaacagggaaccttgagagacagtttttgaatcagagtaaggagttaaactaaacagcaacctaatttaagcaaaaactgctgtgcatctgtacattggcaaactgaattactataaatgcaaagatagtcttatctctattgttatgcagtcctgctgggcatgtattgcacacttcagagatactcacagaagagcgaggtaacacaaagatggggaagaagaaggaggaaaggccttgggttcaagaatgtaatctctggagaagaagtctttcagtgctccttttttctcaggcagcaactcaaagacactagaaaacttctttggagactgyctgagatctgtactatccttacagaaaggcatagttgatgacagaatatttttatattctgtcttaggctaatataacaatgtatattacttaagaatgattgtaaagatttttatcattaattttaagggaaggtgtaataaaatcatcagagattataaagtaagagaggatcttaaaggtcatatagttgtagtcttaaatgaaaatattaagacaaaatcctcattccatttttaaaaagttgacatttagatgaacaaattcaacagaatgccaagctcttttgcctcctggacataaaagaaatactagcttggtgaaagagttttagcaataaaaagtaacaagaaaaacaaacataactcacaaccattatgaattttccttgcaatgggcattctcatgttttatgaaattagagattgcttacactatttccatttttagaattggtagtttcaagccagtatttaaaatattagcactgagacca

SEQ ID NO: 692520 - DNA, 584 bp, Homo sapiens
taaaatgctaattgccaccaaatagttattccttttttctcttttataaaagaattctgagttttagctaagcagattactacataacaaaaaactatatttctcaggctcccttcagtatatgtggctatgttttgtgtaatgagatttcattacaggcagcttctgaaattgtccccaatgacctctctctcctgatactcacctgcttgggcaaatcctcttcttgaatatcagctggacctagtgactcatttctaatgaatagaataggactaaagtgagggatgtcatttccaagattaggttagaaagagattttagcttcrtcttggggtactttctttcgttcttgttatgaggaaagccagctgccatgttgtgatctgctacaaggagaaacctacgtggcaagaaattgatgtatccacacaagagccagtgaggaccggaggcctgccaacagctttgtgagtgatctcagaaaaatatccttcccaggtgagctttcagatgactgtagaccctgtcaacacttcgattgcaaccgtgtgggacacccgagccaagaggattcaactaag

SEQ ID NO: 692521 - DNA, 535 bp, Homo sapiens
tgttcactgagcaatgagttccaattacaaataagaagaaatttatgatatggtttgactatgttctcagccaaatcgcattttgaattgtagttcccataatccccacgtgttgtgggaaggaccagatggagacaattgaatcatgggggcagtttcccccatccttttctcatgacagtgagtgagttctcacgagatctgatgggtttttaaggagttccccctactttgctgggcgctcattcttctctttgctgtctccatgtgaggaagggtgtatttgtttccccttccagcatgattgtaagtttcctgaggcctccccagccctgcagaactgtgagtcaattaaacctctttcctttataaattactcagtctcagatatgtcctcatagcagtgggagaacaaactaatacaatttattgtcttgttattattggtttacaagcttctgtgtggcctacaagcacctgaggttgcaagttctgaaatgttggtggtttcrgtgccagaaaactagtgacaaaa

SEQ ID NO: 692522 - DNA, 622 bp, Homo sapiens
tgtgtccctgattctttcatttctgttggcatccagcagcatgatggactttgtatggaagtgctgagcaagaggccagcacttcaaacagtgcaagacacttaggggctcagggcgtagatgcatgaggaaatgagcagcttaataagctacatggatagctgtgggtgccagcscagttcctcatccccactgctcatgctcagacctgggaaaatgtggggaagatatatggggaccctggttacctctagacagctgcatcctaatataaatactcaatctgcccatttactcttccttcccctctcccaggatctccccagtacactcaagagtgaaatgggctatgggctgaccttccattagcctctggagaaatgaagacttatgccctgacttaagaagtgtctagaaaactatgaatacataagcatagctcattgtttgatatagtgtatattttgtcatgcaagtgattgatgcctgttgaaaatgagagtagctcaagtgtaaacaaggatccacatggcccatggcaatgtcttcatcacagaaccaatcctgtaacactaacaatgacgatgaggttaggggacactcgctatgtgccaggccctct

SEQ ID NO: 692523 - DNA, 1213 bp, Homo sapiens
agcacttatgttacatgcaatgacatattttaaatctacttactcttagaagaaatctactttctctttccataaatttgagcttgaggaagcaattcattaaaaatatgtgaagggttgatttaaggttgggaggacttgttggatatgtctgcagtcaggtttatatcaggaaaaacagaagggaaaggaagtaacatttagtagagacctaccagaccctgggactggggtggggtcataaacacaaaaacaaatgatacttattgttggcttacttggtggtactgtacctgctacacatgtgacattccttatgtcaactgatcttcacaatgattctacaaagttggcactgtcatgggccacattgtccagaaaaggaattgagtccccttttgtaagaacttgcttcaaggaaccacagctagtaatgactggagctggggtttgaaccctggtctctgatttcaaagctccccatcatataaccttatataaaatgtgcacagctaccactcactgtgggtttacagggccagggccaggcccaatactaaggctttaggtaaaggtatgttcatcaaaccaggattaaaaccccaaagcctgtgcttcttacctcaggccactccatctgttgaatagctttgaccattctttgcctttggtttctggtttgcactcctggcagcagatgccaatgcaattgtgtgactgccttatctgctgccaacaaaccaaaggcctgggaaggtttttgccaattcatgtgggtgtgaaatttgttgctcagcattggaataatacctgccatttgcaaggataccttagatgtttattgccagcccactcactttctgatgtttgcagcagagtacaagggttgtgttgtgggtcttgaagtaagaccattcttaacatacaactaggttcaaatcctggctctatcactcatcagctgtgttacaaggactatagaaggctttgtttccgtatctgtgtgtgcagaaaacagcagttgcctacctcatagcttgcgatttattgtaataatatattccacaygtgcctgtacctgcctctcagaaagcattagttactggtgatctttttttattattactgtattgaacttaaggactgtcctgagccagactgtcagagaggactgaggtatctggggaggtatctggggaggtatctgtagtct

SEQ ID NO: 692524 - DNA, 596 bp, Homo sapiens
aggtgatactgattctgatgctgttaaacagtaccatttgctaagtgcctactctgtgcgaggcactattataagtactttcatgcattgtctcatgagatacagatgaagaaagtaggcttatggggtttaagtaacttgtccagatctgtgagactacagagcccagacaaaggagacagtgttacagattttgaacattattcaggtgaaagtataagtggattctagatccttactactcaaagtctcgtccatggactggcagcactggcatcacctgagggcttgtgaggaatgcggactgttgggcccctcactaagaaatcttgaattagaatctacgtggtcacaggattcccagggatttccatatatgttaaaatttgaggagcagatgaaggttctagatcattcacatttaaagacaaacactgyccagatgtctgggttttgtgaataacatgggatttcattcatcttgtgagggtaaatctactgtcagcccagcccgtttctagaacaacagagctatgaacatcaatgaggaaaggtaagtttagacgcctaatagaaactgaattgtttaacaactt

SEQ ID NO: 692525 - DNA, 667 bp, Homo sapiens
gatatcgatggattgagatttttttgtttgttttctgttttgttttgttttttgagacagggtctcactctgttgcctgggttggaatgcagtggtaagaccatcgctcactgcagccttgacctgtgctcaagctatcctcctgcctcagcctcctgagtagctgagaggacagacatgtgccaccacacctggctaattttttaactttttgtagagatggggtctcaccatattgcctaggctggtctcaacctcctgggctcaagctatcctcccacctcggcctcccaatgtgtgaatttttaaaataytgaaacttcacaaagtccacacaagaataagactgccaaactgatatattatttatttatttaaaaaaactatggtttctctttgtattgctttgtctatatgtacacaccagtttaaaaaatgtaaaagaacttgatactttgaggtggttgatctggaaacacttgtccctcttgtctggaaacaagccactctctaatagagaaacatggaagcggacacatactgtcattagttttggtgacacagaccattctgtggtgccctgagagagggaactacacaacagtgtgactaacaggaggccaggttcactggggatgtcttgaagacaagctaccccagtttataa

SEQ ID NO: 692526 - DNA, 592 bp, Homo sapiens
tggaagggcaaaatagtgacgccaggctgtgaaatatgatggaacataaattggtcagcttgtctgtggtgactgtgtctcttttccccctgctcttcatgatttaaaatgaagcctagttagcattttaacctaagggttggtttttccraaggaggagcaaaccacaatttttcaatttagttttgataagtctagaagccagatttcagctttcacagttataaaggaaagcaacaaaggagagttatgattccattttgatggtttatctggtagctgagacaactgttggtggcttctactcaatccaggcacaacattctatgtctgggtgtttgcatcaagaaaggaaaacccggccgggcgcggtggctcacgcctgtaatcccagcactttgggaggccgaggcgggcggatcacgaggtcaggagatcgagaccatcccggctaaaaacggtgaaaccccgtctctactaaaaatacaaaaattagccgggcgtagtggcgggcgcctgtagtcccagctacttgggaggctgaggcaggagaatggcgtgaacccgggaggcggagcttgcagtgagccga

SEQ ID NO: 692527 - DNA, 733 bp, Homo sapiens
  misc_feature 399, 400, 401, 402, 403, 404, 405, 406, 407, 408, 409, 410,411, 412, 413, 414, 415, 416, 417, 418, 419, 420, 421, 422,423, 424, 425, 426, 427, 428, 429, 430, 431, 432, 433, 434,435, 436, 437, 438, 439, 440, 441, 442, 443, 444, 445: n = A,T,C or G
  misc_feature 446, 447, 448, 449, 450, 451, 452, 453, 454, 455, 456, 457,458, 459, 460, 461, 462, 463, 464, 465, 466, 467, 468, 469,470, 471, 472, 473, 474, 475, 476, 477, 478, 479, 480, 481,482, 483, 484, 485, 486, 487, 488, 489, 490, 491, 492: n = A,T,C or G
  misc_feature 493, 494, 495, 496, 497, 498: n = A,T,C or G
agatattccgtacctcagctttaaccaaggggaaagatcattctgcactgccctttcttccagcagccaaactagcatttcacaaccttttcttagcacactcaagaagcagaaaacttcctgccaaataaaaggcttggatttgcttggctaattacattttgagctggaaggtagatgatctttattctgaagctctcaatmgcaggcacaaacctccttttctctgagtctggctttcctcctctggaagcagggatatattttctacctacctcacaggtgaactgtgagttttgagtgagatttttgggagccaaaatgtcaacctagaaagctctatccaaacagaacaggaaaattcttatttacttggcgtgactggtaactacagcagcnnnnnnnnnnnnnnnnnnnnnnnnnnnnnnnnnnnnnnnnnnnnnnnnnnnnnnnnnnnnnnnnnnnnnnnnnnnnnnnnnnnnnnnnnnnnnnnnnnnnactatacttcagggacacctgagcttttgacccaggaaattctatgagaacaaaaagttcaactttgagtgggacctacacttaatctacatgacatgtacaaaaaggattccaaatgttttgggtctgcctatgaatctccaaatttctctcttcttgtatttgatcaaaggtaattttcctgattggaagttatataatgttgaatagaagtgtttttttcagtacaattcat

SEQ ID NO: 692528 - DNA, 616 bp, Homo sapiens
cacagactacaagtgtgcccttagggtgcttcgaatttcaagaaaattatgcatcgtgactgtcatagtaccaagtgggcagtcaacgtcaagccaactgttacaaatcagcatagcatgtcttaatcactcccttaactatttaggtagaaataaatatgagtggaagttccagaactatcttcttacatctaatttgttttcttataaacctcactctacattgaagaccatcaaatgagacaacaatcactagagtacagccaggttagtactgcctatggaattacctccaggaggtgataaaaacaactcttgagcattttccagctcactttgtggataggtgaggcctgtgtgaggagatacttctttaggaagggaaatatctctcagtagcatttccatttccacggggtatccaaactccagtatacagagctgagaattatctagggcagtgtatctgtttyttatgcaattctccagccttttctccaaggaaataagcatttcagaaatgtcagattcatgaactaacgaataaataaatgttgaatgactcaatgatttataaggagataaaataattttgcctgaaatcttacttaatcca

SEQ ID NO: 692529 - DNA, 609 bp, Homo sapiens
ttcaagtgggtaggtaacattctaagataatacgctgggattcccaggtctgttgcacacctgctgtgtaatactttttccttgagtgtaaaaaaatgtgyaactggtgggaaatcactcaagaaattaggttactcatgtgttgacttgtgtttatcaaaatggagatgtcctgactgtgctaaacttaatcagaggtgcttttaagagaaagacacatcatagaaaaacacccctggcttgcctgaaagtaagtgacttctaggtgggccatgttgcaagctgcttatggtgaccacatggcagaaaacatatttgtacattgttatcattcctgcccttctgcatgttgcttccagtagggagaatctaaggatcctatgacagggaaaaaaaggaaatctcattcatgcaagaaataatcacctctcacctgggatagcttaagagaagcaggagaccacaacagaaccacataaatgggaggaaaatggtaacctgggtaaaagtgctctctggcactatggaacaacatttagtaagctgtagtgaatggtcagcctctgggataccaatagtttaccaacaaggctgaactcattctaattc

SEQ ID NO: 692530 - DNA, 609 bp, Homo sapiens
ttcaagtgggtaggtaacattctaagataatacgctgggattcccaggtctgttgcacacctgctgtgtaatactttttccttgagtgtaaaaaaatgtgtaactggtgggaaatcactcaagaaattaggttactcatgtgttgacttgtgtttatcaaaatggagatgtcctgactgtgctaaacttaatcagaggtgcttttaagagaaagacacatcatagaaaaacacccctggcttgcctgaaagtaagtgacttctaggtgggccatgttgcaagctgcttatggtgaccacatggcagaaaacatatttgtacattgttatcattcctgcccttctgcatgttgcttccagtagggagaatctaaggatcctatgacagggaaaaaaaggaaatctcattcatgcaagaaataatcacctctcacctgggatagcttaagagaagcaggagaccacaacagaaccacataaatgggaggaaaatggtaacctgggtaaaagtgctctctggcaytatggaacaacatttagtaagctgtagtgaatggtcagcctctgggataccaatagtttaccaacaaggctgaactcattctaattc

SEQ ID NO: 692531 - DNA, 630 bp, Homo sapiens
gtacttaaaatgtccagttaattagtatcttgagttttttgtgtttcttgtttttcccttatgagtctccctgcccgtttcctccaccctgccaccccatgatggtgtatagccttaatatagtggtaatttttagggactgcataaagttgataaataaatttattataattaaacaataagttcccaagaattgaacattggtttcacttttccaacatcattaactctagaaaaaaaatttttatacttagtrcagattatttccttagaataaattgacaggtagaattacttggccaggaattataaatactcatatgccttgtgatacaaattattggtttcagtacacattgagaaactgttttgcccatctcaccaataattgaaacaaaaacgaggtatcatttttggcctaccatcaatttggttgaccaaatctgccaaaaaacttaataaatgaaagtattcacataagtgattatgagtttttataaagcaatttgacagaatataccaagggccataaatgtttttatactctgttcaccacatgtttaagggacattgccaaattagagcatgctgagcaaaagtattcaagattttccaaaatgggaaatcctc

SEQ ID NO: 692532 - DNA, 630 bp, Homo sapiens
gtacttaaaatgtccagttaattagtatcttgagttttttgtgtttcttgtttttcccttatgagtctccctgcccgtttcctccaccctgccaccccatgatggtgtatagccttaatatagtggtaatttttagggactgcataaagttgataaataaatttattataattaaacaataagttcccaagaattgaacattggtttcacttttccaacatcattaactctagaaaaaaaatttttatacttagtacagattatttccttagaataaattgacaggtagaattacttggccaggaattataaatactcatatgccttgtgatacaaattattggtttcagtacacattgagaaactgttttgcccatctcaccaatarttgaaacaaaaacgaggtatcatttttggcctaccatcaatttggttgaccaaatctgccaaaaaacttaataaatgaaagtattcacataagtgattatgagtttttataaagcaatttgacagaatataccaagggccataaatgtttttatactctgttcaccacatgtttaagggacattgccaaattagagcatgctgagcaaaagtattcaagattttccaaaatgggaaatcctc

SEQ ID NO: 692533 - DNA, 657 bp, Homo sapiens
atttcaatgtgataaatatatgaaaatctttcataaattttcaaatttaaatggacataaggtaagacacaccagaaaaaaaccttttaaatataaagaatttggcaaatcattttgcatattttcaaacctaactcaacataaaataatttgtactagagtaaatttctacaaatgtgaagactgtggaaaagcctttaatggatcctcaatctttactaaacataaaagaattcatattggagagaaatcgtacatatgtgaagaatgtggcaagcctgtaaccagttcacaaaccttactacacataagataatttatactagagacaaactctacaaacgtgaagaatgtagcaaagcctttaacctgtcgtcacacattacaacacatacaataattcatactggagagaatccctacaaacgtgaagaatgtgacaaagcctttaatcagtcctyaacccttactacacataagataattcataccagagagaaactcaatgaatataaggaatgtggcaaagctttcaaccagtcctcacaccttaccagacataagataattcatactggagagaaaccctacaaatgtgaagaatgtggcaaagcctttaaccagtcctcacaccttaccagacataagataattcat

SEQ ID NO: 692534 - DNA, 589 bp, Homo sapiens
aatcaaattattttaattagatgatgactgcaaaactaaaaaaacttaaaaatgctgaaaacaaatccatactctctgctttgtattgaattgattactgtaaaattgtatggcttataattcagaatctccctatgcaaatttttgtttttacttgcctgattcttaggctagacccataattttcttgtgtcttacatttttttctcttattttatataagatgctatgtgagctggtcagagattataaaaataatttttataaaattagtgcaaaaaatttagatttaatttcaaaattagtgtatgttatattttatgtgttagaatattttatttgttcttttaatggagaacgctgtataagcctactttttttagttttgttcctttcagtttttataatgaaaataagtaaatatgattgagcccatttrtttaggtgagtactaggggggcttcctaaatcatgaggatgtttttatatataaatatagcaaacaaacatgacagtgctttctgtgtcacagatgctttataataagccataaatattcctgtggagttagttgtaacttcaagacaga

SEQ ID NO: 692535 - DNA, 850 bp, Homo sapiens
aaatccaaggaacaaaacccccttgctacttaattggtaccagcaacaaaagtgacttcatattgacaaactgacttgggatatcttacatgttcctctgcttcaatgcaaaattcccacaggtaggaacttataggccttactcataaagatcagacaatttcagggactagatgctaagctcagtattacaggaagatacagaactctgtgtagcagaagtataaagacatacaagtagagagcrttgctttaaacaaaagtttatgactggagctcattgagtggttagagttatagatgtaatcctgttagtttccatcgctgagataaagttaaaataatgagagctgttctctcatgtgtcattagtataactttaaggggtcactgcaaagtaggaatggaccttattgttatcaacaaatatttgagtgtttcattatatgtagtgtaagatttaaatttcacaagacaaggagatgtatattaactcttaagaagaggaaaatatatatagtattgctttgttttagcattctattcctttatttaccatgtatgccactacagaagactttatacttttatatgttttaataatatggcaagtttcccaacttacaaatcagttgaatcctaaaaattccatgtatgtagcttgttgaaattcaacacattttaaaatagaaattgtgttgtaaattgtagttctgtttccagaataattcacaaattgcttttaattcacaattcatcttcattgcttcatattagcaaacattgattagcagtgaaatcaagtggtaaagtaactctacaggtttttgaaaggagatatgaaagataa

SEQ ID NO: 692536 - DNA, 600 bp, Homo sapiens
tgataggatttcccactagtcattcagaggtttttctatttaaaaaataayaacttaaaaaataaataaaataaagtaaaaaataaaaaataacaacttaatacgtaaggataagctcataattagttacagtataaaacaatatatattataaagtttaataacataaataatctcaattttataaacattaaataattgaaaacattaaaaggaaacagtacaaaaataccaattaaaaataattttaaaaattaaaaaaaggcataaagatttaatatttagaagtttgtactcctacaatgaaattttaagtacacaaagcattaattgccctatctgaaagtcttgaaccttgtctcatgacaaatatccccaatgtaaaaaacttctttcatcttgcattgacttgctaagattgcacccaaaagtactttcaagcgggatgttggggtacatgttacttcatacaaactattctttttttaatggtaaaattattctgtttgcttgatctgattttggttttgctattgaaagtgatattgcttttgctaatttagatttttgattgattttctactttttgcatgagtattg

SEQ ID NO: 692537 - DNA, 600 bp, Homo sapiens
tgataggatttcccactagtcattcagaggtttttctatttaaaaaataacaacttaaaaaataaataaaataaagtaaaaaataaaaaataacaacttaatacgtaaggataagctcataattagttacagtataaaacaatatatattataaagtttaataacataaataatctcaattttataaacattaaataattgaaaacattaaaaggaaacagtacaaaaataccaattaaaaataattttaaaaattaaaaaaaggcataaagatttaatatttagaagtttgtactcctacaatgaaattttaagtacacaaagcattaattgccytatctgaaagtcttgaaccttgtctcatgacaaatatccccaatgtaaaaaacttctttcatcttgcattgacttgctaagattgcacccaaaagtactttcaagcgggatgttggggtacatgttacttcatacaaactattctttttttaatggtaaaattattctgtttgcttgatctgattttggttttgctattgaaagtgatattgcttttgctaatttagatttttgattgattttctactttttgcatgagtattg

SEQ ID NO: 692538 - DNA, 600 bp, Homo sapiens
tgataggatttcccactagtcattcagaggtttttctatttaaaaaataacaacttaaaaaataaataaaataaagtaaaaaataaaaaataacaacttaatacgtaaggataagctcataattagttacagtataaaacaatatatattataaagtttaataacataaataatctcaattttataaacattaaataattgaaaacattaaaaggaaacagtacaaaaataccaattaaaaataattttaaaaattaaaaaaaggcataaagatttaatatttagaagtttgtactcctacaatgaaattttaagtacacaaagcattaattgccctatctgaaagtcttgaaccttgtctcatgacaaatatccccaatgtaaaaaacttctttcatcttgcattgacttgctaagattgcacccaaaagtactttcaagygggatgttggggtacatgttacttcatacaaactattctttttttaatggtaaaattattctgtttgcttgatctgattttggttttgctattgaaagtgatattgcttttgctaatttagatttttgattgattttctactttttgcatgagtattg

SEQ ID NO: 692539 - DNA, 641 bp, Homo sapiens
tactccaccagacckggctaatttttgtatttttagtagagacggggtttctccatgttggtcaggctggtctcaaactcccaacctctggtgacccgcccacctcggcctccctgcatattcgttcctattaatcatggtttgagtagtgtaaaactctctaatttgtttagatttggtcagaaaccatgtttgtcagtggtacaatgacagagcatgcttttagtgagcctagatagtactgtgttttgaggtacagggcaagagagtgcagatcttcataagatcgtccttctactgaacaaaaagttgaatgaataaatgagctctctacagttaatagctggaatttgttacctagaattgaataacttgacagaaactctataaaaaaaggtttgcttatgcctttatgtgttttcctatagagggactacagccttcgttacgttctcaattggtctgtgaccaatcaagatgtatggagctgttaaatacagaaagatttcaacatgtatacaaaaaatttaagttttcatgtgggatatatctatcttatatggtcttgtcttccttttatgtaaaattaaagctgattatttttatttacatgtttttaaaatgttttacatttttcaaat

SEQ ID NO: 692540 - DNA, 648 bp, Homo sapiens
ctgtgtcaccaaaattattttaaattatacttggttaaaaagctattcttcttgaaaactggaacaagacaaggatgcccactctcaccaytcctattcagcatattattggaagtcctagtcagagcaattagtgaacagaaagaaataacaggcattcaaataggaaaataagtcaaactgtctttcttccctgacgataagattttctacctagaaaaccctaagactcttccaaaagactcctagaactggtaagtgactttagtaaagttcaggatagaaagtcaatgtacaaaaatcagtagcatttctatacaccaatagcatccaggcagagagtcaaatcaagcacacaatgccacttacaatagctgtaaagaaaatgaaatacctaagaatacagctaaccaaggtggtgaacgacttctacaaggataactacaaaacactgctgaaagaaatcagagatgacacaaataattgggaaaagattccatgctcatggattggaagaatcaataatgttaagctggccatactgcccaaagcattttaaagatgcaatgctattcctatcagactacgaatggaatttttcatagaattagaaaacaaactattctaaaattcacatggaacaaaaaa

SEQ ID NO: 692541 - DNA, 648 bp, Homo sapiens
ctgtgtcaccaaaattattttaaattatacttggttaaaaagctattcttcttgaaaactggaacaagacaaggatgcccactctcaccactcctattcagcatattattggaagtcctagtcagagcaattagtgaacagaaagaaataacaggcattcaaataggaaaataagtcaaactgtctttcttccctgacgataagattttctacctagaaaaccctaagactcttccaaaagactcctagaactggtaagtgactttagtaaagttcaggatagaaagtcaatgtacaaaaatcagtagcatttctatacaccaatagcatccaggyagagagtcaaatcaagcacacaatgccacttacaatagctgtaaagaaaatgaaatacctaagaatacagctaaccaaggtggtgaacgacttctacaaggataactacaaaacactgctgaaagaaatcagagatgacacaaataattgggaaaagattccatgctcatggattggaagaatcaataatgttaagctggccatactgcccaaagcattttaaagatgcaatgctattcctatcagactacgaatggaatttttcatagaattagaaaacaaactattctaaaattcacatggaacaaaaaa

SEQ ID NO: 692542 - DNA, 599 bp, Homo sapiens
tgtaagaaataaatttctgttgttcataaattacccagtctgtagtattttgtcatagcagcacaaatgcactgattaaagcaacattactcacttaatcttaacagctcaacagctcagatccaaatgtgtggacgacccctagccactgtacagaattgcacagcaaaaattttatgtatcggcctttcctctagctttatccttttctagtgttcttttcttcatataatcccattttatttgcatatgttttgaaattttatatattttgtatgtttttaattctactaaatcttttttttttttaaacaagacagggtctaaattggttgtaaactggggcaatgccccccgccctttgtgagatgtttggcattggcattgtctggatatatttttgatcgtcacaattagagacggcaaacctgttctaaataaaacaattacatccagacctacagtaaaagctatgattgtttaaaatctgcattataatcatttctgtggcttctaggtaatatygaataggaatttaatattgaaaaaatgaatatagattcctaaaaagaacctaaaaagacacctaaaatgactat

SEQ ID NO: 692543 - DNA, 989 bp, Homo sapiens
ggaagctgtgatttcactggaggatgccaaagaaattaagttcaagctacagtgtgcattctcactgcccttagggggcactayatgtcaccacaggaatgttggttatgcccaacaaagtggatgaacccattgcatgaatttagataagtgagtgaaatggtcaggtaggactcttgggcagcactgtggagaatggatttcagaacaagacgagagacaatgagatcaattcaacagtagtgccgtaattgagatgagaaatgatttgagcctaaatctaggttactattttccccctaaactttcctttggcctccttctaacttgaagagggtaaagaaataaggatataggggaaaagaaaaatttagcacaattctgtggctagtaacactattcactcagatgagggaggcagaggggaaacattttaaaaaaaatctattaaagttgatgtttctgttggtgttcaggtagaactatgtaggagtcagatggttatgtgggtttggatcaagagaaggatctaggatgcaggtgaagactgaggggtcattagtctttgaggcctttggaaatgctgcgttcacccaaaaaatgcatagaacagtgtttcttaaaaaggagggtggcatgtatcagggtccagtagggaaaattgccaactctaagttctaatactctcccaggcccccaacattgcaagggtagggtaggaagcaagcgtacttggaacaagctcctaggtgctgctttacttttttcttccaggggatataggcgttgacacaattttaaaagctccccaggagattctgctgtacaccgaggattaagagtcactaaaggaaagtgaggagggagtaagggtgagcatttcatccagggcaacaaaagtcaaaagagcaagaccaaacctgataatgtaatatttagatggcagctacaactatttaaataaaacaaaacaaaaacctgtcacagat

SEQ ID NO: 692544 - DNA, 989 bp, Homo sapiens
ggaagctgtgatttcactggaggatgccaaagaaattaagttcaagctacagtgtgcattctcactgcccttagggggcactacatgtcaccacaggaatgttggttatgcccaacaaagtggatgaacccattgcatgaatttagataagtgagtgaaatggtcaggtaggactcttgggcagcactgtggagaatggatttcagaacaagacgagagacaatgagatcaattcaacagtagtgccgtaattgagatgagaaatgatttgagcctaaatctaggttactattttccccctaaactttcctttggcctccttctaacttgaagagggtaaagaaataaggatataggggaaaagaaaaatttagcacaattctgtggctagtaacactattcactcagatgagggaggcagaggggaaacatttwaaaaaaaatctattaaagttgatgtttctgttggtgttcaggtagaactatgtaggagtcagatggttatgtgggtttggatcaagagaaggatctaggatgcaggtgaagactgaggggtcattagtctttgaggcctttggaaatgctgcgttcacccaaaaaatgcatagaacagtgtttcttaaaaaggagggtggcatgtatcagggtccagtagggaaaattgccaactctaagttctaatactctcccaggcccccaacattgcaagggtagggtaggaagcaagcgtacttggaacaagctcctaggtgctgctttacttttttcttccaggggatataggcgttgacacaattttaaaagctccccaggagattctgctgtacaccgaggattaagagtcactaaaggaaagtgaggagggagtaagggtgagcatttcatccagggcaacaaaagtcaaaagagcaagaccaaacctgataatgtaatatttagatggcagctacaactatttaaataaaacaaaacaaaaacctgtcacagat

SEQ ID NO: 692545 - DNA, 840 bp, Homo sapiens
ttttaaaaatatcaactcacataaagaggaggccaaccctgacttatctcatgggcaagctgtatggcacaaatgaaattactaatgtgaaagtgttcggtcaactctaaaggtccttacaagtttgtgggtttttttttttttttcagacagagttttgctcttcttgcccaggctagagtgcaatggcatgatctyggctcaccgcaaccttcacctcctgggttcaagcgattctcctgcctcatcctccggagtagctgggattacagacgcccgccaccacgcccagctaattttgcatttttaagggagacagggtttctccatgttggtcaggctggtttcgaactcccaacctcaggtgatccgcccacctcagcctcccaaaatactggaattacaggtgtgagccaccacgcctggccacgtttgaggtctttttaatgattagaaatttcttatactctggcatctgtagaatccattcaaagccataaatttctgcttctttcccacacctggtgggagaaatgggggaataggcccacaaatcgccttggcttttgtggtctcccagtatgctcttttgcatggacagaaaaatgagggaaatgcttttaccttcatcaaacctattggaaatggttaagtttcccttcttttgactaaaacaaaactaaaaaccacaagaaacctactcaagattggctcatatgaatcacatcctgtgtggaaccctgtcctgtgtcaatgacacttagacacagagcaaagaagggagagggtgggtcactgtttctaaatgcaacgaagggcactttcattaaagcactaagg

SEQ ID NO: 692546 - DNA, 840 bp, Homo sapiens
ttttaaaaatatcaactcacataaagaggaggccaaccctgacttatctcatgggcaagctgtatggcacaaatgaaattactaatgtgaaagtgttcggtcaactctaaaggtccttacaagtttgtgggtttttttttttttttcagacagagttttgctcttcttgcccaggctagagtgcaatggcatgatcttggctcaccgcaaccttcacctcctgggttcaagcgattctcctgcctcatcctccggagtagctgggattacagacgcccgccaccacgcccagctaattttgcatttttaagggagacagggtttctccatgttggtcaggctggtttcgaactcccaacytcaggtgatccgcccacctcagcctcccaaaatactggaattacaggtgtgagccaccacgcctggccacgtttgaggtctttttaatgattagaaatttcttatactctggcatctgtagaatccattcaaagccataaatttctgcttctttcccacacctggtgggagaaatgggggaataggcccacaaatcgccttggcttttgtggtctcccagtatgctcttttgcatggacagaaaaatgagggaaatgcttttaccttcatcaaacctattggaaatggttaagtttcccttcttttgactaaaacaaaactaaaaaccacaagaaacctactcaagattggctcatatgaatcacatcctgtgtggaaccctgtcctgtgtcaatgacacttagacacagagcaaagaagggagagggtgggtcactgtttctaaatgcaacgaagggcactttcattaaagcactaagg

SEQ ID NO: 692547 - DNA, 840 bp, Homo sapiens
ttttaaaaatatcaactcacataaagaggaggccaaccctgacttatctcatgggcaagctgtatggcacaaatgaaattactaatgtgaaagtgttcggtcaactctaaaggtccttacaagtttgtgggtttttttttttttttcagacagagttttgctcttcttgcccaggctagagtgcaatggcatgatcttggctcaccgcaaccttcacctcctgggttcaagcgattctcctgcctcatcctccggagtagctgggattacagacgcccgccaccacgcccagctaattttgcatttttaagggagacagggtttctccatgttggtcaggctggtttcgaactcccaacctcaggtgatccgcccacytcagcctcccaaaatactggaattacaggtgtgagccaccacgcctggccacgtttgaggtctttttaatgattagaaatttcttatactctggcatctgtagaatccattcaaagccataaatttctgcttctttcccacacctggtgggagaaatgggggaataggcccacaaatcgccttggcttttgtggtctcccagtatgctcttttgcatggacagaaaaatgagggaaatgcttttaccttcatcaaacctattggaaatggttaagtttcccttcttttgactaaaacaaaactaaaaaccacaagaaacctactcaagattggctcatatgaatcacatcctgtgtggaaccctgtcctgtgtcaatgacacttagacacagagcaaagaagggagagggtgggtcactgtttctaaatgcaacgaagggcactttcattaaagcactaagg

SEQ ID NO: 692548 - DNA, 618 bp, Homo sapiens
ctgccaccttcattgcaatagcagcagcaccacatctgagcacaacaggccccctcgcacttcccaggtttcactccttttataaagaaatcaagcccatgctctcacgcccaccagtatttcccagactttccagattgtgatgaattgcctaaagcattgacttgaaacaaagcaaaccaaaaccagattctcagcacctgcccttggatggtctgacgaagccctggaatcacccaggggattctaatgaccagatgaatttgggaaattctgagctgccctacaacgtctaaagtcagggtttgagtttctccccaccctccctctttcctcctgttgcttctgcaaataggcaggctagactgtttagagagtctcacctggcctccagcatagtctagagtcaggctctgatcttgcagatggatgactcaccacatcatccccacgaggggtccggcatcttcacgtgtcacccaacctttaagttttctggacaggctgcaggaggtgatgggtcctaaaggagaggtgactgacgcgractttgtgttgctaaacagccctggccgtgacagtacagattagtacaggacagttcctggaagggctgta

SEQ ID NO: 692549 - DNA, 1159 bp, Homo sapiens
ttctcccggctgggtctcccatgtgggctcttggagccgcggcctttcccaaggggcgggtgttccggattctcagaacagcagggcacatgctgctgccttccagcttattaaaaagaggaagaaaacggcccgcgcctccttcccccaggcctctgggcctgcatgcagaaacctgaagcctgcaattaagtgaaactcgatccttagtggggagaggttctcctgggctgctggaagagactccaggtcccagaccccgaggaggaccactggcttgtcacagactatgtggggtcttgggggcaaagaggcggccaggggagagaggagagagggagaccaggccggccgagccttagcccaggacaccagactcggggctgtaagctaaggtggcttttgttaaaagagaaaaaaatgacaggtgactttcaagtcacgggagcccccttcctggaggccaccgcctctcactggggcctgggcttttccacgagcctctgtgtatcgctgcacggcctgggaacctgccttgtctgtggacacgtggatctgtgcgcgctgctctcctgtttgctactgggggagccgtatgactgctagttttgtaggtcaaaagtggtcgagtattgacagctttgtatataattyagtgcagtcgttttctcggctagacaagcggcagacctgagtggttccagacactttgttctcatgcaccttatcacatgactctgcctcagtttcctaatatgtaaaatgaggacctaagcagtcctcaccttctagggttgttttgagaattagaagggtaatagacacagcatccagaaccgtggcattagctatcattatttttatctgtatgattacaggttttcaccatgtgctggtgcaaaccagctttgatccagttggctaattttaacttcttgtagtattttgtcatggggatgtgacgtgagcttggtgtgtttcctggagaaagctacttggtgcttgccatgggaaggggctgccggggactttctagagagcacctctgggtgcctgggtgccgtggccagtggatttgccagctctgggcttctcctggtgatgccaggggtgctccacgggggctttgctgggtcagccctctctccattgaggtgtg

SEQ ID NO: 692550 - DNA, 650 bp, Homo sapiens
gaaaactgtgtagggagggtgacttttatggagtaggactgtcccaaaggccatgagccagtcatggggcagccaaaaacatccctggggtggggaccctgccatggagatcccccgccccgccctaacagcacagaaaaaaataacaggaacagtaaagataatatgctgttattgtgagatggaataataataaacagtaactatgtttgggggggaacagcattgccatcgagaccctctgttttcatatcaataataatgacaaaaagaaaagaatggcagaccaggcaccatgayggacccccactctgtcgccgtctggcttggacgactgcagtagcctcttcggggtccccagtccactctggtcacacctgtctggtctctgagttgcagccagagggatcccatcagaaggtccatgagactctggccccacactctccattctcttcccactgctctgagaataaattcagaggccacccgggagctcctcagccctcaccgaccgcatctgcctctgggccttcgcgtttgttgttccccccacctggaatgctgttccctgcatattgacacagctggctccttgctgccattcaggtcccagctcagtgcacgtttaggaggcctgatgtgatgtg

SEQ ID NO: 692551 - DNA, 605 bp, Homo sapiens
tgtctctggggcaagtctctactttggccataatgctctgggctcagtgattctttcataatacctaaaaggtattatgaaattctgtggaggcattttggtcaccttgatgactgagggatattactggttatggagcagaaacctggaatgctacccacattgcaatttgaaaacacagttccggtaagaaagaaaagacctacaccttgtttaactggagaatgtaatgttgagtcagccagcaggtgaaaaataagtttataattatctgagcccaaccacttacctataaaaacaaagcaggagaagtacaggatttgtaaatgtatacaaagatttttccagaagacggctatcctgaaaatccaggaaatatgttgtttataatcttatttttaaaaattgcttgccattttggaaaatgtcattaactgtaaaactattcatatttgtgtcaccaataaagcataatkttatctgtccaaaaaaagtttgaaagccactgctatgttctgatagttttatgactttgcttggggcaacagattgcaccatcacaatattatcatcaccacagtatttcacactcctgttattacaaa

SEQ ID NO: 692552 - DNA, 1725 bp, Homo sapiens
tataatgtgtattatttgcataaaagggactgagcgcagtaatgctttgggagaccaaggcggggggatcgcttgagcaaaagagttcaagaccaacctgggcaacataatgagaccctgtctctaaaaaaaaaaaaaaaaaaaaaattagttgggcatggtggcacatgtctgtagtcccagctaccagggaggcagaggtgggagggtcacttgagcccaggaagtcgaagctgcaatgagccatgactatgcctttgcactccatcctgggcaacaggatggctctaacaggggctagaaaaaaaaaaataaaaaaaccctaaaaggtcgtttagcaattaacttctctaagttttcagaaatcctcctacacttggaatatcataaaaagtagtaattttgtgaaactgtagggagactctgctattcatgcttttaaaatgtgcttttaatttctctgactactaaaggctataataatgtcacttggaaaacagaaagctgagtgagcatctgagggtaaaaaggaatgttttcacagactcagttggtaaataccactggccctagctgaacactgtgattccttaactggaagccaatcacgatcttaattttaaaagtctccttgttacatagggcaaagggcagccatattatctcaattactccttcacagaaaactcaaggattgaactaatactttgaagcatcataaacatgttttcctttttaccatatttctgagtctatatgaagaggtcagatttaattgaaatagtcaacaggctcagatgttagtctagtttgggtattacaaagggcagctttttctttatgttaaggacatttatgatatattatatataatataccataggtcamtagatacaaaaacatatatgtcaaggatatatataacatacaatacatgtatgttaggatatttattatagcattgtcatattatataagttggagagtctaaatacccatcaataaggaaatagagctagtctcagtggctcatgcttgtaatcccagcaccttgagaggcccacgcagaaggattgcttgaagccaggagtacaagaccagcccggtgcaacatagcaaaacactgtctctataaaaaatttttaaaaatatagccaggcatagtggtgtgcacttgtagtcccaactgcttgggaggctgaggtgggaggatggtttgagcccaggatttgaggctgcagtgagctatgattgcgccaagggactccagcctggtgacagggtgagacctagtatcaaataaataaataaggaaatagttaaatcagcagtcctcaacctttctgacaacagggactggtttcatgaaagacaattttttcacggactgggctgtagcagggggtaggttttgggatgaaactgttccacctcagatcatcagtcattagttaagattctcataaagagcatgcaacctagatccctcacatgcacagttcacaatagggtttgtgctcctaagaaaatctaatgccactgctgatctgataggaggtggcgctcaggccgtaatgtttgccagccactcacctcctgctgtatagcctggtagggtctgcagcccagggtttgagaacccctgagttaaatttccatatccataagataatgtagtgtgcaaccatttaaaacaatgaggttagatctataatgtattggcta

SEQ ID NO: 692553 - DNA, 526 bp, Homo sapiens
ttttaaatgcttaacatagttttcagacttgtttctcttgtgtcttgaagtctttgtccacagatgtggttatagtctgcaacaaaggtcatctgagagcctaagcaggtacygacttaattctaccataaggagcagatccaaccctcagtctaatttcatccaacacaaataaacactttcaagtaccagtgtttcttgacatgctagttttgttaaaatgcagtattacaatattcagtgactgtttttaaaaggctataacatggtgatattgtgtgagcaaatacgtaagcatgtccctcactctgcatctttttcttaatatgaacggtttctttctatgtatttgtattttcatgtctatttttatgagtgtctctctgactcttctttattttctcctgtctttccctttccactctgtcttttctcctcaataggctaaatatgaaaatatttaatgttattgttactataaaattatgcatcataggaccagttgaaaatgcttataatatacaca

SEQ ID NO: 692554 - DNA, 1369 bp, Homo sapiens
  misc_feature 359, 592, 702: n = A,T,C or G
tccaaccttgccctgaacattgctctcaactgtgaatttagggatgggaagtaaaattcagaattctgagagacagactggaggagcaatggagcttggttcttcagagaagcccagtggaatttcatagacttccagtttgttatacaataattatcacctgatctcagttgttataatccctgctagtctttgtctgagccattcctttattctcacgaaaacttatcagatgaccttgatcccagggttcagcttccttgatcacctgcaaagatgaggatgaagtcattccttggaatcttgcagagattaaccatctttgacaccaatcactcttcttgagcgggccagggccntactcttgattgaaggatgctgggccctcccctagatgacctcataggggccacaagatccattctcttcctatgggctggcttttttttgttttggtttaggagawggagtcttacaatgttgctagggctggctcaaactggtgggctcaagcaatcctccggccccaacctataagcagctgggactacatgagcaagccactgggcccaaccccctatgtgcttcttanggagatgcccgctaatatggtctagaggactatttataattagaaaatcaagggaaggaacattttctgtatccgtctagatctaagtatgcgactatagtaaagaatcnggctattccaaaaggattaatatctattctgatcttttaatgttctatttcagtagtaaaatgtaacctgaaagtacaattaattaattcattcattcatatagtatttatccagtgccaactattccaattcttatacttcttcatattagtgaaatttgtaagcaatatatgaagaatagcattatggatttttaacagaatgtcaatattaaggtaaaatgcttatggccttatttttccattttgaatagtattcaaaaaataaatctcagagatgaaacaaatgaaagagagatttttaaaaacaattcaaaagatcaaccaaccaaactattggtttttcgaaaagataaaaaaatcaacaaaacttcaactagactaagaaaaaaagagaagacccaaataaataaaatcagagatgaaaatggagacatgataactaacatcacagaaatacaaaggatcataagagattattaagaacaactatatgccaacaaatttgagaacatagaagaaatttataaattcttaagacacatacaagctaccaagattaaagtataaagaaatagaaacactgaaccaaccgatcacaagtgagaaaattgaattagtaaacaacaacaacaaaatctttcatcaaaaaaatcccaggaaatat

SEQ ID NO: 692555 - DNA, 859 bp, Homo sapiens
gacaggttgagtttgagtagacgcaacaaatatataattaggcgatagcaatatgagattgagcacagattagagaagtgataatcaaagccttaatagtaataaggtakgtgtcaggtaattttctaagcaaatgggttattgcttttgatgaagaattgtagagtattggtcctctgcataatcttgcctgacatgcctgagggctaacatatagaccacacatggattctccgttttcaaccttgcgctcacttatgtatttgcatcagagggaaggatgcaagtgtccgttgagaacaacccaaagattattaaataagcctctccctcttcagtcccatactgaattcatatgaatttttacctatgagtctcttttttggaaagtgaaaagaaaaaggacagaaacaaatactggctacatttatattatgggctgatagaaagaaattgaattcataaatgaaggagaacaagaattatccaagaagtatcagaattgccagaactcttggcagctgaatttcacatccctgttttaatctctggaggcctacccagaagtgaggaaggctatcataagaagcagaaaataccaggcttagataaaattattcctttattttacatctaagatccttgcactgctgagtaagagttttaaccccattcaattagatattaaaggttggtatggctcatacaggacactcctccatcacattcctgtagaataattcaaaaatgtaacttttcggacctcctggaacaaagggcaagtaatatcgtacataccattacaaagataaccgaagaattcaatgtatatttccatgttactgtaatgcagtggaat

SEQ ID NO: 692556 - DNA, 1524 bp, Homo sapiens
aaaatctttaatatttgggatacacaatagttgtatgtatttatggggtgcatgtggtattatacaaacatatgctgtgtaacgatcaaatctrggaaagtggaatatcccattcttcatttaggaagaatatcatttcttcctgttaggaacattccaaatcttcttttctagctattttgaaatgtacaataaattattgttaactatagtcactctattgtgctaccaatcactagaccttatttcttctatctaagtgtatttttctttctttctttctttttaatttagtttttcttaggtttcatgaaggtagctttatccaaatattaattattgtatgtatttagaataataatgatgctacatcttttgatgttacacatagatgtaaatggcaatggtttaaatcagaatacaattccccaacaaatggcagtgctggcccaacaggaggaacactaagtcttaatatatttcttttatgtgtttttttcatgtgtgtttacacattcctcactttatccatttgcacaaaaagtacatttacctaaaaactaatcgtgatttcttaatttctagaagctatgggtaattttaatcattgaaaggagagattagaaaaatattacctctgccaataacagtcagattttgaatgactatgtaaggcagtaaatatatgagattaatctataaagagaaggttcaaacaaacatttgaacctaatgataatgagtgaaaaaaatactgcccatgatgctcagttgatcagtgacagcagaggctatgaactcttcatgaaccttacagtacaggattaaggcttattcatagtactcaagtcccattgagattcagtaggctgcttttaaatatacctcactgttaacctagctctaaaaagactcactcataaaatataacttcctgtaggctacttttttaaaaaagatagaattgtatttaccaaacagaaaaactctccttgtcaaaaatgaattataatgtcacacgtttgcaaaagaacttgaaacactggtatttttctcttaataaataaagtttctatctaagtgtgctggcttacacctgtaatcccagcacttggggaggctaaagcaggaggaattgcttgaagccatgggtattgatcagtctggtcaatatagcaatgaccttgtctctaaaacaatttaaaaattagctgggcatggtggtgcatgcctgtagtcctagctgcttgacaggctgaggcagaaggataacttgagcccaggagttcaaggttgcagtgagctatgattgtgtcattgtactccagcctgggtgacaaagcaagacctcgactcaaaaataaataaataaataaataaaataaaataaaaataaaagttaaaaaaatcacactctttcaaaaggtatatttaaaaaaaaacatctctggttcttttatgcttttaccctttacccttactgcttttacccttcgataatcctctcaacaataaacttaaaaa

SEQ ID NO: 692557 - DNA, 1524 bp, Homo sapiens
aaaatctttaatatttgggatacacaatagttgtatgtatttatggggtgcatgtggtattatacaaacatatgctgtgtaacgatcaaatctaggaaagtggaatatcccattcttcatttaggaagaatatcatttcttcctgttaggaacattccaaatcttcttttctagctattttgaaatgtacaataaattattgttaactatagtcactctattgtgctaccaatcactagaccttatttcttctatctaagtgtatttttctttctttctttctttttaatttagtttttcttaggtttcatgaaggtagctttatccaaatattaattattgtatgtatttagaataataatgatgctacatcttttgatgttacacatagatgtaaatggcaatggtttaaatcagaatacaattccccaacaaatggcagtgctggcccaacaggaggaacactaagtcttaatatatttcttttatgtgtttttttcatgtgtgtttacacattcctcactttatccatttgcacaaaaagtacrtttacctaaaaactaatcgtgatttcttaatttctagaagctatgggtaattttaatcattgaaaggagagattagaaaaatattacctctgccaataacagtcagattttgaatgactatgtaaggcagtaaatatatgagattaatctataaagagaaggttcaaacaaacatttgaacctaatgataatgagtgaaaaaaatactgcccatgatgctcagttgatcagtgacagcagaggctatgaactcttcatgaaccttacagtacaggattaaggcttattcatagtactcaagtcccattgagattcagtaggctgcttttaaatatacctcactgttaacctagctctaaaaagactcactcataaaatataacttcctgtaggctacttttttaaaaaagatagaattgtatttaccaaacagaaaaactctccttgtcaaaaatgaattataatgtcacacgtttgcaaaagaacttgaaacactggtatttttctcttaataaataaagtttctatctaagtgtgctggcttacacctgtaatcccagcacttggggaggctaaagcaggaggaattgcttgaagccatgggtattgatcagtctggtcaatatagcaatgaccttgtctctaaaacaatttaaaaattagctgggcatggtggtgcatgcctgtagtcctagctgcttgacaggctgaggcagaaggataacttgagcccaggagttcaaggttgcagtgagctatgattgtgtcattgtactccagcctgggtgacaaagcaagacctcgactcaaaaataaataaataaataaataaaataaaataaaaataaaagttaaaaaaatcacactctttcaaaaggtatatttaaaaaaaaacatctctggttcttttatgcttttaccctttacccttactgcttttacccttcgataatcctctcaacaataaacttaaaaa

SEQ ID NO: 692558 - DNA, 1524 bp, Homo sapiens
aaaatctttaatatttgggatacacaatagttgtatgtatttatggggtgcatgtggtattatacaaacatatgctgtgtaacgatcaaatctaggaaagtggaatatcccattcttcatttaggaagaatatcatttcttcctgttaggaacattccaaatcttcttttctagctattttgaaatgtacaataaattattgttaactatagtcactctattgtgctaccaatcactagaccttatttcttctatctaagtgtatttttctttctttctttctttttaatttagtttttcttaggtttcatgaaggtagctttatccaaatattaattattgtatgtatttagaataataatgatgctacatcttttgatgttacacatagatgtaaatggcaatggtttaaatcagaatacaattccccaacaaatggcagtgctggcccaacaggaggaacactaagtcttaatatatttcttttatgtgtttttttcatgtgtgtttacacattcctcactttatccatttgcacaaaaagtacatttacctaaaaactaatcgtgatttcttaatttctagaagctatgggtaattttaatcattgaaaggagagattagaaaaatattacctctgccaataacagtcagattttgaatgactatgtaaggcagtaaatatatgagattaatctataaagagaaggttcaaacaaacatttgaacctaatgataatgagtgaaaaaaatactgcccatgatgctcagttgatcagtgacagcagaggctatgaactcttcatgaaccttacagtacaggattaaggcttattcatagtactcaagtcccattgagattcagtaggctgcttttaaatatacctcactgttaacctagctctaaaaagactcactcataaaatataacttcctgtaggctacttttttaaaaaagatagaattgtatttaccaaacagaaaaactctccttgtcaaaaatgaattataatgtcacacgtttgcaaaagaacttgaaacactggtatttttctcttaataaataaagtttctatctaagtgtgctggcttacacctgtaatcccagcacttggggaggctraagcaggaggaattgcttgaagccatgggtattgatcagtctggtcaatatagcaatgaccttgtctctaaaacaatttaaaaattagctgggcatggtggtgcatgcctgtagtcctagctgcttgacaggctgaggcagaaggataacttgagcccaggagttcaaggttgcagtgagctatgattgtgtcattgtactccagcctgggtgacaaagcaagacctcgactcaaaaataaataaataaataaataaaataaaataaaaataaaagttaaaaaaatcacactctttcaaaaggtatatttaaaaaaaaacatctctggttcttttatgcttttaccctttacccttactgcttttacccttcgataatcctctcaacaataaacttaaaaa

SEQ ID NO: 692559 - DNA, 1524 bp, Homo sapiens
aaaatctttaatatttgggatacacaatagttgtatgtatttatggggtgcatgtggtattatacaaacatatgctgtgtaacgatcaaatctaggaaagtggaatatcccattcttcatttaggaagaatatcatttcttcctgttaggaacattccaaatcttcttttctagctattttgaaatgtacaataaattattgttaactatagtcactctattgtgctaccaatcactagaccttatttcttctatctaagtgtatttttctttctttctttctttttaatttagtttttcttaggtttcatgaaggtagctttatccaaatattaattattgtatgtatttagaataataatgatgctacatcttttgatgttacacatagatgtaaatggcaatggtttaaatcagaatacaattccccaacaaatggcagtgctggcccaacaggaggaacactaagtcttaatatatttcttttatgtgtttttttcatgtgtgtttacacattcctcactttatccatttgcacaaaaagtacatttacctaaaaactaatcgtgatttcttaatttctagaagctatgggtaattttaatcattgaaaggagagattagaaaaatattacctctgccaataacagtcagattttgaatgactatgtaaggcagtaaatatatgagattaatctataaagagaaggttcaaacaaacatttgaacctaatgataatgagtgaaaaaaatactgcccatgatgctcagttgatcagtgacagcagaggctatgaactcttcatgaaccttacagtacaggattaaggcttattcatagtactcaagtcccattgagattcagtaggctgcttttaaatatacctcactgttaacctagctctaaaaagactcactcataaaatataacttcctgtaggctacttttttaaaaaagatagaattgtatttaccaaacagaaaaactctccttgtcaaaaatgaattataatgtcacacgtttgcaaaagaacttgaaacactggtatttttctcttaataaataaagtttctatctaagtgtgctggcttacacctgtaatcccagcacttggggaggctaaagcaggaggaattgcttgargccatgggtattgatcagtctggtcaatatagcaatgaccttgtctctaaaacaatttaaaaattagctgggcatggtggtgcatgcctgtagtcctagctgcttgacaggctgaggcagaaggataacttgagcccaggagttcaaggttgcagtgagctatgattgtgtcattgtactccagcctgggtgacaaagcaagacctcgactcaaaaataaataaataaataaataaaataaaataaaaataaaagttaaaaaaatcacactctttcaaaaggtatatttaaaaaaaaacatctctggttcttttatgcttttaccctttacccttactgcttttacccttcgataatcctctcaacaataaacttaaaaa

SEQ ID NO: 692560 - DNA, 1524 bp, Homo sapiens
aaaatctttaatatttgggatacacaatagttgtatgtatttatggggtgcatgtggtattatacaaacatatgctgtgtaacgatcaaatctaggaaagtggaatatcccattcttcatttaggaagaatatcatttcttcctgttaggaacattccaaatcttcttttctagctattttgaaatgtacaataaattattgttaactatagtcactctattgtgctaccaatcactagaccttatttcttctatctaagtgtatttttctttctttctttctttttaatttagtttttcttaggtttcatgaaggtagctttatccaaatattaattattgtatgtatttagaataataatgatgctacatcttttgatgttacacatagatgtaaatggcaatggtttaaatcagaatacaattccccaacaaatggcagtgctggcccaacaggaggaacactaagtcttaatatatttcttttatgtgtttttttcatgtgtgtttacacattcctcactttatccatttgcacaaaaagtacatttacctaaaaactaatcgtgatttcttaatttctagaagctatgggtaattttaatcattgaaaggagagattagaaaaatattacctctgccaataacagtcagattttgaatgactatgtaaggcagtaaatatatgagattaatctataaagagaaggttcaaacaaacatttgaacctaatgataatgagtgaaaaaaatactgcccatgatgctcagttgatcagtgacagcagaggctatgaactcttcatgaaccttacagtacaggattaaggcttattcatagtactcaagtcccattgagattcagtaggctgcttttaaatatacctcactgttaacctagctctaaaaagactcactcataaaatataacttcctgtaggctacttttttaaaaaagatagaattgtatttaccaaacagaaaaactctccttgtcaaaaatgaattataatgtcacacgtttgcaaaagaacttgaaacactggtatttttctcttaataaataaagtttctatctaagtgtgctggcttacacctgtaatcccagcacttggggaggctaaagcaggaggaattgcttgaagccatgggtattgatcagtctggtcaatatagcaatgaccttgtctctaaaacaatttaaaaattagctgggcatggtggtgcrtgcctgtagtcctagctgcttgacaggctgaggcagaaggataacttgagcccaggagttcaaggttgcagtgagctatgattgtgtcattgtactccagcctgggtgacaaagcaagacctcgactcaaaaataaataaataaataaataaaataaaataaaaataaaagttaaaaaaatcacactctttcaaaaggtatatttaaaaaaaaacatctctggttcttttatgcttttaccctttacccttactgcttttacccttcgataatcctctcaacaataaacttaaaaa

SEQ ID NO: 692561 - DNA, 1524 bp, Homo sapiens
aaaatctttaatatttgggatacacaatagttgtatgtatttatggggtgcatgtggtattatacaaacatatgctgtgtaacgatcaaatctaggaaagtggaatatcccattcttcatttaggaagaatatcatttcttcctgttaggaacattccaaatcttcttttctagctattttgaaatgtacaataaattattgttaactatagtcactctattgtgctaccaatcactagaccttatttcttctatctaagtgtatttttctttctttctttctttttaatttagtttttcttaggtttcatgaaggtagctttatccaaatattaattattgtatgtatttagaataataatgatgctacatcttttgatgttacacatagatgtaaatggcaatggtttaaatcagaatacaattccccaacaaatggcagtgctggcccaacaggaggaacactaagtcttaatatatttcttttatgtgtttttttcatgtgtgtttacacattcctcactttatccatttgcacaaaaagtacatttacctaaaaactaatcgtgatttcttaatttctagaagctatgggtaattttaatcattgaaaggagagattagaaaaatattacctctgccaataacagtcagattttgaatgactatgtaaggcagtaaatatatgagattaatctataaagagaaggttcaaacaaacatttgaacctaatgataatgagtgaaaaaaatactgcccatgatgctcagttgatcagtgacagcagaggctatgaactcttcatgaaccttacagtacaggattaaggcttattcatagtactcaagtcccattgagattcagtaggctgcttttaaatatacctcactgttaacctagctctaaaaagactcactcataaaatataacttcctgtaggctacttttttaaaaaagatagaattgtatttaccaaacagaaaaactctccttgtcaaaaatgaattataatgtcacacgtttgcaaaagaacttgaaacactggtatttttctcttaataaataaagtttctatctaagtgtgctggcttacacctgtaatcccagcacttggggaggctaaagcaggaggaattgcttgaagccatgggtattgatcagtctggtcaatatagcaatgaccttgtctctaaaacaatttaaaaattagctgggcatggtggtgcatgcctgtagtcctagctgcttgacaggctgaggcagaaggataacttgagcccaggagttcaaggttgcagtgagctatgattgtgtcattgtactccagcctgggtgacaaagcaagacctcgactcaaaaataaataaataaataaataaaataaaataaaaataaaagttaaaaaaatcacactctttcaaaaggtatatttaaaaaaaaamatctctggttcttttatgcttttaccctttacccttactgcttttacccttcgataatcctctcaacaataaacttaaaaa

SEQ ID NO: 692562 - DNA, 570 bp, Homo sapiens
acttgcctattctcaaagtgatatttaaaagcctataaaattatttgcaatgtgaaatggtataattcaaagacagaatctaattaaaaccagtagaataatgtatataacaatatacctcagcctagataattactactgcaaggcactgaaatgaattgaatttcaaggaagctatrgtacaaagggagattgttaggtgtgttttattctcattttctgaccaggagagcataatttagactgaggagaaaactctttggcactaaattcaaggacgaatttattgccaaggtttttaaattggggtcatggaataacaaaagacaaaatcactgttcaaatagacatttctctaaaagctaagggcataacatttaatcatatttcactaaaggcatttcttcagggagctgagataaaagggtatattgctctctggtgattcaacaatcctgagaaaaggcttgtgaagtatagagcagagattcttaaactcccttccccaagttataagtttcatttgtctatttagtcattcatcaagtttatattgaatttgtgctcttc

SEQ ID NO: 692563 - DNA, 1667 bp, Homo sapiens
aaaaattagccggcggtagtggcgcacgcctctaatcccagctactcaggagactgaggcaggagaatcgcttgaacccgggaggcggaggttgcagtgagccgagatcgcaccactgcactcccgtgtgggcgacagagtgagaccctgtcccccctccaaaaaaaagttatcatcactaaagttcatttaagttccattatctgaagaaagatatataaagcagcagagaaagttcgcaactattcaatgacaaaaagctatctgaaactctcatcttccacctcaatttttcagatattttagggaaatcatattttaagagttccactgtttggttagtaaggcaaaggacaatgcaatacataccttgtaccagtaatatattatttattaataaaaagtttagacatcaattaattctattatctttatcttatttaaatgtaacacaaaagtaaagaaatacttagaaaacatttttgtgaacttaaaattggatgatggattgaaactgcttgggaaaatgtaaaataacaaaaatgtaaaataacaataaaataacacagaaaatccaaacttttaatattcagataaattatgcaaaacatagaattcaagtttcaattctcctaattccctaactggtaagtgaagtgtggggatcttcctaaaactcacctttattcctaaggaaccaatacatttgagactcttgatttatgaaattttaattgaatctaaatttaacataatgaaattagttgagtagaactattgtaatacaaacgtaattacgttccttagaaaaaactctcaggcatggtgttaaaggcataatttttatgatctccaaatatttttcaagtcttgtttgtatatgagcacgtatttatatacataaaagtactataaatactttcatattttaatcctccaacaccttttcaaccagatgatattattcccattatacagataaaagaccaagggtcaggaggttaaatgagtttcctctccaagactaaaagcttaggtcttgtctccaaacccagtgcagctcttcctcaagttcaaatgaagattttttttttttttgagacagggtctcattttgtccagagtaggtaggactataagtacatgcaaccactctcacttccccaagtgaaaatatcctattagaaatgtttagatagctaggtgtagtaactcacacctgtagaccaggctactctaaaggctgaggcgggaggatcccttgagctcaggagttcgagtccagtcctgggcaacaaagcaagattctcctacccttcgtttctaaataaataaatacataggctgggcgtggcggctcacacctgggattacagaatcccagaactttgggaggttgaggtgggaggatcacttgaggtcaggagtttgagaccagcctggccaacatggtgaaaccccatctctactaaaaatacaaaaattagccgggcacrgtgatgcatgcctgtagtcccagctactcgggaggctgaggcaaaagaattgcttgaacccaggaggcagaggttgcagtgggccgagattgcgccactgcactccagcctggtgacagagtgagactccgtctcaaaataaataaataaataattaaataactaaataca

SEQ ID NO: 692564 - DNA, 590 bp, Homo sapiens
tctcctttttgtctgtctttctcaatagtaatttagaaatctgagctctttgtatcatgagggtagctacacagctggaaacaagacaaagccaatgatttattcggagattttagtggacaggcctaraaatggggtatatcactctgtcttcatttctttgatgagaattaatgatgtggtccaaacttaaatgcagggtgtattaggcattcttgcactgctataaagaaacatctgagactgggtaagttataaagaaaagaggtttaattggctcacagttcctcaggctttacaggaagcatggtgctggcatcttctcagcttctggggaggcctcaggaagcttaaaatcatggcagaaggcaaagggggagcaggcatatcacatggtcagagcaggagcaagagagcgggtgtggggtgccacatatcttttaaacaaccagatctcatgagaagtcactgacgatcacaaggacagcaccaacaggatggtgctaaacctttcatgagaaacctacccccatcatccagtcacctcccaccaggccccacctctaatactggggattacaattcaacat

SEQ ID NO: 692565 - DNA, 1540 bp, Homo sapiens
  misc_feature 1238, 1239, 1240, 1241, 1242, 1243, 1244, 1245, 1246, 1247,1248, 1249, 1250, 1251, 1252, 1253, 1254, 1255, 1256, 1257,1258, 1259, 1260, 1261, 1262, 1263, 1264, 1265, 1266, 1267,1268, 1269, 1270, 1271, 1272, 1273, 1274, 1275, 1276: n = A,T,C or G
  misc_feature 1277, 1278, 1279, 1280, 1281, 1282, 1283, 1284, 1285, 1286,1287, 1288, 1289, 1290, 1291, 1292, 1293, 1294, 1295, 1296,1297, 1298, 1299, 1300, 1301, 1302, 1303, 1304, 1305, 1306,1307, 1308, 1309, 1310, 1311, 1312, 1313, 1314, 1315: n = A,T,C or G
  misc_feature 1316, 1317, 1318, 1319, 1320, 1321, 1322, 1323, 1324, 1325,1326, 1327, 1328, 1329, 1330, 1331, 1332, 1333, 1334, 1335,1336, 1337: n = A,T,C or G
tacacagtttttcagaaaggtatatcaaactccaccagattataatgcattgtaaatttatttccattcataatgttaaaagcattagtgtcttcaaataaaatccctactaaattatctataatgtaataatacatgcaccgttatttcaaactttcttctaaaatctcatttctgcttttwaaaatggtcatgaacatatatacagaaaacatcgtaccatgtgatattatgccatagaactattatgtgtacctgtatatatacagccaataaagttgtagtaaaaaatgaattatattaaaaaccaagaattattgagcattctagttgtttttagttaaaacagtttaattggtctttaaaattatttcatttgttgagaaaagtaaatttagatcctttattttagtgagaataagcatcaaatgtatacataaaatagttttaaattggggttttaaaatacacaaattttagtattcttcaacatattgagctgatgtagattagacaaataaagagtggtttctattgctgcagtaaatagcatgatcatggaagaagatatattttttaaggaatcaagttaatagtaattaaaaatgtacatcagatgaataatacagtttcttttaagagagggacttgcttagatgccaatatataatttaaattcctttgggattttcaaataagacaggataaatagtacaaacaactataactctcaccctaaaacaagataaaataaaaaaactcataaagcttcatgaagggaaaccatttcaaagcagaaaattaacattaaacgtggggaaagacaaatgataatgtcaagatttccaatagagaatatacaataacagctgttccaaaagatgacaaagaattaaaatagtaattatttgtgtgatatcattttttaaataaaaattttttgttaattttagtttttaaaaatgtgcttttaacctttggtttatattcctgttagtttatttttgaccttaatgtaccagatggggtataaataataatcaggacgcatacatgttatttctttaaaaaattagcatgtttgttgaagggagaaaaaacccaagatattggaaaatttattaaaatccaagagaatctaagaggttttttttaatgaaccttttaaaattttcccttggatttatatgacacccagattatggccctggtccttggaaatagagggtagaagaaannnnnnnnnnnnnnnnnnnnnnnnnnnnnnnnnnnnnnnnnnnnnnnnnnnnnnnnnnnnnnnnnnnnnnnnnnnnnnnnnnnnnnnnnnnnnnnnnnnnaaactctctttatctgaatataaacccttgaagctgggtttgtaatggaaatgctgacagccacttaaccagataatagccccggttcacttggtgtgtatatatagtgtcactgctaatatggctgtgccatctgttctatctgagagttgtaaaagatttgagcttcaaacaactgatttcaaaagtgtactggataaatt

SEQ ID NO: 692566 - DNA, 610 bp, Homo sapiens
  misc_feature 485: n = A,T,C or G
cctgtaataccgggagttactccggaggatgaggcacaagaatcacttgaacctgggagaaggatgttgcagtgagctgagatcaagccactgcattccggccaggacaacagagcaagacgctgtctcaaaaaacaacaaaaaaaattggataatagtgtgtaaccatggaataaatagaacaagtagagcatactctccccaattccccacaaactggggttctaagaaccagaatctcagcaactgtattaaaaccctttttcttgtatgtaaaaacaaaggggttgtattttaaatgttaaatattttgtgygaatataagaaattagtatgttttagaagatttattatatatataagatatttttagaaaaatacaaagcttcgttaagcgttatggaagtatgatttatgagaagaaggtatgatcatatttttgaggaaattaagaaaactgcttcaggataagtcctccactttanaaacaaggtaagatgtaattttaaatagacatatagcattaattgatataaagccattttctatcttttagaataaatttacctacatattcattaactaccaccatatattcattataaggtat

SEQ ID NO: 692567 - DNA, 610 bp, Homo sapiens
  misc_feature 485: n = A,T,C or G
cctgtaataccgggagttactccggaggatgaggcacaagaatcacttgaacctgggagaaggatgttgcagtgagctgagatcaagccactgcattccggccaggacaacagagcaagacgctgtctcaaaaaacaacaaaaaaaattggataatagtgtgtaaccatggaataaatagaacaagtagagcatactctccccaattccccacaaactggggttctaagaaccagaatctcagcaactgtattaaaaccctttttcttgtatgtaaaaacaaaggggttgtattttaaatgttaaatattttgtgtgaatataagaaatyagtatgttttagaagatttattatatatataagatatttttagaaaaatacaaagcttcgttaagcgttatggaagtatgatttatgagaagaaggtatgatcatatttttgaggaaattaagaaaactgcttcaggataagtcctccactttanaaacaaggtaagatgtaattttaaatagacatatagcattaattgatataaagccattttctatcttttagaataaatttacctacatattcattaactaccaccatatattcattataaggtat

SEQ ID NO: 692568 - DNA, 2439 bp, Homo sapiens
taaaggcataacaaaacaaaaattgcaaaggctttatgagtcatgccacaccaattattgcagtcctttggttaaccacgcatttttaaaaattttcaccaaagtacacataaagctaaaggagagggaagggataccatcaggagggtctaggggactgtaacccaaggccatgctcctctaacataaaatgacactgattctttaaggttttgttctataaaatataaatatatattttttgttttgtcttatatctacactttttgaaacacaaacacaaaattctagtaagaatagcatatagaaatcatgtagaaatcaaaagtgttcagggaattaccagtaagtccagcttggctcaaggagtaggaagaactgacaggaagagaagttagtaaggtaagtatgataataatggatttttaaaattaatttattttttattatacttcaagttcagggatacatgtgcagaacgtgcaggtttattacataggtatacacgtgccatggtggtttgttgcacccatcaactcagtaatgggtttttatgttctataaagaaattgggattttatcaaattttgcaggggcatgttgatgattttaatagggtatcaacaaaatcagaagttctaggaaaatctgccaggttttccttgcaacttgagtgcaccatgcctgaaaagcatagactttaaacataagtgtgttcagctgtaactcagaagaggaagggagttccaagatttgttctttctatctacgtgtctgtctatctatctatgtatctatctatcatctatctatctgtgtatctttttttgtttgtttgtttgagactgaatctcattctgtcacccaggctggrgtgctgtggctcactgcagccacaacctcctggctcaaacaggtgctcccacctcagcctcctaagtagctgggactacaaatgtgagccagtacacctgactaattttttcatttttagagagacacggtctccttatgttgcccaggctggtcttgaactactgggctcaagagatcctccccgtcttggcctcccaaagttctgggattataggtgtgagccactctgcccaggctatctttctatctatctaatctctctatctaattatccatctatgcacccttatatgtttttatctctgtgtccatccacccacctacttatccactcatctatattatgactgtttctgtttttctgtctacctaattcatccatcatgcatttatttacctatctacccatctatctatctatgatcttttttattatcagcacaggcattccatttcctaaacagctgaatttaaacaacattaaacaatattaatcaacttctccaacttgatccaacatgcattcctaaagaaggtccccttctattgcttgaaataaagacaaagtaaccattgttttctaggactcctatgagcttttcgtcttctgtgtggctggataaagacagctggaaacagaaacagtcacacaaatgcaggatgttggcagcacatgaaaacaacagacatgttgaactgctatgtgatagtcattttcatgttcactattctgctcaggccttaagacaacgttgttcagtgcttactcatattctcacatcactcctctgagctaggtactatcattattcctatcttacaactgaggaatctgagctttagaaacattaagtaagtttcccacattcagatggctgttaccacctacactggcttcaaaactcttgctcttaaatatgactaagctctagaaccacaatctgtttcgtaagaactgcccatgtttttcacatcttttgcaaccagtgctatgttaagtcaaagtcagattaagtgtgggccagtcaggcatttgccagaaagccaatgtgtgaagggcactaaaatttatttttggaatgttagaagatggagaaaattgcatctactagagcttgtttatgcctctgggaggaacactctgatgagcaacctggttgaagagagtgaagctctaaaattatgcttaagtaacaaatgccacttgtctgctttcagtggaagatcagtccagataattcctgggttttcattttgtggaataaaatatgaaactttggagacacattttaacagtgtgagacaatagactagatgctgagagatgctgccagagactcccaagtgtctcttcctggtgggctatggtcctacataggagtctctcaccacatgtcaatgacataaaattggaaacaagcatgatgtgttaattctcaagttgaaagccagagttttactgaattcagtatagacaccatagggttgacaaataagcacagaattcacgtcactggtaaaccctaccctaatttcaatcttgagtccaagacataataaggg

SEQ ID NO: 692569 - DNA, 682 bp, Homo sapiens
  misc_feature 584, 619: n = A,T,C or G
taatggactgagaacgacrctaaataaacagatgttacattgcaagaagtgctctgaagaaaataaagaaaaaaacaaataaggaaagtagtgattgatgagccggggaacttacttcctgcagaggttaggaaagtcttctttgataaggaggcctttgtgcaaagacatgaagaaacttgggggctacctgttccaggaagagtgaatgttatttattcaggaatgtgatatgcctattagcaagctgcatattgatattagagcagtcaaaggaaaaatatagtttttatattttaaattttgtgtaaatatgctgagaactctgagctcttttctttttttttctttttttctttttttttttgacaggggcttgttctgttgcccaggctggggtgcagtggtgcaatcacagctcagtgcagtctccacctcccaggatcaagcaatcctcccacctcagccacctcccatgtggctgggatcacaggcacgagcctctacacacagctaattttttttttttttttgtagagacagtgagggtcgcactatgtttcccaggctggtcttgaactccntgggttaatagtgatcctcctgcccttggcctctncaaattgttgctattataggcacgtgctactgcgcgccagcctctgaactttgttctttcttt

SEQ ID NO: 692570 - DNA, 1613 bp, Homo sapiens
  misc_feature 603, 604: n = A,T,C or G
tgtctcatggggctaagaatcacttggcctagtcagctctgtcttaggattaattctaaattatctctcacaatgaaaaggagtgcttttcagattttatgaaagacagtttttaaagataagccatttagtagctaacatttacatgttttgaaaagtgtacagataccaatgaaaaaaaactytccaggtgaaaattccagtttctaatgatgttgtgattcacaacaacattgtctttacaggtattaaaattctgagcagaaacacaagaaaagatatattaaatcgttattactaagaatgcttgaggaatgaggcatctggttaattatacctatagtagtgtactactcagagaattgcaaccagttgagaataagaactttttctattttattttaatattttttcttgtttcaggaaaaaaatgggtttgatgaacaaagttgaaataatatagaaaatcattaaatgtataaataggaaaatgaaaatcttttatatacctctatctcccagaaataatcactgatatttttgcaaataataattttccaataaataaatacatattttaaggacaaaatatgttatttaaanntagttcgcacctgcattattcatttatctaaatattatttgttattctattgttttatatactctaacttaaccagttccctttcctatggttatatagattgaatcgtcatctgtgatgtaaggaaatatggaatctatatatctaattgcctaaagtataacaataagaaccagagaagcagctatcttcagataagaaaaagctagtagcttaaatctcttttccatttcctatcaaaaatcccaccaaaagtaaagttgtgtgtgtgtgtgagtgtgtgtacgtgtgtgtgtgtgagtgtgtgtaagggtagctgctggaagaattggaataagccttcctgtaagaaaatgtcacagaaattgcaaggaatatctatgtcaacctgaaagtgtaaatgagtactgtgtaatcctttgatttccttaaatcattttcagaagacaaaagacaaagaaaccactttttgattcattttaataacctttctgaactcttgggagataaacttccatccctgttttccctattaaagctcctcaatcctcttccctaaacccaccctgcattatgcaaatagaaatccctgtaatgtgaaagtctggtgagggtccaactcctcaaataatgattaaaatgagtatattagttagaatatttatagctttaagtgacaaaaattctaaatcaaaatatattaaatagaaagttaccatcccagttgatcaagaggtagaaagggcttcatgtttaataaattaaacactaaatttatttatttatataaccttagagaagttacttaacattatttaatataaattaaattaataaaaaaatataaataagccatactggcaaaagaataggattatcataattggttttacctagtcaggatccacctcttggaactagatatgggatcagtttcccatgaagtatatgttatgtatagtaataaagtatgtcttaataacatcagggttctgttagcaaagaaaaa

SEQ ID NO: 692571 - DNA, 1758 bp, Homo sapiens
ctttatactctatcagaatatttgcttaggaaccttttaatacgtattacatttttaaaaattgcccctttgctgtttatcagtgctagtacttattttgtcataagttataaaattcatgagcaaaaagggatttatatgttttattttctttttaaaaaatccagttcctttgggagataaatgttctttttaatttttgtgggcacatagtaggtgtatgtattaatatttatggagtacatgagatgttttgatacaggcatgcaaagagaaataatcatatcatggagaatgagatattcatctcctcaagcatttatcctttatgttacaagtagatttatgttcttacattaaacttttaggtattcaatactattgtacaggtaaatttaattctttaaaaaatgtattattggtgcaaatartagtctataaagatttccaacttaatatgatgttattttacataatgtaggaggatcaaaacactggacaatggggaagttagttgtctctgattgtttttgcttctgaaccatatacccagactatccagaatgtaagtttatacgattaatagtatttgaaattccatatagtcttccattttttccccatgttattctctggtatcctttctttcagataagattaaacattttttctctaaaaaatgtacaaaatataagcaaaaatggcatattttatcctggatcacatggtaaatttcagaacatggtgggatatatgaagttaaaatacaaataatcatgactgataattttttttaatccttggatattggaaaatctaattttctcagtatatatctgtaaacattaaatttatctgttctatcttaaagagttataggattttgtatattccatcatttcagaaagattttagtcaatttgctaccattataataaacaatggatctaatcaaagttagaggaaatatatggaggaaaataataaagctagaataggaatggatcacagaaatattttctgtatagacccgttcggttgctgagatgggcttccatctatctttgatgtacttagcagctaaattaaaggaggcaacatattcagttatcttatgaatgctatgtataaaaaaaatttaagcagctgctagatggaatcatagtttttccagatgcttagacctacaataattttgtctagttctcatgaagacacactgtgtaatatagtgtataagcagtaaccccataatagatacaacaaagctatttcttatgataataatcagtgtgtgccaagtaggtaactccaacgtgaagttcagtaaaatcaatcgtaagaggtgctaacacattgcatttgtcgttagaattagttcattcatggtctgatcagattgagatgtaaaatgcagactatctggcctgagtaacagatgctctgtatgtcatttaggcaatcctccataaatattatttctttcaactagaattttgataaggattagatagcaaagagtacaaagtttgtactcttcagcaagaacataaggttcagaaatcttacctggcttagctggattatctaaggagaatataaagttgaagagtctataaattaaggagcctaaaccagaaccttgtctgaataaatgggccccaatttcacctactcatgggaatgggtttagaaaaagtgaatgggaagagtgaaaatcgtttgcaaaaacatttcagaattcattccaaagtacat

SEQ ID NO: 692572 - DNA, 1090 bp, Homo sapiens
aactaattcacatgtattttaatagaaaataaatacaattttagaataatcctgttattttgtatatagtcaaaggaaatggaatcatcatatcaaggagatatctgcactctgatgtttattgcagtgctatttgcaatagccatgatatagaatcaacctaagtatccaacattggatgaatggataaaataaatgtrgtatatagacacatttttatacatttagaataatcctattactgagtgtatagtcaatggaaatagaatcattatgtcaaagatatctctgcagtctgctgtttattgcagtgttatttatgatagaatacggaatcaaactaagtgtccaataatagatgagtggataaagaaaacgtggtatatatacacaatggaatactattcagccgtaaaatagtgaaatcctgtcatttgcaatttcatagatgaaccaggataacatcatgttaggtgtgaaataagccagacacagaaaaacaaataccacatgacctcattcataagtggaatctaaaaagagaaaaaaaacctggtatcatagaagcagagactagaacaaaggttatcagagactggatggagagaggggaagggagggaaggatagagagtggttggtcaaaagggacaaagctacaatgaggaggaatacattctggtgttctattgtactgtagggtgagtggaagagaggcttttgaaggttctcaccaggttatgggttcactctaccttgattgtatcagtatacaacacagatatgtattgaaatatcagattttagcccataaacgtagaattacaaggtatcaattaaaaattaaataaataagctataaaataaaaaataaatgcaatggtttatatatgccttaggtcctgatgtaactgtaatcttgctttactaacagccatttaaaccaagtaatattttgtaaatattgtttatgaaaaacataattaacattaaggtcactctgtgacctataaacagtttatatataattgaaattatacttttgttttctggtgtgtttcaggggcttcctttgaaggataaggtacatg

SEQ ID NO: 692573 - DNA, 1090 bp, Homo sapiens
aactaattcacatgtattttaatagaaaataaatacaattttagaataatcctgttattttgtatatagtcaaaggaaatggaatcatcatatcaaggagatatctgcactctgatgtttattgcagtgctatttgcaatagccatgatatagaatcaacctaagtatccaacattggatgaatggataaaataaatgtggtatatagacacatttttatacatttagaataatcctattactgagtgtatagtcaatggaaatagaatcattatgtcaaagatatctctgcagtctgctgtttattgcagtgttatytatgatagaatacggaatcaaactaagtgtccaataatagatgagtggataaagaaaacgtggtatatatacacaatggaatactattcagccgtaaaatagtgaaatcctgtcatttgcaatttcatagatgaaccaggataacatcatgttaggtgtgaaataagccagacacagaaaaacaaataccacatgacctcattcataagtggaatctaaaaagagaaaaaaaacctggtatcatagaagcagagactagaacaaaggttatcagagactggatggagagaggggaagggagggaaggatagagagtggttggtcaaaagggacaaagctacaatgaggaggaatacattctggtgttctattgtactgtagggtgagtggaagagaggcttttgaaggttctcaccaggttatgggttcactctaccttgattgtatcagtatacaacacagatatgtattgaaatatcagattttagcccataaacgtagaattacaaggtatcaattaaaaattaaataaataagctataaaataaaaaataaatgcaatggtttatatatgccttaggtcctgatgtaactgtaatcttgctttactaacagccatttaaaccaagtaatattttgtaaatattgtttatgaaaaacataattaacattaaggtcactctgtgacctataaacagtttatatataattgaaattatacttttgttttctggtgtgtttcaggggcttcctttgaaggataaggtacatg

SEQ ID NO: 692574 - DNA, 1090 bp, Homo sapiens
aactaattcacatgtattttaatagaaaataaatacaattttagaataatcctgttattttgtatatagtcaaaggaaatggaatcatcatatcaaggagatatctgcactctgatgtttattgcagtgctatttgcaatagccatgatatagaatcaacctaagtatccaacattggatgaatggataaaataaatgtggtatatagacacatttttatacatttagaataatcctattactgagtgtatagtcaatggaaatagaatcattatgtcaaagatatctctgcagtctgctgtttattgcagtgttatttatgatagaatacggaatcaaactaagtgtccaataatagatgagtggataaagaaaacgtggtatatatacacaatggaatactattcagccrtaaaatagtgaaatcctgtcatttgcaatttcatagatgaaccaggataacatcatgttaggtgtgaaataagccagacacagaaaaacaaataccacatgacctcattcataagtggaatctaaaaagagaaaaaaaacctggtatcatagaagcagagactagaacaaaggttatcagagactggatggagagaggggaagggagggaaggatagagagtggttggtcaaaagggacaaagctacaatgaggaggaatacattctggtgttctattgtactgtagggtgagtggaagagaggcttttgaaggttctcaccaggttatgggttcactctaccttgattgtatcagtatacaacacagatatgtattgaaatatcagattttagcccataaacgtagaattacaaggtatcaattaaaaattaaataaataagctataaaataaaaaataaatgcaatggtttatatatgccttaggtcctgatgtaactgtaatcttgctttactaacagccatttaaaccaagtaatattttgtaaatattgtttatgaaaaacataattaacattaaggtcactctgtgacctataaacagtttatatataattgaaattatacttttgttttctggtgtgtttcaggggcttcctttgaaggataaggtacatg

SEQ ID NO: 692575 - DNA, 3785 bp, Homo sapiens
tttttaatcttatttgtttgataatacagacaagattcttaatatcattctattagagaattacgtggtaaatcacagttgaaatacaagagttttatagcaagaattgttatggatatttaattatctttagcaacattggtaagtcaaatacatttaaaaatgattaataatagattagatcttaataattagatcccaattacagaaatgtaactttttttcttaatatggatgacatctaagctcaccaagctcaccattctttgaccttttcttttttatcctttactgtctttcctctaccttcattaattgattcatctttctttcctatgcttctcttcttcaaggtttgtttcctttttcccctcttgttgtctactttgttcaaattcgtctcccatagatttttagtcatatttcctcatctcatcaagaatgatggtattcttatgcatttatatcttcgtttttcccaatttttctattttttttaaactttccattctgtagctctgtaccagctgtttctggttcttctggaaagaacactcgtcttatagaaagaacactgtccaggatccaaaagacataaggttgagtgtagttctggcccagctttcttatctgtaaaactgtaagattaaaagaggccagactgaatttcctcacagctttaaaattctataaagtatgcttaggtgtttggaactttggatgaaattgttagctttggaagagagagatgcttttgcaagggtcaaactaagtaacaataccctaccctgcagcagcttccagccccaagtcagatcagccatcagtgcgtgggtatcagcttatgagtattcaacaccttgcctcgtttttttctcaaagcaaaatgggccaaatgggctcatgatggattccagaatcttgtggtaatataaggacataaatatagttcaaagctagacttttaagattctattttcaaacaatatctagagaattattgttatatgtcatgtagaataagatactattgtagaggcagtttcagacattgttcctgtcccatcaatgcttgtgactttactatgtttttttttctgtattccgcaaatcacctaaaattaactgtagacatgaaatgcaactaagaaccatttgaagcaaatggtgactgtattttaataatcatggcatttcactaaaagtctttctaataaataaaagcctagtgtttgatagtgggaatgtaaaggtttaagtcgtaaaactcaaaggataaaccattaccgatactatgagataggaatgattatcattccattttagagatgaggaagatgaggctcagaggttgaataatgagcccaagttcataaaccaaggaattggtgaaggaggaaaatatccagagccagtattttaattcctatgctatcttcccattagatgaaagagtagcttttatcatttattcgatatttctatttggccgtagatatttgattgtatgatatttaaaatatcctaaaactgtttctaaggttgtgttatttaaaggacaataggatttccctcaaggtgtattttgattgcttcatttacttcacaaaaaacacaggtgtgtgtgtgtctgtgtgtgtgtgtgtgtgttctgccttagatcttcacttatgtattagcatgttttatagtcaattaaatgtgaaaatagaagaaataataatttatggagatgcatactggtgtggatagggtttattaattaagtcaattagtgtctaaagtcctaggttaatccaatttgttacacttagaatgtttctaaatcataaaataattgtataattatgaattacacattgattagggtgatttcaaagaatgaccatagttggactttggggtgtctcttgaggaaatgctatgttacagaattctgaactaatacaaagataaaatagctttaaaagtcactaaagatctatgtagcactatataacaagaagcaaagagtctgtcagaaactagccacacataaatatatcttgaatgagtaaaagaataaacagacatcaaaaatggatgtttttatttttatttttattttactttaagttctgcgatatttgtgcagaacgagcaggtttgttacacaggtatacatgtgccatggtggtttgctgcacccatcaacccatcatctaggttttaagtccctcatgcattaggtatttgtcctaatgcttttcctcccctyccccggtcccccaacaggctccggtgtgtgatgttcccctccctgtgtccatgtgttctcattgttcatctctcacttacgagtgagaacacgcagtgtgcggatgtattatatttatgttttccttaagtaacttgttgctgatgctatttttaatacttttattgaacttttttcttggtatgagtctgtcttgtctttaatgtaacttgcagggtactgctaacatcacttacaatgaaactagcatgatcccttgattgattaatccccctcacataagagcctcagctgctgtttcaggagtccttcaataaatatatagttgcctctaatttcagagaccagtagcaactaagaaggcaaaggtttttgaagggatccacagaaatcaacttggacccttcttgtattgatagatacatctcatctaaatagttgatattggttattctgctacaatttatttgtattcaaaatattcatatttttattatatttctttttacaattgaccttcagtatccatgggggcttagttcaaagactccctcacatccctgcaaataccaaaatccagggatgcttaagtcccttatataaagtggtgtagtatttgcgtataacctacacacatacttttgtatatatttcatcatctctagactacttagagtgcctaatacaatgtaaatgcaatgtaaaagttgttacactgtattgtttaggaaatactgacaacaaaaatgtctatacatggtaagcacagacacaaccatctattttttctcaaatattttctgtccacggtttgttgaatccataagtgcagaacccatggacatagaaggccaactgtatggtgtttaatagcaaatggcccatgtctgttgcaatgggatttgaccaatacaataaacttgtgtattttttaataaaacagagaactattagaataaagaacaatttatactgttattattttcaagatacatatagaatgctactggtaattttgtcattgttataccaactgaagacttagtaactatgttgcatattaaatgtaaatacctgacagtaatgtattaaaaaaggaggaagcattctgtatctctattatataatattctttgaatgtgctataaagcacattggtgctttataatccaaagaaaactacaactcaatccaaatttagttgcttttgctttattttcttgaattgtatcaaatatatctttacaataagtatactttaagttttatcaaatatattttcttctctgtcctcataaaaagtatgataaagtaatagttttctatagtgtcacaatataaaatgttaaatctgtgctcattaaaacagaaattatattctatggtatattatcttacaatatgtagtaaatgttaatggcacaatggaagaaatttgtaggagtgttttaaatatcttttccttcattattatggagatgcttgaaattaatgtcataatcggatatgtcaaatagcaacatgataa

SEQ ID NO: 692576 - DNA, 657 bp, Homo sapiens
aattttaaggttctagttgtttgttttgtagttcatagttctattagtcagatgatgatatttagtaacttattattacttatactggcaaattatgatatactcttgagaataagggggtctgattggaggggccacaacaatgattcctccatggtagacaatccctgggtgaggatatactgaaaagctgggctttttggaagtctcaaactggtattttcaaagaccacatttagtcagcagaagtgttttccttgatagtgacagtagacaaaatgttttaaagcaactgaatttgaataccttcaaaaggggactgccatctccagttttgtcacagtctccatcacttccttatttattgctaagagaccactttattcattcatgggctttgtttgactctgaaaagctcctatgagctttttaactcatatgagtttaaaacttctgaactgtactatttaatactattaaagtatttgttagatattatataaaacacacagaaacatacatattgtaagttagcctctrcacaatgcacatgctctacatattgaaggagaaggcaaaaaaatctaaatagttaagtggaatttgtttccttattctaataacagacctggtcatttgaattccttaatatccaat

SEQ ID NO: 692577 - DNA, 666 bp, Homo sapiens
ggtacatgtgctgtcctaccttatttgtttttcagacatgacggctttttgttgcctactgtccattgcctctaaaaccattgcatccagtgtcttagttgttctggcaggagagtgactctaatccctgttgctccatctttctagaagtgcacatctaaaaggagtatttagaataaatctacagagaatttggttggatcatagggaatttcaagaaaaaaagttgaattgaggtatactttcagaaagatattttggagcaaactttcaaatagccctraagttatcataaaaaacaacagcatttcacttaatggagtcagggaaagcttctctcaagtcagcgaacacagccacagctcagtacaagattaacctgccagctagcagtgagccagtggcctggactgtggagccacacaaggctgagagaccacctaggaccttgactacaacccaggcaaggagttgtaaggacttcgagtggaggtgagaatcaggaatgtagaataatcaagagatagatcatccataggtggccagagtgaggagataggaattaaggatagctctggagtctgattctggctgaccaggaggataatgtgcaactaataaaaactagaggtgctggatgaaggatagtttttgagaagagaggca

SEQ ID NO: 692578 - DNA, 629 bp, Homo sapiens
tgcaagctccgccttccagtttcatgccattcttttgccccagcctccccaataactgggactacaggcgcccgcaccatgcccggctaatttttttgtatttttagtagagwcggggtttcaccctgttatccaggatggtctcgatttcctgacctcgtgatccgcctgcctcggcttcccaaagtgctgggattacaggtgtacgccaccgcgcccagcctatctctttaatttttatgcctccttatgatacggaaaggacgtgctgggaagggaagagcgtggtccctttaaatgatgggggagctgaagggaagtgctgggtacaggagggtgtggtccctggctaggcccgcctctcccccccagcccaacacagacctaagtgaggacagacatttttgtattcctgccccaagtgttgcatttcccaagatcaccctggcctgccatgcccccatcctgtgcctataaaaacctcgagaccccagcgggaacacacaggcagcaggacgttgagaggggcaaatcagcagaggaacacacaagtggctggacgttaacggggatgcagtgacaggcaccagcacgcaagcaggccactgactggccgaatgacttggagt

SEQ ID NO: 692579 - DNA, 629 bp, Homo sapiens
tgcaagctccgccttccagtttcatgccattcttttgccccagcctccccaataactgggactacaggcgcccgcaccatgcccggctaatttttttgtatttttagtagagtcggggtttcaccctgttatccaggatggtctcgatttcctgacctcgtgatccgcctgcctcggcttcccaaagtgctgggattacaggtgtacgccaccgygcccagcctatctctttaatttttatgcctccttatgatacggaaaggacgtgctgggaagggaagagcgtggtccctttaaatgatgggggagctgaagggaagtgctgggtacaggagggtgtggtccctggctaggcccgcctctcccccccagcccaacacagacctaagtgaggacagacatttttgtattcctgccccaagtgttgcatttcccaagatcaccctggcctgccatgcccccatcctgtgcctataaaaacctcgagaccccagcgggaacacacaggcagcaggacgttgagaggggcaaatcagcagaggaacacacaagtggctggacgttaacggggatgcagtgacaggcaccagcacgcaagcaggccactgactggccgaatgacttggagt

SEQ ID NO: 692580 - DNA, 629 bp, Homo sapiens
tgcaagctccgccttccagtttcatgccattcttttgccccagcctccccaataactgggactacaggcgcccgcaccatgcccggctaatttttttgtatttttagtagagtcggggtttcaccctgttatccaggatggtctcgatttcctgacctcgtgatccgcctgcctcggcttcccaaagtgctgggattacaggtgtacgccaccgcgcccagcctatctctttaatttttatgcctccttatgatacggaaaggacgtgctgggaagggaagagcgtggtccctttaaatgatgggggagctgaagggaagtgctgggtacaggagggtgtggtccctggctaggcccgcctctccccsccagcccaacacagacctaagtgaggacagacatttttgtattcctgccccaagtgttgcatttcccaagatcaccctggcctgccatgcccccatcctgtgcctataaaaacctcgagaccccagcgggaacacacaggcagcaggacgttgagaggggcaaatcagcagaggaacacacaagtggctggacgttaacggggatgcagtgacaggcaccagcacgcaagcaggccactgactggccgaatgacttggagt

SEQ ID NO: 692581 - DNA, 927 bp, Homo sapiens
ttaaacaataagtgctatgaaggcaacacaaggaagtgtcactgaattcttagtaatacagaaaacaaaaaaaaaattaagaaagagtatgagctgggcatattactggttgttcaatgactgccttttttgttaaaaaggaggagaaagagagaaagtggaaatgtatagttatcaagaagagagataagcagaacctcacttgttcccttaaccaggctatgagtatctctagggcagagacagtattatattcatagctcatttacaagtagttagaaagcatatctatatctatgatatttatctgtttatctccatatgtatgtatgtatgcatgcatgtgtctatctaatctatgcttggtgattggcaatgggacatcaagatgtaggcatctcgcagccacaggattttgcaaaatragttggtaaatataaagcaggctggtagatttatgtatcattataccctaaaattttattttactttttctgtaccatcttttctctggctgagagacagagaccttggattagtgaacatgcttaagacatcacttcagtcccttgacaaatgaggaatggcattctttttattttgatttagttttccattcttgcttaacctggacatgtctaccttctggttttcaacatattatagataatttctatagctgaatccaaagtcaaatactctagaaaaaaactccctaagaaaaaatattttacattggattttcagtggcatgtggacatatttcgtttcttaccgtgacttagttttatcacttttgactagatgattggcagttctcagaaaaataatgattcttaaatattttacacctttaaaataaaattctccccaccaattttttattttaaaataaatccacaataagaatttcctctttggccaggc

SEQ ID NO: 692582 - DNA, 927 bp, Homo sapiens
ttaaacaataagtgctatgaaggcaacacaaggaagtgtcactgaattcttagtaatacagaaaacaaaaaaaaaattaagaaagagtatgagctgggcatattactggttgttcaatgactgccttttttgttaaaaaggaggagaaagagagaaagtggaaatgtatagttatcaagaagagagataagcagaacctcacttgttcccttaaccaggctatgagtatctctagggcagagacagtattatattcatagctcatttacaagtagttagaaagcatatctatatctatgatatttatctgtttatctccatatgtatgtatgtatgcatgcatgtgtctatctaatctatgcttggtgattggcaatgggacatcaagatgtaggcatctcgcagccacaggattttgcaaaatgagttggtaaatataaagyaggctggtagatttatgtatcattataccctaaaattttattttactttttctgtaccatcttttctctggctgagagacagagaccttggattagtgaacatgcttaagacatcacttcagtcccttgacaaatgaggaatggcattctttttattttgatttagttttccattcttgcttaacctggacatgtctaccttctggttttcaacatattatagataatttctatagctgaatccaaagtcaaatactctagaaaaaaactccctaagaaaaaatattttacattggattttcagtggcatgtggacatatttcgtttcttaccgtgacttagttttatcacttttgactagatgattggcagttctcagaaaaataatgattcttaaatattttacacctttaaaataaaattctccccaccaattttttattttaaaataaatccacaataagaatttcctctttggccaggc

SEQ ID NO: 692583 - DNA, 927 bp, Homo sapiens
ttaaacaataagtgctatgaaggcaacacaaggaagtgtcactgaattcttagtaatacagaaaacaaaaaaaaaattaagaaagagtatgagctgggcatattactggttgttcaatgactgccttttttgttaaaaaggaggagaaagagagaaagtggaaatgtatagttatcaagaagagagataagcagaacctcacttgttcccttaaccaggctatgagtatctctagggcagagacagtattatattcatagctcatttacaagtagttagaaagcatatctatatctatgatatttatctgtttatctccatatgtatgtatgtatgcatgcatgtgtctatctaatctatgcttggtgattggcaatgggacatcaagatgtaggcatctcgcagccacaggattttgcaaaatgagttggtaaatataaagcaggctggtagatttatgtatcattataccctaaaattttattttactttttctgtaccatcttttctctggctgagagacagagaccttggattagtgaacatgcttaagacatcacttcagtcccttgacaaatgaggaatggcattctttttattttgatttagttttccattcttgcttaacctggacatgtctaccttctggttttcaacatattatagataatttctatagctgaatccaaagtcaaatactctagaaaaaaactccctaagaaaaaatattttacattggattttcagtggcatgtggacatatttcgtttcttaccgtgacttagttttatcacttwtgactagatgattggcagttctcagaaaaataatgattcttaaatattttacacctttaaaataaaattctccccaccaattttttattttaaaataaatccacaataagaatttcctctttggccaggc

SEQ ID NO: 692584 - DNA, 603 bp, Homo sapiens
caatccacattttccttctaaagattgcaaactttatctatttttatcgtacatatttatggtggacaacatgagattttgaaatatgcatacattgtagaatggctaaatcaagctaattatgcattgcgtgacatacctatcatttatttgtggtgagaacatttaaaatctactcttttagcaattttcaagtaaataatagttattaactrtagtcaccatgttgtacaatcaatctcttgaacttattcctcctgtacaactgaattttgaatcctttgaccgatctctcccctttcctacttcccctttccctcagcccttgataaccaccattctactctctgcttcagtgagtgtgactttttaaaattccacatgtatgtgagataatgcagtattcatctttctgtgcctgttgtatttcacttgttaaacacaatttacaggaagccattggtttggaccgagctcctgcactaggcccaacagactaaacctaaatggagttattcatgctaaagttccacaccaccaagctgaaattaagttgtttagctgattctcccagaaatcaggagagatagtagtcaaatcccc

SEQ ID NO: 692585 - DNA, 603 bp, Homo sapiens
caatccacattttccttctaaagattgcaaactttatctatttttatcgtacatatttatggtggacaacatgagattttgaaatatgcatacattgtagaatggctaaatcaagctaattatgcattgcgtgacatacctatcatttatttgtggtgagaacatttaaaatctactcttttagcaattttcaagtaaataatagttattaactgtagtcaccatgttgtacaatcaatctcttgaacttattcctcctgtacaactgaattttgaatcctttgaccratctctcccctttcctacttcccctttccctcagcccttgataaccaccattctactctctgcttcagtgagtgtgactttttaaaattccacatgtatgtgagataatgcagtattcatctttctgtgcctgttgtatttcacttgttaaacacaatttacaggaagccattggtttggaccgagctcctgcactaggcccaacagactaaacctaaatggagttattcatgctaaagttccacaccaccaagctgaaattaagttgtttagctgattctcccagaaatcaggagagatagtagtcaaatcccc

SEQ ID NO: 692586 - DNA, 1170 bp, Homo sapiens
ggacagaaaaccaaacgtcgcatattcttactcataggtaggaactgaacaatgagaacccctgttcatccttttaagattgcactcaactatcagtagtaactgcttctctactcatcaccttgaaagaggaaagattcccttgtccccctcgcggggctgcaaaggggstgtggctcacttcttcagtgccccgctgctcaaacctctaggggagtatacagacaggcaggttgtggggctccgaccgccacagtgtctaggggtgaatgtttacagctcctgaagccccagtgcccatgtattacagggtgcttagtttagcggttagtaagcccgattagaccctctgcctggtcacaaggacagagggttttctgtatcctgggttcttaccttggtgaaccggaagaatcggatcacacgtgggcttggaggataagtgcaaagttttactgaatggcagtagttctcccaggatggggaagccagaagtgagatggtcttcccctggagttgggctgctcggccgatgagttctcctctgactgccccagcctccgcatcttccgccagtggatggcctgttggccgcctgtgcctgccatgctcttctgccagcaggctctcaaggaccggccgcttgtgtctgcttcagccgatgtgctcccatcgacgtctggctgcctgtgtgtctgcgcactagggtctcgggtttttataggaccaggatggggacatggtaggccagggtggtcttaggaaatgcctgtcctcaactaggtctgtaggggtagagacctagccagggaccacgccctcctctacccagctcgtcccttccccccttaggtatcatttaaaggcaatacgctcttcctttcccagcacttccctatcaacctcaccttctagattcgtatctctcatctgtaatacaagaacaggaattattaatttccaggagaaaccccttcaaacctcagtgtgcttctccaataattgaagggtggatttctgatttcttttatgaggcccatggagctgacaagaaccacagaaatacatcaaatgacttttggcaaaattatctttctctgtcaataagatactgtctaattctgaaatcctagacttgctataagtcaaaaatttggaagctaggaaaac

SEQ ID NO: 692587 - DNA, 1170 bp, Homo sapiens
ggacagaaaaccaaacgtcgcatattcttactcataggtaggaactgaacaatgagaacccctgttcatccttttaagattgcactcaactatcagtagtaactgcttctctactcatcaccttgaaagaggaaagattcccttgtccccctcgcggggctgcaaaggggctgtggctcacttcttcagtgccccgctgctcaaacctctaggggagtatacagacaggcaggttgtggggctccgacygccacagtgtctaggggtgaatgtttacagctcctgaagccccagtgcccatgtattacagggtgcttagtttagcggttagtaagcccgattagaccctctgcctggtcacaaggacagagggttttctgtatcctgggttcttaccttggtgaaccggaagaatcggatcacacgtgggcttggaggataagtgcaaagttttactgaatggcagtagttctcccaggatggggaagccagaagtgagatggtcttcccctggagttgggctgctcggccgatgagttctcctctgactgccccagcctccgcatcttccgccagtggatggcctgttggccgcctgtgcctgccatgctcttctgccagcaggctctcaaggaccggccgcttgtgtctgcttcagccgatgtgctcccatcgacgtctggctgcctgtgtgtctgcgcactagggtctcgggtttttataggaccaggatggggacatggtaggccagggtggtcttaggaaatgcctgtcctcaactaggtctgtaggggtagagacctagccagggaccacgccctcctctacccagctcgtcccttccccccttaggtatcatttaaaggcaatacgctcttcctttcccagcacttccctatcaacctcaccttctagattcgtatctctcatctgtaatacaagaacaggaattattaatttccaggagaaaccccttcaaacctcagtgtgcttctccaataattgaagggtggatttctgatttcttttatgaggcccatggagctgacaagaaccacagaaatacatcaaatgacttttggcaaaattatctttctctgtcaataagatactgtctaattctgaaatcctagacttgctataagtcaaaaatttggaagctaggaaaac

SEQ ID NO: 692588 - DNA, 1170 bp, Homo sapiens
ggacagaaaaccaaacgtcgcatattcttactcataggtaggaactgaacaatgagaacccctgttcatccttttaagattgcactcaactatcagtagtaactgcttctctactcatcaccttgaaagaggaaagattcccttgtccccctcgcggggctgcaaaggggctgtggctcacttcttcagtgccccgctgctcaaacctctaggggagtatacagacaggcaggttgtggggctccgaccgccacagtgtctaggggtgaatgtttacagctcctgaagccccagtgcccatgtattacagggtgcttagtttagcggttagtaagcccgattagaccctctgcctkgtcacaaggacagagggttttctgtatcctgggttcttaccttggtgaaccggaagaatcggatcacacgtgggcttggaggataagtgcaaagttttactgaatggcagtagttctcccaggatggggaagccagaagtgagatggtcttcccctggagttgggctgctcggccgatgagttctcctctgactgccccagcctccgcatcttccgccagtggatggcctgttggccgcctgtgcctgccatgctcttctgccagcaggctctcaaggaccggccgcttgtgtctgcttcagccgatgtgctcccatcgacgtctggctgcctgtgtgtctgcgcactagggtctcgggtttttataggaccaggatggggacatggtaggccagggtggtcttaggaaatgcctgtcctcaactaggtctgtaggggtagagacctagccagggaccacgccctcctctacccagctcgtcccttccccccttaggtatcatttaaaggcaatacgctcttcctttcccagcacttccctatcaacctcaccttctagattcgtatctctcatctgtaatacaagaacaggaattattaatttccaggagaaaccccttcaaacctcagtgtgcttctccaataattgaagggtggatttctgatttcttttatgaggcccatggagctgacaagaaccacagaaatacatcaaatgacttttggcaaaattatctttctctgtcaataagatactgtctaattctgaaatcctagacttgctataagtcaaaaatttggaagctaggaaaac

SEQ ID NO: 692589 - DNA, 1170 bp, Homo sapiens
ggacagaaaaccaaacgtcgcatattcttactcataggtaggaactgaacaatgagaacccctgttcatccttttaagattgcactcaactatcagtagtaactgcttctctactcatcaccttgaaagaggaaagattcccttgtccccctcgcggggctgcaaaggggctgtggctcacttcttcagtgccccgctgctcaaacctctaggggagtatacagacaggcaggttgtggggctccgaccgccacagtgtctaggggtgaatgtttacagctcctgaagccccagtgcccatgtattacagggtgcttagtttagcggttagtaagcccgattagaccctctgcctggtcacaaggacagagggttttctgtatcctgggttcttaccttggtgaaccggaagaatcggatcacacgtgggcttggaggataagtgcaaagttttactgaatggcagtagttctcccaggatggggaagccagaagtgagatggtcttcccctggagttgggctgctcggccgatgagttctcctctgactgccccagcctccgcatcttccgccagtggatggcctgttggccgcctgtgcctgccatgctcttctgccagcaggctctcaaggaccggccgcttgtgtctgcttcagccgatgtgctcccatcgacgtctggctgcctgtgtgtctgcgcactagggtctcgggtttttataggaccaggatggggacatggtaggccagggtggtcttaggaaatgcctgtcctcaactaggtctgtaggggtagagacctagccagggaccacgccctcctctacccagctcgtcccttccccscttaggtatcatttaaaggcaatacgctcttcctttcccagcacttccctatcaacctcaccttctagattcgtatctctcatctgtaatacaagaacaggaattattaatttccaggagaaaccccttcaaacctcagtgtgcttctccaataattgaagggtggatttctgatttcttttatgaggcccatggagctgacaagaaccacagaaatacatcaaatgacttttggcaaaattatctttctctgtcaataagatactgtctaattctgaaatcctagacttgctataagtcaaaaatttggaagctaggaaaac

SEQ ID NO: 692590 - DNA, 1170 bp, Homo sapiens
ggacagaaaaccaaacgtcgcatattcttactcataggtaggaactgaacaatgagaacccctgttcatccttttaagattgcactcaactatcagtagtaactgcttctctactcatcaccttgaaagaggaaagattcccttgtccccctcgcggggctgcaaaggggctgtggctcacttcttcagtgccccgctgctcaaacctctaggggagtatacagacaggcaggttgtggggctccgaccgccacagtgtctaggggtgaatgtttacagctcctgaagccccagtgcccatgtattacagggtgcttagtttagcggttagtaagcccgattagaccctctgcctggtcacaaggacagagggttttctgtatcctgggttcttaccttggtgaaccggaagaatcggatcacacgtgggcttggaggataagtgcaaagttttactgaatggcagtagttctcccaggatggggaagccagaagtgagatggtcttcccctggagttgggctgctcggccgatgagttctcctctgactgccccagcctccgcatcttccgccagtggatggcctgttggccgcctgtgcctgccatgctcttctgccagcaggctctcaaggaccggccgcttgtgtctgcttcagccgatgtgctcccatcgacgtctggctgcctgtgtgtctgcgcactagggtctcgggtttttataggaccaggatggggacatggtaggccagggtggtcttaggaaatgcctgtcctcaactaggtctgtaggggtagagacctagccagggaccacgccctcctctacccagctcgtcccttccccccttaggtatcatttaaaggcaawacgctcttcctttcccagcacttccctatcaacctcaccttctagattcgtatctctcatctgtaatacaagaacaggaattattaatttccaggagaaaccccttcaaacctcagtgtgcttctccaataattgaagggtggatttctgatttcttttatgaggcccatggagctgacaagaaccacagaaatacatcaaatgacttttggcaaaattatctttctctgtcaataagatactgtctaattctgaaatcctagacttgctataagtcaaaaatttggaagctaggaaaac

SEQ ID NO: 692591 - DNA, 1170 bp, Homo sapiens
ggacagaaaaccaaacgtcgcatattcttactcataggtaggaactgaacaatgagaacccctgttcatccttttaagattgcactcaactatcagtagtaactgcttctctactcatcaccttgaaagaggaaagattcccttgtccccctcgcggggctgcaaaggggctgtggctcacttcttcagtgccccgctgctcaaacctctaggggagtatacagacaggcaggttgtggggctccgaccgccacagtgtctaggggtgaatgtttacagctcctgaagccccagtgcccatgtattacagggtgcttagtttagcggttagtaagcccgattagaccctctgcctggtcacaaggacagagggttttctgtatcctgggttcttaccttggtgaaccggaagaatcggatcacacgtgggcttggaggataagtgcaaagttttactgaatggcagtagttctcccaggatggggaagccagaagtgagatggtcttcccctggagttgggctgctcggccgatgagttctcctctgactgccccagcctccgcatcttccgccagtggatggcctgttggccgcctgtgcctgccatgctcttctgccagcaggctctcaaggaccggccgcttgtgtctgcttcagccgatgtgctcccatcgacgtctggctgcctgtgtgtctgcgcactagggtctcgggtttttataggaccaggatggggacatggtaggccagggtggtcttaggaaatgcctgtcctcaactaggtctgtaggggtagagacctagccagggaccacgccctcctctacccagctcgtcccttccccccttaggtatcatttaaaggcaatacgctcttcctttcccagcacttccctatcaacctcaccttctagattcgtatctctcatctgtaatacaagaacaggaattattaatttccaggagaaaccccttcaaacctcagtgtgcttctccaataattgaagggtggatttctgatttcttttatgaggcccatggagctgacaagaaccacagaaatacatcaaatgacttttggcaaaattatctttctctgtcaataaratactgtctaattctgaaatcctagacttgctataagtcaaaaatttggaagctaggaaaac

SEQ ID NO: 692592 - DNA, 2473 bp, Homo sapiens
tagtgagaccccatctctacaacagataaaacaaattagccaggcatggtggtgcaaatctgtagtcctagctactcaggaggctgaggcaggaagatcacttgagcccaggagtttgaggttacagtgagctatgattacaccactgcactgcagcctgagcaacagagtgacagagtgagaccctgtctctaaaaaaaccaaaacaagcaaaaaaaaccctgtgtttttccactttctggagataacctctattaacattgcgatattttcccttcttatcttttctgcatctatctgtattcatacctagctagctaattatatagatagatgttatatatatatctctctacatatattttaatattatatagttgaattcatactaaatatatatgactttatatatttagaaagcattgttatgcttagtatttactagtgtcaataaaaacacctttgtaarcacaatttaaagtggttccctttcattccatcatgactgctttataaatgttttcacctatattttgttgttcagcgtttgttatttctattttttaactactataaataactctacaatggacatctttgtttataagacatttccccctgcatttcatattaattccttggtttggcttctccagtatggaattactggggcagaggatgtaaatatttttaaatctcttaagtaaattacaagattctcctctcctaccctcccttcctccctcccttccttcctttattcttctattttttttctctttctggggattctggcagatagaattctaacagagtactcaaaatttctaacttttgggtgcaaatcattttcagttattcaaccaaacaccaatctaggtcttactgaggagagatttttgcaaatataattaagatcccaaatcagttaccctaatagggagatcgtctgggtgggcctgacctagtcatatgaccctttaaatctgggtctagaagtctgagatgggcgcagtcagagatctgaagcacagaggaaatttgactcaagggaagtacttcattgctggtttaaagacaaaggaggggtcatgcggcgaaggggaggctgtgtggtaaagaatgcaggcagctttgaggagctaagagcagcccccagttgacagccagcaaagacattcagaccgcagtcgtacaaccacaatgacttgaacttgaataacttgaatgagcttggaaatgagccccagaacctccggagagaactcatccagctgacaccttgatttcagtcttggcgatggcctgagcagaaagtccaccgtgtgctgaacttctgacccgcaaaactctgaactaggcaatggggaatgttttaagccatgaagtttctagtaacttgttatccataataggaaacaaatacaggaatgtacaggatttgtgtttataaagtgtgtgtgtgtgtgtgtgtgtgtgtgtgttatgcatagctagttcttcaatcttagatttcacattgggctattctgattttatgggtcagttatctcatttgtctgccaagttctttgcagaagcactttacatatatttctttgtttaatagctccatttagtctattactagccccattttccagatgaggaaactgagccacggagtttacttccccgtgataacacagctagtgcatgtcacggtgagtgcgagatggtgttggaacccagacctgtgtgtgccaataaccccttcttccgtaccacacagcacttttgaataacttcatggctagctgacgatttgggtaatggactttacttataaatccaatgagactacaggagatggttgcaagaaaaaatgaggagtctaaaagtagtctcttttaaggccaaagctgtgcacctcttctgttggggagcagcagccttctgatctcagccttttgtgactttcttgtttatttatttgctgttggtcccacccaaggctctggaggttacctgattctgcacatgcctggtcagaaataaggtccaccagggcaggggttgggtcttattcttttcttgaatctacagcatcccagctcctcaccggcagggcctagcatgatatcctatagtgactgatggccagcaaaattgtgttgaagaaaacagggcaatggcctcttctagaatccttaaaaactgttgattttttccctacttgtgaggaagtgccacttccttaagaaaatcatgcctcatcaccttcaaggtgacctctctaactaatctgcagctctagttttgttttggaatcaacatcctgaagacctcagggagcactgttactccattgtcattctggccaaagaaagagcaagccagtcttccctctccagctcatagcctagattagatgcaatggaacatttgaacaaatctgctccaagtattaggagatagcaacaaggaaataatc

SEQ ID NO: 692593 - DNA, 1358 bp, Homo sapiens
tgaagaatgttcaggaaacacaacaggtcatggagcgcagtctaagatgtgtgtgcaggagtagcaagaggagacgccagaaaatgaggccggggcagatcccaaattgtgcataagtcatgctgaagcatcacgcttggtacggcaggcatccgtatgggagccccttaagaatttgatctgatctacattttcctaaaatccccctgggtaggtgcctggtaaatggacaggcagaggaacagaggaaggaggtggccagctggaggtgggtcaaatggtcagggaagagatgacaacaccaactcggtcagcaaagggggtaaaaaagaggaatagccgctgcacacccagtggtgcccaggcttggcctcttaacagggccgagggggcaaccggtgcaagaagacagcccacactcatttgctctgtgttcaggactcaaacacgtcccttttttagactccactttctttttttgtttttaataatttttgtatttcaatagcttttggggtataagtggttttcagttgcatggatgaattgcatactgaagtctgagatttcagtgcacctgttagctgaatagcatatattgcatccaatatgtagtttttttatccttcaccctcccccactttcctccttttgagcatctaatgtccattaaaccactctgtgtgcctttgcacttgtaagtgagaacatgtgataattggttttccattcctgagtcacttcatttagaataatggcctccagctctatccaagttgctgcaaaagacattattttgttcttttttatggctgggtagtattccacagtgcatatataccacattttctttatccattcatcagttgatgggcacttaggttggctccatatctttgcaactgggaactgtgctgtgataaacataggtagataccactttctgatgtaccaaatgacaaagtggtgattttggcagcactgggctctgagctgtggcaactcaaccctcctcttctgcatgcctgccttgctctcctccagctcacaagcaggttggcaaagttcagcagtcaggtgcatgtggcccagtcagtccctgccccagtggctcaaagaagcaaatctggtaagagcaatcagtgggtcagtgaggtggggacagcacttgtcacatgcccttctgagccacaggtcaagaggagaggctggaagaaagtgaaggaggagggaaaggtccaggatggaatggagttggcctctgctggttcaggaggaggatctacagccacccatctctgaaatggycactgctcccttattaaagacaaaccaaactaaaacaaaacaccttccga

SEQ ID NO: 692594 - DNA, 921 bp, Homo sapiens
gaagcaaatgcacagacaggttaagtatctttattatactgatttgatggaaatatcagatgtgtggaagttgggggatgatacggtagagataggcatattgacaacaggaaaagtcacagctgacagtctgatataatggaagggcatgtaaaaaccaagaataatcctctatttccattgtccctgttcttcccaggttccttttcctttcttcacactgaagagtgtttgagaggtgcctgagggcttggagatcagtaataagaggtgaacagaggagatattccaagacacagtgacaatgtgcttaccagtggccaaggatgtgggtaggttaggagatgccacatggaagcattctggctgtgtgctcactagcacccaaggatacagcatttgagggtagaggaagctacacaaagcactttggcagtttaggttacaagatgctaaaggggatgggtgcagaggtagcagatgaaargggagcacagttgtaagactgataatattgaacaaataagtgtataaaaaatacactatggatagtgaaagccaagtttctaactggagaaagtaattcaaaatactgaaagggtagaaagaaatatgtccattgatttgtcagaatataattagagttatggtattaacctatatgagacatatacatatatatgcatgtatatatgtgtgtgtgtgtatatatatatacacacacttatgtacgtgaaaatttctgaatatacatacttatatgtatgcatacatatatgttcatatattacattccttgatcttccagaaaacctagaaataatgaaagtgaaggcatctcactagaaatgaacatacccagcacccagatgttgatatctaaatatcaccaggggtctttaaataaatatttttgaaatg

SEQ ID NO: 692595 - DNA, 932 bp, Homo sapiens
gcaacacagctgcaagatattacctagataaaactcaaatacaaaacagtaggtgggaactggtaaattggatgtaatagagactaagtgcaaattaaattcagatgcattcaacagaacactgcttcaaaacagtatggtaaaggaaggtctttattagtgctgaaatcgatactgggtcttgtagattgacatgtattctgataggcaagctagaaatggatataaaaggcaaktatttccaggttaatgaatacatcagtttagctgaaaaaaagagtttgtgtacacatgttgaggaaataaaattggagaagtcaaggtccaatggtggaggaacatgatgtacagctctgagcagtgcaatcaatgcaacagttccaaactaaatatcaatacgatcgtcaacaaatgtagaaaagcattcaataaaattcaacatccagccattattttttaaaaaacttacttccttatgataatatgaagttttacaagaaaagatggcaaacatacttaatggtggaaaacttgaaatattccttttaaaatcaggagtaagacaaagatacctacatcaattctggtcaacattgtacttcatttccctagtctgcacactaagaaaaaaaaaaaagaataacagctattaagattgaaaaggaagaatcccagtttcgtatcatgactaaatagaacaaaacaaaaaatcctcaattatgagaattaagtctggaagattgctgagtaaaatagatatgtaagagtcagtaattttatatattagaaaatgcaacttatgaaaatatatatcacacaattaaaaactagaaataaactgaacaatatacaagacatgaaattatacaagtactgaaaaatgttaaagttctaaataaatggagtaacataacattcagacagaagggtca

SEQ ID NO: 692596 - DNA, 932 bp, Homo sapiens
gcaacacagctgcaagatattacctagataaaactcaaatacaaaacagtaggtgggaactggtaaattggatgtaatagagactaagtgcaaattaaattcagatgcattcaacagaacactgcttcaaaacagtatggtaaaggaaggtctttattagtgctgaaatcgatactgggtcttgtagattgacatgtattctgataggcaagctagaaatggatataaaaggcaattatttccaggttaatgaatacatcagtttagctgaaaaaaagagtttgtgtacacatgttgaggaaataaaattggagaagtcaaggtccaatggtggaggaacatgatgtacagctctgagcagtgcaatcaatgcaacagttccaaactaaatatcaatacgatcgtcaacaaatgtagaaaagcattcaataaaattcaacatccagccattattttttaaaaaacttacttccttatgataatatgaagttttacaagaaaagatggcaaacatacttaatggtggaaaacttgaaatattccttttaaaatcaggagtaagacaaagatacctacatcaattctrgtcaacattgtacttcatttccctagtctgcacactaagaaaaaaaaaaaagaataacagctattaagattgaaaaggaagaatcccagtttcgtatcatgactaaatagaacaaaacaaaaaatcctcaattatgagaattaagtctggaagattgctgagtaaaatagatatgtaagagtcagtaattttatatattagaaaatgcaacttatgaaaatatatatcacacaattaaaaactagaaataaactgaacaatatacaagacatgaaattatacaagtactgaaaaatgttaaagttctaaataaatggagtaacataacattcagacagaagggtca

SEQ ID NO: 692597 - DNA, 932 bp, Homo sapiens
gcaacacagctgcaagatattacctagataaaactcaaatacaaaacagtaggtgggaactggtaaattggatgtaatagagactaagtgcaaattaaattcagatgcattcaacagaacactgcttcaaaacagtatggtaaaggaaggtctttattagtgctgaaatcgatactgggtcttgtagattgacatgtattctgataggcaagctagaaatggatataaaaggcaattatttccaggttaatgaatacatcagtttagctgaaaaaaagagtttgtgtacacatgttgaggaaataaaattggagaagtcaaggtccaatggtggaggaacatgatgtacagctctgagcagtgcaatcaatgcaacagttccaaactaaatatcaatacgatcgtcaacaaatgtagaaaagcattcaataaaattcaacatccagccattattttttaaaaaacttacttccttatgataatatgaagttttacaagaaaagatggcaaacatacttaatggtggaaaacttgaaatattccttttaaaatcaggagtaagacaaagatacctacatcaattctggtcaacattgtacttcatttccctagtctgcacactaagaaaaaaaaaaaagaataacagctattaagattgaaaaggaagaatcccartttcgtatcatgactaaatagaacaaaacaaaaaatcctcaattatgagaattaagtctggaagattgctgagtaaaatagatatgtaagagtcagtaattttatatattagaaaatgcaacttatgaaaatatatatcacacaattaaaaactagaaataaactgaacaatatacaagacatgaaattatacaagtactgaaaaatgttaaagttctaaataaatggagtaacataacattcagacagaagggtca

SEQ ID NO: 692598 - DNA, 732 bp, Homo sapiens
  misc_feature 631, 632, 633, 634, 635, 636, 637, 638, 639, 640, 641, 642,643, 644, 645, 646, 647, 648, 649, 650, 651, 652, 653, 654,655, 656, 657, 658, 659, 660, 661, 662, 663, 664, 665, 666,667, 668, 669, 670, 671, 672, 673, 674, 675, 676, 677: n = A,T,C or G
  misc_feature 678, 679, 680, 681, 682, 683, 684, 685, 686, 687, 688, 689,690, 691, 692, 693, 694, 695, 696, 697, 698, 699, 700, 701,702, 703, 704, 705, 706, 707, 708, 709, 710, 711, 712, 713,714, 715, 716, 717, 718, 719, 720, 721, 722, 723, 724: n = A,T,C or G
  misc_feature 725, 726, 727, 728, 729, 730: n = A,T,C or G
tcaactaagtgagtctcctagctctgggatcatccctttgaaccacagtctgcaaagtgaacatctgggaatctgtagggcttacctcatttgttttgctgcctattgtccaatgtctaaaagtcattgtttcaaatatttgtccatgtggttcactgcctatggcttatgratatctgttttgcatttcctacatttggccctgttcaaagttattttatcctcagtgtcccaaatggaactctattattcactcagtcatggtttagacatcattgacatgccatgtgctggaaagtttgtgaggcactagggaaacagagtgagtgagacagagtcactatcttggagagctacctgagtgtgtgggaaacaaacttttaaaattataattgggctatacggctacaatgtctgctattatgagagaattaatgatgtgtcgtgggaaaccagaggaggaaataattaattataactgggttgggctaggatcagggaagagtggttaaagatgatttcacgtaggaggtgacttaactgtggtacaactcaatagtctatgtctcacaaaaaactaataagcaatgaaacaactttttggcataagggttataactgttggaattcnnnnnnnnnnnnnnnnnnnnnnnnnnnnnnnnnnnnnnnnnnnnnnnnnnnnnnnnnnnnnnnnnnnnnnnnnnnnnnnnnnnnnnnnnnnnnnnnnnnnat

SEQ ID NO: 692599 - DNA, 616 bp, Homo sapiens
gggcctctctccccacctactgcaaatggctggcatacagcagtcctcagttatggaaaagaagacatcttagctttaaaactcagatatggtatgaattaccagtccccacaaatttgccccacgagtcatgccttccagtattcacaccatgtgtagttccctgctgcattgatctaggatggccctgtgtctccctttaaccagtataatgcaaaggaagtgacactgtgtccgttctgtgcctaagccttgaaagggtctggcagtttccagttttgtgctcttgggagaacttcatatataaagcacagctgtgytgctaaaaagaccacatggaaagaccacatggagtggaaaattctgaggctacatggagagggaaagaagaccagctgtcctacccaagttgaaggtcaatttgatttcatctgtatccacacccaacttcccacaattatctccaaggaaatcctaatcatcatatcattttattcataagtatttaatatatgtttctaaacaaaaatattatttctaaaaatataatcttaatttcattatctcatataatttcttaatatcaattatcagtgttcaaactttcttaagagac

SEQ ID NO: 692600 - DNA, 1489 bp, Homo sapiens
ctgttgtactattattattacttacacatggacatcccaatccttgaacgtatggtattattcataagggccagcactattcctagccagctccataaaaatgagagctgtatggttttctcttcttagcagcctgaagcaacaaagcatacatctagtccttgcctttatggatatccacttgcaggactggaaattcttgcctgatcaatcactgyagaactcaattgtttaagaactcagaagcttccagaataatgctcatctatcctctctaccttgtatgtgctgttccctgcctttgagatcctctcttgtcttctccattggaccagaagaggatagaaggtggccctaaaccttgcttttgtttttcttatattaggacacaaagttgagtaagagagagtcccctggaagactttcagttaagaaggaatgacagtccagtgaacctgtggttacaataaaagtttaagagtttttatggcagtggataatattttttaatttattaatgattttcttcactcttccttgcataaggctgtgctctactaaaccagatacactgttacctctaggaagattttgttttaactagaatgcaaagaaaaggccaccattcagcatttgatttgcaacagagaatcatgaggcccatggcaaagctgtggtcatgaaaaccagggttttctcagaaatcaaggtacttctaaaggtaaacaacttctctttccatatcaggagcaaaacttgaaatttgaaacatatgattttactataacctttagatagtaaagcttatattatattatattatattactatgttgtaaagctcttatctttactgtctaagtgaaccttagatagtaaagataaacctccaaattgtctgagtttcaagtaaagcttagataataaagacaaaaatttttctttagagaaatttaaggattatgatttaagggaagttgccatctatccaaggagtaaaaataaagtggaaaggacctctgacttgagggatagaaatcagacagggagagctacagaagactagacaagggagaagatgatcatgagtccctgagtttatccccagcacaggggccaggtatatagagactggagggttttgcagcagcagaaattgccacaaaactccaggcacattgagacagaacccacaagcattttttccatgctagtgccctgctttcctaggctatccaagctggccttggagtggtagaacaacaaagggaagtgtccacagagacaggcctgctatgggacaactgactcccatggtgctcatatgatgtggaaggagtccagaagctcctgaatgcctccgggaatgtggaccatgagtgctggctggtgaacttactcaaggcaacgatgggccaagctggggatggaatggagtcactgggaatctgaagcaccgcgacgaccagcgtggggcctgatcaacaaga

SEQ ID NO: 692601 - DNA, 1489 bp, Homo sapiens
ctgttgtactattattattacttacacatggacatcccaatccttgaacgtatggtattattcataagggccagcactattcctagccagctccataaaaatgagagctgtatggttttctcttcttagcagcctgaagcaacaaagcatacatctagtccttgcctttatggatatccacttgcaggactggaaattcttgcctgatcaatcactgtagaactcaattgtttaagaactcagaagcttccagaataatgctcatctatcctctctaccttgtatgtgctgttccctgcctttgagatcctctcttgtcttctccattggaccagaagaggatagaaggtggccctaaaccttgcttttgtttttcttatattaggacacaaagttgagtaagasagagtcccctggaagactttcagttaagaaggaatgacagtccagtgaacctgtggttacaataaaagtttaagagtttttatggcagtggataatattttttaatttattaatgattttcttcactcttccttgcataaggctgtgctctactaaaccagatacactgttacctctaggaagattttgttttaactagaatgcaaagaaaaggccaccattcagcatttgatttgcaacagagaatcatgaggcccatggcaaagctgtggtcatgaaaaccagggttttctcagaaatcaaggtacttctaaaggtaaacaacttctctttccatatcaggagcaaaacttgaaatttgaaacatatgattttactataacctttagatagtaaagcttatattatattatattatattactatgttgtaaagctcttatctttactgtctaagtgaaccttagatagtaaagataaacctccaaattgtctgagtttcaagtaaagcttagataataaagacaaaaatttttctttagagaaatttaaggattatgatttaagggaagttgccatctatccaaggagtaaaaataaagtggaaaggacctctgacttgagggatagaaatcagacagggagagctacagaagactagacaagggagaagatgatcatgagtccctgagtttatccccagcacaggggccaggtatatagagactggagggttttgcagcagcagaaattgccacaaaactccaggcacattgagacagaacccacaagcattttttccatgctagtgccctgctttcctaggctatccaagctggccttggagtggtagaacaacaaagggaagtgtccacagagacaggcctgctatgggacaactgactcccatggtgctcatatgatgtggaaggagtccagaagctcctgaatgcctccgggaatgtggaccatgagtgctggctggtgaacttactcaaggcaacgatgggccaagctggggatggaatggagtcactgggaatctgaagcaccgcgacgaccagcgtggggcctgatcaacaaga

SEQ ID NO: 692602 - DNA, 1167 bp, Homo sapiens
tgcagcctccacctcctggaatcaagtgatcctcctgcctcagcctcccaagtagccggaactaaaagcgtgtgccagcacacccagctaatatttgtattttttttgtagagatgggattttgcyatgttgcccaggctggtctcaacctccggggcacaagtagtctacctgccttggtctcccaaagtgctgggattatagacatgagccactgtgaccagcctcccattgctttttaaaaatcttaattcttaaactaataggcatatctgtactttgcttttcctgaaggagaataagcctgatctaaccataccttaaatctaagtttatgaatgctcattttttacatatatttttcacagttaagaagacatctgactttgttattgttttctctctcattctgaccaccttatccaaaaatggatggttctgtcttgcaactttattctatctcagctataagccttgcttagatatgttttctattttgtaattagctttttttaattctttcaattctaacttatctgtatactatttataaaatatttgaaatgtaactaaagtgttttgtgttgttgtttgttttttaccatttacttctgttgccaggatggcagtaaagtttttacaaagcaaacatttctctgaatcatgcagtaagggctaattttttatgattaatctttacaaatcccatcacattgaacagacctttagcctatatacaaatagtgactctgaattttgttgtggggatataaaggcaagtaaacacacaccctcaactttcagaacactgtcagtacaacggtggatttgtgggaaagggaggtggattaactgtgatgaccacaaaacaaatattcttacctgtaccattaatcatgtcgcagtgactttcccaataggacagattcctaggaatagaaaaagacaatgaataaacattcttatttaaagaatacctttcttacattactttttctattataattcaatacttctgttaatatgatgcatttaaatgtgacaagtactaagtttaagaaatgttcaattctgtttatgttttgtttgaaccttttatcttattgcaatgtacctgatgccattaggtagccagatcataaaataaaaactgccaggtgttaatta

SEQ ID NO: 692603 - DNA, 1266 bp, Homo sapiens
tagggccagatactggcttgtattatctgttgacatgtgaaagctccagttattatacaaactgttcttgagaactgagatttcacataatgaattaagatctttgatccaaagagacagcccatcttccaaaagccactgcaccattaacgaagcagatgtgggggcaacaggagcaccatgagaaggacaacgttttataagacagctagaaaaggaatgcacgtaggcctccgtttctcagttacaaagccgaggtctggagtccagactcaaaccagcaccatgagcaggctgtataatctccataattataattcaagtgctaaatgagtttgtgtgaaaactaaagaagatcacataatgaggtcctcagcccagtgcttggcacatgggaaatatcacacatatggcctgtggtggtgattactactgtgtaccaactcttacatcctccaaaacatgggggtacagagaggaccacaggcttccccatttttaacttctaggtaaggtaatgttaagttctttgcaaaatatcagttaacaaaataagaagaaatgtctcattctcccctacaacccaacacctggagcacrgggagggcagaggtagcaaggaccagttcctgcctctctgacactgggatgcataagaacaaagcctggacaccgaagtggcatttggcctgccttccctgattctacacccttgtactccaagcccctgcccaaaactggcaatgccaccacctgggttccaggacatagtttccaagcactccccagctgggctgatcccaaaccactggcaacctagccacgctcttgcacagatctggactatcattttgaaatctcatccgttatgggacatgggtgaagaatctgagttctggagccaataaaccgggttcaaacctcagttcagccacttccaaaccacgtaaaaatggacaacttacttagctttaccaggtctcagtttcctcatatgtcaaaggggaaaatcatgacaaccgctcataaggttgttttgtggggatttagtgacttcaagagcaaagcccatggcataacattgtggtgcagacagagagcttaatttctgctggctatcatttcagcaaggatcatttcccacctgggccactgcaacagcagcctgctaagtcacctccctgattccacattccatgccttcacaaacgtcactgcacaccagccagagtgacagccctaaaataaaaatcaaatcacaacact

SEQ ID NO: 692604 - DNA, 1446 bp, Homo sapiens
gtggtgattgctaggaatacaatgataagcagaagtagatatagtccctactctcattaaatttcagcctgttggataagctagatattaacaaatgaccacagaaataaacatcaactcttaacagagaacaacaggcatgaacaggggaaaatatgaaatgtgagtgcttggccttgctaagaattccaaggaaaacttctctgaactgaaacccaaaactgagtctaaatcaactaaggaaagaggagaaatgaaagttgtgttggaggcagaaggaaagtgatgtcatgaatctcatggaaaaaggagcatgagaggagagtggtgaaagaagcccagggtagtgacagccacatggtgagagcaagcaggatatgggaagctggagaggtggcagccgcyggaccacaccgagtcttgtagacgctagttttgtttttaatttatgcaaaaacaatgggaatcacttggagagcttaaagtgagaggggacactggtagggttacagctgagattttcttgttgatctttgagctgtggtattcaataaggtggtcactagctacatgtggctaaataaatttaaatgtaataaaattaaaaatccagttcctcaatagtaggtatgtgtgagagagcccagatgtagaatattcatgcttgcagaaagttcagttggcaacactacccaaagggttgctttgggccctagcatgagcatcccgagaaccggtttgaaatgtatgatgtcaagtcctgtcttgcattctaaggtgattcttaggtgacttgtatgcatgttaaagtttgagaaccgtaagtctagaaggtaactggccatttaatgggatcctattgataatttgctactgtgaatgggaagaaaagcacccataaacttccagtatggagaataatgactgaaaagatgccaatattgccaagtaaactaccaatttggacctaaattttataagacctctacaagtccctttcggaactcagtgaaatatacacaccacctggttcaaatcaaatgctttgcatttggtggaaaaaagatagtctcacagttctttccaaatatgatttcaaagtgttcccccactctcctcccttccccatccattcccctgtattccccctctctaatatcttgctgttgtgagtaggattgctacatatcataccaatagaattcaggctgtgacacaaagcttaatttttcctgggatggttcccaggggaagactatagtgtgtgaaatgttatttgttgggtcgttgaaaagaaagtaatgaactcactggcttcctgaaattgtggttctatttttcaggagtatgggagcctatttatttttaactgtactattgtcgtacccatagatcagcttgtgtttgttacccatttgcgacacgccctccactcgccttttattg

SEQ ID NO: 692605 - DNA, 527 bp, Homo sapiens
aattatgaaatatcattattcatttttaaatttaayattaaatatggcagatgggaaaataattataaaactacttgcagttatatatgagaccactattaaatctaggccttacatttttcactttttcctaatttgggtcaatatctaatgcctaataaagttcacagcatgtttgacagcattccaaatatgctgtattcttctttatttgaatttcaactcctttatttaacattctacttctttgtcaattagtgcctcaaaggatgatagcctgcctaagcagcaaaattcatggcagctttcaactttgtattgtgcctagtaccaagatttttaaatgctctaatcatcttgtcacacttctaaaattataacattggtggtgtgatcaaaggctgagattccattgagaacttcacctaggatttaatctgacttcctgcagatgctagttgggaacatataataaagtttattagtgtgtagttattcattatgtaaagaattgcatcatgcagagg

SEQ ID NO: 692606 - DNA, 681 bp, Homo sapiens
gacatgatctcattcttttttatggctgcatagtattctgtggtgtatatstaccacattttctttatctaaactaccatggaagggcatttaggttctttagagtcagggtctgtgttgctcacactggagtgcagtggcacactcatagctcattgaatccttgaactcctgggctcgagtgatcttgctgcccagcctcctgagtagctgggaatacaagcaggtgcctggctacttaaaattttttttctgtagaggtgggatcttgctatgttgcctaggcttgtcttgaacttctggccttaagaagtcttcctactttggtctcccagagtgctgggattagaggtatgagccattatgcctggccttggaatgtggaagtccaagatgaaggtgctggcagggttgtcttctgaggcctctttacttggattgcagatggctttttctctgggcacacgtacccctagtgtctcttcttcttataaggacattagtcctattggattgggactccacccacatgacctcactcaaccccttttaaggccctgggagttggggcttcaacatatgaattttgggggaatacaattcagtccataactgtagcatttattttaggataacgtgttttaagtaatcttaaaatgtatatttttggttacaagtaaa

SEQ ID NO: 692607 - DNA, 681 bp, Homo sapiens
gacatgatctcattcttttttatggctgcatagtattctgtggtgtatatgtaccacattttctttatctaaactaccatggaagggcatttaggttctttagagtcagggtctgtgttgctcacactggagtgcagtggcacactcatagctcattgaatccttgaactcctgggctcgagtgatcttgctgcccagcctcctgagtagctgggaatacaagcaggtgcctggctacttaaaattttttttctgtagaggtgggatcttgctatgttgcctaggcttgtcttgaacttctggccttaagaagtcttcctactttggtctcccagagtgctgggattagaggtatgagccattatgcctggccttggaatgtggaagtccaagatgaaggtgctggcagggttgtcttctgaggcctctttacttggattgcagayggctttttctctgggcacacgtacccctagtgtctcttcttcttataaggacattagtcctattggattgggactccacccacatgacctcactcaaccccttttaaggccctgggagttggggcttcaacatatgaattttgggggaatacaattcagtccataactgtagcatttattttaggataacgtgttttaagtaatcttaaaatgtatatttttggttacaagtaaa

SEQ ID NO: 692608 - DNA, 590 bp, Homo sapiens
tttacttttattttagaaacaaactcgtttatttaatttctcatcccagaggagttgaaaagggcactgggattaatagtggcaggttcctaaaagacttccagaagtgacaactagcagccacgaattagaccagggatgcacacattttttctataaagggtcagacagtcaataattttagctttgcgactactctactctgctctgtagcgtgaaagcggcccctgatgatatgtaaatgagtgggtatggctaggtgccagtgaaactttatttacmaaaacggacgacggggacgtaggctttagttttttgatcccttgattacacaaaaagtatcaaaacatgatattaaaaccactggaaaagcacagcagtctggggctatttaggacaggggcaaacagcagacacacctcaacagatctgaccagtgtccccagactgtggcctgggctcaggattccttgcactggttagaaaaggcactgtgtctcagtctttgccgccgcgccggcgagcgccgcccgggaggcagcggctggaggagcggacgggccccgcggggccggagggcaaggagcagc

SEQ ID NO: 692609 - DNA, 592 bp, Homo sapiens
agcagattgtagtgtgcaccctcagaggtatacaacactgtgtatacctgtttgcttctctggtgccctgtgacatccgcaggcagtggctgagatggggcttgggacatctagtggtgggtgctgtgtagaatggtcagaccccccaccaaccatgaaacggctgcagcggagccacagcattgacaggtgggcccttccccaggtccaggagtccgtagccagctgcttgccacccctygtgccagccatcaaggaggatgctggagggatgatccagaggcttatgcagcagctgctggagtcagacaagtacgcagagcgcaaaggggccgcctatggcctggcgggcctggtgaagggcctgggcatcctctcgctgaagcaacaggagatgatggcggcactgactgatgccatccaagataagaagaacttccgccggcgagagggtgagcatctctgagcttggggctgcccagcatgggaagttggtccccaggttgccagaggaaggaatctgaccgtggcgccccaggtggaggccgttgcttgtgcgtgtactacagagggccccgctgtgtgcgaccca

SEQ ID NO: 692610 - DNA, 592 bp, Homo sapiens
agcagattgtagtgtgcaccctcagaggtatacaacactgtgtatacctgtttgcttctctggtgccctgtgacatccgcaggcagtggctgagatggggcttgggacatctagtggtgggtgctgtgtagaatggtcagaccccccaccaaccatgaaacggctgcagcggagccacagcattgacaggtgggcccttccccaggtccaggagtccgtagccagctgcttgccaccccttgtgccagccatcaaggaggatgctggagggatgatccagaggcttatgcagcagctgctggagtcagacaagtacgcagagcgcaaaggggccgcstatggcctggcgggcctggtgaagggcctgggcatcctctcgctgaagcaacaggagatgatggcggcactgactgatgccatccaagataagaagaacttccgccggcgagagggtgagcatctctgagcttggggctgcccagcatgggaagttggtccccaggttgccagaggaaggaatctgaccgtggcgccccaggtggaggccgttgcttgtgcgtgtactacagagggccccgctgtgtgcgaccca

SEQ ID NO: 692611 - DNA, 592 bp, Homo sapiens
agcagattgtagtgtgcaccctcagaggtatacaacactgtgtatacctgtttgcttctctggtgccctgtgacatccgcaggcagtggctgagatggggcttgggacatctagtggtgggtgctgtgtagaatggtcagaccccccaccaaccatgaaacggctgcagcggagccacagcattgacaggtgggcccttccccaggtccaggagtccgtagccagctgcttgccaccccttgtgccagccatcaaggaggatgctggagggatgatccagaggcttatgcagcagctgctggagtcagacaagtacgcagagcgcaaaggggccgcctatggcctggcgggcctggtgaagggcctgggcatcctctcgctgaagcaacaggagatgatggcggcactgactgatgccatccaagataagaagaacttccgccggcgagagggtgagcatctctgagcttggggctgcccagcatgggaagttggtccccaggttgccagaggaaggaatctgaccgtggcgccccaggtggaggccgttgcttgtgcrtgtactacagagggccccgctgtgtgcgaccca

SEQ ID NO: 692612 - DNA, 645 bp, Homo sapiens
tgtatttttagtagagactgggtttcgccgtgttaggcaggatggtcttgatctcctgacctcacaatccgcccgcctcggcctcccaaagtgctgggattacagacgtgagccaccgtgcccggtcggattttattttttattttaattttattttcagttctgggttacatgtgcagaacgtgcaggtttgttacataggtatacatgtgccatggtggtttgctgcacctatcaacctgtcatctaggttttaagtcctgcatgcgttaggtatttgtcctaatgctctccatccccggccccccaccccccgacaggccccagtgtgtggtgttccactccctgtgtccatgtgttctcattgttcaactccctcttaygagtgagaacatgcggtgtttggctttcaattcctgtgtttgctgagaatgatggcttccagcttcttccatgtccctgtagttatttttccctcattgggagaatcatccaaggtgtctagtcggctatatggccagaaatggaggtcatgccttaatgactaggaaatgctggactacctatatttaagtaggcttctttgctattggactttactgagcttgaaaatatcactgtgcactaagagtctctgggatgggg

SEQ ID NO: 692613 - DNA, 1322 bp, Homo sapiens
tgcatgttgtgccaactgtgacctttacctgcaggtttcaggcagctatttgattttctgttcaaggagagcattgtaaccctagcaacagmtaccatggtgcagatggcagatctaatatccaaagtctgtttgatggggacacatactaacactgcaagcagaggaaccttttttaatactttaacaagactttaaattgagctgctctgcaaagcagaatcttcctctttcttagacacaataggactgccagtggcataccaggtttatcagctcttctcttcatcacccccaaacctagctggagttcaatctttaatctcctcctaagtcacagaatccagagagctagcatccaaaatactgagataacataccatggtctcacaccaggacaatgagctgtaggtaagttagtcaaatgtaggagcttctgtggttaggtaactttgtctctcttatcagtacctcatggaacttagaaatttggtctagtgttgaggagacttggagtgtcagtatcacactagctgtgtgaatgtgagtgtgttgatatgtctgtcttaacattcctgtattgcagtattttatctaagtcaagtctaaaatggagtattaaaatatggaaatatgtacatcttaagattgacgaaataatgatagatagggtaggctaaatcccgtaacaggtaacttccaaatctcagaagcataacacagtagattatttcttgttcatataactcagtaattcagcgattcatggtctatgctctttccatgatgcagttctaccctcatgcagatcctcagacccctccccattcagctaagacatgtataatttctgcttacctttggttggccagaactagtcatgtgaccatgccgaattgcaagcgagtctgggaaatgttgtctcactgtgtgctttggagaaaaaggaaagagactgtggtgaatacttagttgtcaccactacagtctggccctctatcaaatccccattgatttttcttcccaagtagagaacacctttcaacctcttactcaagagaagccaccaaagtcccatcatgaccacgaagacagctcaaagtccaggatctcagggtaatgtgaagttctccctatcagtcccattctttcacgattatggcacctaacatccagtacagcagagacactggtttcaagttctatgtgagtcacccagatatctttcttaagaagattcagaagtgtcttaggagagagaataatctagaaaagggattggagtcttggatatacaactggcagctctaaatcatttatcc

SEQ ID NO: 692614 - DNA, 935 bp, Homo sapiens
tgcctctgagtcctgggggcccggaccctcagtgaccgtagagtaatgggtcaccagaatccggggcctgcctgaatctaagacatggtgtggcgctcctccacagacagctcttccccacttcacagtccctgggtaattaaagtctccgtagtgacccctatctggattgctttaattctcccataaatttactactacgctaacgacgctcattcattcaacacacatcaaaggggttaccgatcagggagctgtccaggctaatgmgcccccaagtctcccaaacacagctgcggaaccgccgggttagtgagcccgcgctgtcagaaagactcccaaagactgctgcaagtgaggaacgctttcgggctcgtgccaggagttcccggtcctggaagaatgactgggagttgaaaggttccactccaggccgggacttcattgtgcgtttgcatccattaagccagggatcttcctgagacccactgcctcagccccaacaactcggctgtgaaaacactttgtcaattttagctgcagggtggaagtcgctccatgaaaataaagcatttatggagttacactggcgatttctgaatccctggaaatcctctcaagccggtgggttgaggctgttctctccgtgtaaatgtgcgcagtagaaataaatggcttgtttgctgatcagtccacagcagaaaacaaaacaaaacaagacaaaaccttaaagaaaggaactcggaaggtaaaggagttaatttctttaaagattcgattccctcctttaaagggattttaatgtctacaaactggtaaagtggaaggaagttagtttgtttctcttttgtttacattaaatttaaattttatttagctgtgcttgattagcattcatgtggcacaaaattctaaaactacaaatggaacacagt

SEQ ID NO: 692615 - DNA, 1692 bp, Homo sapiens
  misc_feature 972: n = A,T,C or G
tcaccatagcagctacagtttattcttgtgctctcattagagttgggagaaatatgacaccaagatttgagacagtcatgagattttgttggctgygcagtgatactttgaccagatgttttattaagatgtccagcatctctctgtttttctctggcaatttgcacaccaatgcatgtacagcctccaccctgtagttttggtcatcagatttaacagcaatgatacaaatctttgtgtaacttgtaagtcatcagtggtgctgcaaagcacctgaggtagtttttcagcccactcattgtcttattgtcccacagttcaatatcaatatcaggaggggatttaggagaaaatatgatattcacaagtttttgaactttggagttcactcctcctattcagtagaggcctaaaacggtgataccgcttgtttccacagcttgaatgcagtttctcacaaaattgaaccctgcttcattcaaatacctttcttctttcttgcttataatgtcaggcagagtataaatcatttccttcccatccatggcttcaagccagagtttcctattagcgtctgagaaggcctgtaatgtgatgatcccatgcctttcaactacttgtatgtcgaagcagaagtggttgtcaattgaatctgtctttcgtcggatacaagtttttgaacatttccggtgagctagtaacaaggctgtttaatccatgtaaaaccaagcggtcgtttctcctggacatacggatagccttccatcgtccactggctgggtggtctgtagtcctggttggcagatttcatcctctgcatcaacccctctacctcttgtcgagtactttcaaaattattccttgtattctgcaagttgaactgcagctgttgcttatgcggtgcaaattcctgggcaagttcatatccctcgtggtaaaaaagtaaataaaccctgaagaaatgacaaaagncggttcaacaaattcaaactttttttcttgaaccgcttgaattttaaagacatatttttcatttatttttatttatttgtttatttatttattttgagacggagttttgctcttgtttcccaggctggagtgcaatggcgcagtctcggctcaccgcaacctctgcctcctgggtccaagcgattctcctgcgtcagcctcccgagtagctggctttacaggcatgtgccaccacacctggctaattttgtatttttagtggagacggatttctccatgtaggtcagtctggtctcgaactcccaacctcaggtgatccgcctgcctcagcctcccagagtgctgggattacaggcgtgagccatttaaagacattctaatgatgcttcatagaagttctgatgtgcttgatcaatttgtgtatctgcctcttgcaaatgagactcctttttctttgcagataaatttaaatgcttttcaaggatagagtaatatttttcactctttgtcaaacttctttccatcttttactgcacctatctgttctttttgaaatttctcaagtggtgcaattaatacatcattagccttttggatcagtcttcacctttcttcttctgctgcaatgagtagtcttgcaaattcttttagtgactgactaatactaatttcatcatctgtttcagcattatcaatacattcaaattggaaatcttgtaa

SEQ ID NO: 692616 - DNA, 1085 bp, Homo sapiens
gctctctttgaaggtctcagccaccaagctccatctacttggcctgtacagttcctcaaacaaaatgaactccttgcagccacagccttcgcttcaactattccctctacctagaaatgtgacccattggaacttctcctgaccagcttcttcccgatattggaacctcaaattaaaaggcacctcctcaaaaaggccttccctgactattctcatcataaggaacgatttattcactccattccatccactctgggtagttcttttcactctctggttttttaaattgtctgtgtgttgtctgtctccccctcagcagaatgcaggctccctgaagggaagactttgactgtatccttgactgtatccccagtgcctagaagaacgttttgcatgtaggagggcctcagtaataatgctcaataaatgaatgctcaacaaatctgaatgaatacaatgggttatctaattagcaatcagatattttactcattaatgtcattaattatcagatttgtgtaaaatgtaagctacttttagtttttaaagaagaaaaaatagatccatagtattataaaaaacaaacggttcctaatcatttggagccagcgatacttctttagcctgaaaactacawtcctcagatctttttctctcttttgcagacttcatgaaatgttaacaatggccccattacctatcctattccactcttggatgctgctacaatttgtattatctgacactgattcagggaaagaggtgctgttgaagaagagtggggtgaaaattgaggataaaggggtggcttcagctgccacgaatacaactctctctcagtaaaggagatgactgctggctttctgattcatgggccagacttttggcagaagtgggtggcaacatttttctaccttactcctgcatgccctggaacctctcaaagcctggaattggaatggtcatgagcttgttgatgacttttgatggccagtgactgataattcttgcacagattggcaaactgctgatgggcatttcttattcccagtgccaaaaaataactttatgtattgtgactttat

SEQ ID NO: 692617 - DNA, 1506 bp, Homo sapiens
cttgtcaatacatgtgctgtattttttttgcatttgttgaaaaattgcacatatagaattccaaacatttctcttggtaggttcagttacacaaatacatgttctatagaacactgagaggttacttttaagtccacaaatcttccgtaagttcaacctaatcagttaccagttcaagaagatcttgaaggtggtaaactagcaggaacttcagatttaggaaattaaaggtgtcagaataatactatcaaccaatgttcctggcagacttaattgaacttaaagaaccattgagagtaaaactggtttcaaataaagagacataaacagatttcctgttaaacctcacaagatactttttacattgccggtttggacactgaacatgggacgtgaacactaacaacgtcatcttaaggacaaagaaaagaatggaccgtgagaatcaaatttacagttccaactgtttggcaattggcatttctggttcattctcagccagtcattttaggcttcacagtcttactctcttacattttaagataccagcttttattttttaagttcttattcattttatttgacaaaaagccagctttggcaacacatacccataataaaagtcattttaaaattgtggcccaaacactaaggaaaaaaaaagaaaggaaaagctcaaacaacaacaataaaaaattaagaacaacctctaaaaagtttctgggtagcagccattagggtaatgtagtgtgtgttggcatcttttttggcatctgcaattgaaagagagggtaagaaaaagaagcaaagaagggaggaaagacaatggcacgtggcatttcaaaagaaaggactcctgcgtgtctttgatcctgccttctgcatatttctctgagcaatcaagctatggctgaaggtaaacatctaaaagaaatgacacttaactgttagacgggcatccattgtcccagtccaaagtgagacaagacagtatattctattaaaaaagaaacyatgtgtgtatccagagcaacacatttaaaaccatagtattaatacatataatccttcagcaaaaactacaaacttatataaagctgatgatggcttacatcgaacgatgtgtcctgactgtaacatttgagagaaaaacttgaccaagaatggaactaggataaaggccattgtaacatgggaaaaaaatcaggagggaggtatgaattaggggggaaaaaagggaaatcagctttgttttgctccatagaaaagaaaaagagagaaagagagagagagaaagaaacaagtcttatctttgtgagtgcatgactgagaatttaaaatacaccgagtcacaaggttttgcctaaaaaaaagatagagaggaaatgtgctgggactgtacttcagcatcctctgtttttcctctgaatagtttaaataaaatcataatgtttactacaaactctgtggacacgctcacacagagtccaggacggcaataaatta

SEQ ID NO: 692618 - DNA, 1506 bp, Homo sapiens
cttgtcaatacatgtgctgtattttttttgcatttgttgaaaaattgcacatatagaattccaaacatttctcttggtaggttcagttacacaaatacatgttctatagaacactgagaggttacttttaagtccacaaatcttccgtaagttcaacctaatcagttaccagttcaagaagatcttgaaggtggtaaactagcaggaacttcagatttaggaaattaaaggtgtcagaataatactatcaaccaatgttcctggcagacttaattgaacttaaagaaccattgagagtaaaactggtttcaaataaagagacataaacagatttcctgttaaacctcacaagatactttttacattgccggtttggacactgaacatgggacgtgaacactaacaacgtcatcttaaggacaaagaaaagaatggaccgtgagaatcaaatttacagttccaactgtttggcaattggcatttctggttcattctcagccagtcattttaggcttcacagtcttactctcttacattttaagataccagcttttattttttaagttcttattcattttatttgacaaaaagccagctttggcaacacatacccataataaaagtcattttaaaattgtggcccaaacactaaggaaaaaaaaagaaaggaaaagctcaaacaacaacaataaaaaattaagaacaacctctaaaaagtttctgggtagcagccattagggtaatgtagtgtgtgttggcatcttttttggcatctgcaattgaaagagagggtaagaaaaagaagcaaagaagggaggaaagacaatggcacgtggcatttcaaaagaaaggactcctgcgtgtctttgatcctgccttctgcatatttctctgagcaatcaagctatggctgaaggtaaacatctaaaagaaatgacacttaactgttagacgggcatccattgtcccagtccaaagtgagacaagacagtatattctattaaaaaagaaaccatgtgtgtatccagagcaacacatttaaaaccatagtattaatacatataatccttcagcaaaaactacaaacttatatwaagctgatgatggcttacatcgaacgatgtgtcctgactgtaacatttgagagaaaaacttgaccaagaatggaactaggataaaggccattgtaacatgggaaaaaaatcaggagggaggtatgaattaggggggaaaaaagggaaatcagctttgttttgctccatagaaaagaaaaagagagaaagagagagagagaaagaaacaagtcttatctttgtgagtgcatgactgagaatttaaaatacaccgagtcacaaggttttgcctaaaaaaaagatagagaggaaatgtgctgggactgtacttcagcatcctctgtttttcctctgaatagtttaaataaaatcataatgtttactacaaactctgtggacacgctcacacagagtccaggacggcaataaatta

SEQ ID NO: 692619 - DNA, 1506 bp, Homo sapiens
cttgtcaatacatgtgctgtattttttttgcatttgttgaaaaattgcacatatagaattccaaacatttctcttggtaggttcagttacacaaatacatgttctatagaacactgagaggttacttttaagtccacaaatcttccgtaagttcaacctaatcagttaccagttcaagaagatcttgaaggtggtaaactagcaggaacttcagatttaggaaattaaaggtgtcagaataatactatcaaccaatgttcctggcagacttaattgaacttaaagaaccattgagagtaaaactggtttcaaataaagagacataaacagatttcctgttaaacctcacaagatactttttacattgccggtttggacactgaacatgggacgtgaacactaacaacgtcatcttaaggacaaagaaaagaatggaccgtgagaatcaaatttacagttccaactgtttggcaattggcatttctggttcattctcagccagtcattttaggcttcacagtcttactctcttacattttaagataccagcttttattttttaagttcttattcattttatttgacaaaaagccagctttggcaacacatacccataataaaagtcattttaaaattgtggcccaaacactaaggaaaaaaaaagaaaggaaaagctcaaacaacaacaataaaaaattaagaacaacctctaaaaagtttctgggtagcagccattagggtaatgtagtgtgtgttggcatcttttttggcatctgcaattgaaagagagggtaagaaaaagaagcaaagaagggaggaaagacaatggcacgtggcatttcaaaagaaaggactcctgcgtgtctttgatcctgccttctgcatatttctctgagcaatcaagctatggctgaaggtaaacatctaaaagaaatgacacttaactgttagacgggcatccattgtcccagtccaaagtgagacaagacagtatattctattaaaaaagaaaccatgtgtgtatccagagcaacacatttaaaaccatagtattaatacatataatccttcagcaaaaactacaaacttatataaagctgatgatggcttacatcgaacgatgtgtcctgactgtaacatttgagagaaaaacttgaccaagaatggaactaggataaaggccattgtaacatgggaaaaaaatcaggagggaggtatgaattaggggggaaaaaagggaaatcagctttgttttgctccatagaaaagaaaaagagagaaagagagagasagaaagaaacaagtcttatctttgtgagtgcatgactgagaatttaaaatacaccgagtcacaaggttttgcctaaaaaaaagatagagaggaaatgtgctgggactgtacttcagcatcctctgtttttcctctgaatagtttaaataaaatcataatgtttactacaaactctgtggacacgctcacacagagtccaggacggcaataaatta

SEQ ID NO: 692620 - DNA, 1506 bp, Homo sapiens
cttgtcaatacatgtgctgtattttttttgcatttgttgaaaaattgcacatatagaattccaaacatttctcttggtaggttcagttacacaaatacatgttctatagaacactgagaggttacttttaagtccacaaatcttccgtaagttcaacctaatcagttaccagttcaagaagatcttgaaggtggtaaactagcaggaacttcagatttaggaaattaaaggtgtcagaataatactatcaaccaatgttcctggcagacttaattgaacttaaagaaccattgagagtaaaactggtttcaaataaagagacataaacagatttcctgttaaacctcacaagatactttttacattgccggtttggacactgaacatgggacgtgaacactaacaacgtcatcttaaggacaaagaaaagaatggaccgtgagaatcaaatttacagttccaactgtttggcaattggcatttctggttcattctcagccagtcattttaggcttcacagtcttactctcttacattttaagataccagcttttattttttaagttcttattcattttatttgacaaaaagccagctttggcaacacatacccataataaaagtcattttaaaattgtggcccaaacactaaggaaaaaaaaagaaaggaaaagctcaaacaacaacaataaaaaattaagaacaacctctaaaaagtttctgggtagcagccattagggtaatgtagtgtgtgttggcatcttttttggcatctgcaattgaaagagagggtaagaaaaagaagcaaagaagggaggaaagacaatggcacgtggcatttcaaaagaaaggactcctgcgtgtctttgatcctgccttctgcatatttctctgagcaatcaagctatggctgaaggtaaacatctaaaagaaatgacacttaactgttagacgggcatccattgtcccagtccaaagtgagacaagacagtatattctattaaaaaagaaaccatgtgtgtatccagagcaacacatttaaaaccatagtattaatacatataatccttcagcaaaaactacaaacttatataaagctgatgatggcttacatcgaacgatgtgtcctgactgtaacatttgagagaaaaacttgaccaagaatggaactaggataaaggccattgtaacatgggaaaaaaatcaggagggaggtatgaattaggggggaaaaaagggaaatcagctttgttttgctccatagaaaagaaaaagagagaaagagagagagagaaagaaacaagtcttatctttgtgagtgcatgactgagaatttaaaatacacygagtcacaaggttttgcctaaaaaaaagatagagaggaaatgtgctgggactgtacttcagcatcctctgtttttcctctgaatagtttaaataaaatcataatgtttactacaaactctgtggacacgctcacacagagtccaggacggcaataaatta

SEQ ID NO: 692621 - DNA, 404 bp, Homo sapiens
tgcccagaatttatagttattatctgtgaaatgaaagagaagagagaaaaaacagtaacaaataattaggtaattattgctaagtgtcattgatatcctaggaaaatatattaagaagctgtgggtgatgaaccgacaattaaaagccgtgtgtgaaattcccagggccccccagggaacttacaaaggttctcacatgctgtggcaagagggcgccaaaagctgaagaccaggctcaagacttgacattaccgtggctgagctcctgagcggcttaaatactccaggtctaaggtatctaggtcagggtatgtgggaccctgatacataagattcccccaaatatttagaactatcagattctgctgaaccttcttagcctmcggaagtacccacctcgccgg

SEQ ID NO: 692622 - DNA, 404 bp, Homo sapiens
tgcccagaatttatagttattatctgtgaaatgaaagagaagagagaaaaaacagtaacaaataattaggtaattattgctaagtgtcattgatatcctaggaaaatatattaagaagctgtgggtgatgaaccgacaattaaaagccgtgtgtgaaattcccagggccccccagggaacttacaaaggttctcacatgctgtggcaagagggcgccaaaagctgaagaccaggctcaagacttgacattaccgtggctgagctcctgagcggcttaaatactccaggtctaaggtatctaggtcagggtatgtgggaccctgatacataagattcccccaaatatttagaactatcagattctgctgaaccttcttagcctccrgaagtacccacctcgccgg

SEQ ID NO: 692623 - DNA, 1448 bp, Homo sapiens
atggtgaaaccctgtctctactaaaatacaaaagatcagccaggcgtggtggtgcacgctgtcgtcccagctactggggaggctraggcacgagaattgcttgaacctaggaggcggaggttgctgtgaccgaggctgtctccaaaaaaaaaaaacaaactcttgtgtgaagtccttatcatggacagaaatcactctgttttgtcttatttatctatcctcaggctaatctttccgcctaccatcctcttaggcagtagaaattgggtcttaatcttcctctcaatcttttcccctggcatccttctctaggctggaggcccttgcaccagcatggtttcaaagctgccccacctccttgtttcttgacagctttctctttgaactggcttcacactgccttggataagcactgctcccaaggcatggggtcctgggacttgaagcttctagttgaatttcccttgctatgacctcttccccatcagtctcctgggttttcactgcccttagtacctgcttctgactttcactctttttttttttttttaaagagatgagatagatagggtctcgctcttttgcccagactgaaatgcagtggcacaatcatagttcactgcatcctcttgccttagtctcctgagtagctgggactacagatccatgtcaccatgcccagctaatgttttttcattttggtagagacaggtctctctctctatgttgcccaggctggtcttgaactcctgggctcaagcgatcccaaagtgcttgccttggcttcccaaagtgcttggattagaggagtgagccatcgtgcctggctactcttctgatctcccggactcatctgatgctctcagcccctttagccccattctagcctcagctcaatctccctcatgtcctgagggatccttgccctgctgtacaacagcaaagccccatgagggggcatctatattgacagagcatggcgtgaggatctgagacagggaagtctgctgttctcttactgctgacggcaacgtcccactcacccatcacccctactgaaagcaaaagctacccgtgcacctccagctggaaatgacaccacccattaagagggcacacacactttcctcactttttacacacaactgatcctcattactgaactctaagcaactagacgccaggaaggatgcatgcccccagcccgccacagtaaggaacctgcaggcgtaggctctttcaataaacactgggtgaacgactaaaagaatgcgtaaatgaacgttacagagagagggaagatgtaatttctgctcaaatctacagggaatgctataatgaaagtcccagtatcgagtaatagccaagcctcaaaaccaagcttctaattcactatgaatctataaaattcttttgaatacctcctttaatttggtggccaaattatt

SEQ ID NO: 692624 - DNA, 1448 bp, Homo sapiens
atggtgaaaccctgtctctactaaaatacaaaagatcagccaggcgtggtggtgcacgctgtcgtcccagctactggggaggctgaggcacgagaattgcttgaacctaggaggcggaggttgctgtgaccgaggctgtctccaaaaaaaaaaaacaaactcttgtgtgaagtccttatcatggacagaaatcactctgttttgtcttatttatctatcctcaggctaatctttccgcctaccatcctcttaggcagtagaaattgggtcttaatcttcctctcaatcttttcccctggcatccttctctaggctggaggcccttgcaccagcatggtttcaaagctgccccacctccttgtttcttgacagctttctctttgaactggcttcacactgccttggataagcactgctcccaaggcatggggtcctgggacttgaagcttctagttgaatttcccttgctatgacctcttccccatcagtctcctgggttttcactgcccttagtacctgcttctgactttcactctttttttttttttttaaagagatgagatagatagggtctcgctcttttgcccagactgaaatgcagtggcacaatcatagttcactgcatcctcttgccttagtctcctgagtagctgggactacagatccatgtcaccatgcccagctaatgttttttcattttggtagagacaggtctctctctctatgttgcccaggctggtcttgaactcctgggctcaagcgatcccaaagtgcttgccttggcttcccaaagtgcttggattagaggagtgagccatcgtgcctggctactcttctgatctcccggactcatctgatgctctcagcccctttagccccattctagcctcagctcaatctccctcatgtcctgagggatccttgccctgctgtacaacagcaaagccccatgagggggcatctatattgacagagcatggcgtgaggatctgagacagggaagtctgctgttctcttactgctgacggcaacgtcccactcacccatcacccctactgaaagcraaagctacccgtgcacctccagctggaaatgacaccacccattaagagggcacacacactttcctcactttttacacacaactgatcctcattactgaactctaagcaactagacgccaggaaggatgcatgcccccagcccgccacagtaaggaacctgcaggcgtaggctctttcaataaacactgggtgaacgactaaaagaatgcgtaaatgaacgttacagagagagggaagatgtaatttctgctcaaatctacagggaatgctataatgaaagtcccagtatcgagtaatagccaagcctcaaaaccaagcttctaattcactatgaatctataaaattcttttgaatacctcctttaatttggtggccaaattatt

SEQ ID NO: 692625 - DNA, 1448 bp, Homo sapiens
atggtgaaaccctgtctctactaaaatacaaaagatcagccaggcgtggtggtgcacgctgtcgtcccagctactggggaggctgaggcacgagaattgcttgaacctaggaggcggaggttgctgtgaccgaggctgtctccaaaaaaaaaaaacaaactcttgtgtgaagtccttatcatggacagaaatcactctgttttgtcttatttatctatcctcaggctaatctttccgcctaccatcctcttaggcagtagaaattgggtcttaatcttcctctcaatcttttcccctggcatccttctctaggctggaggcccttgcaccagcatggtttcaaagctgccccacctccttgtttcttgacagctttctctttgaactggcttcacactgccttggataagcactgctcccaaggcatggggtcctgggacttgaagcttctagttgaatttcccttgctatgacctcttccccatcagtctcctgggttttcactgcccttagtacctgcttctgactttcactctttttttttttttttaaagagatgagatagatagggtctcgctcttttgcccagactgaaatgcagtggcacaatcatagttcactgcatcctcttgccttagtctcctgagtagctgggactacagatccatgtcaccatgcccagctaatgttttttcattttggtagagacaggtctctctctctatgttgcccaggctggtcttgaactcctgggctcaagcgatcccaaagtgcttgccttggcttcccaaagtgcttggattagaggagtgagccatcgtgcctggctactcttctgatctcccggactcatctgatgctctcagcccctttagccccattctagcctcagctcaatctccctcatgtcctgagggatccttgccctgctgtacaacagcaaagccccatgagggggcatctatattgacagagcatggcgtgaggatctgagacagggaagtctgctgttctcttactgctgacggcaacgtcccactcacccatcacccctactgaaagcaaaagctacccgtgcacctccagctggaaatgacaccacccattaagagggcacacacactttcctcactttttacacacaactgatcctcattactgaactctaagcaactagacgccaggaaggatgcatgcccccagcccgccacagtaaggaacctgcaggcgtaggctctttcaataaacactgggtgaacgactaaaagaatgcrtaaatgaacgttacagagagagggaagatgtaatttctgctcaaatctacagggaatgctataatgaaagtcccagtatcgagtaatagccaagcctcaaaaccaagcttctaattcactatgaatctataaaattcttttgaatacctcctttaatttggtggccaaattatt

SEQ ID NO: 692626 - DNA, 777 bp, Homo sapiens
cttgtcgatttgttacagtattctataatttattcttagcgtttttttcattccttgttcgaagaggaatggctacttatggcttataagaatggccatctactgcttataatcagtcaacagagagcaacacatacatatcacctagaaaaattgagctaatcaccagastaactccaaagagaaatgattaagagtggctgcctcaggaatatgaaaggttagggcaaagtatggctcatttttattataaaacccattggattattggatttttaaaaaatcatgtatatgcattactttagatttataaacttctcaattaggataaagagcagtctttagtacttgacaaatctaggatataaattttattacctgtaagaaattaacaccatataaacctcaattttctcatgagtaaactaagaatgataatgcccacctcatagctgtgttctgtgtaaaatctctagccaattttagcttatgtcctccttccttctccttttagtaactttatctttttccttctgttacattactattaaaaatattaaatcaaggaatgaatcaacacatttattcatgacctactatgtaatagtcaataatgataaatactgtgtgcaatttcccatcaaggatattacagtttggagataaatgacattgccaccttgtagattaaatccagcactttgaaccaacagtaagagaattgccacaagaaagattattatgcctatattttttaatcactacaacttacagaaa

SEQ ID NO: 692627 - DNA, 777 bp, Homo sapiens
cttgtcgatttgttacagtattctataatttattcttagcgtttttttcattccttgttcgaagaggaatggctacttatggcttataagaatggccatctactgcttataatcagtcaacagagagcaacacatacatatcacctagaaaaattgagctaatcaccagagtaactccaaagagaaatgattaagagtggctgcctcaggaatatgaaaggttagggcaaagtatggctcatttttattataaaacccattggattattggatttttaaaaaatcatgtatatgcattactttagatttataaacttctcaattaggataaagagcagtctttagtacttgacaaatctaggatataaattttattacctgtaagaaattaacaccatataaacctcaattttctcatgagtaaactaagaatgataatgcccacctcatagctgtgttctgtgtaaaatctctagccaattttagcttatgtcctccttccttctccttttagtaactttatctttttccttctgttacattactrttaaaaatattaaatcaaggaatgaatcaacacatttattcatgacctactatgtaatagtcaataatgataaatactgtgtgcaatttcccatcaaggatattacagtttggagataaatgacattgccaccttgtagattaaatccagcactttgaaccaacagtaagagaattgccacaagaaagattattatgcctatattttttaatcactacaacttacagaaa

SEQ ID NO: 692628 - DNA, 831 bp, Homo sapiens
tctcttcatgatgtgaacattgctgcatgttcttttccactatgatagcttttacaaggtacaccatgtcattggccttttctttcagtgagaagcttgccttgttcacaaaaggctgacagctccactccaactagtgagattttaaaggagcttgtgacagcgtggctaagccaggcttcacaatgggtcgtctttgcagtgttaacatgaaaagtcagagagtgaaaggaagattgaatagagtcccagataaaaggaaaataaagacctaaggacctgtcacataacacttattttctgagtaaaagtaactaagatataataaagaataatagctttgaagtcagaaagacctagattcacatattttaccctctgtcagtttcagtatcttcaccttaaaaagggggggratcaaatatcagcataatagagctattaggaagataaagtgaaaaaatatgtgtaaacagttcaattctgcatctgtctcccagaaggactaacatttatagaaacttcttatgtgccaagcactgctctagacacaggcaaaaatccctgccctataggacattcattctagtgggagacattgagatcaattcaaaagacaattaaaatgtatagtatattagatgatgagagtgggaaggggataaaaaatgcaaggaagagggacaggaaggatcatatgtagaataatagataggatggctcgaagaatcagcacaatttcatgaaaaggtgacattccagtaaagtgaatgagtgagccaggtagactcttgaggacaagcattctaaagataagaaaaagcaaatgca

SEQ ID NO: 692629 - DNA, 831 bp, Homo sapiens
tctcttcatgatgtgaacattgctgcatgttcttttccactatgatagcttttacaaggtacaccatgtcattggccttttctttcagtgagaagcttgccttgttcacaaaaggctgacagctccactccaactagtgagattttaaaggagcttgtgacagcgtggctaagccaggcttcacaatgggtcgtctttgcagtgttaacatgaaaagtcagagagtgaaaggaagattgaatagagtcccagataaaaggaaaataaagacctaaggacctgtcacataacacttattttctgagtaaaagtaactaagatataataaagaataatagctttgaagtcagaaagacctagattcacatattttaccctctgtcagtttcagtatcttcaccttaaaaaggggggggwtcaaatatcagcataatagagctattaggaagataaagtgaaaaaatatgtgtaaacagttcaattctgcatctgtctcccagaaggactaacatttatagaaacttcttatgtgccaagcactgctctagacacaggcaaaaatccctgccctataggacattcattctagtgggagacattgagatcaattcaaaagacaattaaaatgtatagtatattagatgatgagagtgggaaggggataaaaaatgcaaggaagagggacaggaaggatcatatgtagaataatagataggatggctcgaagaatcagcacaatttcatgaaaaggtgacattccagtaaagtgaatgagtgagccaggtagactcttgaggacaagcattctaaagataagaaaaagcaaatgca

SEQ ID NO: 692630 - DNA, 831 bp, Homo sapiens
tctcttcatgatgtgaacattgctgcatgttcttttccactatgatagcttttacaaggtacaccatgtcattggccttttctttcagtgagaagcttgccttgttcacaaaaggctgacagctccactccaactagtgagattttaaaggagcttgtgacagcgtggctaagccaggcttcacaatgggtcgtctttgcagtgttaacatgaaaagtcagagagtgaaaggaagattgaatagagtcccagataaaaggaaaataaagacctaaggacctgtcacataacacttattttctgagtaaaagtaactaagatataataaagaataatagctttgaagtcagaaagacctagattcacatattttaccctctgtcagtttcagtatcttcaccttaaaaaggggggggawcaaatatcagcataatagagctattaggaagataaagtgaaaaaatatgtgtaaacagttcaattctgcatctgtctcccagaaggactaacatttatagaaacttcttatgtgccaagcactgctctagacacaggcaaaaatccctgccctataggacattcattctagtgggagacattgagatcaattcaaaagacaattaaaatgtatagtatattagatgatgagagtgggaaggggataaaaaatgcaaggaagagggacaggaaggatcatatgtagaataatagataggatggctcgaagaatcagcacaatttcatgaaaaggtgacattccagtaaagtgaatgagtgagccaggtagactcttgaggacaagcattctaaagataagaaaaagcaaatgca

SEQ ID NO: 692631 - DNA, 831 bp, Homo sapiens
tctcttcatgatgtgaacattgctgcatgttcttttccactatgatagcttttacaaggtacaccatgtcattggccttttctttcagtgagaagcttgccttgttcacaaaaggctgacagctccactccaactagtgagattttaaaggagcttgtgacagcgtggctaagccaggcttcacaatgggtcgtctttgcagtgttaacatgaaaagtcagagagtgaaaggaagattgaatagagtcccagataaaaggaaaataaagacctaaggacctgtcacataacacttattttctgagtaaaagtaactaagatataataaagaataatagctttgaagtcagaaagacctagattcacatattttaccctctgtcagtttcagtatcttcaccttaaaaaggggggggatcaaatatcagcataatagagctattaggaagataaagtgaaaaaatatgtgtaaacasttcaattctgcatctgtctcccagaaggactaacatttatagaaacttcttatgtgccaagcactgctctagacacaggcaaaaatccctgccctataggacattcattctagtgggagacattgagatcaattcaaaagacaattaaaatgtatagtatattagatgatgagagtgggaaggggataaaaaatgcaaggaagagggacaggaaggatcatatgtagaataatagataggatggctcgaagaatcagcacaatttcatgaaaaggtgacattccagtaaagtgaatgagtgagccaggtagactcttgaggacaagcattctaaagataagaaaaagcaaatgca

SEQ ID NO: 692632 - DNA, 831 bp, Homo sapiens
tctcttcatgatgtgaacattgctgcatgttcttttccactatgatagcttttacaaggtacaccatgtcattggccttttctttcagtgagaagcttgccttgttcacaaaaggctgacagctccactccaactagtgagattttaaaggagcttgtgacagcgtggctaagccaggcttcacaatgggtcgtctttgcagtgttaacatgaaaagtcagagagtgaaaggaagattgaatagagtcccagataaaaggaaaataaagacctaaggacctgtcacataacacttattttctgagtaaaagtaactaagatataataaagaataatagctttgaagtcagaaagacctagattcacatattttaccctctgtcagtttcagtatcttcaccttaaaaaggggggggatcaaatatcagcataatagagctattaggaagataaagtgaaaaaatatgtgtaaacagttcaattctgcatctgtctcccagaaggactaacatttatagaaacttcttatgtgccaagcactgctctagacacaggcaaaaatccctgccctataggacattcattctagtgggagacattgagatcaattcaaaagacaattaaaatgtatagtatattagatgatgagagtgggaaggggakaaaaaatgcaaggaagagggacaggaaggatcatatgtagaataatagataggatggctcgaagaatcagcacaatttcatgaaaaggtgacattccagtaaagtgaatgagtgagccaggtagactcttgaggacaagcattctaaagataagaaaaagcaaatgca

SEQ ID NO: 692633 - DNA, 347 bp, Homo sapiens
tttaaaatctattgattaattacttgactcaagagatgcttctctggatccattcayaataccttagttgttgcttagcaactagttttccctttttcttggctttgcgaagctacatgtatggaaggagaggatgaaattatggaatgagattaagtaaatgtctttaagtttcctagatatcaagtgatagctagaaagtaataataaaatgacatgaatctttgaatcttctttcctaggtgaacatgtcatagatgggaactacacataaataataataaaatctttcctataagatagatcttaattttactctacttatgtcttttattcagttttgtttt

SEQ ID NO: 692634 - DNA, 347 bp, Homo sapiens
tttaaaatctattgattaattacttgactcaagagatgcttctctggatccattcataataccttagttgttgcttagcaactagttttccctttttcttggctttgcgaagctacaygtatggaaggagaggatgaaattatggaatgagattaagtaaatgtctttaagtttcctagatatcaagtgatagctagaaagtaataataaaatgacatgaatctttgaatcttctttcctaggtgaacatgtcatagatgggaactacacataaataataataaaatctttcctataagatagatcttaattttactctacttatgtcttttattcagttttgtttt

SEQ ID NO: 692635 - DNA, 486 bp, Homo sapiens
tgtgaggcagctgaaaagaagactagggaatgctcaaatccatctacccaagctgggggatgtgttgggtttatgaggatagtgtaatgaagtatgatctgactggatcttgcaatgaggtgatgccagaatgcatgatctgactggatcctgaccttcttgccttgtactttttcttaattcagtccctgcttctcagtcctagcacttaggttctgcacatggttcatctgggcatgcttagctcatgtsatcttcaacttggaggtccctggcgaccaaaaaaacaactttcaactttgctacatgacagttaaaccagattggtatgatgcagttataacatagacaagttctttcaaagtagctgtaattaaagtccaaaattgtgagaattcaatatgacaataaaatgtatctgaattaggagctttctgtatgttcaacttaaatttgtgctggtaaagagattgatacaattatata

SEQ ID NO: 692636 - DNA, 589 bp, Homo sapiens
ggcatacaaaatatgaggctcaaaggagaggccaaatggttgaagtttataccttatcctgaggttatagaaagaatggctgcctactgcgtagtgcaaggggggtggagtcccaggtaataggacagtgagggaaggaaagcatggcaggtagggctgtcttgttatgcctataaaaaatctctcaagtaaactcagagctgccctcagaaagtatagatggtggcctgtgttaaaatgtctctgttagaacttcaaaatggttagattttagtctctttttttctttgagttaatcttagttttgggtaaggcagataaggggggcttcagagaaagcctgtttgcatctgctgtttactttactaatgtagattttctatacagatgtaaaccctcccacaaaaagacagcttttcaaagctgttcctgtagtctgtagcccctctgaatagcatcttaaaatatgccaaagaaatatattttggggtaaaatattctggtttccttcaaagtctcagtaagaaatatgcacaatgtgttttattgtgcaaatgcaacacgatttaatactttccttaactyttat

SEQ ID NO: 692637 - DNA, 616 bp, Homo sapiens
gaatataattttgaataaagaagttttcaatatctagaaattaagaaattgtctgtgtcccgttactaaggtaaacaatcggtcttccagaattaatatttatgcttatttatgctgtcaaagataaggctgaatatacagttagcttataatcaccacatatattctgagttgacttttgtgtatatgtggttatattattgcttagctaagtgaaaaaaaaaawgattgttcttttaaaatcataaatgaaagccaagtaaatgagtgtacctaaaggatgttggtggaatcagcagtaatgatttgttgttaaagctttcaaaaataaatgcaaaagaataaaggtatttcatatgaaatgaatatatatgataaatagtcttggaaaaatgcaataaaatttaccagtgcatggaacaaaaataagtggtttgcttatagttcatgtttatatttttttcctaagccatatttagtatataaatacactaatataaataacacaacaccatatgtagggtagaggacttaaaaatcattaataataaaatgtacacaatgtttttactaaatgtgaatgccttcaaagtgttaatagattctacagttgaat

SEQ ID NO: 692638 - DNA, 1157 bp, Homo sapiens
attttatttagaacttttcatctgtgttcatgagggatatgcagtttttttttcctgaaatgtctttatcagctggtctacaattaccttagcttaggtgtcttgggtaactcctatctgcttaactcatcttcatcctccatctggatgaatatgatgggtatgtttcaaggtcatggcaaaaggaaagagctagagtggaatcttacaaatgcttttgcaaacctctcctttgtggcatcccagtgaccgaatcaactcacataatggaacacaaaattagagggaaagggcactacgaggtgaaatgtgagggcttgaattcaggaaaagttgaagaattgagaccattgatggaatgagtctaccttattctcaggcagggaagcatttttrtacatgagatagttcacaagaaataactactatatagtcagagactcaagacttcagcaattgtataaaaatacatttgtaaatacctaaagaccttgaagagaagagtctgaaccacatctcacccaggttacgctattcactgctaagacatgactctaccactcccttggccaattttgaaaattgtttcaaactatttatttgaggtggaagtactttctgtcgctccgaatgggcacagtcatggagtaatgtgaccagggtccactggatgggtcatgacactcagggcagccatcccaaaatttccgaattccatctttatggggaaaacatctcttgattgctaatattgttttctaaagcaggttaagttaataactgtgagttaattatagcatgtctaaattgagcccattttcttttagtagatttggtgttgactaatataaatttggcaacacttactattagctggggtgtttttaaaaagccaaaaacttttagcatgtaaatcaaaacaaagacattactaattttttcttgggtgatctctagacttttggtttctatcagttattaaactgttatctccttggggcattgacaaagtactaataagtcattggttcctttaccatttttaatcagagtatcccaaaaggaggtaattatgtgttttaataaattccgcaaatcataaaccacccaaaaagcaaatctaccatccatattaatatttagtctttcatctttgc

SEQ ID NO: 692639 - DNA, 894 bp, Homo sapiens
accgccattaaactaaaactgggtgactaggatacctagcatggcaatatttacattaaagcttttttcattacattttaatcagcgcctagaatctcattaaatattgtttataaagtcttggcagccaccagttgctattctataaaaccatttgcacatagtgtacatattttttacttaatgaaataggtttttgatttgtaacatctattacgtcgaaggaattaatgttaataataatggccaagatttactgtatttcacacatagtggcaagtaccacacttttacttgctttatcttatttatccttcttcacaagcttgtgagaagattgaggaatggggaggctcagagactagcccaatattatataactaataggtagtaaaaggagactgaatggactgaataaatttatattgcttgasagctctttaaccataggttaaaagtataaggttgagcatggttatgattctgtatgaagcaaggtagttgagtacatgtacttcaaattatgggtataaacacattgtatttctatagtgcctttcacaggactttccactgcattactttatttatcctaacacagtcttgtgaggtgaataggtgtagtggtgttattatcttctagccacggagaggataaacttctttctgaatctgcagagcttggactagagtaagtctaatttcatgagcaggacactttctatgaaatcatattgcctctttctgtaggccaatccactttttcactaccgatgatacttagtgaacactgattcagaatacagcaaactatgaatgtaccaatatgttatttaaaccccaaatccccaattatctcataagcattcaccaaatttgtaaaaacttgtttca

SEQ ID NO: 692640 - DNA, 1139 bp, Homo sapiens
tattaatgagacatgtgatgtataaacaagcatgtacagctactgtgcatgtgcacccagaggaccacccaaaacatgcttcctagcaacctcttcccacccccttatgaataatcatgtaagcctccataaagggagtttccttagtaatggtcaatgctgtctcatcctcatgagcagtcccctctgaattgcctcttagggtatactgtctattctgaacctaactttcagagtattctttctcctttgcaataaattgctctatgcaatatctcccttgctgtgtgtcttttgttgaaattcttttaaactaagaagacaagaacctaggattcacaacagccatcaacagtaagtcagggaccatctgtagtgtgtagttggatggacaggcaaggttatcattgattttgtcaaccaattctttcaagagttaaaaacaacagttcttgtcttactaattgagtctttacaaaaacagaaatgcagctctagaggtaatgcaaagcccacctatgtttcttaccaatctcaaaattcatctcaaaatgcttgtagataatgtagtagaaggtcaggacattgcaaaagggactgtcctatactaaaaaaagaaacttaaatactaattactctaggttctgataataggcaaatatgctcctgaactcctccttagagctttagaaagctaacatcatttctctgtcattctgtggtcagaatgagttgggacagagcaagtaatcagaatgagtcagggaggagcaggtaatcggaatgagtcagggtggagcaggtaaccgaaaaatgttgctttatgaggaaataaagtttaaaagtagaaggcaaagaattgaacatactgacatattgattctttgaagagaaatttagaactcatatctaacattccctcctcttgcatcttccttacagttctttctcttcaaacttctttaacatgtcttggcttagttgttctgcttgattttccaaaagaagaagcttctctggataaggtggaggatagctaagkgaggttttagtaagtgccattcttttgagcctctgcaccaacccacagatgcatggtgtgacatagcacccgacaagaataagtacacccattaaga

SEQ ID NO: 692641 - DNA, 648 bp, Homo sapiens
tataaagaaaataatggaagatagattattttagtaaggtctggtcatgcacttcatcttggttttgactctgtatccctaggtatgagtgggtggggatgagaggaagaaacttcaccctgaaacatatgctctgcttttcggccgaagagagcagaaaactcttcctggcaattcttttttttttttttttttttgagatggagtctcactctgtcacccaggctgtagtacagtagggcaatctcagctcactgcaacctctgtctcttgggttcaagtgattctcctgcctcagcctcccaagtagctggaattacaggcaccagccaccacgcccagctaatttttgtattttttagtagaggcgggcttcaccatgttggtcaggctggtctcaaactcctgacctcaagcaatccatccgcctcagcctcccaaagtgctagagttayaggtgtgagccaccgtgcctcaccttcttcctgcatttcttgattgtcaattgaccttaagatcatttggaggtagataaatatcacatctacacagggtacatacatatacataaacatacagacagatgcacgtagagatcttataaaattttagccatgagtgaggtataaatacagaaacacaaaattc

SEQ ID NO: 692642 - DNA, 596 bp, Homo sapiens
cacaatactgggtttaactcttgtttttcaggataatgagagtgcaagctatgctctagaattatgttgtttaatatgaaagccacttaccatgactatttaaatttatattaaataaaattaaacaaattaaaaactcaatttatcagtcacactagccacattttaagtgctctgtaactttatgctatcatatttaacaacatataacttttttttttttttgagacggagtcttgctctgtcgcccaggctggagtgcagtggcacgatctcgactcactgcaacctctgcctcccaggttgaagtgattttcctgcctcgagtagctgggactacaggcgccagccaccacgtccagctaattttttgtgtttttagtagagatgcggtttcaccstgttagccaggatggtctcaatctcctgacctcgtgatctgccgcctcggcctcccaaagtgctgggattacaagaacatttttatcagtgtaaaaagttctattggatactcctactctagatctaggttattatttctactaaactattgataaatatttcaggagactgttgagaaataatagttgctcaat

SEQ ID NO: 692643 - DNA, 604 bp, Homo sapiens
tcactcaccaattttaaagtctactgggagcaaaagaacaaaaactgacagctgtgaaactgacaactatgacaactatggtaagaaagttgacagatgtatatgtgaaggttcctgagggtaaastaaggagttattaatcccaatgcagaagactggagaagctacaaagcatcatgagtaggggtctttccagtgggtaatgggctaaagagcattctaggtgaagggaaaagtgtgagcaaataaaaagaggtatgaaagaaatacagggaagagtccttagtatcatgacacttgatttcaaatcccaactctaccctcttaaataagcaaccacatgcaatttactcagcctctcagtgcctccatttccttacctacaaaacagggtaaatattcatctttttctcaaaggtggctaaaaagattaaatgaggaagtatgtgtgagagcccttattggagcttggcacatagtaggccatgaaaagcaatttgaatgaatgaggcgtgtgtagtagcagaaaatagactgattagagtgaatttggccccaagaagagtttgagaatcgatacggatttcttaatgcctaggcaaag

SEQ ID NO: 692644 - DNA, 604 bp, Homo sapiens
tcactcaccaattttaaagtctactgggagcaaaagaacaaaaactgacagctgtgaaactgacaactatgacaactatggtaagaaagttgacagatgtatatgtgaaggttcctgagggtaaactaaggagttattaatcccaatgcagaagactggagaagctacaaagcatcatgagtaggggtctttccagtgggtaaygggctaaagagcattctaggtgaagggaaaagtgtgagcaaataaaaagaggtatgaaagaaatacagggaagagtccttagtatcatgacacttgatttcaaatcccaactctaccctcttaaataagcaaccacatgcaatttactcagcctctcagtgcctccatttccttacctacaaaacagggtaaatattcatctttttctcaaaggtggctaaaaagattaaatgaggaagtatgtgtgagagcccttattggagcttggcacatagtaggccatgaaaagcaatttgaatgaatgaggcgtgtgtagtagcagaaaatagactgattagagtgaatttggccccaagaagagtttgagaatcgatacggatttcttaatgcctaggcaaag

SEQ ID NO: 692645 - DNA, 604 bp, Homo sapiens
tcactcaccaattttaaagtctactgggagcaaaagaacaaaaactgacagctgtgaaactgacaactatgacaactatggtaagaaagttgacagatgtatatgtgaaggttcctgagggtaaactaaggagttattaatcccaatgcagaagactggagaagctacaaagcatcatgagtaggggtctttccagtgggtaatgggctaaagagcattctaggtgaagggaaaagtgtgagcaaataaaaagaggtatgaaagaaatacagggaagagtccttagtatcatgacacttgatttcaaatcccaactctaccctcttaaataagcaaccacatgcaatttactcagcctctcagtgcctccatttccttacctacaaaacagggtaaatattcatctttttctcaaagrtggctaaaaagattaaatgaggaagtatgtgtgagagcccttattggagcttggcacatagtaggccatgaaaagcaatttgaatgaatgaggcgtgtgtagtagcagaaaatagactgattagagtgaatttggccccaagaagagtttgagaatcgatacggatttcttaatgcctaggcaaag

SEQ ID NO: 692646 - DNA, 640 bp, Homo sapiens
tgctcagccactttataactctgtggccttagaaagccacttaatcttggtcaactataacttagggaaaataacacctcacggaggtgtttgaggattaaacgcgggcatatatggtacctgaactatagtagtaatgattatcctgttgagatatgacatgtttgggccacaaattggaacccaaatcaacaagtgctgacttaatgcccccttgcccaccctgggctccctttaactgtgattattctatgttttccaggctagagatcatcttctatgagagagaagcctgaattagaataggagctgaccagttctgcctttctccatcttttgtgaacccatatgtttagtgacccttgtgagtcaggcagcatgagtattcttcccattggttttgagtctaagaaaagtgaatttgactatccttggtgtttttcacaagtcttggcccattcagtgattttatgtccttgaatctctccttccatgccagtctttgtgttgtcctcggttatgaccatcacccttaacatcttgtacctgccctttggttccttgagggcatgctacaaatattcacyacactttccctagaccagagttttttcaaatggtgggtaacaaagtcaattta

SEQ ID NO: 692647 - DNA, 1184 bp, Homo sapiens
atcataaatgatggctggaactactccatttctctggaggtgaaatctacattctcttgtctgaggtagatatgtttgcttgggttctgcttaaggagatgggggagagcagtgtgtttcagggcctggaaaatgtgttctctatataggcttttggttaatctctgttttcagtcttgmctgtcagtcccactctcgggggtacctggtgtctgagtctagaacctttccaggttgctgtgggacaaattagcttccttgttatcggtgtccccctgacctccactttgctttgctttgctccattaattaaccattttccatttactgtcattttctaatggaggtgaattctcttctgtgggtaaccccatttcttttttttgtaattgtgtgtttatatattgtttattcttcactgtatttctagtggagcctcaggacaaagagcagatggtggaaatatgtgttcagtgttcagtttttttctgtaagacatctgcaacttgtgtttttcactgaatatcacgtggacttaatgcatatagagctaccttgtttttcatgattgtgcctacaattctatggagaaatataatttgtgaattacctgatgaaattttcctaatttcgaatcatccttgcattcctataataaacactgttagaatggctatggtaatattttatttttgcatttttatttctgtattaaataagattatagttttgtttgtttcctttcagtttcgtatttcatttcagtatcaacggtgtgcagggctaactcgggaagctttacatctttttcctaagacctaggatgtagatctagtttacacagtagttttcaactgcaggaatattttgcctcccatgggacatttggaaatatctggagacatttttgtggtcacaactggtcacggtcgggaggtcttattggcattccgtgggtagaggggatgttactaaatgtcccacaacacaccaggagaaccctcacaaagaattgtctggcccaagatatcaatattgctgaggctgacaaaccctggtttaaataaatgtccaatttggaggatgagtctgtctttttccttcttctgcgtattggtctccagattttccatttcttcagttagttttcgtaactgtagattcttaaaagaaatgaacacttc

SEQ ID NO: 692648 - DNA, 1184 bp, Homo sapiens
atcataaatgatggctggaactactccatttctctggaggtgaaatctacattctcttgtctgaggtagatatgtttgcttgggttctgcttaaggagatgggggagagcagtgtgtttcagggcctggaaaatgtgttctctatataggcttttggttaatctctgttttcagtcttgcctgtcagtcccactctcgggggtacctggtgtctgagtctagaacctttccaggttgctgtgggacaaattagcttccttgttatcggtgtccccctgacctccactttgctttgctttgctccattaattaaccattttccatttactgtcattttctaatggaggtgaattctcttctgtgggtaaccccatttcttttttttgtaattgtgtgtttatatattgtttattcttcactgtatttctagtggagcctcaggacaaagagcagatggtggaaatatgtgttcagtgttcagtttttttctgtaagacatctgcaacttgtgtttttcactgaatatcacgtggacttaatgcatatagagctaccttgtttttcatgattgtgcctacaattctatggagaaatataatttgtgaattacctgatgaaattttcctaatttcgaatcatccttgcattcctataataaacactgttagaatggctatggtaatattttatttttgcatttttatttctgtattaaataagattatagttttgtttgtttcctttcagtttcgtatttcatttcagtatcaacggtgtgcagggctaactcgggaagctttacatctttttcctaagacctaggatgtagatctagtttacacagtagttttcaactgcaggaatattttgcctcccatgggacatttggaaatatctggagacatttttgtggtcacaactggtcacggtcgggaggtcttattggcattccgtgggtagaggggatgttactaaatgtcccacaacacaccaggagaaccctcacaaagaattgtctggcccaagatatcaatattgctgaggctgacaaaccctggtttaaataaatgtccaatttggaggatgagtctgtctttttccttcttctgcgtattggtctmcagattttccatttcttcagttagttttcgtaactgtagattcttaaaagaaatgaacacttc

SEQ ID NO: 692649 - DNA, 673 bp, Homo sapiens
ccccataccaggaagagtttaagaacccagggtcttagtccaaatttggggcaggctgggtgcagtggcttatgcctataatcccaccactttgggagaccaaggtggaaagatcacttgagcctaggagttcaagactggcctgagccacacaatgagaccccatctctattttagaaggaaaaaaaaaaacaaattaacaamtttggggcagccatctctttccacaccccagtgggaagaggactagggcttggtcagtctgctgctgtcattgctgctcattgccacaaggtgtcactgttgaacacctatgtggtgcagtctggtgctgatggctgctgagctgtgcaggtagtgatgccacatccctacagagatgcaccataccaggactccaagatcatggttcttagtgttctggttctgcagttcccatactctgccatcacctattctagcatctgggagcaccataccagagccatttcttgtgtcaatgtcatggtgacagaactatgtccttcatctctccttgagatattcctccaccacaggtcaggcagctttttttttttttttttttttccagaacacagagcatctgcctgggctccctgtccctgaacagttagcctggcttccttcagtgacctcgagaaactttgccaaa

SEQ ID NO: 692650 - DNA, 673 bp, Homo sapiens
ccccataccaggaagagtttaagaacccagggtcttagtccaaatttggggcaggctgggtgcagtggcttatgcctataatcccaccactttgggagaccaaggtggaaagatcacttgagcctaggagttcaagactggcctgagccacacaatgagaccccatctctattttagaaggaaaaaaaaaaacaaattaacaaatttggggcagccatctctttccacaccccrgtgggaagaggactagggcttggtcagtctgctgctgtcattgctgctcattgccacaaggtgtcactgttgaacacctatgtggtgcagtctggtgctgatggctgctgagctgtgcaggtagtgatgccacatccctacagagatgcaccataccaggactccaagatcatggttcttagtgttctggttctgcagttcccatactctgccatcacctattctagcatctgggagcaccataccagagccatttcttgtgtcaatgtcatggtgacagaactatgtccttcatctctccttgagatattcctccaccacaggtcaggcagctttttttttttttttttttttccagaacacagagcatctgcctgggctccctgtccctgaacagttagcctggcttccttcagtgacctcgagaaactttgccaaa

SEQ ID NO: 692651 - DNA, 673 bp, Homo sapiens
ccccataccaggaagagtttaagaacccagggtcttagtccaaatttggggcaggctgggtgcagtggcttatgcctataatcccaccactttgggagaccaaggtggaaagatcacttgagcctaggagttcaagactggcctgagccacacaatgagaccccatctctattttagaaggaaaaaaaaaaacaaattaacaaatttggggcagccatctctttccacaccccagtgggaagaggactagggcttggtcagtctgctgctgtcattgctgctcattgccacaaggtgtcactgttgaacacctatgtggtgcagtctggtgctgatggctgytgagctgtgcaggtagtgatgccacatccctacagagatgcaccataccaggactccaagatcatggttcttagtgttctggttctgcagttcccatactctgccatcacctattctagcatctgggagcaccataccagagccatttcttgtgtcaatgtcatggtgacagaactatgtccttcatctctccttgagatattcctccaccacaggtcaggcagctttttttttttttttttttttccagaacacagagcatctgcctgggctccctgtccctgaacagttagcctggcttccttcagtgacctcgagaaactttgccaaa

SEQ ID NO: 692652 - DNA, 673 bp, Homo sapiens
ccccataccaggaagagtttaagaacccagggtcttagtccaaatttggggcaggctgggtgcagtggcttatgcctataatcccaccactttgggagaccaaggtggaaagatcacttgagcctaggagttcaagactggcctgagccacacaatgagaccccatctctattttagaaggaaaaaaaaaaacaaattaacaaatttggggcagccatctctttccacaccccagtgggaagaggactagggcttggtcagtctgctgctgtcattgctgctcattgccacaaggtgtcactgttgaacacctatgtggtgcagtctggtgctgatggctgctgagctstgcaggtagtgatgccacatccctacagagatgcaccataccaggactccaagatcatggttcttagtgttctggttctgcagttcccatactctgccatcacctattctagcatctgggagcaccataccagagccatttcttgtgtcaatgtcatggtgacagaactatgtccttcatctctccttgagatattcctccaccacaggtcaggcagctttttttttttttttttttttccagaacacagagcatctgcctgggctccctgtccctgaacagttagcctggcttccttcagtgacctcgagaaactttgccaaa

SEQ ID NO: 692653 - DNA, 673 bp, Homo sapiens
ccccataccaggaagagtttaagaacccagggtcttagtccaaatttggggcaggctgggtgcagtggcttatgcctataatcccaccactttgggagaccaaggtggaaagatcacttgagcctaggagttcaagactggcctgagccacacaatgagaccccatctctattttagaaggaaaaaaaaaaacaaattaacaaatttggggcagccatctctttccacaccccagtgggaagaggactagggcttggtcagtctgctgctgtcattgctgctcattgccacaaggtgtcactgttgaacacctatgtggtgcagtctggtgctgatggctgctgagctgtgcaggtagtgatgccacatccctacagaratgcaccataccaggactccaagatcatggttcttagtgttctggttctgcagttcccatactctgccatcacctattctagcatctgggagcaccataccagagccatttcttgtgtcaatgtcatggtgacagaactatgtccttcatctctccttgagatattcctccaccacaggtcaggcagctttttttttttttttttttttccagaacacagagcatctgcctgggctccctgtccctgaacagttagcctggcttccttcagtgacctcgagaaactttgccaaa

SEQ ID NO: 692654 - DNA, 517 bp, Homo sapiens
ttttctttaagctattgtttcctgagaatttactatgtaccattcattcactatgctaagcacctgacatacattatctcatttaatcctcacagcagtctccttgttcaattttgtatcttaacaaaataaatacttgtccaatgtcaaaagctaaatggcacagctagggcctggagtctgcttgactccagggcattttaacaactattctgcagaacaccttagcctgacattcatatggctccacttgacttagtcctagaatactttttccaytttctttctccctcccctgtcttctgaatcaaactacttgctgtttcccatatgagccctgcaatttcccacctcctttgggaagtgtccacattcccaaaggaagtttattaatttaatagtcaactcttatagcacttattttgtgtactgcttatatttagtcattaaactttgacatactgcttatattttgtcattaaacttttgacatattgtttcttataccaagaaaaaa

SEQ ID NO: 692655 - DNA, 620 bp, Homo sapiens
aagttacttgtccaagtccacagctagaaaaggtggagatgatctttgaacccaagaagcccaacagccaagctaaacgcaaatttgcgattcacattagaactcatgcttttaaattcagaataagggtagttaggtttttttaaagcaatggaaatctatttaactcaaatttcacacaaatagtactggtttttytactgtgaactgagaatatctcttatctccatctttcccttcctggcccacaagcaaccctctagaactgtgcagtcccatatgatggccagtaggcatatatggctattgagcacctgcaatgtagctagtgtgactgagaagctgaattttagattatttttaataaatgtaaattctaattttaaaactagaacagtgtagaatatttttccattaaacacaactttattgttttggtagggctacatttttcacttcaactgttgaaaatctagtgtccaaattgagatataccataagtgtaaaatatacgccagatttggaagtctttgagaaaaaaagaatgtaaaatatttaatgtgtattatattgattatatgtttaaatgataatatttgaatatattggttaaataaaaa

SEQ ID NO: 692656 - DNA, 620 bp, Homo sapiens
aagttacttgtccaagtccacagctagaaaaggtggagatgatctttgaacccaagaagcccaacagccaagctaaacgcaaatttgcgattcacattagaactcatgcttttaaattcagaataagggtagttaggtttttttaaagcaatggaaatctatttaactcaaatttcacacaaatagtactggtttttctactgtgaactgagaatatctcttatctccatctttcccttcctggcccacaagcaaccctctagaactgtgcagtcccatatgatggccagtaggcatatatggctattgagcacctgcaatgtagctagtgtgactgagaagctgaattttagattatttttaataaatgtaaattytaattttaaaactagaacagtgtagaatatttttccattaaacacaactttattgttttggtagggctacatttttcacttcaactgttgaaaatctagtgtccaaattgagatataccataagtgtaaaatatacgccagatttggaagtctttgagaaaaaaagaatgtaaaatatttaatgtgtattatattgattatatgtttaaatgataatatttgaatatattggttaaataaaaa

SEQ ID NO: 692657 - DNA, 601 bp, Homo sapiens
tttgaaagggctcgaagaggttaaatctgatggttaatgtcaattttaattttgggataaatgttactttctcaaatgaacatcccataaattgaagaaaatgtataaactttggagtcattcttctctctctctctcagcctgcatttcatccagcagcatawcctgtaaactccaccttcaacagccacttcataccttctgtatgtccactgcttggtccaagtccaacctcatcattcatagactatggtactagcctacctgctttcactctttccagaccacaggctttttaatatagagtacagagtgttccttttgaaacatcagactggatcctttttatacttaggatcttccagtggcttctgaggtgactctgagtaaaagctgcttctatgggttaccacagagttcccacgtgtttggcacttgggctacctctccacctttatttcttgcaactttccgctagttctctcatcccctactgtttctcacatgaacgattatgcttacagcttttgcactgagtgattgctctactgaattgatttccttccagatattcacatgcttgtatctaccctttatttca

SEQ ID NO: 692658 - DNA, 996 bp, Homo sapiens
  misc_feature 625, 626, 627, 628, 629, 630, 631, 632, 633, 634, 635, 636,637, 638, 639, 640, 641, 642, 643, 644, 645, 646, 647, 648,649, 650, 651, 652, 653, 654, 655, 656, 657, 658, 659, 660,661, 662, 663, 664, 665, 666, 667, 668, 669, 670, 671: n = A,T,C or G
  misc_feature 672, 673, 674, 675, 676, 677, 678, 679, 680, 681, 682, 683,684, 685, 686, 687, 688, 689, 690, 691, 692, 693, 694, 695,696, 697, 698, 699, 700, 701, 702, 703, 704, 705, 706, 707,708, 709, 710, 711, 712, 713, 714, 715, 716, 717, 718: n = A,T,C or G
  misc_feature 719, 720, 721, 722, 723, 724: n = A,T,C or G
aagtctcaaacatggacatttccttggctatcaataggtctatactgtgataaacattatagatttaaaattcaacaaactgaacattgtcagtgtgattctggtcacataggccaaatccagccaaatgccaaaatgacactagatttagaatggaaaattttaagatcacatgtgtcaagcagtattaacctgacaamattccagaagaggaaagaatttggataaactcttaagagttcaccataatgggatgtgactgtgtgtttctagccaagatgatatgtgacagttctggcaataagaatatatcctacacagatgaatcattttggcaatgatgtaagcatagatacatcatgatttagaatgtttttaatcagtgttgtgcatactagacaatcccacttctgccaaaacctctgtccagatgagtcatatcagtttatttagagctgaaatcctaaaaggtctacagcgttataaatgttcatcgacattttttagttactctaatttggagaagagtttatttggtctatacccttatcgtgcataaaataataaccctttccaaatatattgatatcaagtagtgagttacttgaattgctacttgtgaatnnnnnnnnnnnnnnnnnnnnnnnnnnnnnnnnnnnnnnnnnnnnnnnnnnnnnnnnnnnnnnnnnnnnnnnnnnnnnnnnnnnnnnnnnnnnnnnnnnnntatagagcccaatggtcaaaacaaagccatagtggccataactaattggttgccctgtccatctgttatcgaaaatggcatgcccagcaagcctgatggcagggttcttgcgggccaaggattcaagaggttcactttcccccttttctatggtagcttctcatcaattcctttaacaaaattaatatatgtcatttggaatcagatactcacatgacaaatgaagtggcattttttggttaactaagaaataaccactgttgaggtcatta

SEQ ID NO: 692659 - DNA, 622 bp, Homo sapiens
catcctctttctgcagttcaaactactcttcccaatttacttcttttggtttcaccctacatctatccatccagtccccatcactgtgggcagtgcatgatgagaaaaagtagggagtgggaaaaagaggaaaatgagaacaaacgtgttcatgaccctttccctacctctttgcctccctatttattatcagtctggtaggcatactgtttagtttgcctcatctggagagataacactttcgtctctataaagcagttagtatcacytaagccacggaaatgaacttccctatggaacaataaagatgaaataaggtagtgacaaaatcccacaggaaggactattaactaatattattaagtgatacttcctaagtgaaacatcccctccactgtaatatttcattattaatagtccttgggagtttcaagaaaagaaaaacctttttatttctctggcttggtctcctggtattcataatggaatctaggctatgctttatgatgccaaaaaccactggtcaatccagtcagtcttttaatagaacaacaatcagccacattatttagtgttacgtagacaaacagctatttgaatggaatattcacatgcaaatcag

SEQ ID NO: 692660 - DNA, 622 bp, Homo sapiens
catcctctttctgcagttcaaactactcttcccaatttacttcttttggtttcaccctacatctatccatccagtccccatcactgtgggcagtgcatgatgagaaaaagtagggagtgggaaaaagaggaaaatgagaacaaacgtgttcatgaccctttccctacctctttgcctccctatttattatcagtctggtaggcatactgtttagtttgcctcatctggagagataacactttcgtctctataaagcagttagtatcacctaagccacggaaatgaacttccctatggamcaataaagatgaaataaggtagtgacaaaatcccacaggaaggactattaactaatattattaagtgatacttcctaagtgaaacatcccctccactgtaatatttcattattaatagtccttgggagtttcaagaaaagaaaaacctttttatttctctggcttggtctcctggtattcataatggaatctaggctatgctttatgatgccaaaaaccactggtcaatccagtcagtcttttaatagaacaacaatcagccacattatttagtgttacgtagacaaacagctatttgaatggaatattcacatgcaaatcag

SEQ ID NO: 692661 - DNA, 645 bp, Homo sapiens
gaagtttgctactccttcaacagaagatgctccctgagcatgggctaactttgttgctgtttgtgatgtatgtgtgtgtgtgtgtgtgtgtgtgtgtgtgtgtgtgtggtttccttgaaggtttattttacccttttagttttaaactcatgtataatataaatacagaagaatacacataaagtaagtgtatgacatgcttaattttcaacaaggagatactttgattccattagcmccgaaagaaagaaaagaaatcaacgcacctctgaaacccccttgtaccccttttcattcactaaccccctctgcaagtaactactaatttgatatataaaaacataggttagttttggttattttagaactcatacaaatggaaccacacagcatatagccttttgtgttggtttctgctactcaacatgacttttgcaaaaggcatctgtaatgttgcatatatttgcatttcactcatttgcattgctgttttatttcactgtgagaaaatgccaccgcttatctgtccattttatgcctaatgaatctttgtgtggttttcaggttgtgagacattctagtacacttccattgccggacatgtgcatgtataatttagtatgctatttccagagtattaaaaat

SEQ ID NO: 692662 - DNA, 626 bp, Homo sapiens
tagatgtgtatttcagagattacttattacttttaatttattattcagcttgatgtgctataccttcccttcctccaaactatgaaaatgtataaatatttctgtatctaatatctaaaccttagattgaaatgttaacaattaaaaacccaattataaatcagcacttattcacttttttrtttggctctttttaatttttgtaagctctcactactactatattctctccttgataatttcactctttgttttttaagtattaggatctttgcgagaccatggtagatacttgcaggagacgaaaatatgaccaaagggaaaaggagaagaggttcatttactgtgtgtctcaagagacaaggcatggagattggtcttgagctgtgttggtgaggttcaatttatgaggcagtttacaatctggaacttgatgatgactgtaggaaaaataagactttgtacctacagcttggtataaaggaaacaatactgatctgagtcagctattaagagtttatctgactaccaataagattacctttccgtttgtcatttgtaaactttgagaatttgactaaatttttaggatttaagtttaaaaatctgtagcttcgtgccttaca

SEQ ID NO: 692663 - DNA, 602 bp, Homo sapiens
ttactctggaaagttaaaaaatatcttgaaagccacattcctcctctccaccaaactacctgactcctaccacaggggctgtggtagtgatgacagatgaataatgaaaccaatactttcataaagagtttttaaaaatatgctgatcccaggacaactaagaattacattattataatattcagaaaagaggcaggctagtctttatatttaataagaaattcagatgattcttttcttccatttggaatattctactctacatgtatattttagatgagattttaaaaactgactttcaagtatgaaaaataagataacatccagcagagaaggcttatttcaagcccaatttggattatataaaaaaatcmctcagagggattattataacggatttcagaaaatattagtaattccattcctatgtttacacactaaagaaaatagcataatagcatcgatcaatgtccctaaaagtttacattctaagctccacaggatcacccgtatttcaagagattacttcagtctttttacttcggatatctaacaataagtactctagagcaatcacgaaaatagactttaaagatttattt

SEQ ID NO: 692664 - DNA, 1868 bp, Homo sapiens
tgcatccgattatccattgttcattcatgtgatacattgagtgtctgctatgggatagggagccgtgctaggtgctaagggcctagatataaaaactgcagtttctgctcttttaagagactggtgatattgtgggatagctgtataaaaagtaacactggcagcagaactatgattagggctaaggcagcacaaaagctgggtgctatggtagcagaagctagaagctctagtgagttatttagttctaggcctacatgttttcagtagaatttgagaagactaatgttccctttgtgactccttgattgaatgtggagctcaccctatatctgaaagcttctcagccatagactttctgtacatgggtctttactgtgccctgtccaactgcctggaggagttaccctcttgggaacatcttttgttcagttccctatatatttgaggcattcgtctctgttctttctctaaarccaaacactcctttgtcacagtttcatgggactttaattagtttctcaatgcagaatcgtaatttcagtttctaccatcagtcagctcctgatattgtagtcattatttaaactggtacttgcgactctacctcttgttttcattcttcacactcttggttcacttctgtctgctcattaaagtcaaaaaaagtttgccaactatacataaaattagagccctcttctaaatcaatgacatgtctatataaaaagttctactgtgttttaaaaacacaatgatttcagctatatgttaagatactataaaagtcataacctgccttggaatttactgtggggcaatgccataatattacaacattactttcagagacagaacttttaagaacaaattttgagcttgtaatcactttactttgaaagcattctgaagttaaaaaaagatcatttttataaactgtccttccctgctttgaatttgactgttgcaatccccgcaaaaactaggtatctcttggatagcgttagtcatcactttctcattatcaagcatcctggaatattgttccatactgattttctttctctacatcttatttcaaaatttattcttttcactatgcattaatgcatagcaaactccacaatatgttttctaccaaaccctgtggctatttcttgtatatgataattcagaatttaaatcaggcccccatactaccatatttctcaataaagtaaattattcagggaagcaggggagcatgtaatatggagttacatttattctcagttaaaaaaaatgagagaaagggagaaggaaaagaagactgatttgcatgcatgctatcaagtaataacatttttttctcttcttgaactcttttcttggccctttacagttacttttcttccctatgatctagtgaagattgacaacctatttcctcctaacatttataatatctaaagatgatcctgagtttgtgctatatcatccagtcaatcatcaattgctcctggagtccactcatttgtttagaaaacatttattgagtatagtaacagaagacatagtgatggccatgataagatgtgatcactggcttcacagaatttgtgatttactgggaaatatattttaaacaatatttagtcatataattaatagatatcaatagtaagaaatgatagtaaaattagagcaatggatgtacatataaatgaaatattaaaagtctggaggctcaaggttagcttctgtgaggaaattgagatctcaaagataaactagtcacctgaatgtagtggaaataacactgcaggctgccaggcataagcggggagtacatctgaagatcattgcagcacaataagatctaacctctt

SEQ ID NO: 692665 - DNA, 639 bp, Homo sapiens
tttttaatgtgaaaagaagcttctagattaagtaattctgtctcaagttcaattatatgaatatataaaggatagcccccaaattcaaagtctgttgtgtmatgttatggtgtccagggctctttgtgacataccatactatgattattctgtgtaaatgaacttacaaagaaagaaacatagtaatgggactatttatcatacaaataaaatgggaattgtttttgaagagaagatatttaaactaagaaaatcaatgaaatggaaagttttgcaactgagatccaaaaattgcccagagtttctgtctgagggaaaaaaaaatgacatacatgggtttcattatctaataaaagaaaacaaaatagtttaaccatacgagcaacaaccctccttggtgaaaagcagtagactgagaatcaatagtgctttccatttctgttcattttcctaattatgaggccctgggaaaatccctggactttgtatagaatatttaaattctgaagagaacaaggtagcatcaatctttaactaatattcttttttttttttttcttagagagggtcttgctctgtcggtcagactggagtgcagtgatgtaatctcagctcactgcaacctccatctcctgggct

SEQ ID NO: 692666 - DNA, 639 bp, Homo sapiens
tttttaatgtgaaaagaagcttctagattaagtaattctgtctcaagttcaattatatgaatatataaaggatagcccccaaattcaaagtctgttgtgtcatgttatggygtccagggctctttgtgacataccatactatgattattctgtgtaaatgaacttacaaagaaagaaacatagtaatgggactatttatcatacaaataaaatgggaattgtttttgaagagaagatatttaaactaagaaaatcaatgaaatggaaagttttgcaactgagatccaaaaattgcccagagtttctgtctgagggaaaaaaaaatgacatacatgggtttcattatctaataaaagaaaacaaaatagtttaaccatacgagcaacaaccctccttggtgaaaagcagtagactgagaatcaatagtgctttccatttctgttcattttcctaattatgaggccctgggaaaatccctggactttgtatagaatatttaaattctgaagagaacaaggtagcatcaatctttaactaatattcttttttttttttttcttagagagggtcttgctctgtcggtcagactggagtgcagtgatgtaatctcagctcactgcaacctccatctcctgggct

SEQ ID NO: 692667 - DNA, 1532 bp, Homo sapiens
tggtgtgagtagcctgcagatagcagtaccttagggtccgccacaggggctcagggttgtggtccaggggaataaccagaaggggtctctaatacaacctgtgcaggtcctggaggcctcgaatggctgcatctcacataccctgtccctttgtttccaccagtccttgtgcttccactgttctgaggtataatcagagaacttggtttccaaccccttggatctacttagatgcctggcccatctcccggacctactcttctgtcagaggcaggagcctctttggacaggctcatcagaaacagaacatcttctgcagtggacacagacacaactatttgatagagaggctgggagacccccsgccatctggccagctctaatggctcacggagaatcgaggagtgggggcgccacatgagggactgttcgcctcatggaacacaggagatttccagtagattttgttatttgaggagtgggcatagggtagaggtaggggtgtctttcagaggattcctggggtcagccttctaggaagaaggagtccatttggcctctttttttcaggctttttatctcctccacacccccaaacagtagaaagcctgcaaggggtttaccaccagcatcattctactcctcaagtctcaggtgctggcatctttaatccacaaaataaattgtgatttagacaagaagagtgttcacttcttttgtttgtttgtttgaatacagttactttctaccaaaattttatcaaaggggtcaacgtgactcaatattactctagttcatattgaagataccttgggcgattaaaacaacttaattggaacattcattcattggttaatagttatggagtaaataacttcctcggtatctacaggacatgagagagaacctgagccttacaatgcaaagggatccaatcaactgctggacataatagagaatccattttaaattctacgaaatgcaggcttttctctggaggcaccttctttaaaaaagagattacatttttcccttttagttcaatattttaaaatatgtacagatatcataatttaatgaaagatatcactgaaaatataaagcttttcctaaatgaatttacataggcacatggggagaattaggatgaggactcctaccctggagaacactccctattccatggtgtaagggttctagcttggcctctatggccctaagtgtcaggaaaaatatgaaggcttttgtattttctacaaaactgatggacactttttagtttctttttgttgttgttgttgttattgttgtggtttttgagaaggaatcatgctctgtcacctaggctggaatgcagtggcacaatctcagctcacagcaacctccacctcctgggttcaagaaattctcctccctcagcctcccgagtaactgtgattacaggcatccaccaccacacctggctaagttttgtatttttagtagagacacggtttcaccatgttggccaggctggtttcaaactcctggcc

SEQ ID NO: 692668 - DNA, 1532 bp, Homo sapiens
tggtgtgagtagcctgcagatagcagtaccttagggtccgccacaggggctcagggttgtggtccaggggaataaccagaaggggtctctaatacaacctgtgcaggtcctggaggcctcgaatggctgcatctcacataccctgtccctttgtttccaccagtccttgtgcttccactgttctgaggtataatcagagaacttggtttccaaccccttggatctacttagatgcctggcccatctcccggacctactcttctgtcagaggcaggagcctctttggacaggctcatcagaaacagaacatcttctgcagtggacacagacacaactatttgatagagaggctgggagacccccggccatctggccagctctaatggctcayggagaatcgaggagtgggggcgccacatgagggactgttcgcctcatggaacacaggagatttccagtagattttgttatttgaggagtgggcatagggtagaggtaggggtgtctttcagaggattcctggggtcagccttctaggaagaaggagtccatttggcctctttttttcaggctttttatctcctccacacccccaaacagtagaaagcctgcaaggggtttaccaccagcatcattctactcctcaagtctcaggtgctggcatctttaatccacaaaataaattgtgatttagacaagaagagtgttcacttcttttgtttgtttgtttgaatacagttactttctaccaaaattttatcaaaggggtcaacgtgactcaatattactctagttcatattgaagataccttgggcgattaaaacaacttaattggaacattcattcattggttaatagttatggagtaaataacttcctcggtatctacaggacatgagagagaacctgagccttacaatgcaaagggatccaatcaactgctggacataatagagaatccattttaaattctacgaaatgcaggcttttctctggaggcaccttctttaaaaaagagattacatttttcccttttagttcaatattttaaaatatgtacagatatcataatttaatgaaagatatcactgaaaatataaagcttttcctaaatgaatttacataggcacatggggagaattaggatgaggactcctaccctggagaacactccctattccatggtgtaagggttctagcttggcctctatggccctaagtgtcaggaaaaatatgaaggcttttgtattttctacaaaactgatggacactttttagtttctttttgttgttgttgttgttattgttgtggtttttgagaaggaatcatgctctgtcacctaggctggaatgcagtggcacaatctcagctcacagcaacctccacctcctgggttcaagaaattctcctccctcagcctcccgagtaactgtgattacaggcatccaccaccacacctggctaagttttgtatttttagtagagacacggtttcaccatgttggccaggctggtttcaaactcctggcc

SEQ ID NO: 692669 - DNA, 1532 bp, Homo sapiens
tggtgtgagtagcctgcagatagcagtaccttagggtccgccacaggggctcagggttgtggtccaggggaataaccagaaggggtctctaatacaacctgtgcaggtcctggaggcctcgaatggctgcatctcacataccctgtccctttgtttccaccagtccttgtgcttccactgttctgaggtataatcagagaacttggtttccaaccccttggatctacttagatgcctggcccatctcccggacctactcttctgtcagaggcaggagcctctttggacaggctcatcagaaacagaacatcttctgcagtggacacagacacaactatttgatagagaggctgggagacccccggccatctggccagctctaatggctcacggagaatcgaggagtgggggcgccacatgagggactgttcgcctcatggaacacaggagatttccagtagattttgttatttgaggagtgggcatagggtagaggtaggggtgtctttcagaggattcctggggtcagccttctaggaagaaggagtccatttggcctctttttttcaggctttttatctcctccacacccccaaacagtagaaagcctgcaaggggtttaccaccagcatcattctactcctcaagtctcaggtgctggcatctttaatccacaaaataaattgtgatttagacaagaagagtgttcacttcttttgtttgtttgtttgaatacagttactttctaccaaaattttatcaaaggggtcaacgtgactcaatattactctagttcatattgaagataccttgggcgattaaaacaacttaattggaacattcattcattggttaatagttatggagtaaataacttcctcggtatctacaggacatgagagagaacctgagccttacaatgcaaagggatccaatcaactgctggacataatagagaatccattttaaattctacgaaatgcaggcttttctctggaggcaccttctttaaaaaagagattacatttttcccttttagttcaatattttaaaatatgtacagatatcataatttaatgaaagatatcactgaaaatataaagcttttcctaaatgaatttacrtaggcacatggggagaattaggatgaggactcctaccctggagaacactccctattccatggtgtaagggttctagcttggcctctatggccctaagtgtcaggaaaaatatgaaggcttttgtattttctacaaaactgatggacactttttagtttctttttgttgttgttgttgttattgttgtggtttttgagaaggaatcatgctctgtcacctaggctggaatgcagtggcacaatctcagctcacagcaacctccacctcctgggttcaagaaattctcctccctcagcctcccgagtaactgtgattacaggcatccaccaccacacctggctaagttttgtatttttagtagagacacggtttcaccatgttggccaggctggtttcaaactcctggcc

SEQ ID NO: 692670 - DNA, 1532 bp, Homo sapiens
tggtgtgagtagcctgcagatagcagtaccttagggtccgccacaggggctcagggttgtggtccaggggaataaccagaaggggtctctaatacaacctgtgcaggtcctggaggcctcgaatggctgcatctcacataccctgtccctttgtttccaccagtccttgtgcttccactgttctgaggtataatcagagaacttggtttccaaccccttggatctacttagatgcctggcccatctcccggacctactcttctgtcagaggcaggagcctctttggacaggctcatcagaaacagaacatcttctgcagtggacacagacacaactatttgatagagaggctgggagacccccggccatctggccagctctaatggctcacggagaatcgaggagtgggggcgccacatgagggactgttcgcctcatggaacacaggagatttccagtagattttgttatttgaggagtgggcatagggtagaggtaggggtgtctttcagaggattcctggggtcagccttctaggaagaaggagtccatttggcctctttttttcaggctttttatctcctccacacccccaaacagtagaaagcctgcaaggggtttaccaccagcatcattctactcctcaagtctcaggtgctggcatctttaatccacaaaataaattgtgatttagacaagaagagtgttcacttcttttgtttgtttgtttgaatacagttactttctaccaaaattttatcaaaggggtcaacgtgactcaatattactctagttcatattgaagataccttgggcgattaaaacaacttaattggaacattcattcattggttaatagttatggagtaaataacttcctcggtatctacaggacatgagagagaacctgagccttacaatgcaaagggatccaatcaactgctggacataatagagaatccattttaaattctacgaaatgcaggcttttctctggaggcaccttctttaaaaaagagattacatttttcccttttagttcaatattttaaaatatgtacagatatcataatttaatgaaagatatcactgaaaatataaagcttttcctaaatgaatttacataggcacatggggagarttaggatgaggactcctaccctggagaacactccctattccatggtgtaagggttctagcttggcctctatggccctaagtgtcaggaaaaatatgaaggcttttgtattttctacaaaactgatggacactttttagtttctttttgttgttgttgttgttattgttgtggtttttgagaaggaatcatgctctgtcacctaggctggaatgcagtggcacaatctcagctcacagcaacctccacctcctgggttcaagaaattctcctccctcagcctcccgagtaactgtgattacaggcatccaccaccacacctggctaagttttgtatttttagtagagacacggtttcaccatgttggccaggctggtttcaaactcctggcc

SEQ ID NO: 692671 - DNA, 1532 bp, Homo sapiens
tggtgtgagtagcctgcagatagcagtaccttagggtccgccacaggggctcagggttgtggtccaggggaataaccagaaggggtctctaatacaacctgtgcaggtcctggaggcctcgaatggctgcatctcacataccctgtccctttgtttccaccagtccttgtgcttccactgttctgaggtataatcagagaacttggtttccaaccccttggatctacttagatgcctggcccatctcccggacctactcttctgtcagaggcaggagcctctttggacaggctcatcagaaacagaacatcttctgcagtggacacagacacaactatttgatagagaggctgggagacccccggccatctggccagctctaatggctcacggagaatcgaggagtgggggcgccacatgagggactgttcgcctcatggaacacaggagatttccagtagattttgttatttgaggagtgggcatagggtagaggtaggggtgtctttcagaggattcctggggtcagccttctaggaagaaggagtccatttggcctctttttttcaggctttttatctcctccacacccccaaacagtagaaagcctgcaaggggtttaccaccagcatcattctactcctcaagtctcaggtgctggcatctttaatccacaaaataaattgtgatttagacaagaagagtgttcacttcttttgtttgtttgtttgaatacagttactttctaccaaaattttatcaaaggggtcaacgtgactcaatattactctagttcatattgaagataccttgggcgattaaaacaacttaattggaacattcattcattggttaatagttatggagtaaataacttcctcggtatctacaggacatgagagagaacctgagccttacaatgcaaagggatccaatcaactgctggacataatagagaatccattttaaattctacgaaatgcaggcttttctctggaggcaccttctttaaaaaagagattacatttttcccttttagttcaatattttaaaatatgtacagatatcataatttaatgaaagatatcactgaaaatataaagcttttcctaaatgaatttacataggcacatggggagaattaggatgaggactcctaccctggagaacactccctattccatggtgtaagggttctagsttggcctctatggccctaagtgtcaggaaaaatatgaaggcttttgtattttctacaaaactgatggacactttttagtttctttttgttgttgttgttgttattgttgtggtttttgagaaggaatcatgctctgtcacctaggctggaatgcagtggcacaatctcagctcacagcaacctccacctcctgggttcaagaaattctcctccctcagcctcccgagtaactgtgattacaggcatccaccaccacacctggctaagttttgtatttttagtagagacacggtttcaccatgttggccaggctggtttcaaactcctggcc

SEQ ID NO: 692672 - DNA, 1532 bp, Homo sapiens
tggtgtgagtagcctgcagatagcagtaccttagggtccgccacaggggctcagggttgtggtccaggggaataaccagaaggggtctctaatacaacctgtgcaggtcctggaggcctcgaatggctgcatctcacataccctgtccctttgtttccaccagtccttgtgcttccactgttctgaggtataatcagagaacttggtttccaaccccttggatctacttagatgcctggcccatctcccggacctactcttctgtcagaggcaggagcctctttggacaggctcatcagaaacagaacatcttctgcagtggacacagacacaactatttgatagagaggctgggagacccccggccatctggccagctctaatggctcacggagaatcgaggagtgggggcgccacatgagggactgttcgcctcatggaacacaggagatttccagtagattttgttatttgaggagtgggcatagggtagaggtaggggtgtctttcagaggattcctggggtcagccttctaggaagaaggagtccatttggcctctttttttcaggctttttatctcctccacacccccaaacagtagaaagcctgcaaggggtttaccaccagcatcattctactcctcaagtctcaggtgctggcatctttaatccacaaaataaattgtgatttagacaagaagagtgttcacttcttttgtttgtttgtttgaatacagttactttctaccaaaattttatcaaaggggtcaacgtgactcaatattactctagttcatattgaagataccttgggcgattaaaacaacttaattggaacattcattcattggttaatagttatggagtaaataacttcctcggtatctacaggacatgagagagaacctgagccttacaatgcaaagggatccaatcaactgctggacataatagagaatccattttaaattctacgaaatgcaggcttttctctggaggcaccttctttaaaaaagagattacatttttcccttttagttcaatattttaaaatatgtacagatatcataatttaatgaaagatatcactgaaaatataaagcttttcctaaatgaatttacataggcacatggggagaattaggatgaggactcctaccctggagaacactccctattccatggtgtaagggttctagcttggcctctatggccctaagtgtcaggaaaaatatgaaggcttttgtattttctacaaaactgatggacactttttagtttctttttgttgttgttgttgttattgttgtggtttttgagaaggaatcatgctctgtcacctaggctggaatgcagtggcacaatctcagctcacagcaacctccacctcctgggttcaagaaattctcctccctcagcctcccgagtaactgtgattacaggcatccaccaccacacctggctaagttttgyatttttagtagagacacggtttcaccatgttggccaggctggtttcaaactcctggcc

SEQ ID NO: 692673 - DNA, 468 bp, Homo sapiens
aggaattaggaggtgtgctcctcggtgcttagaggaaaattgatattttggccattgatgacttaataagcccaaatcaggccaggtgcagtggctcccgtctgtaatccctgaactttgggaggccaaggcaggtggatcacctgaggtctggagttcaagaccagcctggccaacatgatgaaactccatctctactaaaaatacaaaaaattagccggatgtggtggcaggcacctgtaatcccagctactcaggaggctgaggcaggagaatcgcttgaacccgggaggcagaggttgcagagcaaaactccatctcaaaaaaagaaaaaaaaargagtaagatcaaagactttcttctgcagtggctctgccctcacagtctctgctggcttctcagaatctccctgtactccctgctcttgctcacccaccagcacagcccccctcacctggctcaggactc

SEQ ID NO: 692674 - DNA, 634 bp, Homo sapiens
cagcgtatttcttggtaaagatttaagcaattgttgaagatctgtgctgtctcctttctagtcctcacagcaactcctacacagtgactactgagtagtactcctttgtgttagcagctggcttccttatttcaatatattttaagaaacctctaagttgcaaactaaagccctattaaggcattcctcaaattctttttgactaatctaagatctagtttcaacatgacataacttttctttgtcatatacaagtcagatattaaatgaacacaaaatgaatttccaaaaataatttataaaagataytggcatttttataggaccacttcttgtataaaggtatttaactcgacacttagtcttctgacctataatatgtaacagcaggattttttaaaagttgtttttaagcaggcacggagtccaacttatttaataactcatttagcacagagatctaccattcagaatggatgctggtggtcataacactggaccaggtcctgaactgctccttcatgctccttattagtttctggataatgggaggcctgggtgaattgcagggattcaatggaatggcagtacggggcactcaggtaattgaggcaatggctatttatcaattatt

SEQ ID NO: 692675 - DNA, 601 bp, Homo sapiens
gaggtcaccctgtaactgagacaccaccgggggctgcctgccgccctgctggcatgagctttatcctccttttggccaaggcttcgtaggcagccgtgaaccctgggtgggcactgggggtcactcgaggaaccaagctgggtccctccagctggaagctacatgcgagtggtcagtggcagaagtgggctttgaacccagggctcccggctcaggccccggtctctctcctgctcacttgcccgagatgccctgtcttgggagctgggggctcctgtgtgcatcctccccattccgcagcccccagggagtgcacccagctcagccacaccaggacggatgaatcagctccagcctcaggcataccagttrggctgctcagcgcccagagccccccttgttatctcgggcagatttcttcgcaaggcacgtaaacggcagcccataaaagcgaacagtacttcatctttaaggtgatctctgaagactaattctcctctgctgagtgccctgtttcatctccaagctccgctgtccccctgcctctaggggacccctgcggcttcctcgagcccctccccatttcggtgccctctgcctt

SEQ ID NO: 692676 - DNA, 629 bp, Homo sapiens
taaacataggtaatgatattgacagaaccttctgagctcctactttgtgscaggcagggactgtgtcccagtggcaggaaggcgtgcggttgcctccaggcccaaacaggagccctggctggtgagaggtgacagcgtgctggcagtcctcacagccctccctcgctctcggcgcctcctctgcgtgggctcccactttggcggcacttgaggagcccttcagcccaccgctgcgctgtgggagcccctttctgggctggccaaggccggagcccactccctcagcttgcagggaggggtggagggagaggcgcgacgggaaccggggctgcgtgcggcgcttgcggccagctggagttccaggtgggcatgggcttggcgggccccacactcagagcagccgaccagccccgctgccccggggcaatgaggaacttagcacctgggccagcggctgtggagggtgtactgggtcccccagcagtgccagcccaccgggctgcactcgatttctcaccgggccttagctgccttcccgcgggccagggctcgggacctgcagcccgccatgcctgagcctcccaccccctccgtgggctcctgtgcggcccgagcctccctgacgagcg

SEQ ID NO: 692677 - DNA, 629 bp, Homo sapiens
taaacataggtaatgatattgacagaaccttctgagctcctactttgtgccaggcagggactgtgtcccagtggcaggaaggcgtgcggttgcctccaggcccaaacaggagccctggctggtgagaggtgacagcgtgctggcagtcctcacagccctccctcgctctcggcgcctcctctgcgtgggctcccactttggcggcacttgaggagcccttcagcccaccgctgcgctgtgggagcccctttctgggctggccaaggccggagcccactccctcagcttgcagggaggggtggagggagaggcgcgacgggaaccggggctgcgtgcggcgcttgcggccagctggagttccaggtgggcatgggcttggcrggccccacactcagagcagccgaccagccccgctgccccggggcaatgaggaacttagcacctgggccagcggctgtggagggtgtactgggtcccccagcagtgccagcccaccgggctgcactcgatttctcaccgggccttagctgccttcccgcgggccagggctcgggacctgcagcccgccatgcctgagcctcccaccccctccgtgggctcctgtgcggcccgagcctccctgacgagcg

SEQ ID NO: 692678 - DNA, 629 bp, Homo sapiens
taaacataggtaatgatattgacagaaccttctgagctcctactttgtgccaggcagggactgtgtcccagtggcaggaaggcgtgcggttgcctccaggcccaaacaggagccctggctggtgagaggtgacagcgtgctggcagtcctcacagccctccctcgctctcggcgcctcctctgcgtgggctcccactttggcggcacttgaggagcccttcagcccaccgctgcgctgtgggagcccctttctgggctggccaaggccggagcccactccctcagcttgcagggaggggtggagggagaggcgcgacgggaaccggggctgcgtgcggcgcttgcggccagctggagttccaggtgggcatgggcttggcgggccccacactcagagcagccgaccagccccgctgccccsgggcaatgaggaacttagcacctgggccagcggctgtggagggtgtactgggtcccccagcagtgccagcccaccgggctgcactcgatttctcaccgggccttagctgccttcccgcgggccagggctcgggacctgcagcccgccatgcctgagcctcccaccccctccgtgggctcctgtgcggcccgagcctccctgacgagcg

SEQ ID NO: 692679 - DNA, 629 bp, Homo sapiens
taaacataggtaatgatattgacagaaccttctgagctcctactttgtgccaggcagggactgtgtcccagtggcaggaaggcgtgcggttgcctccaggcccaaacaggagccctggctggtgagaggtgacagcgtgctggcagtcctcacagccctccctcgctctcggcgcctcctctgcgtgggctcccactttggcggcacttgaggagcccttcagcccaccgctgcgctgtgggagcccctttctgggctggccaaggccggagcccactccctcagcttgcagggaggggtggagggagaggcgcgacgggaaccggggctgcgtgcggcgcttgcggccagctggagttccaggtgggcatgggcttggcgggccccacactcagagcagccgaccagccccgctgccccggggcaatgaggracttagcacctgggccagcggctgtggagggtgtactgggtcccccagcagtgccagcccaccgggctgcactcgatttctcaccgggccttagctgccttcccgcgggccagggctcgggacctgcagcccgccatgcctgagcctcccaccccctccgtgggctcctgtgcggcccgagcctccctgacgagcg

SEQ ID NO: 692680 - DNA, 1276 bp, Homo sapiens
cttgacagttttccgactatcatggtggagctctccagccttggggaggggagtggtgaggtttggggcatgagacaccgcacgccgcaggggcacaatctcccacggcccttgccctaggcctgggtgctggccgagggacgcactgccaggctgctcacagcccagcccctgcctgggtccccaagtgccagacgtcagttctccgtggctcccatcccaggaggaggtgaaaaatgtgacacctataagtgggacattaaagtttaatgggggctgatgcatatttaatggggcttaacaaagcatccttaaagacatcccagacagcccccggggcgggggcatcgccttgccgcgaaagctgccctgcccactgcagccggtgctccctcatctgtctggtggcgtccctaggaaaacttggcattccaagctcttgccagagccaagtgtgggcctgcggtctccgagggagctgccctttcattattaatattatgagaatgtctgacgggccacgtgagtcacagggatgtgactcagtctgcctgccccattccaggaagcctctgttggacagaatgggaggcctgccccctcctccctcagtccctctgttccccaacctatgtcaggagccacagctggagtggaaggtcagatggggacatcctgggagtgggggtgcacagagatgggataagatgggtccctgtcattgactccaaaataactgcctgagactcggagatcccgcattctttgaatcagggcatcttggaagggctgccgtggacacacctgagtccagaggtccaggcctgctggctgtgagctctgacacagcracaggaactgcatggccgttgtttcactgctcccccacccccattgacatgaccttgggaccacagcctactctcagctcacccctgatatttctggggtctccaagtgtttctcataaggagcccgccagtccttattgatgtcttcacaggccgtgaagcagaggaagcttttcctctcatgcttcatcttggcctggtgaaggatggcggtgacctagaattctcaagtggcaggtccccaagactcagccccatgccttgtcctggtctcagcactgacccattcatcctcagttacctgtgatgtatagactatgcacagtgcatccctgtaggctgtccctacaacacaatctgaccctacagcacaacctgtccctacagcacaacctgtccctacagcacaccctgtacctgtagcc

SEQ ID NO: 692681 - DNA, 688 bp, Homo sapiens
ggctggtttgcttttctctcctatgcctcagagatcccctgtcacttccctgctgaattcctgttttctcttagatgccctatttgatgtgtgatgacatacttgctgttttggtccttgtttgtggaggagatgagtgctgggaacctttagtctgttatcctgacatccttggagatcttgtcctcagcatttactgagtgttcacaacatgcacacagttaaactaaacactggaggaaaagcaaaaaaaaaaaaattgcctgctcttaagatattcttatctaaatgggaaaactggttatacacatagcaaaaatgtagattaacacaaataatatgcatgtaaaaaaagaagatccaaggaagcagtggatcttaagtaagtttccaggggtttgatagattttcatggtcagtgtaggttttactgagtgttgggagttgatcaactaataatcctttctttttgtaagtaaagtatttagtaagttgaatttctactgtgcaccaggcattgatacacttcacttgaactttggagttaaactaccagaattaaagcttatttggataatatcctagcagtatgtgcatcaacaagttgcttaccctttttaagccttaattttccacctgtgaaatgaggatactcccagtaataagtgtgcaayaaactaagcaatgg

SEQ ID NO: 692682 - DNA, 614 bp, Homo sapiens
ttaaatttagcgattagaattatagaatgaagtcccgtcaggtcatgggttcctgtgctttccaaatattaatacttaactattttgtagattgaaatataaatattgtctacaacttatagagggcttagatattttaaaatgtcttttttactgatttagtaatacttcgataataaatgatgctatctyatctctaaatctgaaaactgtgacacctgtgaaatgatttgggccactttttcccttgagtttgaaaaattcttagaatcatcacatagagatttttattgcttatgaataaaattcttttttagcttgttcctcatacttattttttacttcattacagctgctttctaaaaaaacactttagaatattcacaaggcataaacataattgttaaaacttgattttctgaattgaaaattattgaaacaaaaaataaaacaagatgataattgttttcctcctcaggcaaaagcagtctgaaagatagtcattgcatttggggctctttaaactaaaagaacacacatattcttatttataaaatgaaactatataaaacatctcacttcctgaaaccatttttacactggatttagccaaa

SEQ ID NO: 692683 - DNA, 614 bp, Homo sapiens
ttaaatttagcgattagaattatagaatgaagtcccgtcaggtcatgggttcctgtgctttccaaatattaatacttaactattttgtagattgaaatataaatattgtctacaacttatagagggcttagatattttaaaatgtcttttttactgatttagtaatacttcgataataaatgatgctatctcatctctaaatctgaaaactgtgacacctgtgaaatgatttgggccactttttcccttgagtttgaaaaattcttagaatcatcacatagagatttttattgcttatgaataaaattcttttttagcttgttcctcatacttattttttacttcattacagctgctttctaaaaaaacactttagratattcacaaggcataaacataattgttaaaacttgattttctgaattgaaaattattgaaacaaaaaataaaacaagatgataattgttttcctcctcaggcaaaagcagtctgaaagatagtcattgcatttggggctctttaaactaaaagaacacacatattcttatttataaaatgaaactatataaaacatctcacttcctgaaaccatttttacactggatttagccaaa

SEQ ID NO: 692684 - DNA, 648 bp, Homo sapiens
gtaaactataaacttccttttaagcactgttttaaatgcatgatatacatattttgatttttttgtttttaattcagctcaaaatattttgcaattttctctcactcatgggtgttagaagtgtgttgtttaatttccaaatatttggggattcatcagatctctgtctttcattgatttctgacttaattccgttgtagtcatagaacacactttatattatttcaatcctttaaatttattgaggcttgctttatagcctagcatagagatcagcaaatgatagcttgtggttatgcatcttaagtaattacaatttactttatcataataccaacttaattctgctctgttatatctrgcagtgtgcccctgaagtagaatttttattttagttattgtacttttatcatcagaatttccatttggatttttaaaataatttctatatctttactgaggtcctttattttttggactattgtcataataatttcccttaattatttactgttaatttactctagttctttgaacatatatataaaactgagttgatgttgttatctgctaaatttggcatctgaggacactcagagaaatgtctattcactgctattttccttctttaatatgagtaacactttc

SEQ ID NO: 692685 - DNA, 574 bp, Homo sapiens
  misc_feature 2, 3, 4, 5, 6, 7, 8, 9, 10, 11, 12, 13, 14, 15, 16, 17, 18,19, 20, 21, 22, 23, 24, 25, 26, 27, 28, 29, 30, 31, 32,33, 34, 35, 36, 37, 38, 39, 40, 41, 42, 43, 44, 45, 46,47, 48, 49, 50, 51, 52, 53, 54, 55, 56, 57, 58, 59, 60,61: n = A,T,C or G
  misc_feature 62, 63, 64, 65, 66, 67, 68, 69, 70, 71, 72, 73, 74, 75, 76,77, 78, 79, 80, 81, 82, 83, 84, 85, 86, 87, 88, 89, 90,91, 92, 93, 94, 95, 96, 97, 98, 99, 100, 101: n = A,T,C or G
annnnnnnnnnnnnnnnnnnnnnnnnnnnnnnnnnnnnnnnnnnnnnnnnnnnnnnnnnnnnnnnnnnnnnnnnnnnnnnnnnnnnnnnnnnnnnnnnnnntactggtagtctggtatgtttcttccagggctagaatataaatccacaagtgaaggaaatcattgcctgatactaaaactaagttataaagtaatgtttcctagttctggaaattcccaaaaaactggatgagggtttaatgggggtaagaccttacgaaagtgagggtgagtaaaagccagagacagctgacttagtgctgttaacataatctcacttgtatccgctgatgaaaaagatctgaagaagcatgtgtttatgtactgcaataatccctggtgtgtgtgtagggctttatagtgaacaaactgctttcatatacgctatcagattttattctaatgacaattttgtgaacyggctattcctaacttcaagttgaacatggtagaatgaagacatctactctcttcagaaacctactaagattataggaaagaaattaaactgtttttaattcacagagacagaag

SEQ ID NO: 692686 - DNA, 574 bp, Homo sapiens
ttaaattttttttaatttttcattttcttatcagcttatgaattaaaatccattttaatgaatttttagaatagacaaaatgtccattcctattcagcaaatagtgtttctttgtaggtagaactaggttagcacagagaggggaaaagaaaaagaattaagaaaatcctttttaacaaaaataaaacaaagaccttatgaactatgtytttaaaaatgttccacgcacccaacttttaaatagcagatgaagaattttagagtgctgctgtttttaagtgctttcctctggactgaaatagaggttcaggggaaaagtcacattccaagggcttaattttttatttatcttgagaaaagaagttgccttatggtgccatcacccatcatttgctttgaaagagactaaaaccactttgctttcataacagaacagatgtttcttagcagggttcgatgttcttataaataaacaaataaacactatggagaaggattgagagaatcaacagtaagatttttaaatttaagacatttctttattcatagcaacatgggctctgctgacatgtaa

SEQ ID NO: 692687 - DNA, 657 bp, Homo sapiens
ggcaatgagactttgcaaatttattttaacttctctaagccctcagtttccatctctgtaaaatatggttgtaaaaatgccatgaaataatgtatgtaaggaaattcattagcacagtgcctaataaatttcagtttctcttttctttgccttaaattccttagttttctcccatctcaggctctctctctctctaygtctctatgaaacagctctgctaaagaaagatgcaaacttttgataatctacccttgaagaaaagctccttggaatttggacctacagtttgaaaatttggcatgctacaccaacactacagtgacaagggaaaaaattgtttgtgacagagaaaaattacctgcaatttacaatacccagctgcctccaaaggaggttctttgctgaacagagtgatgggtatgaggatgcagggttaagagagttcaccaaattgttctgcattagaaaaatcctgtttattcatttattgtaggaggtaggcaggggtgagtcagggtgaatggaaaatgaatgagatccagaagaaccagggaaaatgtggagcctatgtgtggcaagattgaagggtgggaaagtggctaaggggaactttctgaggagaccccagatgttaaacaggaatttttattaaaattt

SEQ ID NO: 692688 - DNA, 580 bp, Homo sapiens
gggggagcgcttcgatttttccaccagaggagccaagagcgaatgagaaacaaatccagctcgactgcctgtcccactgcctgcccctgcagtgcatggagggaggggagagtgagcccccagccctttccctgcctccattcctaggcaccagcacccaggggcgaaagtctcagccccctggttagagggcgggcagtgggtgcaggacctccctggcccacacccaccatgaggcrgaaagtctggggccttggcttattgctccccaccccagccttggacaagaacaaacactggaggctgcccccccactccccactgcaagtcttgggctggggcctccatgttgcgggggagggacagagttggatgggggtacagtcactgctctcagatggccccagctagataaagagatggggcctccatgacgcctcccgctcttctcactgaactctttccccgcggagggtccctcccttcactgagcctcttccccacatttggccccctcctccacctgagccccagtccctcactgcatcccatcccttctccatctgcccacaccaccggg

SEQ ID NO: 692689 - DNA, 577 bp, Homo sapiens
atttacagcacattatttaattcatttgagaaatattaacagttccaggcactattcatctctatagattcacaggtgaataaaatcctattatttttgtcttaaggaattgacttaacgcaaagatagaaaactaaacaagaaacaagaaacactacaataattgcttaaactgcaataatcaaaggtactaagggacttttccattttggtctttcattaattttcctttactggttttcawgttaatgttatgccaccagctgcccccagacagccctaagaaatgtgccactgtgtcggtggtggggacaccatggaaggtgacatgcacagcttcacatggtggctgccctatgaagacgtgggacaagcagtatcttgattttagaaaaaaaaaaaaaaaaaagaaaagaaaagctgtgcttcttctcagccactggttcatttttgccttaaggaccagttgactttacaagtgataatatatgtagtttttctttgtcttagctataaaggagagaaaagacaaatgtgggtacaatctgtggtaaccctgtagaaccatatggcattc

SEQ ID NO: 692690 - DNA, 577 bp, Homo sapiens
atttacagcacattatttaattcatttgagaaatattaacagttccaggcactattcatctctatagattcacaggtgaataaaatcctattatttttgtcttaaggaattgacttaacgcaaagatagaaaactaaacaagaaacaagaaacactacaataattgcttaaactgcaataatcaaaggtactaagggacttttccattttggtctttcattaattttcctttactggttttcaagttaatgttatgccaccagctgcccccagacagccctaagaaatgtgccactgtgtcggtggtrgggacaccatggaaggtgacatgcacagcttcacatggtggctgccctatgaagacgtgggacaagcagtatcttgattttagaaaaaaaaaaaaaaaaaagaaaagaaaagctgtgcttcttctcagccactggttcatttttgccttaaggaccagttgactttacaagtgataatatatgtagtttttctttgtcttagctataaaggagagaaaagacaaatgtgggtacaatctgtggtaaccctgtagaaccatatggcattc

SEQ ID NO: 692691 - DNA, 577 bp, Homo sapiens
atttacagcacattatttaattcatttgagaaatattaacagttccaggcactattcatctctatagattcacaggtgaataaaatcctattatttttgtcttaaggaattgacttaacgcaaagatagaaaactaaacaagaaacaagaaacactacaataattgcttaaactgcaataatcaaaggtactaagggacttttccattttggtctttcattaattttcctttactggttttcaagttaatgttatgccaccagctgcccccagacagccctaagaaatgtgccactgtgtcggtggtggggacaccatggaaggtgacatgcacagcttcacatggtggctgccctatgaagacgtgggacaagcagtatcttgattttagaaaaaaaaaaaaaaaaaagaaaagmaaagctgtgcttcttctcagccactggttcatttttgccttaaggaccagttgactttacaagtgataatatatgtagtttttctttgtcttagctataaaggagagaaaagacaaatgtgggtacaatctgtggtaaccctgtagaaccatatggcattc

SEQ ID NO: 692692 - DNA, 1147 bp, Homo sapiens
gtagcaactacatcgcaattgccaccacctggctagcagcaattttaagatgcattctgatacaaaagatgctaaaatctgaaaagtacatgatttagaatacacaaaacacagtatagttttttcttttccttttagtaagaactctggatttttttttttggctagcctgtaagatcctttgaaaaactgggtctcacatatgcatacttggcatctaggatgcaaaagaaaaatacgggaagcgggaagctacagtgtgccagaaataggttatccattgccacatgtgttgtttagttggcttattacaatagcccaagggtagcctgcactttccccactttacagagtgttttttaaaagtatactgggtacaccttacatagcttaagacacataagaggcattcaataaatgtgtgctggtgaaatgaaagaatatgtagagattaaataacttggtcatgwtcaggcagttagttgacattgaatcagaaaattgactcttgactggtctgactcaaaggcccattctttggcaattgctagtctggctccaagcgggtgactacgaggtctggcaactaatgggagacaaaaatatttactgtgtcagttagaaggaagaaggaaggaaggaagaaagagaagaagaaaggaaaaaggaaggagaagaaggaggaaggaggaaagggaggaagaaaggaaggaggagagggagggaaggacagaaggaagatcgaaggaagaggtgaaaaaaagaaaaaagaaaggatgagagaaagataataagaagcaagaaaaaacagaagtaaaaactgagaaaagggaagggaaaagggaacgaaaagacaggcaaaatggaaaaagaggaaaatgaaagaaaaggaagaaagcagggaagaaagctgtcagtaatggctaaacattaagaaactggattagaaagatagtgtttttgcacagccaatgttggctttcctccagatttcactagttttacagttattctagaaagttctctcaacatcacattttgaaggaaggaaccaacactgcaactgctacttgttttcaggttcttgaccaacagaggcttaatgagtaatgtatttgctccaagtgtactgaggaaagcagtactt

SEQ ID NO: 692693 - DNA, 636 bp, Homo sapiens
caacaaaagagaattttagaccaatatccctgggtgattttaatatgggctttgcaagataggacatggtgaggctcagttggttaaaatataatggctttgaatggtgggcaaagcacaggtgagggtttcaagtgagtcttatgattaagctgttagtccttataatttaactctctagttattggccagtcttatcttccaagagcagttatttgctagtgtaaacagctaagttatatttatgtggccctggtagggtttagcacaaaacaagtcagatatatcataacagtattttttagcataaaggcagaaatgtatgtttctttttttgttttgtttttgagacggagtctcactctgtcacccaggctggagtgyagtggcgccacctcggctcacggcaatctctgcctcctgggttcacgccattctcctgcctcagcctcccgagtagctgggactacaggtgtccgccaccacgcccagctaattttttttaattttagtagagacggggtttcaccttgttagccaggatggtctcgatctcctgtcctcgtgatctgcctgccacacttttgaatattgattcacagaggtacaggagattatttaaatgttgattctcat

SEQ ID NO: 692694 - DNA, 637 bp, Homo sapiens
tgagtgcatatatgtacatgtggtggcacatggtacatggaacgataattgtttttgtgcatctttctgacctactttgttgtaaagttgtggacagggtttgcatgttctttatctttctacctccaatacttagcacagtgtctggcaacaaaccagtagatgtttgctgaatgcacatagaaatggttataaaagaatgctttgacaaagagcatttcaaattcagaatacgcttttagactctgttatcccatggatggactatgggcatcactaaaggcataaggtattttcagtattcatgtcttatttgggaatcctcgggtctggaatcattctcraaaacatccagtaaagagtcattagctattcttagagcacctcttttttcacagagagaattggcaccaagcaagagcgaggaaccagacaccagttatggaaaatgtatccccacatcacatcgggagcctagctcacagacactgcctatggaaattgcagaaatagatcaactgcaaaaggttacatagggggcccatatgttacattaattctcagtgaataaattacacgtaaaatttgagaacatgttttcatcaaataagtatttgtgaagataaattttagctta

SEQ ID NO: 692695 - DNA, 637 bp, Homo sapiens
tgagtgcatatatgtacatgtggtggcacatggtacatggaacgataattgtttttgtgcatctttctgacctactttgttgtaaagttgtggacagggtttgcatgttctttatctttctacctccaatacttagcacagtgtctggcaacaaaccagtagatgtttgctgaatgcacatagaaatggttataaaagaatgctttgacaaagagcatttcaaattcagaatacgcttttagactctgttatcccatggatggactatgggcatcactaaaggcataaggtattttcagtattcatgtcttatttgggaatcctcgggtctggaatcattctcgaaaacatccagtaaagagtcattagctattcttagagcacctcttttttcacagagagaattggcaccaagcaagagcgaggaaccagacaccagttatggaaaatgtatccccacatcacatcgggagcctagctcacagacactgccwatggaaattgcagaaatagatcaactgcaaaaggttacatagggggcccatatgttacattaattctcagtgaataaattacacgtaaaatttgagaacatgttttcatcaaataagtatttgtgaagataaattttagctta

SEQ ID NO: 692696 - DNA, 1372 bp, Homo sapiens
caaactggttaaacttcagtttgagcaccagtttattctgcacttttaaattgccatgataatttacacagatctagggtttaaaacacaagcagtagaaaccagcttgaagccaattgaaaacagatgtagtctataaggatagggaattaacatttgttgtatatcaaatacagtgtttgacaatgcttttacatacatgatctcagtataattcagtattatctggatgtttataacatgtaatgcataatatatcaataaatagggtamaatcctagtatcgttagtgttaaccaaactaggtatttagttaagcatttgccctaatggaatttccttgtttggtgatttagtagaaaagtcagaaattttggtgtttgaatctcagttgaaaccttgacaaagtcatttaatttctctgatgatcaaatctctcatctgtaaaatgaaaatataattataaccccattcagtgctgagggttaaatgtaatgctgtatatggaacccttggtgtgaagtctggcacattagtgtgctctccaaaaatggtagctatgatgcttgtggtggttgttgttagagaggccctgctgtcatactgctcatcagtcttcaagtccataaaaccagactcaaagtaggtcatagaggctgacttcctctatgtagaactcttcctggcttgaggcagctcacttcaaactgcacacaccaccaccctccaactcactttcttactttcaaaaatagaattgaaaatactggtaaatatcacagaaagattatgggaagaaagtgtaactaaatcattcaatttacttttattgtgtctacttgtgtaaacatctgctgtaatgacaagatacttaaatctatgaagcatgtaaatactgaatgcccatataggatgatctgaacgtttacctgcaaatttccttccttaagtcctaatacattctcttaagtgtgtcatctgttatccaccactgaattttttgcaacaaatttttattttggaataattttagatttacaaaaaagttacaaaggtaatacagggcattcctgtgcattcctcccccagtttttctcattgttaaacactttacattaccatggtgcgtttgtcaaggaaactgatattgctacattactattaactaaacctttggaatttctatcccaggatcaaatctaggataccatattgcattgagttgtcatagctccctagtctcttctgatctgtaaccgtttctcagcgttctttctttttttatctttctttctttctctctctttctctctctttctccctccctcccgccctctctctctccctctttctttccttctttctttctttc

SEQ ID NO: 692697 - DNA, 619 bp, Homo sapiens
tccccatcccaccacagaaaccagagcctcgaggcttttggcttgggtgctgccttcacagtttaggttttggtaagaagaaagcttatcttcatgtcatgagaaagaaaaaaaaaatgtatctttacgtaacgagctgaaagaacaaaacaagtatacctaagccaagtacatgctatctttatttctttatttccacactgaaatttagtcagggataaaacttacttttttaatcacacgaagtttgaaaaataggaagtactatgggaaacacctaatgcatcaaaacccctgtgcattttatctttgtcttatgtttgctggattttaatcttagtaggtttcctgttgcaacaatacaaaaacagataaagaaaaaacttaataacctttcctaccacaaatgtgaacagcccgtgttcttgttggtaggtacagatacagatatatgasattatcgttatttattatcagaaaatgggattttactatttcccacacacacactttttttgagatgggggtcttgctatattgtccagggtggtctcaaattcttgggctcaagcgatcctcccacccaagtatctgtaatccaagtagtctggattacaga

SEQ ID NO: 692698 - DNA, 627 bp, Homo sapiens
attttaaaatagtttagtagaattgggatgtgcacataggatagggcagaatatgcaaaggagatggcccttgaggagttttcacaccttcagtcgtgtttaccaggaggtgttcactaaaccctagtttgtcaattatgtttattctttccagaatctgggaaggggccagcgatgcaatgggacacccaatacttaggagcctcacctgcttccaggtccctgctctaattctgcagtcctcggtccagctattgctgaaagcaaagcttcagaccacctgtcagcaaattattccttcctcaagaagttgccctgaagccatttctttatatgaaggcttttagttcatcactacactggaaattcagtttaccaccgaatgaagttttttagaagaggttgttattatttcctttaaagagaggtatcagargacaggggttggtagaagcaataaagaaaaccattaatatagattgagaattaagatgctgttttctgctgaggatggcaggagggaggtgtgttccagcccacagggtgatatggttgtcctgacagcagtgaactcctagggtaaaagcagcagtcagactggctgttagatagcaggtctctgggagc

SEQ ID NO: 692699 - DNA, 690 bp, Homo sapiens
ttaaataaaaattggagaataaccaccctgctcattgcaatttttcactttattactgatctaatttgtatcaactttttgcaactttaactcaggactttatttccaggaaatctgcatacctgagaagaaggtgaagattttgatgtgctatatatgcagtataaagtagtcacacctaaaattaagtgacagaaatcttaaaatgaaaaccataagcagaggcaaggaaagcagggatcataacattggcaataaaaaatatgtaagtttgattataaagaactacttgctagaacttcattcactaaaactaaaacatatctggtattttattgtccatgagattatttacataataytcttgaaaaagcaaacaatttagcgagagaaatagaacagtagtagtccagtagaatttgagggaagatagacttattctagcatcttgaatattgtggtggatacgtgacagtgatgtatctatagaactttacattaaagaagcaaatgatactgaatgaatattatagttggttgataatgttttcttgcatatatcaagtatacacctttggccaggtgcagtggctcatgcctgtaatcccagcactttgggaggctgaggcgggcggatcactcgaggcctggagtttgagaccaacctgggcaacatggtgaaacaccatc

SEQ ID NO: 692700 - DNA, 690 bp, Homo sapiens
ttaaataaaaattggagaataaccaccctgctcattgcaatttttcactttattactgatctaatttgtatcaactttttgcaactttaactcaggactttatttccaggaaatctgcatacctgagaagaaggtgaagattttgatgtgctatatatgcagtataaagtagtcacacctaaaattaagtgacagaaatcttaaaatgaaaaccataagcagaggcaaggaaagcagggatcataacattggcaataaaaaatatgtaagtttgattataaagaactacttgctagaacttcattcactaaaactaaaacatatctggtattttattgtccatgagattatttacataatattcttgaaaaagcaaacaatttagcgagagaaatagaacagtagtagtccagtagaatttgagggaagatagacttattctagcatcttgaatattgtggtggatacgtgacagtgatgtatctatagaactttacattaaagaagcaaatgatactgaatgaatattatagttggttgataatgttttcttgcatatatcaagtatacacctttggccaggtgcagtggctcatgcctgtaatcccarcactttgggaggctgaggcgggcggatcactcgaggcctggagtttgagaccaacctgggcaacatggtgaaacaccatc

SEQ ID NO: 692701 - DNA, 655 bp, Homo sapiens
aagagggtgcttttcaatctgctttctgtgtgcacscttggcaaactctggcaatgcaaatgacatctccagcatctgacacggagggcatacagagctacaccagtgcccagattctgtagttcaggctgctgctatggcacccacttcctgaagttcatggtggccaggagaacccagcggccaagagcttctcctgaaattgtcctttgccaaatttgtagtagagcccctctggcttgacatttcttcataaacagctttacacattggcccagaagacaagtttctggggagttctgaagtgtcaatttgaagcagattcttcaagggcaacactacagcgacttcttaactttgagcgaggccacaatgtgaggggactcttcattggctgctccaaattcaccatggagacaagagcaattccttacatctgctcatcacatattcttgagacttctctttacatattactagacaatatttcattgttccaatgctgtaacaattaataattcttcatattaactttccctattcacattactgtatgttttctctgtcttgatggaccctgaatcctaccctcatgtgaatgaatgctctatatcagcaaaatatggcaaactacagccacagtgataatatattt

SEQ ID NO: 692702 - DNA, 611 bp, Homo sapiens
aatattagctgggcatggtggcatgtgactgtagtcctagcttctttggaggctgctgcaggaagattggttgagcccaaaagtctgaggctgcagtgagctaaaattgcacaactgaactctagcctgggagacagagtgggaccctgtctcttaggaaaaaaagggggggtgggggatggataaaaatatgctgctactggtgatctgatccagtcaacctgcttggaagatgctcttactcccaagcccgaccctttgataatccctagaaagaaagttagggccatttctggctgtccaatgatctatctcattctgcaatatttagaagatcaacctggggacagtcaatgtttggcagaaaaaaatccaactgtcaggatttaggaggaaataaaatatctaaatatcaacattagggaaaagaataaataaatatatatttattatatacattrtatatagagagatgtttgggttctgtgtatacataagtaaaaatatatttaaaatagaaaaggagctaaaattatacacaccagaatataacaatgattttatatttttctgataaaattggggagatttttattttttgtcatggcttt

SEQ ID NO: 692703 - DNA, 648 bp, Homo sapiens
ggaattttagtgattaagcaatttagtgtcttctcctatataatattgtgtaatacttatgtacttgcctttaacaattcgtcttctttttatccaaatgcaagattgtcttgtcttttttttcagattcttaaaacatgaatctaagaatgcaatgttctgcattcttagaggcaagccagtttggtccctttcaaataatttttaaataatatttgttatatcatatacacatattttaattgatacaagcctggaatgtgtttatgtatcataatattagccatttaggatgtagcttattgagatgcttaagtactttccttgatccatcactgaccaatcttactaatactaatagtaaatatggtgctaatcattttttgtaagctatcctataagagatatgttttgttrttttttctgtaggaaacaaacaaattcagcggctatccactgtatcacagtgtctatgaaacatatgagttggtggaaaagttttatgatccaatgtttaaatatcacctcactgtggcccaggttcgaggagggatggtgtttgagctagccaattccatagtgctcccttttgattgtcgagattatgctgtagttttaagaaagtatgctgacaaaatctacagtatt

SEQ ID NO: 692704 - DNA, 658 bp, Homo sapiens
tgggaaaactgaatatccaatacttaaattaaaattttgctacagattggggagtttttcagattattttttaaaatcagtaatttgttaactatatttaaagaacaagaatgtctactgtaaaayataaattttatcaaaggtagtgagagtgataagattcagactatatattgaagtgagagtcagcaagatttgataataaaaagtgtgaaaataagacagaattcaaggatgactcaagatgttaggaaatatccgcagcttggaaataagacaaaaggatgacagcgtgtctttttgtattggaacattgtctcacaggcactggcaaggatgatttaattctctaagacatgcacccatgttgacttaatatttactattgtgaaataacttcactactgtgaagttttatgtggagttgtatgttcgcttggaaacttttgcccagtagagatgaaaatatttttcatccagtagagaagataatctcaacagtgttattttcctgaagttcatcaacccctttgttctctaacttagcaaacttactttgcttgcgttcctggatgactccataaggtccgtttctcctttgaatcggctttatcttttttgagtcctttgatttttttaaatcaacttttctactctg

SEQ ID NO: 692705 - DNA, 635 bp, Homo sapiens
agggcccaggtggctgccctggcaggatcacagcacagccagccctccaactgcagtcacccagctgcctgaaggcaggagcccatgtgccgcggcagggttagtgctgagctgggagagagtgcacctctcttcttccacatgggaatcccatcccccaatcagacgggatcatccagggaagatggacagccctgcccctctgccctcagagatcccagcccagactcttcccttctacccggccccaggcctactcacctgccgatcaagcttctgctgcctcaggtttctgccctcatcatctaagacactgcagagcgaaagaggggttttcagggcttgcccgtgaggtgccaggatacagcccagagcccacccccagcatatctgggcccrttaaacccatcccatcacggctgctgggactcagtgagcccacatggtagaaggaggaagggtggagcctgccatcttgaaaccagcttgaaccaaaagggctcgagctgccactttggaagcctgctaggacccctgtttccccagggactccccagtaaataccggatgagaccctcccctcagatccctgagcagggccgggcctgactgagatccaagagaactatccagag

SEQ ID NO: 692706 - DNA, 629 bp, Homo sapiens
ctgtacattctctgtagaccagccagaaccattctgtggttggtagtctcttatcaggcaaaaaaggagggacagtatcaggtggttggttgatagcagtggtggatttttttgaaatggctagtttctgtttggtagttagagaagaaaggctaatcgtggtttgcgagggaaggggtataatgaggtgggtttgaaccccccatcccgtcatagccaagaatttagttttcaaggttactttggggtcccgttggccaagagatgacccatcagtcagttggtgggcttagaattttatttttagtttatagacctatcctttcctttttatagctctagccaccacctcagtgatttgcatctcagtgctaagttactrtaatagcctttttgacgttttcccagaccctagtttctgtctatattagagcctatattctgctgctggattaatccccatcaagtacccttctcatcaaggtccactgtatcaaatttatatatcacacaagttagcattttaactcctccccatctttacttcttatctcttcttacttccctaaatggagccaaactaatttggtagtaagtcctacttaatggtttctttgttctcaatctca

SEQ ID NO: 692707 - DNA, 1348 bp, Homo sapiens
ttcttcccacaygttttgcacccagagctcctctgttgaaataataagcagtgttgtaatacatgaatttgagcatggcttcagaatctaatgttctctttatcaacaaagagtggctgagatttatttggtgttttagtatcaccaaatttgaagatattacagttaatgaaaaaaagaaacatctgtgttgatattataagaattattctgaaatatgaatatccctggaaatgtcagctgcctactacataatttccaagagtcatttttgtgatcttaatattcagaagtcctcaactaaaaatgactcataaaaagaaagaaagagaccttacagatatgaagactctgattgaaaacatttacttcattcagaatacatttttcacctatttacttacatattatttacccatagatctctacttttggcaaagttcatcagtttagaatgcaggggcaaaatgacttccgtggtgagattttaaaactttttttcctgtgggaggaaaaaaggttgaagaaaaagttaagctttttagataatattattagtggcagaaatcagagacaatggattaatgttttagtcatgggaaatcttcagatctgaagaaaggaaaaatagttacataatggtttttaaaagtgctatgaaattgtcgaggtagatagaattttcccttttgatggtcttaaaatagaaagaagacatgtttaaaatgacaattctagagtctgaatgtcaagaaccaaaccaaaccaaaaaccttttatcatgatggtataatagacatttcagaatgctggctctggaaaagcaaggtggggttgcatctccggtatattgcttacttttgaccttgaacaaattacaaaatcctgataaatctcagtttcttcatctgtaaaataccagggtaataacacctatcttttttggttatggttaagattaaatgagttgctattaactgatacaagatgaaactaccaatgtatactaactgctattttattacacagtatctttgtttttataagtaatgataaccaagtttcctccaaattgtcacaaaggaattatagaaatcaaaatgcaaagtcacgtttgacataaaaaatgaagctaattttcaggaaacttaagaaccacaatcatataaatttcaaattgatatttaggtatatggatagaattttctttagttgtctgcacttctagagaaagaaaagtgaaggatgagaagaagccagagtttaaggaattcttgcacctcgttaacatacaccattatgatcaaattattagaaatgaaaaaatacaagcaaggataacctcttg

SEQ ID NO: 692708 - DNA, 1534 bp, Homo sapiens
ttcaagcaaattcctcattttggtgcaactctaaagtcaacattagtatttattcaactatatgtctcaacttaaacctcaaatgtttgtctcagtttctccagccaacaggcttagctctgtgctatatatatacaactgtatcacaccatcattgtttaaaggtgccaaagctgccatgtctgatgcacctaccagactgccctagaagtatcctataggtaattatggttggagttagaatggccaccccatgtctggttatgatactgggagattttgcttctcacaatttgaaaacatttaagaatgggaagcaaacaaagaattaaatgacctataccaaaaagataggatggagaaatccattttctctattttatcattgaatgccagtcttttatcactttttcaagaccccaaatcaagtgacagatgtgatctgaaactttcttagctctaactaaatttcaacccatcaaggggaagttatttctggttccaatataaaatttagtttttatttgcyggtgctcattgattggaatcctcaccccagattctgttctttccatttaattattaagaatgtttcttaagtcagtgacctagagttttctttttagttaattaatttaaacatgcattaagcacctactatgtgccagatactagagataaaatattgagtcacagtccctgaatgcaaggaacctaaggttcagaggcatgtaatctcccaagtgtaaaaaatgaagatttttttttccccttccatttgtcctccttacatagtgctaaaaatgatgcaaatgagagggaaaagtgccattagctccttgtagctgtttacccaacttggtaaggtaaaagacaattgctaaggtatgtatgttaactatgcattaatggcttattaactcatttctcagtaatgtttactgaggaaaaaatattaattatcaggtaaatatctggagcataaccactgtattatgtgtgtggcatctaaaaataataccagacacaagtttttatcttcaaggaatttacagttaagttggagaaaacaaaattttaacaaatattttaaagataaaataggttgcattgcactttgtatgtgcatttgtgtgtaataattgattttaaaaatgagaattgttagttttatagatagaagagaactgcccagctaaccttcattagtttagattctcactgtctcacatcgtgttgctctatcccaattaggaaagagtagctatatgtcaaataggtgaagggtggggatcaatcagaggaaagtgcgccccagaagaagacaagttctcaatctagtccaaagatttaacttgtagcatggctttcaggctttaaactgtcttcagcttggaacaatgattaaacttccactgatttctcatcagaaacaatggagcccagaatataaggacagcctcattaaactgttggaagaagaaggaagagaagtaggaggaaaagtttaaagttacagttggagatataggat

SEQ ID NO: 692709 - DNA, 633 bp, Homo sapiens
agatcaggagttaaagaccagcctggccaacatggctaaactctgtctctattaaaaatacaaaaattaactgggtgtgggggcacacgcctgtaatcacagctattcgggaggctgaggcacaaggattgcttgaacccaggaggtggaggttgcagtgagccaagatcccacccttgcactccagcctgggcaacagaataagactgtgtctcaaaaaaaaagaaaaagatataatctaaattatatttgttaagatgtatctcttttgatatacayagcacctattcatttatcttcacattgatacatataacaataatttattttttacattgttgtgtggtagcccagtgtatgattataccaaaatttatttcttttcttactgatggacatgtaagttgtttctaggatgttgttgcttgtttgcttttcttttgtttgcctttgatacataatgttgaaataaaaatccaaaccacaaagtgatattacttcacacccactaggatggctttaataaaaagacggacaataacaaatattggtgagggcatgaaaaaattggagcctcatacattgctgatgggattgtaaaatggtacaaccactttggtacacagtctagca

SEQ ID NO: 692710 - DNA, 3107 bp, Homo sapiens
gttgttgatagaagaaaaaaatccaaatgctgtttaaacatggtaatatatttattcccataaataataagggaagaacaaattaaaacaaaaaagcatatcacagccatcataagagtaaaaatcacagggtctgacaattcaaaatctaataaggatatgagaaaattctagacagcagtgtgaactgccacatttgcttcagacagcaatttagcaatatgtggtaaagctgaaaaagcacacactctataatagcaattccacttttaggtatatatcctagacaaaatattgcacatatacagaagaaaaccatacgaaagtgtacattttagattacattgcttgtaattgaaaaattggaaataatgtattaaggtggggaaatacataaactttagaattcataaaatggttaaaattaaagaaatatatatatatacagaaagttcaaaaatacaattttgaagaaaaaattctacagtgatacatacagtatgagatcatttatgtggacttaaagcacataataaaacaatctgaaaacagagattggatggatacacacaccaaattttaataaaggtataagttggactagaagcagaacaaaggtgattttaactgtatttctaatattttaattattttaaaatagctgatgcaaaaatgacaaagattagcatttatttattctagatggttgatcacacatatttgaatattattttctaagtctgtagttttaagcatttcaaaatctaaagaataatttttaaaagctataaaaatatgaataaaggactagaaatcagtaacttttaattaatatgctggattctgggacaactttaaactcaacagtagtatttaccatggtgtcaaatttagcatttatcttgagttcacaaacttgagttcactaattttgtctctgtttttcaaatttctagcgtttacagactactataacaaccatactcttttaggctaagtgttggaagatagtaatagatttctggctgaaaaagaagtcttactttactaacgtaactccaagatcactattcaagcccatcattctcaccgtcccttcacgtggtcatcgtgcccacctacaagttctccaaagccaaaagcccatccctatttagaaccgttttggctcccatgactctcttttccatttggcttgtctattaccctggccattatttacacactaaggttcattctttgagttcatgcgagaacagtttctggggtctttaaattttaagagaagaacttatgatattctgctcacctataaggatacacacaattaataaacctgaaaggtcccctccctttctttttaacaagattgtgcttactatttatatctgataaaaaggatcactctacaaatattatttgtctcaaattatgactcacatctggataaagatggaagcattttactgtattaattacaagaggatattcagtaagcctgtcattcataatcatccacagtccttccaaaaatgaagatgcttcaatattgttcttgaagtaggaataataaagtccctttttttttaaaaaaaggcacatattgtcaatgtaattaaaactttaaaatatttatttttatcaattctttagtacattttttttctgaaaaaaaaggtcaataataagacttcctaattactccttgctattttgcattcttggactttaaaaagcacgtattttcaggtgatcaccgtactattctttcaaattgtctataggttttcaaactaaagagttggaggtatggtccaacaatttaaagagtttatctaatattgtcttaaagtgtgtagacagtacatgtttaattttatcaaatctgggttttatcccccacatttgagatgcttgaaggttgacctctgattaattctgtcataaacagggatgccttcatgcctctgtacaactttgcatatagaaaattacttctttttttcccatgctcttaggaaataaaatataatgaccataagcatcatgggcaaggaatccartgcttctagcttacttcatagctccatctaatcctctgtacaaagtgaaagctcaatgtcgattgactattgttgcttacaaatgctatgtactaaaaagcagattattttagtgtcttacacttcagcatataaaataaagtcttcattaggatagtagaagtgctgttgagttaaaattcatggattaatctcaaggatctagaactagaaataccatttgacccagccatcccattactgggtatatacccaaaggattataaatcatgctgctataaagacacatgtacacgtatgtttattgcatcactagtcacagtagcaaagacttggaaccaacccatatgtccatcaatgatagactggattgagaaaatgtggcacatatacaccatggaatactatgcagccataaagaaggatgagttcatgtcttttgtaaggacatggatgaagctggaaaccatcattctcagtaaactgtcgcaaggacaaaaaaccaaacaccgcatgttctcactcataggtgggaattgaacaatgagaacacttggacacaggaaggggaacatcacacaccggggcctgtcatggggtggggggtggggggagggatagcattaggagatatacctaatgtaaatgatgagttaatggatgcagcacaccaacatggcacatgtatacatatgtaacaaacctgcatgttgtgcatatgcaccctagaacttaaaagtataattaaaaaaaaaattcgtggattaacaacagcatgttgtgtcttattttcccatcaatttcttgttttcactcctaaaatctaaaagcaaaaaagggccacattgtttaaaatgcactctccctaaaaaatgctatatgctataatcatatctgcctcatccaacacgagtaactactaaattaaaggtttgttttagctggtgtctgaaaggccattacctcatagttgattggcaaaatatgagttcataaagcattttcctttctgcttaggaggataacaaagcaatacaataatta

SEQ ID NO: 692711 - DNA, 1220 bp, Homo sapiens
tgtctccagaaagccgggtgagaaaggctgctataagttcctcagaaagtgtcactgtactactaggccccagtcacccaaccccaacagcactaaaagaactatartgagtgcacaaatctagaacttagataagaaaaaagataaatgctttatctccaactttaagcaactaggtatttttacttactaggaatagcatggggctcaactgtctcttgctctgaatagaatgcatttacttaacaaaataaacccacagaactataatgtttctcaaagggaattatcagctcttagaaaatgaatttttaaaaatcagcatattaaataaatattaacttgacaaggcttttcctattgacccttctttagcaaacaaatattcatcttttgataactgctaaatgcaaattttcactttaaaaagataaagataaatattaaaaaccagtttgcccttcattttcgcactaatcaccaattctcagaaactgccttttatattcttcagtgtggactacagcaacttcaactgctgggttagttgtgatcaaatcactttaaagacaccagtggagttcttttactcaaaagcaaatgacttttaaaaatggcccaattttaagagggatgaatatttttaagaagcaaaaattactttaaaacaaggttgctaattaaaagtcaagcgtcgttccatattgaatgtacaaagcgttactaaaaagatgggaaaaactaaacatgacattcctatttttaatttatgctggcgtgtgtgctgatagcacagaacatcacaacagataaattactaagtattccactttactaagtctccactcaaagttcctacgtttacaaatatgtaagtaaaagaggcacaaaaatgtaggggatggtgttttcgttgctcatctgtgctcagttgcgaattcttctaatatcagatacataatgcgatgaaatgggaatgcttatcttctatacttctatttattttcataaagcgggaaggggaggtggtcttgattcatttaatattagcgttttgcaataaagtagagcagcataaaatataactgaagaagaattcattttccccaggataatgcacccttcctcctgtttctacagtaaagcacatcattttgctattaaaaatgtccatttttcacaactgacttttccttaactctagtcaacactgctcttca

SEQ ID NO: 692712 - DNA, 1220 bp, Homo sapiens
tgtctccagaaagccgggtgagaaaggctgctataagttcctcagaaagtgtcactgtactactaggccccagtcacccaaccccaacagcactaaaagaactatagtgagtgcacaaatctagaacttagataagaaaaaagataaatgctttatctccaactttaagcaactaggtatttttacttactaggaatagcatggggytcaactgtctcttgctctgaatagaatgcatttacttaacaaaataaacccacagaactataatgtttctcaaagggaattatcagctcttagaaaatgaatttttaaaaatcagcatattaaataaatattaacttgacaaggcttttcctattgacccttctttagcaaacaaatattcatcttttgataactgctaaatgcaaattttcactttaaaaagataaagataaatattaaaaaccagtttgcccttcattttcgcactaatcaccaattctcagaaactgccttttatattcttcagtgtggactacagcaacttcaactgctgggttagttgtgatcaaatcactttaaagacaccagtggagttcttttactcaaaagcaaatgacttttaaaaatggcccaattttaagagggatgaatatttttaagaagcaaaaattactttaaaacaaggttgctaattaaaagtcaagcgtcgttccatattgaatgtacaaagcgttactaaaaagatgggaaaaactaaacatgacattcctatttttaatttatgctggcgtgtgtgctgatagcacagaacatcacaacagataaattactaagtattccactttactaagtctccactcaaagttcctacgtttacaaatatgtaagtaaaagaggcacaaaaatgtaggggatggtgttttcgttgctcatctgtgctcagttgcgaattcttctaatatcagatacataatgcgatgaaatgggaatgcttatcttctatacttctatttattttcataaagcgggaaggggaggtggtcttgattcatttaatattagcgttttgcaataaagtagagcagcataaaatataactgaagaagaattcattttccccaggataatgcacccttcctcctgtttctacagtaaagcacatcattttgctattaaaaatgtccatttttcacaactgacttttccttaactctagtcaacactgctcttca

SEQ ID NO: 692713 - DNA, 1220 bp, Homo sapiens
tgtctccagaaagccgggtgagaaaggctgctataagttcctcagaaagtgtcactgtactactaggccccagtcacccaaccccaacagcactaaaagaactatagtgagtgcacaaatctagaacttagataagaaaaaagataaatgctttatctccaactttaagcaactaggtatttttacttactaggaatagcatggggctcaactgtctcttgctctgaatagaatgcatttacttaacaaaataaacccacagaactataatgtttctcaaagggaattatcagctcttagaaaatgaatttttaaaaatcagcatattaaataaatattaacttgacaaggcttttcctattgacccttctttagcaaacaaatattcatcttttgataactgctaaatgcaaattttcactttaaaaagataaagataaatattaaaaaccagtttgcccttcattttcgcactaatcaccaattctcagaaactgccttttatattcttcagtgtggactacagcaacttcaactgctgggttagttgtgatcaaatcactttaaagacaccagtggagttcttttactcaaaagcaaatgacttttaaaaatggcccaattttaagagggatgaatatttttaagaagcaaaaattactttaaaacaaggttgctaattaaaagtcaagcgtcgttccatattgaatgtacaaagcgttactaaaaagatgggaaaaactaaacatgacattcctatttttaatttatgctggcgtgtgtgctgatagcacagaacatcacaacagataaattactamgtattccactttactaagtctccactcaaagttcctacgtttacaaatatgtaagtaaaagaggcacaaaaatgtaggggatggtgttttcgttgctcatctgtgctcagttgcgaattcttctaatatcagatacataatgcgatgaaatgggaatgcttatcttctatacttctatttattttcataaagcgggaaggggaggtggtcttgattcatttaatattagcgttttgcaataaagtagagcagcataaaatataactgaagaagaattcattttccccaggataatgcacccttcctcctgtttctacagtaaagcacatcattttgctattaaaaatgtccatttttcacaactgacttttccttaactctagtcaacactgctcttca

SEQ ID NO: 692714 - DNA, 1220 bp, Homo sapiens
tgtctccagaaagccgggtgagaaaggctgctataagttcctcagaaagtgtcactgtactactaggccccagtcacccaaccccaacagcactaaaagaactatagtgagtgcacaaatctagaacttagataagaaaaaagataaatgctttatctccaactttaagcaactaggtatttttacttactaggaatagcatggggctcaactgtctcttgctctgaatagaatgcatttacttaacaaaataaacccacagaactataatgtttctcaaagggaattatcagctcttagaaaatgaatttttaaaaatcagcatattaaataaatattaacttgacaaggcttttcctattgacccttctttagcaaacaaatattcatcttttgataactgctaaatgcaaattttcactttaaaaagataaagataaatattaaaaaccagtttgcccttcattttcgcactaatcaccaattctcagaaactgccttttatattcttcagtgtggactacagcaacttcaactgctgggttagttgtgatcaaatcactttaaagacaccagtggagttcttttactcaaaagcaaatgacttttaaaaatggcccaattttaagagggatgaatatttttaagaagcaaaaattactttaaaacaaggttgctaattaaaagtcaagcgtcgttccatattgaatgtacaaagcgttactaaaaagatgggaaaaactaaacatgacattcctatttttaatttatgctggcgtgtgtgctgatagcacagaacatcacaacagataaattactaagtattccactttactaagtctccactcaaagttcctacgtttacaaatatgtaagtaaaagagrcacaaaaatgtaggggatggtgttttcgttgctcatctgtgctcagttgcgaattcttctaatatcagatacataatgcgatgaaatgggaatgcttatcttctatacttctatttattttcataaagcgggaaggggaggtggtcttgattcatttaatattagcgttttgcaataaagtagagcagcataaaatataactgaagaagaattcattttccccaggataatgcacccttcctcctgtttctacagtaaagcacatcattttgctattaaaaatgtccatttttcacaactgacttttccttaactctagtcaacactgctcttca

SEQ ID NO: 692715 - DNA, 957 bp, Homo sapiens
aaattgaatccatgtggtctggggaggacccggtggatcatctccccaggtgatgatctcacatgcagatggagttgagaaccagtgctgtaagtgtactgcatcatctacatttcctggaagctctgaactaggcccatagcagaagcctggagccatagggtcggggcagctgaagagttacttccatatcataggatagaattaaaaatctaattcctctcttgccagatgtatgacttgagtcaattacttagattccttttctgtacaataaggataatgatgttatcaaaactaacagtattggctgggcatggcggctcatgcctataatcccaatactttgggaggccaaggtgggaggacagcttgaggccatgagtttgagagcagcctggaaaacatagtgagaccccatctctataaaaaagttagccatgtgtggtggcacatgcctgtagttccagctacttgggaggctaatgtgggaggatcacttgagcctggaaggtacaggctgcagtgagctactccattytagcctgagtgacagagcaaggccctgcctcaaaaaaacaaaacaaaacaaaacaaaaaaaaacaaaaccaaaaaccttacagagacactgtcccaaaaaacaaacaaaaaacccaaaaacgtacagtattgttgtagggattaagtgagatgacatgtgcaaagcacgtagtgcagtacccagcatgttaaaaaatgctagccttcagtgtcatcacaggtacccctaggattaagttaggctaggcacccactccctgacaagacacagaggttctcatgtatttctggccacttatgaagtaaagggtgttcctttaaccaggtaccactgagatggctgcagaccctgagtgtcagtgtgcattgtttcctgataggtacgaaggcttttcctggggtagcagccccaaaag

SEQ ID NO: 692716 - DNA, 957 bp, Homo sapiens
aaattgaatccatgtggtctggggaggacccggtggatcatctccccaggtgatgatctcacatgcagatggagttgagaaccagtgctgtaagtgtactgcatcatctacatttcctggaagctctgaactaggcccatagcagaagcctggagccatagggtcggggcagctgaagagttacttccatatcataggatagaattaaaaatctaattcctctcttgccagatgtatgacttgagtcaattacttagattccttttctgtacaataaggataatgatgttatcaaaactaacagtattggctgggcatggcggctcatgcctataatcccaatactttgggaggccaaggtgggaggacagcttgaggccatgagtttgagagcagcctggaaaacatagtgagaccccatctctataaaaaagttagccatgtgtggtggcacatgcctgtagttccagctacttgggaggctaatgtgggaggatcacttgagcctggaaggtacaggctgcagtgagctactccattttagcctgagtgacagagcaaggccctgcctcaaaaaaacaaaacaaaacaaaacaaaaaaaaacaaaaccaaaaaccttacagagacactgtcccaaaaaacaaacaaaaaacccaaaaacrtacagtattgttgtagggattaagtgagatgacatgtgcaaagcacgtagtgcagtacccagcatgttaaaaaatgctagccttcagtgtcatcacaggtacccctaggattaagttaggctaggcacccactccctgacaagacacagaggttctcatgtatttctggccacttatgaagtaaagggtgttcctttaaccaggtaccactgagatggctgcagaccctgagtgtcagtgtgcattgtttcctgataggtacgaaggcttttcctggggtagcagccccaaaag

SEQ ID NO: 692717 - DNA, 681 bp, Homo sapiens
tcaccccagctctgcctgcccacccaccccattttatactccagggttaactgccccaaatgccccatctggttgtactgagagggacggccacccccagtgacccagaggcctgggagtgcttggtccctgcgtggctgggagccctcacacatgtctggggtggagacaactctttggggcaggcaagatgagcatggcagccacatctacctgtcattctgaaagctgagggcagcagagaacttcaagggcagatggggcggaaggatcccttgtcttcatatagcccctgcctccatgacaatatgggtagagcgaggaatcgagacctagaagtatctctagttgggtggtggggagtaaattggaagctggagctagggaaagaaaagcagaagaagcccccatttttactcacaagttctcagaaagattcttggagctctgcagcagctgycctcgtccccaagaatccctctgtatacccagagggctcccaggctgacactggaaaccattgtatggggtttacgtgaggcaggaccaaaatcatctgacttttcttgcctgggcaggaaggggccctggtcactgcagggtggggtaggcatggagtggtaaaggagcctggggagcggagacaagggctttttccagcagaaagaggtgcatggttgg

SEQ ID NO: 692718 - DNA, 681 bp, Homo sapiens
tcaccccagctctgcctgcccacccaccccattttatactccagggttaactgccccaaatgccccatctggttgtactgagagggacggccacccccagtgacccagaggcctgggagtgcttggtccctgcgtggctgggagccctcacacatgtctggggtggagacaactctttggggcaggcaagatgagcatggcagccacatctacctgtcattctgaaagctgagggcagcagagaacttcaagggcagatggggcggaaggatcccttgtcttcatatagcccctgcctccatgacaatatgggtagagcgaggaatcgagacctagaagtatctctagttgggtggtggggagtaaattggaagctggagctagggaaagaaaagcagaagaagcccccatttttactcacaagttctcagaaagattcttggagctctgcagcagctgtcctcgtccccaagaatccctctgtatacccagagggctcccaggctgacactggaaaccattgtatggggtttacgtgaggcaggaccaaaatcatctgacttttcttgcctgggcaggaaggggccctggtcactgcagggtggggtaggcatggagtggtaaaggagcctggggagcggagacaagggctttttccakcagaaagaggtgcatggttgg

SEQ ID NO: 692719 - DNA, 594 bp, Homo sapiens
aaaaaaaaagggtggggtggggggaggggcggtgaagcgaactccttgacttcctatgttacctttgtcgttatactgtctcaaaccaggagtgtaagggttacctttgtcgttacactgtcttaagccgggagcataagctgggatgtgtgacttggtcaccacgttttccagtctataggaaaaagcaggggaatgcatgctgttcccattgtatagaaacagacactgaagcccagaagaacacggaactgggtataggtcctccgggttctctgttgtgmcagaaagagataaggtgatgaacctccctgagaggaaggcgggcactctccacccatatgttattaccccatttccccaaactcatctctgggtctcacatcttccccaacagtctgggccttatcccaactcttcaccgaggaaaaaggccattttcagttgtgcagcattttagagttagaggttcacacacggttccttatttttcagcagcgccgtgagataagcaaaatgtgtactcttactccagtttttacagatgcagagcctgggacactgggctcaggctggcgaaggcagcttcagggc

SEQ ID NO: 692720 - DNA, 647 bp, Homo sapiens
gagagcaggaaacagaatggccaggctggagccagctcagccctggtgtcttccctagaggacaacatgctgctccccagccctgagcacgccagtcttcaggtcctgccaggtacaggacagcttgtagtcccacacggcagtcggtcgrccaaccgcaccccacaagcctcatccaatattgatgcagtgtctaatgtctcctgaacacaatacactgcttctcaaacaagctcctgcctttctatgacccagaggaggcagaggactcttgacatcccttaaacagctacacacctggtaaattttgcccctaatcacaggcaaatgttatgcgaaccatttctttccaggccggatgaatggtcccactgcctgctttcagggttttcctcactactctggctcttccaagaaaggaaagaaaggagatgaaaaccacagttggaagcacctcctctgtgccaggcacaggacaaaaggctgtgcatgcataatctaatcccaacaggaatccttccaagtgggtgctatgggctaccatttatagatgggactgagatgtaagggggttgattaggtcactcaagcaagatcacaccatttggatggggcgaagttaaactttagattccgcatctcagact

SEQ ID NO: 692721 - DNA, 1013 bp, Homo sapiens
accagcgtgtatggggttctgctttctccacatccttgcaacacttgtcatatgttttatagtcatcctgcagtaggcgtgaaatgatgtctcattttggttttgatttgcatttccatgatgactactgatgttgaacatctcatgtgtttatcagtcatttgtatatcttcttagaaatgtcttttttggccgggcgcggtggctcacgcctataatcccagcactttgggaggcggaggtgggcggatcacctgaggtcaggagttcaataccagcctggccaacatggtgaaaaccccrtctgtactaaaaatacaaaattaaccgggcatggtggcaggcgcctataatcccagctactcgggaggctgaggcaggagaatcgcttgaaccctggaggcggaggttgcagtgagccgagatcgtctggggggcaagagcgagacttcgagactttgagactttgtctcaaaaaaaaaagaaatgtctttttgattcctttacccatttttaaatttggttatttgtctttttgttgagtggtagatgttttctttatatattctagatataagcccaagactcttagcagatattaatcacaaagttgtataaagcataaagactatgtaataatagtaattttccatcacctattttcaactctcttatctgctaaaggtaaaattttagggtgccatataaattgcctaaaatatatatactataacttagttattaagtaattacctttaccaataatgctacggtgcatatcctcttacctaaatctttgtatacatttgtaattatttctttaggataatttcttagaagtagacttgtgtgtcagtaggtgtgaatattttaagatttttgttattgttttctagacagagtctcgctcttttgcccaagagggaatgcagtggtgctattatggctcactacagcctcagcctcctgggctcaagagatcctctcacctcagccgcatccaagtagctggg

SEQ ID NO: 692722 - DNA, 1524 bp, Homo sapiens
tattaatgtatcaaattgttacaggaggctaactccttttaactttagggttctggagatgtttgggtgggataagatcagttgaaattttaaaacattgtctatctactgtatgcttacagcacaatggggaaaccaagatgatagatgtgacccatgacctcaaaaagtttcagaactagatataaattacctgttgggttttgttttctagtatttggtttaatgcttctagttgcttagttactggaggaataaatagaaaatgaaaacaagtacagttgtgccctattcactaaatataagaaattacagggccgggcgtggtggctcacgcctgtaatcccaacrcttcgggaggctgagttgggcagatcacaaagtcaggagatcgagaccatcctggctaacatagtgatacccccatctctactaaaaataccaaaaaaaaaaaaattagccaggcctggtggcgggcacctgtagtcccacctgcttgggaggctgaggcaggagaatgatgtgaacccgggaggcggagcttgcagtgagccaagactgtctcaaaaaaaaaaaaaaattacaaatatgtttaatacctaatagccaggcctgaaagaaatttgtttccttaaacatttgacattaattttggttctaaatataattatagtttcagaatttgttgatctaaaatttataggccaggcatagtagcccacatctgtaatcccagtactttgggaggcagaggtgggagaattgcttgaggccagctgtttgagaccagcctgggcaacatagcaagactccatctctacagaaagtattaaaatgaacaaacaaaaaaaagccaggtgtgggggtgtggacctgtagtcctagctacttgagaggctgaggctgtagtgagctatgatcgtgcagtttcactccagcctaggtgacagagcaagaccatgtctcaaaaaaaaaaagtaaaatttaaattatgtttgggttttgtgaggttataaagcattccttttagacttataaaatgaaagcttatgtttacacgtttcataggactgtttttaaaatttattttaatgttctttctgctgctttcatttatctcttatttttgtcttttcccatgttctaatctacctaaagttatagctatatttaatatagtgttaatattaagtattgtatttagggaaataacggatacatattgaaatagggatcgtattaccttatagtaatctaaagaaatagcaactctgcacctgtgtagtcttaccatgttaaaagaaccaaataataaatccataaatatttttatagagaacatgtggaccagcagtgcagagaagctgtttaggattctcaaaattgtaatataattgatgcagataatggagatctcatttccctcctttgttttccctaaacagtataaaagaagcctgtattgttttgaatttgaacgtcggttctgcactactgctgaaagatgtactgcagtcagcttca

SEQ ID NO: 692723 - DNA, 1391 bp, Homo sapiens
actttaaaaaagtaccagaaagtatttattttatgttacttcagtattattaatgttcagtattattgtgcttgtgaaagttattcatgaaatacaagtgccactaatttcttttcactaccctgtattttctattgtactcttttgcaaaattgaattatctttcccttgtaaatgaacatttgtattgtttgaggaattatttatttatttatttattttgagaggaagtctcgctctgtcacccaggctagagtgcagtgatgtgatctctgttcactgcaacctccgtctcccagtgagaatcaagagattctcctgcctcagcctcccaagtagctggggctacaagtatccaccaccatgactggctgatttttgcatttttagtagagacggggtttcaccatgttggccaggctggtctcgaactcctgacctcatgatccgcccacctcagcctccaaaagtattgggattacaggtgtgagcctctgtccccggctgaattccttttattaaaagcagctattttgtgactattgttttaaatgtctcattctatgtgcaagcatatctctagccagagtgagttatagttggattgctgggatattttatctttacagagaggcaaaaaaaaatgcatcttaaaatcaatgaaatgtgatagataatgtcagagcatgatattaagcagtaatgtaaatatacacaataagcttatcagagtggctctgtagctgataccaatatttggtattatcagactttctaattttggcttgtcttgtgagcataaaatggtgttctggttgtaatctttatttcttaattaataaatatttatatttgacaacttatgtaaattgtacataatttctgatttcttttattttttattattagtattgacagtctattattctttccaaaatgaaattaaattaggagtgttttaaattttttattttatgcattttaaarctacatactaatatcatgtttttgggttctaaccattgcatatgggcaaagaatagattctttgaaaaaccaattctctgaattttattaaatcttgttttatagcttattcatgatcaactttatatttcaagtttgtttgagtcaattgaatattctcaagatattgggtagactattccatatatgtctattagatcaagcatgtgaattgcattatttaaatattctatagattaggatctgtgaaaacagcacatttttatacaataacggaagtttatcctcaaggttaatttgctccaagtacaaagtatttttgtaaactgtaaggttgagttttaatacattttttattaaacaaggaatagctatttatcctttcaaaatttcattgttgttgc

SEQ ID NO: 692724 - DNA, 1300 bp, Homo sapiens
gattccaaagctcaagctctgagtcatattttccaggtcttgcttggctcttaacagaaagctacttgggttccttccagttctgggagcttctgagagaaaaacgtaataaacacaaaactagaagcaatagaaagcttttaagtaagcccaagggtagatggctgaggatttctcagactgcctctcagatacattcctcactcaacctgcctgctcctggggctgggggacagcagagatgttctaggaactggcttgtgtgtgtgcacgcctaggggtttggggtaggatgagccttttggtctgggtgctgagccgggtgccctgggcatggccagaggtgcactgttagcctctgtggctgccrgtttctcatgatggcatccgtcctttcttggggatcatcttctttaatcctccggcaagactaggtctccaaatcagattgaactgatgtaggtgtgagaatcctcttgctcaagcccttttgttctcttagagcaaggggacactggagcccccagtcttccccatccttcaagggtcagctcaaatcccgtggttcctatgacacctcccccagtaatctccttatgagtcatgcgacttctaatgtatcattttctttctctgacccacagtttacaatgtgaaaaatagaaggtttcagtgtacctaccttattctacttattttgagagttaaatgttataatgcacttagggcacttagcagagcagtaatcactcacctgtcatactgattgttttcagtggtttctcttccggcatgaatgggtggttttgtctccagaacttcttttgtcctcagagtctgaggtcctgggggcatggagttgtgtagatgagtgtgggcttcaaagtcagacctgactccccactccctagctggatctccttggataagtcattctgcctctctgtgcctcagtttcctcacctgcaaaatgcaatgggaacatctccctgataaggatcaagtgatttaatgctttgaaaatgcttagcacagtctggacatatgacaaagtgctgtatgcgtacatattaagagaaatgcatttcttgccgactcagtacctatgagtaaaatgtacagatgggtggaatgtgtggctttctcacagtgcttacctttactatgggcgatgcacattctttctttcctttctcctccccttcctcttttaccattttaccaaaaagcatggctggtcatgatgacccaacgaattgatttcatgacccatgaatgggtcgtgacccgcagttcgaaa

SEQ ID NO: 692725 - DNA, 1300 bp, Homo sapiens
gattccaaagctcaagctctgagtcatattttccaggtcttgcttggctcttaacagaaagctacttgggttccttccagttctgggagcttctgagagaaaaacgtaataaacacaaaactagaagcaatagaaagcttttaagtaagcccaagggtagatggctgaggatttctcagactgcctctcagatacattcctcactcaacctgcctgctcctggggctgggggacagcagagatgttctaggaactggcttgtgtgtgtgcacgcctaggggtttggggtaggatgagccttttggtctgggtgctgagccgggtgccctgggcatggccagaggtgcactgttagcctctgtggctgccagtttctcatgatggcatccgtcctttcttggggatcatcttctttaatcctccggcaagactaggtctccaaatcagattgaactgatgtaggtgtgagaatcctcttgctcaagcccttttgttctcttagagcaaggggacactggagcccccagtcttccccatccttcaagggtcagctcaaatcccgtggttcctatgacacctcccccagtaatctccttatgagtcatgcgacttctaatgtatcattttctttctctgacccacagtttacaatgtgaaaaatagaaggtttcagtgtacctaccttattctacttattttgagagttaaatgttataatgcacttagggcacttagcagagcagtaatcactcacctgtcatactgattgttttcagtggtttctcttccggcatgaatgggtggttttgtctccagaacttcttttgtcctcagagtctgaggtcctgggggcatggagttgtgtagatgagtgtgggcttcaaagtcagacctgactccccactccctagctggatctccttggataagtcattctgcctctctgtgcctcagtttcctcacctgcaaaatgcaatgggaacatctccctgataaggatcaagtgatttaatgctttgaaaatgcttagcacagtctggacatatgacaaagtgctgtatgcgtacatattaagagaaatgcatttcttgccgactcagtacmtatgagtaaaatgtacagatgggtggaatgtgtggctttctcacagtgcttacctttactatgggcgatgcacattctttctttcctttctcctccccttcctcttttaccattttaccaaaaagcatggctggtcatgatgacccaacgaattgatttcatgacccatgaatgggtcgtgacccgcagttcgaaa

SEQ ID NO: 692726 - DNA, 643 bp, Homo sapiens
aaggggtccaaatgtgaaaggaaagggcaaatacaggggaaacataggggtgttcagaaatagttcctaggtcactgcctgtttcaatatgtacagtcctcggccccacccacaagattctgacttggcaggtcagagttggagatggggagctacctggttacgagggatcccagtgcattttgaggcagccggttgttagactgcattgtaaaaattacccctcaaagatgtgaaggtaagcagaaaggcataggcaggctagaaaaggacacaagtaaaacatgaacaagttcattccagaaggagattctcaaccacagctgcacaccacaatcagctggggagattttaaaaccgcagtgcccaggctctgcaacccagatcaattactacagaatctcttggggatgaaacatgggcatcagtattttttgactttgtgtgtgtgtttcttgttttttgtttttgagacagaatcttgttctgtcacccaggctggagtgcagtggtgtgwtctcagctcactgcaacctctgcctcccaggttcaacccattttcctacctcagcctcccgagtagctgggattacaggcatgcaccaccacgcctagctaatttttgtatttttgatagagatag

SEQ ID NO: 692727 - DNA, 843 bp, Homo sapiens
tttgtccctatagttttgttttttcaagaatgtcctataaatgaaaccatgtagtatgcaaccttttcagactagctgctttcctttagtgtaatgtcttgagcatcacacaagtggttgtgtgtaccaatagttagtccctttagactagtattccattgtatggatatactgcagtttgtttatccattcaccctctgagggatatttgagtttgttttccgtttttggcaatttgaaatagagcttctgtacacattcatgaacaggtttttgtttaaacataagttttcatttcttaagggtaaatacctagaaatggaaatgctaggtcctattgtgcttactggagtatttamgtgtctttaaacagcttggcattatataatttagcttacatacttatataagagtttggcatcagagtttttacactcccgtcagacagcagtgtatgagagttccagttgctccacatccttgtcagcacttggtatcgtcagcatttttaatttagccattctgataggcatgtcctaggatcttgtaacctgtttaaccttttctattttgcaatacttaccctccttctataggtgggatattgtaaattcagagagccaatgtggctagcagagcctcaaactaacagctttcggatgtatgtgggagccaggtaattctccccaccaaacagactcagaggtttactcaaaggtcatgtgagcaccaaaaaataataaaatacatgtccaagtccccttctactattttgagccccatccatacacttgaggctggggagagttcaggagaacagtgtttctgttgcattcatttgct

SEQ ID NO: 692728 - DNA, 583 bp, Homo sapiens
gggtttctgccttttaaatatttcattatcaatatatcatccttttagcctccagaaagcattttaatggagattctggcttaagacacttgtgggtctgtctgtctctctctctctctcttttccttgaaacagggtctcactttgtcacctagactggagtgcagtggcatgatsacagctcactgcagctggaccttccaggctctagcaatcctcccacctcagcctcccaagtacttgggactgcaggcacacaccaccatacctggcttttattttattattattatttttttttttggtagatgcgaggcttcaccacgttgcccaggctggtcttaaactcctggactcaagcgatcctcccccttcggcctctcaaagtgctggaattattggcttgagccaccacgcccggccaagaaccttgtctcttgtgatgcaccccagaacaaaacatcactgcaaaacacaccaaggcgtaagtttcagtcctaagtcccatttatccaccatacactatgtgccaggcacaacgctaagtgcttctatggacgagcttcccttaatctcagcagta

SEQ ID NO: 692729 - DNA, 583 bp, Homo sapiens
gggtttctgccttttaaatatttcattatcaatatatcatccttttagcctccagaaagcattttaatggagattctggcttaagacacttgtgggtctgtctgtctctctctctctctcttttccttgaaacagggtctcactttgtcacctagactggagtgcagtggcatgatgacagctcactgcagctggaccttccaggctctagcaatcctcccacctcagcctcccaagtacttgggactgcaggcacacaccaccatacctggcttttattttattattattatttttttttttggtagatgcgaggcttcaccacgttgcccaggctggtcttaaactcctggactcaagcgatcctcccccttcggcctctcaaagtgctggaattattggcttgagccaccacgcccggccaagaaccttgtctcttgtgatgcaccccagaacaaaacatcactgcaaaacacaccaaggcrtaagtttcagtcctaagtcccatttatccaccatacactatgtgccaggcacaacgctaagtgcttctatggacgagcttcccttaatctcagcagta

SEQ ID NO: 692730 - DNA, 624 bp, Homo sapiens
acccgcgtgcctccccagtggaaggccagcaaagccacacaggaagagttggggtaggaaagcagaaagtgaaccccaggaggccaggctggccacggagccccatcccacgcacacgggcccggtcactcaggggcccacgtgtgcaggacaccgggagctcacagggacagcgccccgrgggatgcaaggaactttgcctctctgtccctctctgtagggatggaaagaggagagcgatttctgggatggaagccatctgcctcctctcaactctcgctgcccaaccagaaagggaagaaaaacaggaagatgcggggcaggtgaggagctgggtgagcgccgccagcccgcagcccagcagagcagggcttggccaagcctggcgccagggacttcccctctacccccaccataagccccccgccaggtgggaccgacaaaagtcccagacagatgccccagacaggatgcccagcgcaacccccgccccttcccctgctgggggcccccaggacgcggggctccccctccccttttggctagccgcagagtccaacggggctcctggccagggacgtcgtgggagaatcaggaagtcgaagccacacagccgagaagggg

SEQ ID NO: 692731 - DNA, 826 bp, Homo sapiens
tttgggaggcttgtacctgttttgagcaacacagtgtggtggaaatgaaccaaagtgacttctgaggctgaagcttcttcctggttcctttggaatgctcatgctctggatacttcctctcagaacccaactgccactcagcgagaagcccaagccccttggagaggtcctgtgcagactctggttcctcctgaacccagcctcaggctcatccagccccaacatcagatgtgtgagtgaagaaacytttagataattccatcctgagccacttgtgtctctcttagctcaggcctcaatcatcccaggacagaaacaagccatctaggttgtgcctggtggaaatttctgactcatagaatccatgagcaataaaaccacaataaaattgtgattgttttatgccactaagtttgtggggatttgctaggcagcaatagcaaattggaacaggagaatttcaggcaaggctttctataatatagagcacttgaacgaaacataatcgccattaagagcacaggccttggtattagaactagatgaaaattccagttctacaatgaacactagttcatgccacttgtataacctctagtagtttttttgtaagtattctgagagataatgactgaaagtgctttgtacagtgttgccttaaagtaagcaatcagttcttagcttaaaaaaagatgaatagaagtaataaaagcaaaaaacaagcaattgtactaaacatagtatctaccattccagttagtgtaatcgtatgactcggcttacaattctcatttattctctttgtcctgggaccctttcaatttta

SEQ ID NO: 692732 - DNA, 2752 bp, Homo sapiens
gccaacatggtgaaacctcatctctactaaaaaatacaaaaattagcaggatgtggtggcaagcacctataatcccagctacttgggaggctgaggcaggagaatcacttcaatgcagaaggcagagattgcagtgagacaagattgcaccattgtactccagcctggatgacaagagtgagactccatctcaaagaaaaaagttgagtgtggcccccttcctctttctgtcaggctctcttgcccatttgccttccaccatgagctaacacagcatgaggcccttgccagaaagctgactccttgatacgggacttcccagcctccagaattatgagccaaacaaatttactttctctgtaaattaccctgtctcaagtattctgtgatagcagcagaaaacagactaagacaatctccagctgcttgcttgacacctccatatgcatgaccaaaatcagattcatgttattctctacaaaaccaaattcctgtaatattcccagtgacctgacctgatataatctctcaagcttctcatcatgaagctcactgcctattaatttattttccacatacacagaaccacacagtaattctgcctctgatgttgcacacactgctacagctctttagcatctatttcctccattttcctcttataaaacccccaccgatccttcaaggcctaatggatgtcactttctccataaatttcttcccattttttcttagactagattatcacataagtgaagggtttgtatccctgtagagtttttatagcttttaatttataccatactgtctttcagagttttgtacctttttaaattactacatgtatattacatttgctgtgtgcctattgtatgcctaaatttgcatatatgttaacattaatccagtcgtttcttcaactaatgttaattaaatgatcaattgtaatctgcttatattaagtatctttgggatatgacaatgaacaaaatagccaatgttcctgctctgtgaaccttatggaggtggtaattttatatagacgtaagtgctgtgaggagagttcaacaagataatgtggtaatggctgggggctgtttttactagatggttagggaagacttatgtgaggaggcatgacagagccagccaggtatgacttcacatgcaaacactcataagatcagaatgagttaggaacattccaggaacaaaggaccatcaatatggctagaaagatatggccaggagatcaagtgattggacacaagcgggaaagagagagagagggcgagagagagggagaggagccagatcttgtaggatcttgaaggccatgttgaagagactacatttcattttaaatgagttaagaaatcattggaggagaattttgaacaagaaagtgaggtgatctattgcatgcatttaaaatgtcattctggttcttgtgttgagaataacgtggaggaaagactaagcagagagaacattttggaaactattgagaagtctggtgagtcagaatggaagacggtaagaagaggccacatctgggactcatattaaagtgagcattcttcaaacttgctaaaatattgaatgtaggcatgagagtaagaaagtaatcaagtataagtcttctgtttctgtgttgagaaattgggtgaaagatcctgctatttcataagttggggaaagccggggacaaaattttttttcattaaggaaagggaagccgagagttccatattggacttattaagtctaggacatattagacatttataatccttgcaaaaatcttacaagattgatattatcatcattccattttacaagcaagggaatgaatattcaggaatgtattaagtcttgtcatcctgagaagtgaaactagaatcctttcttgtgtctttctagtatcatagtacctgatgctatggtcttgaatgtttgtgtcactctgaaatgcctatgttgaaatcctaaccaccaaggtaatatattaggaagtgggaactttggaaggtgattaagtcatgagggtggagcattccatgaaagtgattagtgcacttaaaaaggaggcatgagggagcttggtcgctctttccaccatataaggacacagtgaaaagacaccatctactaacccgaaagtagatcctcactagacactgaacctgctggaatcttgattttgaatttcccagcctctagaactgtgagaaataaattccttttgtttatgaactacccagtttatagtattttgttacaatagccaaaacagcctgaaatacctgaggggcttttaaagtgccctattgcttccctataaggtatccaatagattttatgatccttccttgagggcagaggttactcagtaggattctccatatcatttaacatcagctatgtaaaacgtgtttctgtaaaaacaaatcatccaaaatattttacagtttaaatcttacatatacgcattacattggaaactttgaaagtggagtcactttcctctgactggaggagtatagtcttcctaagaggcatccttccatatcctcaacagagaaggcaaactgggacagtgggaagagtacctttcrtctttatacttaagtacctgagaactgctttatcgtgtaccttggcttcgaagaaaaagctaagctgttatgttggtaagcaaactaaaagaactaaaacaagtaggcagacttcacaaacacataaattacaa

SEQ ID NO: 692733 - DNA, 657 bp, Homo sapiens
ggactgggagctccaccaagggaatgcaagagagaggcttttacagaaaaaaatacggaggtaaaaaaaataaaatatttaattggttacagttattcagttgccttattaggtctatcttgttcctagttacataattataggtttgttttcygtttctgaatggttagtgcttaaattctgtttttctttaatagaggcatttacaagaaatagctcaagctaagttttgcttatgtttgaaaatcaagcaaggttgaagtcactcatgaggcctcactggttaagtctgctcagagaatcttcaggcctggtttccatttaaatttactttaatatcaataatcctatcacggaggtccatgctgacaacctcatctatacctaatcacctcctcaaggccccacttccagatatcacattgatggcgaagtcttcactacacaaattttggtggaacaaaaacattcagtctataacattacctatcacttcaacagaaggtggtaaaatatgagagggatacaattctgtagttttataaattcagagtgattgttaacagctcctatgggacaaaaataaaaagagtgtaggttgggaaaaatatagatctacccacagtttggcaagaattttgactgctgcttcttccc

SEQ ID NO: 692734 - DNA, 672 bp, Homo sapiens
tactacaagagtcttatttgttacttctcataaatttatctctttcctaatgaattactgtttttcatgtaatttgaatttttaggttacaagtcactttcaatgacagattaatttcccttgttttcattattcatctttatgaactttgcttatatctcactaatttttagtttttctcatttatttaataaataaataagtgtgaacatgttacctcatacatattagaaaatagggaatacgttatttctaactggttttattgaaacatttttaaakctctttgcaaattgcagttacaatggcatagttcgaacccaacttctgcttagttgaacctaaaaaatgttacagccactataatgtcttcagcaggtgggagtaggatagagaaaagatcagagtaaaaagagacagttacctttaacttaaattatagctcgtgtttttcacttttgcaaattttacatgcaaccatggatccatcctcctcaggcctattatagccttcaggggaagcttccatggaaataacttaatctggtgagatccccctgagctcaggaaggtagagatcccaagcctcatgcctcagccagacttatctcgaggaaccacttaataatgttttctatgccacaagaatcttgctgaataatctattttata

SEQ ID NO: 692735 - DNA, 2344 bp, Homo sapiens
  misc_feature 3, 4, 5, 6, 7, 8, 9, 10, 11, 12, 13, 14, 15, 16, 17, 18,19, 20, 21, 22, 23, 24, 25, 26, 27, 28, 29, 30, 31, 32,33, 34, 35, 36, 37, 38, 39, 40, 41, 42, 43, 44, 45, 46,47, 48, 49, 50, 51, 52, 53, 54, 55, 56, 57, 58, 59, 60,61, 62: n = A,T,C or G
  misc_feature 63, 64, 65, 66, 67, 68, 69, 70, 71, 72, 73, 74, 75, 76, 77,78, 79, 80, 81, 82, 83, 84, 85, 86, 87, 88, 89, 90, 91,92, 93, 94, 95, 96, 97, 98, 99, 100, 101, 102: n = A,T,C or G
ctnnnnnnnnnnnnnnnnnnnnnnnnnnnnnnnnnnnnnnnnnnnnnnnnnnnnnnnnnnnnnnnnnnnnnnnnnnnnnnnnnnnnnnnnnnnnnnnnnnnncagcttttgtggagccagagcgtgccatgggtgcttggcagctggtgctcctctgaggtttcctgtgtgtgtggcagccaagtcatgttgagtgccggagtggggtatccatggagcggtgcaaggaggagatttgcaatgagcatatttgggggtgtcagtgtggacccaggtggccgccggggacttgggactggaaggtgacttttcacagatggatcctagtggatgctttagattgaaatgagatgcagaattctgtcttctgattgtattaacagtgctgtcaagaacgtaattatgtaagattcaaccagctttcttgacatctcagttttccttcaccatttgcaaaatttagtgtgtcatcattttagtttggaaattttattttggaaataaaatgtcattattattttcttttgaaagaaggaaactccattgttttgcaaggcagagctctgacacaattacgtctaattagtgaagtgttgtatatgttttcagagttcaaataaggttcacgtactctctttttgttgttgttgctgttttctaaactctgagctcatttcttttctttctttttaagaaaataataattttaaaagaactaagtcaagtttctcatagttgaccaaccacacatttctatggggccctaaaaactcagctgtttaaaaataaagcaaaatgaaaaagaaagaacaacagccaaatgagggtatacgttgaactactcaggattaagtttaaacaaatgcttttcataattgctgtcttccccagccagaaactaaggcctgctgtgtgctttgggtgtgtgggtgggtgggttgctgggggaagggtccttgtaatattcggggagttttggctggggccaattatttgttcataattctaagtatttaaacaatgctacgtattttctgtcttttatggaggcagatatctctaagtggcccctcctggtgctggggtatgatcaaaagggacttctgtaagttttcactggactgctttaattttctatcagaacagtgtatttagtacttgattaagtaaaaaacmagaaaaaaccaaaactaaaaatctagtaacacatgttgatgatttgaaaaagaaaccaaaactgagaagggtgtgattgaagagcacctcccacttctcccttttcactcgcccccccgcatccataaacacactgaacagacttgatgcttcattcctgatgttttctgcgcacatgtgcttgtttgtgcttctcctttatttatttttaaaaattctggtaaaattcgcataacataaaatgaatcatgttaaagtgaacaattcaatgtcttttaatccacttttattgttacttgaccattactaccatccagttcattttcatcacccccaaaggaagtcctctacccattaaccatcactccccatttccccgtccccgcctttttcctagcctctgcgaaccgctaatctactttctctccctgtggatttgcctattctggaaattttatgtagaaaatgtcatgcagtatgtggccttttgtgtctggcttctttcacttagcataatgttttcaaggttcatccacattgctccattctttctttgtttttatacacagtgagatcataccatacatactgaggtttgctgttttcacctaacgatagttctcataagtctttctgtattagtacatgccaggctacctcatttttaaaaaccattgctaatatctgtcatttatgtatacattggtagtatctgtcattaaaacaatttgctgatagctctcatttggaatttatttccctggtctcctgtggatgtatacttctgatttttagctattacttgaaacaggtctgtagtgaacatctgtaaacatatttttttttttaactctgtgagtatctgtagagccaatttccagtccagtactttgtgcaaagtattatattttttgagacagtctggccctgtcgcccaggctggagtgcagtggcgcaatctcggctcactgcaacctccacctcctgggttcaagcgattcttctgcctcagcatcctgagtagctgggaccacaggcgcgtgccaccatgcccggctaattttttttttgtatttttggtagagacggagttgaccgtgttagtcaggatagtctcgatgttctgacctcatgatccgcctgccttggccttccaaagtgctgagat

SEQ ID NO: 692736 - DNA, 2344 bp, Homo sapiens
  misc_feature 3, 4, 5, 6, 7, 8, 9, 10, 11, 12, 13, 14, 15, 16, 17, 18,19, 20, 21, 22, 23, 24, 25, 26, 27, 28, 29, 30, 31, 32,33, 34, 35, 36, 37, 38, 39, 40, 41, 42, 43, 44, 45, 46,47, 48, 49, 50, 51, 52, 53, 54, 55, 56, 57, 58, 59, 60,61, 62: n = A,T,C or G
  misc_feature 63, 64, 65, 66, 67, 68, 69, 70, 71, 72, 73, 74, 75, 76, 77,78, 79, 80, 81, 82, 83, 84, 85, 86, 87, 88, 89, 90, 91,92, 93, 94, 95, 96, 97, 98, 99, 100, 101, 102: n = A,T,C or G
ctnnnnnnnnnnnnnnnnnnnnnnnnnnnnnnnnnnnnnnnnnnnnnnnnnnnnnnnnnnnnnnnnnnnnnnnnnnnnnnnnnnnnnnnnnnnnnnnnnnnncagcttttgtggagccagagcgtgccatgggtgcttggcagctggtgctcctctgaggtttcctgtgtgtgtggcagccaagtcatgttgagtgccggagtggggtatccatggagcggtgcaaggaggagatttgcaatgagcatatttgggggtgtcagtgtggacccaggtggccgccggggacttgggactggaaggtgacttttcacagatggatcctagtggatgctttagattgaaatgagatgcagaattctgtcttctgattgtattaacagtgctgtcaagaacgtaattatgtaagattcaaccagctttcttgacatctcagttttccttcaccatttgcaaaatttagtgtgtcatcattttagtttggaaattttattttggaaataaaatgtcattattattttcttttgaaagaaggaaactccattgttttgcaaggcagagctctgacacaattacgtctaattagtgaagtgttgtatatgttttcagagttcaaataaggttcacgtactctctttttgttgttgttgctgttttctaaactctgagctcatttcttttctttctttttaagaaaataataattttaaaagaactaagtcaagtttctcatagttgaccaaccacacatttctatggggccctaaaaactcagctgtttaaaaataaagcaaaatgaaaaagaaagaacaacagccaaatgagggtatacgttgaactactcaggattaagtttaaacaaatgcttttcataattgctgtcttccccagccagaaactaaggcctgctgtgtgctttgggtgtgtgggtgggtgggttgctgggggaagggtccttgtaatattcggggagttttggctggggccaattatttgttcataattctaagtatttaaacaatgctacgtattttctgtcttttatggaggcagatatctctaagtggcccctcctggtgctggggtatgatcaaaagggacttctgtaagttttcactggactgctttaattttctatcagaacagtgtatttagtacttgattaagtaaaaaacaagaaaaaaccaaaactaaaaatctagtaacacatgttgatgatttgaaaaagaaaccaaaactgagaagggtgtgattgaagagcacctcccacttctcccttttcactcgcccccccgcatccataaacacactgaacagacttgrtgcttcattcctgatgttttctgcgcacatgtgcttgtttgtgcttctcctttatttatttttaaaaattctggtaaaattcgcataacataaaatgaatcatgttaaagtgaacaattcaatgtcttttaatccacttttattgttacttgaccattactaccatccagttcattttcatcacccccaaaggaagtcctctacccattaaccatcactccccatttccccgtccccgcctttttcctagcctctgcgaaccgctaatctactttctctccctgtggatttgcctattctggaaattttatgtagaaaatgtcatgcagtatgtggccttttgtgtctggcttctttcacttagcataatgttttcaaggttcatccacattgctccattctttctttgtttttatacacagtgagatcataccatacatactgaggtttgctgttttcacctaacgatagttctcataagtctttctgtattagtacatgccaggctacctcatttttaaaaaccattgctaatatctgtcatttatgtatacattggtagtatctgtcattaaaacaatttgctgatagctctcatttggaatttatttccctggtctcctgtggatgtatacttctgatttttagctattacttgaaacaggtctgtagtgaacatctgtaaacatatttttttttttaactctgtgagtatctgtagagccaatttccagtccagtactttgtgcaaagtattatattttttgagacagtctggccctgtcgcccaggctggagtgcagtggcgcaatctcggctcactgcaacctccacctcctgggttcaagcgattcttctgcctcagcatcctgagtagctgggaccacaggcgcgtgccaccatgcccggctaattttttttttgtatttttggtagagacggagttgaccgtgttagtcaggatagtctcgatgttctgacctcatgatccgcctgccttggccttccaaagtgctgagat

SEQ ID NO: 692737 - DNA, 2344 bp, Homo sapiens
  misc_feature 3, 4, 5, 6, 7, 8, 9, 10, 11, 12, 13, 14, 15, 16, 17, 18,19, 20, 21, 22, 23, 24, 25, 26, 27, 28, 29, 30, 31, 32,33, 34, 35, 36, 37, 38, 39, 40, 41, 42, 43, 44, 45, 46,47, 48, 49, 50, 51, 52, 53, 54, 55, 56, 57, 58, 59, 60,61, 62: n = A,T,C or G
  misc_feature 63, 64, 65, 66, 67, 68, 69, 70, 71, 72, 73, 74, 75, 76, 77,78, 79, 80, 81, 82, 83, 84, 85, 86, 87, 88, 89, 90, 91,92, 93, 94, 95, 96, 97, 98, 99, 100, 101, 102: n = A,T,C or G
ctnnnnnnnnnnnnnnnnnnnnnnnnnnnnnnnnnnnnnnnnnnnnnnnnnnnnnnnnnnnnnnnnnnnnnnnnnnnnnnnnnnnnnnnnnnnnnnnnnnnncagcttttgtggagccagagcgtgccatgggtgcttggcagctggtgctcctctgaggtttcctgtgtgtgtggcagccaagtcatgttgagtgccggagtggggtatccatggagcggtgcaaggaggagatttgcaatgagcatatttgggggtgtcagtgtggacccaggtggccgccggggacttgggactggaaggtgacttttcacagatggatcctagtggatgctttagattgaaatgagatgcagaattctgtcttctgattgtattaacagtgctgtcaagaacgtaattatgtaagattcaaccagctttcttgacatctcagttttccttcaccatttgcaaaatttagtgtgtcatcattttagtttggaaattttattttggaaataaaatgtcattattattttcttttgaaagaaggaaactccattgttttgcaaggcagagctctgacacaattacgtctaattagtgaagtgttgtatatgttttcagagttcaaataaggttcacgtactctctttttgttgttgttgctgttttctaaactctgagctcatttcttttctttctttttaagaaaataataattttaaaagaactaagtcaagtttctcatagttgaccaaccacacatttctatggggccctaaaaactcagctgtttaaaaataaagcaaaatgaaaaagaaagaacaacagccaaatgagggtatacgttgaactactcaggattaagtttaaacaaatgcttttcataattgctgtcttccccagccagaaactaaggcctgctgtgtgctttgggtgtgtgggtgggtgggttgctgggggaagggtccttgtaatattcggggagttttggctggggccaattatttgttcataattctaagtatttaaacaatgctacgtattttctgtcttttatggaggcagatatctctaagtggcccctcctggtgctggggtatgatcaaaagggacttctgtaagttttcactggactgctttaattttctatcagaacagtgtatttagtacttgattaagtaaaaaacaagaaaaaaccaaaactaaaaatctagtaacacatgttgatgatttgaaaaagaaaccaaaactgagaagggtgtgattgaagagcacctcccacttctcccttttcactcgcccccccgcatccataaacacactgaacagacttgatgcttcattcctgatgttttctgcgcacatgtgcttgtttgtgcttctcctttatttatttttaaaaattctggtaaaattcgcataacataaaatgaatcatgttaaagtgaacaattcaatgtcttttaatccacttttaktgttacttgaccattactaccatccagttcattttcatcacccccaaaggaagtcctctacccattaaccatcactccccatttccccgtccccgcctttttcctagcctctgcgaaccgctaatctactttctctccctgtggatttgcctattctggaaattttatgtagaaaatgtcatgcagtatgtggccttttgtgtctggcttctttcacttagcataatgttttcaaggttcatccacattgctccattctttctttgtttttatacacagtgagatcataccatacatactgaggtttgctgttttcacctaacgatagttctcataagtctttctgtattagtacatgccaggctacctcatttttaaaaaccattgctaatatctgtcatttatgtatacattggtagtatctgtcattaaaacaatttgctgatagctctcatttggaatttatttccctggtctcctgtggatgtatacttctgatttttagctattacttgaaacaggtctgtagtgaacatctgtaaacatatttttttttttaactctgtgagtatctgtagagccaatttccagtccagtactttgtgcaaagtattatattttttgagacagtctggccctgtcgcccaggctggagtgcagtggcgcaatctcggctcactgcaacctccacctcctgggttcaagcgattcttctgcctcagcatcctgagtagctgggaccacaggcgcgtgccaccatgcccggctaattttttttttgtatttttggtagagacggagttgaccgtgttagtcaggatagtctcgatgttctgacctcatgatccgcctgccttggccttccaaagtgctgagat

SEQ ID NO: 692738 - DNA, 2344 bp, Homo sapiens
  misc_feature 3, 4, 5, 6, 7, 8, 9, 10, 11, 12, 13, 14, 15, 16, 17, 18,19, 20, 21, 22, 23, 24, 25, 26, 27, 28, 29, 30, 31, 32,33, 34, 35, 36, 37, 38, 39, 40, 41, 42, 43, 44, 45, 46,47, 48, 49, 50, 51, 52, 53, 54, 55, 56, 57, 58, 59, 60,61, 62: n = A,T,C or G
  misc_feature 63, 64, 65, 66, 67, 68, 69, 70, 71, 72, 73, 74, 75, 76, 77,78, 79, 80, 81, 82, 83, 84, 85, 86, 87, 88, 89, 90, 91,92, 93, 94, 95, 96, 97, 98, 99, 100, 101, 102: n = A,T,C or G
ctnnnnnnnnnnnnnnnnnnnnnnnnnnnnnnnnnnnnnnnnnnnnnnnnnnnnnnnnnnnnnnnnnnnnnnnnnnnnnnnnnnnnnnnnnnnnnnnnnnnncagcttttgtggagccagagcgtgccatgggtgcttggcagctggtgctcctctgaggtttcctgtgtgtgtggcagccaagtcatgttgagtgccggagtggggtatccatggagcggtgcaaggaggagatttgcaatgagcatatttgggggtgtcagtgtggacccaggtggccgccggggacttgggactggaaggtgacttttcacagatggatcctagtggatgctttagattgaaatgagatgcagaattctgtcttctgattgtattaacagtgctgtcaagaacgtaattatgtaagattcaaccagctttcttgacatctcagttttccttcaccatttgcaaaatttagtgtgtcatcattttagtttggaaattttattttggaaataaaatgtcattattattttcttttgaaagaaggaaactccattgttttgcaaggcagagctctgacacaattacgtctaattagtgaagtgttgtatatgttttcagagttcaaataaggttcacgtactctctttttgttgttgttgctgttttctaaactctgagctcatttcttttctttctttttaagaaaataataattttaaaagaactaagtcaagtttctcatagttgaccaaccacacatttctatggggccctaaaaactcagctgtttaaaaataaagcaaaatgaaaaagaaagaacaacagccaaatgagggtatacgttgaactactcaggattaagtttaaacaaatgcttttcataattgctgtcttccccagccagaaactaaggcctgctgtgtgctttgggtgtgtgggtgggtgggttgctgggggaagggtccttgtaatattcggggagttttggctggggccaattatttgttcataattctaagtatttaaacaatgctacgtattttctgtcttttatggaggcagatatctctaagtggcccctcctggtgctggggtatgatcaaaagggacttctgtaagttttcactggactgctttaattttctatcagaacagtgtatttagtacttgattaagtaaaaaacaagaaaaaaccaaaactaaaaatctagtaacacatgttgatgatttgaaaaagaaaccaaaactgagaagggtgtgattgaagagcacctcccacttctcccttttcactcgcccccccgcatccataaacacactgaacagacttgatgcttcattcctgatgttttctgcgcacatgtgcttgtttgtgcttctcctttatttatttttaaaaattctggtaaaattcgcataacataaaatgaatcatgttaaagtgaacaattcaatgtcttttaatccacttttattgttacttgaccattactaccatccagttcattttcatcacccccaaaggaagtcctctacccattaaccatcactccccatttccccgtccccgcctttttcctagcctctgcgaaccgctaatctactttctctccctgtggatttgcctattctggaaattttatgtagaaaatgtcatgcagtatgtggccttttgtgtctggcttctttcacttagcataatgttttcaaggttcatccacattgctccattctttctttgtttttatacacagtgagatcataccatacatactgaggtttgctgttttcacctaacgatagttctcataagtctttctgtattagtacatgccaggctacctcatttttaaaaaccattgctaatatctgtcatttatgtatacattggtagtatctgtcattaaaacaatttgctgatagctctcatttggaatttatttccctggtctcctgtggatgtatacttctgatttttagctattacttgaaacaggtctgtagtgaacatctgtaaacatatttttttttttaactctgtgagtatctgtagagccaatttccagtccagtactttgtgcaaagtattatattttttgagacagtctggccctgtcgcccaggctggagtgcagtggcgcaatctcggctcactgcaacctccacctcctgggttcaagygattcttctgcctcagcatcctgagtagctgggaccacaggcgcgtgccaccatgcccggctaattttttttttgtatttttggtagagacggagttgaccgtgttagtcaggatagtctcgatgttctgacctcatgatccgcctgccttggccttccaaagtgctgagat

SEQ ID NO: 692739 - DNA, 603 bp, Homo sapiens
gattattgctgtatcagctatcagctactgataacacactcccatcttactttaatgacatatgtactcagaatgctcaaggagggacagatgtttaggaatatcaaattttccttcttggctattgattgattcccaacacccatttctgattggaatgcaaaatgtttttcttttagacttggagtctttattttcccgatctaatcagaaaaacacaagcaacacaccaggatctagaatgaaatgctggagcatccctggatgctgcttgggcttattaccattgactgtagttaccaatgctcaatgacagcctctgtcactctgcctatcttccaaagccaattcattagtacagagcatgcaactctggcaaagggaaagtgaaatatactatacagtggttttagcaaaaatcaaaatggtggtttcattaggggattttgcgggatgtgggagggcattgatgacttcatagccggatggagtggatactctaaactagcttggctctctttgtagaacccatgatgggcttcattcttaaatggagggtgtgtctgatgacatcagtagcatatttttttcrtggaattgaca

SEQ ID NO: 692740 - DNA, 636 bp, Homo sapiens
tggattcagatgaatccaaactaaggaaagctctttggctacttccaaatttcaagtttgttttcaggtcagaggaaaacaaaagagtaaaagctttcttcactctcagtttcttttttttctgttttttgttttgttttgttttttaagagacagaatctcgctctgtcacccaggctggagtgcagtggcatgatctcagatcamtgcaacctctgcctcccgggttctagcaatcctcctgcctcagcctccccagtagatgggattacaggcacatgccaacatgtccagctaattttctgtatttttagtagagacggggtttcgccgggttacctaggctggtctcgaacttctgagctcaggcaatccacctgcctcagcctcccaaagtgctaggattataggcggagccaccacacctggcccactcttagtttgtttagttttatattcttgtctcactatctctgtgtcttcctctgtctttctctaaaacattcgggccctcctcactcataaggttttgaattcttgaagagatactaaatcaatatttaaatgaacactgatcaaacattattctgtaccacaaattaaaattgaatgttgctttacaagtgctataaatct

SEQ ID NO: 692741 - DNA, 795 bp, Homo sapiens
gattaacctcatgctctgtgttcttgcttattttagattatctcgctaattttagattatcacctatttatagcaagcacactagtgatgacgcaggaagtaccagccttaacaaggctcttgggaccccagtcatcgcagcacgttcggcgccctcccaattagaatgtcactattcatttgggtgtgtctcccttccctggagcaagcacagctgtgctccaggaagagaggtggcaaagaactaatttgtgattcatgatcccattaccaacgctaatgagtctcttccagtggaagaggctttcacgctggagagccagtcagcatccccaagaggtggacatcagtgaacaccagggttggcttgatggtgagaaagcacttctccagggacctggtgacggtgacagggtggaactggaggctgggctgaaggcaagcacccatcagcaatagagcttcccagagtgtgttccgccatttgtcagccacctccttccatctgaacacagggtgacagtcactaagctcattcagtgtctctttcatttgattctcacagactccctgagggagatgtcactatcaggaagcaatatagcatcttttttaagagcacagactacctgtgtccaaaccccagctatgccactcactctaagcacctcccttctgctgtctgtgcctttgtttccttgcatcaaaaaatggtgcttagattatcaatgcttacagcgcttaggtttgatgcaaggatcacataygtttatatgtatccagggcttagagagg

SEQ ID NO: 692742 - DNA, 1229 bp, Homo sapiens
tggatgcgtcaaaaccttgttcacgaaaattcttttaaacaaatttgaagtgattaaattggagatgctttgtttgtttgttttggggtttttgttttgttttktttttttttttgagatggagtttcgctcttgtcacccaggctggagtgcagtgccgtgatcttggctcactgcaacctccacctcctgggttcaagcaattctgcctcagcctcccaagtagctgggattacaggcacctgccaccacacccagctaatttttgcatttttagtagagacggggtttcaccatgttggccaggctggtcttgaacttctgacctcaggtgatccactcgcctaggcctcccaaagtgctgagattacaggcatgagccaccacgcccagctctgatttgtttttatggtgaatattaacagtgtcttcataataagataagagcaaattgtagtcatctaatttttattattttttagtaagtgattggcagatctaacaatgatcatattctaggaaaaatgttaaaaagaaagaaaacaaggcttagtgtgtggttgtccagcaacctaactgagaatcagaaaaactccctgagcgtcaaaatagtttcctggaaaagaggactatttctttcccctcagctggctttatgatcgtgatcctactaactagaccattcagtctaccagccaatccatttcgtcagacatgggattaggggagtggccacgctgctaaggagtaggactccacgtgttttcttaaaaacacagggctcggccaggcacagtggctcatgcatgtaatcccagcactttgggaagccaaggtgggcagatcacttgacgtccggagttcaagaccagcctggccaacatggtgatccctgtctctacagaaatacaaaaattagccggtgtggtggtatgtgcctgtaatctcagctacttgagaggccaaggcacgagaatcacttgaacccaggaagcagaggttgcagtgagctaagatctcaccactgtactccagcctgggtgacagggcaagactctgtctcaaaaaagaaacaacaacaacaaaaaaaaaacagggcaccctgcattttggatatgtgtatgcatgcatgtatgagtgtgggctggtgtgcgcaattgtgtgtgttcgagtgagtatgtgagagtgtgcgccagctcctcagaagcccaaccccttccaatcatgcg

SEQ ID NO: 692743 - DNA, 1229 bp, Homo sapiens
tggatgcgtcaaaaccttgttcacgaaaattcttttaaacaaatttgaagtgattaaattggagatgctttgtttgtttgttttggggtttttgttttgtttttttttkttttttgagatggagtttcgctcttgtcacccaggctggagtgcagtgccgtgatcttggctcactgcaacctccacctcctgggttcaagcaattctgcctcagcctcccaagtagctgggattacaggcacctgccaccacacccagctaatttttgcatttttagtagagacggggtttcaccatgttggccaggctggtcttgaacttctgacctcaggtgatccactcgcctaggcctcccaaagtgctgagattacaggcatgagccaccacgcccagctctgatttgtttttatggtgaatattaacagtgtcttcataataagataagagcaaattgtagtcatctaatttttattattttttagtaagtgattggcagatctaacaatgatcatattctaggaaaaatgttaaaaagaaagaaaacaaggcttagtgtgtggttgtccagcaacctaactgagaatcagaaaaactccctgagcgtcaaaatagtttcctggaaaagaggactatttctttcccctcagctggctttatgatcgtgatcctactaactagaccattcagtctaccagccaatccatttcgtcagacatgggattaggggagtggccacgctgctaaggagtaggactccacgtgttttcttaaaaacacagggctcggccaggcacagtggctcatgcatgtaatcccagcactttgggaagccaaggtgggcagatcacttgacgtccggagttcaagaccagcctggccaacatggtgatccctgtctctacagaaatacaaaaattagccggtgtggtggtatgtgcctgtaatctcagctacttgagaggccaaggcacgagaatcacttgaacccaggaagcagaggttgcagtgagctaagatctcaccactgtactccagcctgggtgacagggcaagactctgtctcaaaaaagaaacaacaacaacaaaaaaaaaacagggcaccctgcattttggatatgtgtatgcatgcatgtatgagtgtgggctggtgtgcgcaattgtgtgtgttcgagtgagtatgtgagagtgtgcgccagctcctcagaagcccaaccccttccaatcatgcg

SEQ ID NO: 692744 - DNA, 697 bp, Homo sapiens
gatagaagccatctgtgaccatgaggtagggtggctatctgagagtgaagccagaagaagcagagccgaaagatggaaagacagaagcctctcaggctgatggtgtcaactgaaaccttgayctagctacacctaaagccagactgattcctgaagcttttgattatggagccaatgcattctttttggttagaacattttggatatgtttctttttgttacatgtgaccaaagcctaaaaaatcagataacccatgttcaatttctttgttaaatgcacactagctgggtcttcagtccatacccatccctgacttgacacactgggcattttcagattccttctgccgaggctgaagcaggctaagcagactcctagatttctcacctctaagatggtacctgaatcttagcttactaggacacaaaaaataagtccaagaaagtccctttctaactttgatgctttggctaaaactcagttctgctagttagaggttacaaattccaatctttaaagggggcacagcaggaaaaatgaatacgtaaaacaggctgggagttggaaatatgccccttgcttcttaagtccaaggaaaacatcaaggcaaatctgaaattaaatgcccagtctcagtgttaacaaggcaacagggagtggagatactagagtattggagagctcttgcctccttta

SEQ ID NO: 692745 - DNA, 662 bp, Homo sapiens
tgacattggtttttttttttaagaagacaagttgtttttttgtagaatatccctaaatttctatttgcttgtttcctcatgcttagatttttgacaagagtactaactaggtgatgtttagttgctcccctttaaatgacatgtttttaagtcaataaaataaaacaagtaataccacaatcctatctcctccatcttagagacccatcctagcatttcatcatagtcactcagtaaaatattcttctcttagggtcggctttgagcatgtggtagaccttgatgaactctccctggttcaatggagctccagaaccaggaaatataactagaaatgttattagagataaaaatgcctaagttgatagacttttctatttttagaccacaaagagacttctgacatagtattttacmgtgaataccaggctactgagctcctctgtctactgtctaaattatttttgtttttaattggaaaaattaacacatacatataagaaaacaagtaaaacaatccaatgcatacaataaaattaaatcttcatcttaatccaaatcctcccatttccacaacccagagaaccaatgctagcggtttcttgtgtatctgttaaaatactgtttacaagcatgttacatacagctctccatcttgcttg

SEQ ID NO: 692746 - DNA, 1099 bp, Homo sapiens
tggattatcttcttctccaaatcatctctgctatcaattcccactttcacaatttgaatcctatygtagttagcaactgctttgtatttcttcttagtgcttatctggcctgtgaaatagctattgcttatatgtttattttctgtcttgttccactagactgctttctgcatgacagctgagacttatttatttcctgctctacaatagcacttgtaagagaggatgtaatagagtaggtacccagtatatttgctaaagtattgagcattattcatacctaatccactctatgctttgtgggaaaatgtggagattcactataggaatagaccatagatcacatgcaatctaaagaacatgagaattgtttgttgatctgtttcattcttaaaacctggtgcttggatgctttaaagcttctataatatacaggtgtgagaatttcctctggtttcagaatcttgatataaagcatgagcctgcctgaaaagaaatggtaataagaaagtccagtcatgtctatggggaataccaagggatgcagagaaataaagcactcagcctcaaacctaagctatttttgataatagccattctaacatgtgtgaggtgatatctcattctgacattatcaaaaagatgaatgataacaagtgtgggtgaggatgtggagaaaagagaaccctgtacagtgctggtgggaatgtaaattagtacagccattttggaaaatagtaaactcaaaaaactaaaaatagaattaccatatgatctagcaatcccactcctgggtatatatccaaaggaatttaaatttctatgtcaaaaggatagttgcagtcctactttaattcagcattattcacagtagccaagatatggaagcaacctaaatgtttattgctggataactaggtaaagaaatgtggtatatatacaaaattaagtaccacacagcctttacaaagaaggaaattctgtcattcaagacgaggtggtactggtgtacattacgttaaattaaataatccaggcaccaaatgataaatgccacatgatctcacttatatgtggaactaaaaaagtcaatctcata

SEQ ID NO: 692747 - DNA, 916 bp, Homo sapiens
gtttagtcattaactaatcaaataagacagaaatgcctttctctcctattatctgtaattcttataatctttaggtaaaactttaatcacttagtattttgtaccttacttctttataaagagatgagaaggcttattattactcttatataaattgtgactgattttgttaatcataatttaatgaaatgttttcgtctatcgttatgtagtgatacaatcctaaatctggtaatgtaaaagtaacaatttataattatatctcagaattctgtcagtatcccactcttagctggtgagttctcacttagtgcttttcatgcttttgtagatagtggttgaggctagagtcattgaagcctttgattaatctgggcagccacaatggctcacttacacggctggcagttgatgctagctgctagacggtatcagtatggctgctgaccagatcacctacatgtggcttgggtttctcatagcatagtagttcggctccgacaggaatcattccaaaaatgagcattcagaaagacccatgcagatattgtaaagctttttacaggttcatttctactgcattctgttggtcaaaatccatcatagcacctaagaccaggagagactcaaggggaatgggttacacaaaggtacaaataccataaagttgtggtttattgaaggccatctctggagaccagatacaactgttttctcctcagtccctcatcatatgcatcacagaggcaatatactctyactctttcttaagaaacccaaagatttattcctttatagcattagtttcaagactgaagtccaggatgtaacattcaagtgatagcaaagtggtgataaaattccttaggggtagagtattgatttcttgttgctgctagaacacatcactacaaat

SEQ ID NO: 692748 - DNA, 1138 bp, Homo sapiens
tcaatgatctcactgcagaggtgctctctggtccaatccaaccctgtctcctggggatctgggcctacatcccaagctgcctctggacagctccatctgggagccacagcagcggctcaaacacagcctcagtgggaagcacacgctttccttccattccgcccgttatccctcttgataaccagcctcccagtctttggggttcaacagtccttccttcccctcatcctcaagtacaaccatttctaagtcctgctggygattctggggtctgtcttccccatttttatttccagtgcgttgagtgagactgccatctccactccatctcaatggccatccaactggcaaattaagtccttctaaatccccttccaactcatccttaatatagcagtgatttaactctgggggtggtggtggcaaaaaagtaatttgaagccatttataagattgatttaatgaccaaagcttttctaggtgatataacctaacagctactgtagggcatttcagaatttttacatttctctagcagtctttatattgtttgatcctaacaattacctggcagataggcaggacagaaaatctctacttgcagacaagaaaaccaaggctcagagaagccacacacttgcccagggcagtaaatgatggtcaggaccaagaacttaggttttatttctattctatcatattatttcattgtgcattagttatgagagatctacagagtcagacttgacaagacttagcttatctaaaacatgcctgagcctgataaggctctgtgccttatcaaaaactactatttcactcaatttgtgggggagggatgtggggagattggattaaaaaaacaaatcaagctgcacaatgttgctggtaactgacaggagaacaaaataattaccacattgcaaatcttacagtctttttcaatagaaaacactgttaagtagatactaaagtgtaaatatgataagctacacctcctgctgcaaagttcaggagaactaaaagacagatctagatcaaaatggggaatgaaaaacattatttgaaacaagaagacagatgacagtacctagacagaaaacctgttcatttgttttggacacaggatcatattctg

SEQ ID NO: 692749 - DNA, 883 bp, Homo sapiens
tgttctkttctttactgccagcatctcctccaggaacactttccagcccagcccagcctgaccccaggctaagattggtaccctcctgacttggggtctcatagcaaatttactcattttttcctgcccctggccacactactgcccagtcccacactggactgtagggcctgcctgcctccctgccactagagtatgagcaacttgtgggcacattctgtgtctttttcatccttttcagttttctccttgcagagtctagagcacaagatggataagtagtacagtatcttattcttactcctggcaatagggtttggttctgtgtccccaaccaaatctcatgttgaattgtgatcccaagtactggaggtggggcctggtgggagatgattggatcacaagggtggtttctagtggtttagcaccattcccctagtgctgtcttgtgagtaagttctcatgagatctggttgtttgaaagtatgtagcacctccccattctctctctcttcctcccgctccagccatgtaggatgtgccggcttaccctttgctttctgccatgattgttaagtttcctgaggcctacctggccttgcttcttgtacaccctgtgtaactgtgagtcaattaaacctcttttctttataaattacccagtctcagatagttctctatagcaatgtgagaacagactaatacacttggtaacaggggtgaacaggggcctcaaaaagctatgtccaagtcctaagcctccccacctccacccaccccacccccattcagtatctgtgaatgtgaccttatttggaaataggattttgcaggtgtaattaaggatctcggcatgtgatcatgctggatttacaacaggctc

SEQ ID NO: 692750 - DNA, 883 bp, Homo sapiens
tgttctgttctttactgccagcatctcctccaggaacactttccagcccagcccagcctgaccccaggctaagattggtaccctcctgacttggggtctcatagcaaatttactcattttttcctgcccctggccacactactgcccagtcccacactggactgtagggcctgcctgcctccctgccactagagtatgagcaacttgtgggcacattctgtgtctttttcatccttttcagttttctccttgcagagtctagagcacaagatggataagtagtacagtatcttattcttactcctggcaatagggtttggttctgtgtccccaaccaaatctcatgttgaattgtgatcccaagtactggaggtggggcctggtgggagatgattggatcacaagggtggtttctagtggtttagcaccattcccctagtgctgtcttgtgagtaagttctcatgagatctggttgtttgaaagtatgtagcacctccccattctctctctcttcctccckctccagccatgtaggatgtgccggcttaccctttgctttctgccatgattgttaagtttcctgaggcctacctggccttgcttcttgtacaccctgtgtaactgtgagtcaattaaacctcttttctttataaattacccagtctcagatagttctctatagcaatgtgagaacagactaatacacttggtaacaggggtgaacaggggcctcaaaaagctatgtccaagtcctaagcctccccacctccacccaccccacccccattcagtatctgtgaatgtgaccttatttggaaataggattttgcaggtgtaattaaggatctcggcatgtgatcatgctggatttacaacaggctc

SEQ ID NO: 692751 - DNA, 611 bp, Homo sapiens
gtgataatttgtcatgcagcctgaaaaaccaatactttcagaaacastagaacctaactcaactagaagtgctggggcacctgaggacacagattcacaactcctttttcaggctttctccagggtgtcagttcattgcatggaatgactggcatgattgctcacacttttttatttttttatttttttcttgacccctagggttacattttattgagttaaatgtgtagatgatgtgactttactataaaattatactctagagttcgtaaagcttgtttcttaatgtttaccatatccctgtgtggtattattgttgtattagttttctattgataaatagcaaattaccacaaaacttagaggcttaaaaagacacatttactcaaaagagccaagagatggaagcaacccaaatgtccaaagatggatgaatgggcaaaccaaatgtggtctatatacagtcaatggaatgttattcagtcctaaaaaggaaagaaattatgacgcatgctacagcttggatgaatcttgaagacattatgctcagtgaaataagccagtcacagacaaataccttatgattccacttttatgaagcacctcaagtt

SEQ ID NO: 692752 - DNA, 1838 bp, Homo sapiens
ggtgggagttgggagtagagggattcgggggggctgctggtgtaagtcccagagtcttcaaaggcctgagaaccaggagttttgatgtccaagggcaggaaattatggatgtcccagctcaagaagagaaaatttgtcctcctcctgtgctttcgcttcattcagttcagccctctgtagactgcatgacactggcccgtgttggtgggagtggatttatttactcagtctactgattcaaatactaatattttctggaaataccctcatagacacacccagaaatgaagttgtatcaaatatccaagcgccccttaactcagtcaaattgacacattaacttatctttcagctaacttctctaaaactacactttttatagtttctctgaaatatgtactattataagaaggtctatttagtttggcccttttgaggatgaattactcttttgaatctagattgatacatttttcaaacttataaactcagtgattcatttattaataaatattaaaatgcattgaattaatgcacttttttgggatggcgatgggttattgatttctgcaaatactatgtatatcatcttacctaggatcaatatatttcattaccatactggaatatcttgtgtctgaagttgcactctgaaagtgattttattctagagctgacaaagtctgttcatggctgtctaattttaggaaaactttatctgcatttttgtagtcttttcatacttaataaaagctatactgatgttgtgacttatctgtcttcatggacttattctctagtcttacaatcaactgtttgtatgttgtatgaattgttcaaatatctcaactgtagtgacctcaatatccctgtatctaaccctacatggaggattatcatcatcattatgattatttgattacttgttccacatcttctttaaatagtttctgattgtgtcatatctctttaattttagatttccattattataattatattttgacaacctttgttatatccattctaaaatatttcatttcactgattgtataagttttatttcaattatacctgattgatctttaatcataagaataatatttaatgtcagtattgctactttttcaagtagagaattattattttgatatttgatcatttgagtgcaaatttttctgttggaaaacattgcttccattcacttagaagtgaaaaaaatatgataaggagttgagcgggcgtggtggctcatgcctgtaatcgcaagcactctgggggggccaaagtgggctgttcacttgaggcctggagtttgagaccagcctggccaatatggtgagaccccatgtctactaaaaatacaaaaattagcatggcgtgatggtgtgcgcctgtattcccagctacttgggaggctgagctgggaggaagtcttgagcccagggggcagaggttgcagtaagctgagatagtgccattgctctttagcctggctgacacagcgggactctgcctcaaaaaataaataaataaataaaggagttgatggtactgctgtgtatatatattatatatagaatatatatttacagatatacacatagtatatatgtatggcatacatgttaatagttgtgcatctttcacttaaaatttttaattcatttccaaatatcctgctactaaagtaaatagctattaaatggacacraatattttgattaattttaatggaaaaattatgcatttcatcccaatccaagatagaaataaaatgtttttatgagaaaaataagtatcagtttggaagtaaatagttcattcagaaaatttaa

SEQ ID NO: 692753 - DNA, 622 bp, Homo sapiens
gcagtgaagacttaaaaaaaaattcataattctaacaaaaataattttatagaatcatacgcttggagcagtgatagccttatatcttgaatggcaacattttagtttaataatgtaatgttgtatcagcatcccttcaactagattttggaaatttaactaattctaatttagagagacttactttcactgcataattatccatgaaatcactaggatttctctgcatcctttaaaaggatgagaataaaatacttaagccctatgaagtaagttaaacaaaaaaatcaatctattgttcttsaaaacttaactagcatcagctgaaatagcataagaaaatcactgagaccaattgaaatgtagatggtgaaaagtttattcaaatatcaaaattaattcaaatatagccattctgaatccgttgtaatcttaaaagataatgtctgtatgctttaaatacaatgagtggcatctcaggcatgatagtaaataatagaagttttctcctgtaactgtaataatttataaacttgttaatatcaaatatgtttttgacattggcgttttataagaacacaataatgcattatatgtagaagttcaattgagtcataagcta

SEQ ID NO: 692754 - DNA, 594 bp, Homo sapiens
tcagaaaagtggtttacagacagtccccaacttaagacggttcaacttccaatttttcaactttatgataatgtaaaagtgatatgctttcagtagaaacagtactttgagtactcatgcaaccaytgtgtttttcactttcagttccgttttcagtaaattacatgagaaattcaacactttcctataaaatagtctttgtgttagatgattaaaagcctagccaaactgtaggctaatggaagtgttcttagcacttttaaggtaggctaaactaagctatgatgtttgttaggttaggtgtattaaatgcattttgaatttatgatattttcaacttgcaatgggtttattgggatgtaatcacattgtaagtcaaggcacatcttcaattgtattatgtcctctgtcccctgcctgctgactgatacgctgctgttcttccactagccattttccaactctcgtttgcagtgtctagttcctctaatacgtatttctccttccatttgtaccctggacatctgagtctgttttgtttctctttgtctgagatcccctttctagaccctgctctacttttcttactcagag

SEQ ID NO: 692755 - DNA, 594 bp, Homo sapiens
tcagaaaagtggtttacagacagtccccaacttaagacggttcaacttccaatttttcaactttatgataatgtaaaagtgatatgctttcagtagaaacagtactttgagtactcatgcaaccattgtgtttttcactttcagttcmgttttcagtaaattacatgagaaattcaacactttcctataaaatagtctttgtgttagatgattaaaagcctagccaaactgtaggctaatggaagtgttcttagcacttttaaggtaggctaaactaagctatgatgtttgttaggttaggtgtattaaatgcattttgaatttatgatattttcaacttgcaatgggtttattgggatgtaatcacattgtaagtcaaggcacatcttcaattgtattatgtcctctgtcccctgcctgctgactgatacgctgctgttcttccactagccattttccaactctcgtttgcagtgtctagttcctctaatacgtatttctccttccatttgtaccctggacatctgagtctgttttgtttctctttgtctgagatcccctttctagaccctgctctacttttcttactcagag

SEQ ID NO: 692756 - DNA, 594 bp, Homo sapiens
tcagaaaagtggtttacagacagtccccaacttaagacggttcaacttccaatttttcaactttatgataatgtaaaagtgatatgctttcagtagaaacagtactttgagtactcatgcaaccattgtgtttttcactttcagttccgttttcagtaaattacatgagaaattcaacactttcctataaaatagtctttgtgttagatgattaaaagcctagccaaactgtaggctaatggaagtgttcttagcacttttaaggtaggctaaactaagctatgatgtttgttaggttaggtgtattaaatgcattttgaatttatgatattttcaacttgcaatgggtttattgggatgtaatcacattgtaartcaaggcacatcttcaattgtattatgtcctctgtcccctgcctgctgactgatacgctgctgttcttccactagccattttccaactctcgtttgcagtgtctagttcctctaatacgtatttctccttccatttgtaccctggacatctgagtctgttttgtttctctttgtctgagatcccctttctagaccctgctctacttttcttactcagag

SEQ ID NO: 692757 - DNA, 639 bp, Homo sapiens
taccaacagatttctcttttttgatcagaaagatgttctctgcatttccctaagtcatttcttgtttcttttgagacatcacattgtgaccaaatcaagacatttctgtttttcgtagaagggaaactggaaattatctgaacttcatcctttaaaatttttttttgtaatagaatcataatgtttgcattcaacagtaaaaacggcactgaacacagagttatgatgcttcctaccatgatgccattatgtactgtggatgtaactgtgggcaattacttcacttctgtgagyttcagttttagctccctgaaaaggcagatagatgatgatgtttgcctacctcagaggcttgctatgaggattaagataacagaaggcatccagcggaatgaattcctgggatgtggtagatttttgataaatatgtgttagatctcatggtgttgagtatagaaaggtgaacatatgttgcttctttttaaaaatttatctaatttcttctaggtgctgcttacaactgataacagacagaccccctgccattcaagaggagctagatcttatccaagccgttggatgtcttgaagaatttggggtaaagatcctgcctttgcaaggtgagttttctacttactg

SEQ ID NO: 692758 - DNA, 639 bp, Homo sapiens
taccaacagatttctcttttttgatcagaaagatgttctctgcatttccctaagtcatttcttgtttcttttgagacatcacattgtgaccaaatcaagacatttctgtttttcgtagaagggaaactggaaattatctgaacttcatcctttaaaatttttttttgtaatagaatcataatgtttgcattcaacagtaaaaacggcactgaacacagagttatgatgcttcctaccatgatgccattatgtactgtggatgtaactgtgggcaattacttcacttctgtgagtttcagttttagctccctgaaaaggcagatagatgatgatgtttgcctacctcagaggcttgctatgaggattaagrtaacagaaggcatccagcggaatgaattcctgggatgtggtagatttttgataaatatgtgttagatctcatggtgttgagtatagaaaggtgaacatatgttgcttctttttaaaaatttatctaatttcttctaggtgctgcttacaactgataacagacagaccccctgccattcaagaggagctagatcttatccaagccgttggatgtcttgaagaatttggggtaaagatcctgcctttgcaaggtgagttttctacttactg

SEQ ID NO: 692759 - DNA, 607 bp, Homo sapiens
aaggaaagacttactctgtgttttttggttgcatagtgtgatttttttttcttttataaataatgtaattttctgatcatacaagtaatccatgtcttagaaaatatgaaatgtagaaaacaatgaaaaaaataaaaaataaaattcataatcttactacccagatacaaacattgtcaacagtttggtttgtttccttctttcaatgctaattgytttgcatggctgggctcatgttttatacacattattttttttttttctttttcaccttaatattagaaaacaagtattttccttttcttaaagagacaatattggctggctgcagcggctcatgctgcgatctcaatacttggggaggttgaggcgggcagaatgtttgagctcaggagttcaagtccagcttgggcaacatggcgaaaccctgtctctacaaaaacatacaaaaagtagctgggtgtgttggcatgtgctgatagtaccagctgctcaggaggttgaggtaggaggatcacctgagccagggaggttgaggctgcagtgagccttaattataccactgcactccagcctgggcgacggagtgagaccttgtctcagaaaa

SEQ ID NO: 692760 - DNA, 654 bp, Homo sapiens
atttttgtatttttagcagagatgggtttcaccatgttggccacgcgggtctcaaactcctgacctcatgatccacccgcctcggcctcccacagtgctgggattacaggcatgagccactgtacccggcctggggtgacattcttacaaaagataattttggcccccttccctcactcatatacactctcttgccatgtaatgccttccaccatattataaaatagcaaaaaggccctcaccaggtgcaatgcttgatcttgaactgcttagccttcagaaatgtgacctaagtaaaattctattgtttatcaatacataaaaaaaaagaatttgagatggatttggcatgacctttgacctcctttgtcagaagataagtcgaagcttggatttggagagctccactgtagcagatctgaatccatagcaaactacayagccactgaccttgcatttttattctgagacctatttcaagaggctcagtttaatcaaaaattatacattaaatacagatacagttcattcacttatagcatttccacacatgtcctaagcagaaaatatcacattatgagtccctataatttgtccttcattcacactttttctgctttattaaaggcttttggaaaacaatcaaacttagat

SEQ ID NO: 692761 - DNA, 625 bp, Homo sapiens
cttagatctcattgccattgatcctattgataacgtaaaaccgtaaaaactgcagtcctgacttaaacatagttttcagatctacacaactgtacttgattttgtccgtattctacatcatttgctttttattctatatcgttaactttgggcccattcstaactattgtctaaaccacttatttggcactcattgctttgattctatagacccattcattaaacggagattttttttatgccactgtctgatggtgagggtataaagatgaattgaaccaaggtcctgcccacaaggtattggtctagttcagagggtgaggaaatacgtgggcagaagcttagcaagctaactaaagtgcctctcagtctggacagtctcagacttgctaactgcctaagtttagggagcactgatttttcagtctgagttgtatcttgactcaaatccagcttgaagctgggaagagtagcttgtaagatttgccttaaatgtaggcttagagggcagagtggttggttagttccaccctcaggtaataaaagcaccagatataggtccattagggttcccatttactgtcttagaaaggagccctaagtggtccagggatcacaggagcat

SEQ ID NO: 692762 - DNA, 1197 bp, Homo sapiens
caaggcatgaattcccatccccatttcatagatgaggaagctcaggcccaaggtgatccttttgtgagtcagagacctaggattctccaccatgttctgcacatgaaaccccttttctgagtttaggatggggcaaaagatcctgcatttctagagggagcatagctagagaggagatcacgtgttgactgatggcctgtggatgtcttaggtgctgcagcatcttccaagggcaaataggctgagtcagaactgctttagagaaaaggcctcttgacagagatctgcttttttttatagcttacaaggcccaggagaatcttccagtcttaaactctgtgagttaaatgatttatttggagactttccctccccctcctccttagcacatacccagcttttatgtcactctgctttctgagcctgatggaaaaaaatcaagaatgatagaaaaaagagccaaaaattttctcaagtattcctagagacagtattgggccattagagagtgtctatttatttactgttgaaaatcttccctgaaaagtcccctcttatttcttagaattaggattcagccctggtctgctggcatgcatgctggagggagaaggcggccagtctcagctgtccaaacagcgggaaattaaatgcttttgtctcataggagatcgctgagctccatggtgattttcagctctcacccagtggtgttacaaaggctcttttccctccctccttcttccctctaactcttctgtttttttgagagaagaaggggcttatggtaggtaggttgcagatttgagatygagtcttaaaaagaacaagaaagaaaagggacttcactataatgcatgctgggtcccatcaaagtgtctggttccaccctgacagtaagtgctgcagggtgctagaagagataaggacacattataaaaacacagattggattctgtagaaaacctgtggcttttaacaaaacttatttggcctgagttatcttacctataataaatctcacttcacagggtcagtgtacaaatcaaatgaaatataagtgtctgattcaaaatagatgggcagttattggttcatttggccaattcatttgcattgagctatactaattggagctcaggatatcacatgtttcactaagatgttttccctgtgtgccctttattagttattttt

SEQ ID NO: 692763 - DNA, 1034 bp, Homo sapiens
caggtcaagtgatctgagattgaagtctggcattaccacttactaatgacgttaggcaagtcattttagacacccagtgcctcaggtgcctcccccataacatgggggtggtaatattaatagtatgtacctacctcatagagttgctgagaagactaaatgagttagtgcatgtaaaattcttagaacacttcctggcacagaataagctctaaacaaggctatattattaatgttgctgttattactattgctttacatttgcaataaaacaaagatcatcatgtagatgtttcctaagacaaagaagtggtctacccaagaagtgaatttcagtttctggtacttaggacaaaaactgtacattttaaaggtcgtttttcaagcttcaaaaactgtttagtcacactggatctccatttcttttacttgcttgctccttgccacttcccataaagaatatgaagtggcattaagaaaaatataaaacaaagtggtcgtgttaaattaaaaaaaatcaagaccagggaaaatcaacattaaaatrtaacatcggctgggcacggtggctcatgtaatcccagcactttgggaggctgaggcaggtggatcacgaggtcaggagattgagaccatcctggcaaacacggtgaaaccccgtctctacttaaaaatacaaaaaaattagccaggcgtggtggcgggcatctgtagtcccagctacttgggaggctgaggcaggagaatggtgtgaacctgggaagcggagcttgcagtaagcggagatcgcgccactgcactccagcctgggtgacagagcgagactccatctcaaaaaataaattaattaatcaattaaataaaatataacatcaagacaggaggaagatctaaagcatgctaagggctctaaattctcatacacttataagagcactggattacaacccattaaataaaatggaaataaactaaataatataaataatataaataaacacatataccagttaaacaagtggatggataattgg

SEQ ID NO: 692764 - DNA, 1387 bp, Homo sapiens
aaaaaagagagggcactaccacatttcactgtcccagcctattactgtccttaacatcatacgtagtggtcttccataggtcctttaaccattccacctatgtggccttctcaatagtaatagcatcacaagtcagcagagctttatatgtcacaaagaaattgcacatggagtatctcttctgatcttcacaacagccctttgggttataccgaatcagctgttattattcccattttacaaacaaggcatctgaggtgtaaagaggttcagggatttgtttacagatatgtggctggcaaatggagggctgatcctgtaactcttagcccagtgctttcttcgcggcattgcaaggaattacagaccacttgagcagagctgtatgaacatcaagacattgcctatctactcattacaacttcagtaatggctcattgagatacaggtcttctttactaaaggacctgtcaagccattgaatagatcaaactcagtcacaaaacatgatacaatgaatccaaaatttgccataaaagtctacaaatcaactcacaacagaagctttcaaatttgacttagacttcatgttccttgaacatcacaataatcattttggtttttaactatactctgagcttattacagttgtcttttttccccacttttgggtaattagtattattttggatagtgtgctactaaaaaagcagaacgcttttatagtctatgtaggtaacaaaaaccttgtctatttaaatctgatatatctttctcatggctagggcaagccaaaatgtacagttcagtctacacagccattcacacttatctgcaggtccttctcttctcaaattgagacattaaccatggttcctccatagagtatccttcaaaaactcagtttatcacaatcactatasagatcatttattggtgggaaatgcttactgtgccaacacgttgaacaccaagagattcatcagatcctcagtctctctctctctctctctctctctctctctctctctctctctctctctctcatgccttagaacctgaaattctgctgtaatttcaactttggagaaaagcattagaaaaccgctcttaacattgtgttcaattcaacaacccttactgagcacatacaagacacactgttacccaatatggaaaccttagattctatttcatttctctgtttcttgcttttaccatagacagtcaccagagtcagaacactgacctcttaaaaatatctttcttatctgaatcctcctttccatttcaattaatactgccttagctcaattaattgtttgttcttgattggattcttaatctagtcttctatctggtatccctgcctccagggaatgtataa

SEQ ID NO: 692765 - DNA, 2419 bp, Homo sapiens
tagctatttctccacatctctatttaagaataacctgcaccttccccactgagtgtgtacaaattataatgtaatatgttgtaatatttaaacaaattcaaaaaagaagtaattctaataaaaagaaaggaaagctacataaacctagatgtagatattaataaaaatctgaattctggtgtcattcaaattagttaattaaataggtttatatctggtcagctggccttaagattcaaaactcctaaacctcaaatagaattcatctatatcttaaatatataattatttatatatagtggcaataacttcataaaacaactctttctaccataataacggttatgcttaatttggtcaccaaacaatcacaaaaatctataagcatgtataaaattaccttttaattgcaaaagagccatcattatttctacaaaagacagcactttaatgtgctaaacactctctagtcagagtgctggtctgactctccaataaaggccagcccaacaggctgaactgcagaaagaaagaaacaggaagatcaaggttaaaaaaaaaaatctgtctcctacccataaactggtatttaatttaaaactccttaacttccttctgcacaaccttatgtgcatctaaccgtgtccattttgtagtaaagattatcaattcactagcacagctaagaaagcatctctctccctctggctggcagtttatcaaaggtcagacaggattgccaccttacatgcatctgtttaatagctaaaacatatatgaaaacactagctttttcccacacagaaaatggcatattctaagaaaatgctgctcttcttcaaatgtgccccattcaaacaaaatggatgagaataaattacaagcaagttttacaactgactaaattatgttgttttggaaatataatattcttattagccattttaaacataaatggtttccagaaggaacatcagtaatttgatgtttggggaattaaattggtccaaactggaacagtggtttaaaaggataaggaagactaattatctgtggtaaaaggcaaatatattaaacaacaaattttcagtcacaataatttccataataaaaatcaaaagtacgaaaaagaaggtcaaaagatatcytttaaacatgattgctgatttcttaaatgcaacttattctgtgctgtttttaattacaggattagaaagatttctggggcatcagaaaacatccaggccttttcaaatgtcataaggttttcttttgggagattttcaatgtttttttcctttaatatgggttttctatgtacgtactccctttttccagatttcgacagtgcctgcaagatttgaaaacatgacagtgctctgaatacttgtaattcctaaatcttactccttatgagaaatctcagcacagcaagagtatttagttgtatatgcattgttataccatttggggagaaaaaaattaactcttcgctttcttttctggtagaagttaaactttttaagcctttcttacccctttcccatattttacacacacacatacacaccccacatacatgaaataatgaatatatgtagatatctcatttcttataggatttcaaaatgctacagttacttaaagctgaaagttccttttaggagattacacacacctccctggaagaaaaaacaattgacagatcttcctgaaattggagcacaggagactcactagagaattctccaagtccacatcacaggaactgcatcctcagctctccgttgcaggccacctctcctgacaaccgcgcctcggatctggagagagctcagtcccgctctgtcacatcacagacacacaggcctgacaccagcacctctcattgcggacaaggggataacggcttcaaagccaaacaaacgcagcctgctaggcgctcagggaacgcccccgtcctccgttccctctagtccccactgtgacaccctcgtatggcatctaattaaccagtttaccttaataagcttacgattcatcactctccttccactagtcaaggaactgctttatctcccatcccatcccccagcctcctgaacttttcttaaaacccaggattctgatgtattgacttaaaactgaagtcctccacgaaacatcaaaggtaccccccaataagcgttgctcccctcaagcaacacgttgccagtacaaacttttcattcatagctcggctccaacataaactgggtgtgtttgggggcgggagagaatcacgccaccgaccgctcgcctcagtttgcctagccaaatgtcagggtctgcatgccacaaagatgacctagcacccaactctgacgaaggttcccttaaacccaccggtctccgggctgcgagatgcaaggcaagtggc

SEQ ID NO: 692766 - DNA, 619 bp, Homo sapiens
ccacactgtggaagctttgttctttcgctctttgcaataaatcttgccagtgctcactctttgtgtccacgctgcttttatgagctgtaacactcactacaaagatctgcagcttcactcctgagccccgcgagaccacgagcccaccaggaggaacgaacaactccagacactctgccttaagagctgtaacactcaccgcgaaggtctgcagcttcactcctgakccagtgagaccacaaacccaccagaaggaagaaactccgaacacatctgaacatcagaagcaacaaactccagacgcgccaccttaagagctgtaacactcaccgcgagggtccgcggcttcattcttgaagtcagtgagaccaagaacccaccaattccggacacactaggaattctagaggagagaaagacaatattatgccagacactcctatggtcctctggcactggggaatgtagaaaaatttccagagggtaggcaaggaaagatggggccatccatgggactgtttgcctgttttccttgaccgtattgtccctaatatggtttgatttggttgtatgcatctaatggcagaactatttttaattcatattgataatatatatt

SEQ ID NO: 692767 - DNA, 619 bp, Homo sapiens
ccacactgtggaagctttgttctttcgctctttgcaataaatcttgccagtgctcactctttgtgtccacgctgcttttatgagctgtaacactcactacaaagatctgcagcttcactcctgagccccgcgagaccacgagcccaccaggaggaacgaacaactccagacactctgccttaagagctgtaacactcaccgcgaaggtctgcagcttcactcctgagccagygagaccacaaacccaccagaaggaagaaactccgaacacatctgaacatcagaagcaacaaactccagacgcgccaccttaagagctgtaacactcaccgcgagggtccgcggcttcattcttgaagtcagtgagaccaagaacccaccaattccggacacactaggaattctagaggagagaaagacaatattatgccagacactcctatggtcctctggcactggggaatgtagaaaaatttccagagggtaggcaaggaaagatggggccatccatgggactgtttgcctgttttccttgaccgtattgtccctaatatggtttgatttggttgtatgcatctaatggcagaactatttttaattcatattgataatatatatt

SEQ ID NO: 692768 - DNA, 1337 bp, Homo sapiens
gagagagagagaatggcttgaataattgaatgagaattgtcttccccagtgcctggcatggtggctcacgcctgtaatcccagcagtttgggaggctgagggaggtggatcacttgaggtcaggagttcgagagcagcctggccaacatggtgaaaccccgtgtctacaaaaattagtcgggcatagtggtggtgcacgcctgtaatcccagctactcaggaggctgaggcaggagaatcgcttgaacctgggaggcagaggttgcagtgagctgagatcacgccactgcactccagcctgggcgacagagtgagactctgtctcaaataaataaataaataaataaataataataataataactgtcttccctgagatgaaaaggatcatttcccagcagggaaaccctagagcccaggtggcccgatggcttcctcggggtcataaacagcacagttgcaacgtgaacttctgttggttttcttcactgaagtagagctgctgctgccgtgagttaaggcatcaaccggttttgatccttccaaatagtcactgaagatagtggcgtgcatccccaggtgctatcagaggactgtttttctcttatcagggaagtcctgtgcatcttgtcccacagggctatggagatgtggttggcatgggacacacccccttcatgcttagttaaagcgcaattgcactgctgaggaccggctttgtctcatcccccgtcatgctgtgaacattctggagagaggaagtctgttttgtttttctggctcccaggaccccatccagagagacaggaagctaggaggtgcccgttgaacagttgttcaatggatgtgaaataaaggaacataaatatgacccttgcttttatcttccttgggcatcccaggctctggcatttagatcaaatggttacagtctatagaagttgattctgtagactgtggtctgggagcacagggcagaagctcagcccaatgattgcccttcagtgtgtcgaacgccctgtgcttcactaccaggctttttgatgtggctgagaaagtttacrttcaatctcaaaatgctctccttagggaacatctaatacggtttccttgagaaaataaattaatttctcaggtttggcattggcaagtgtcccactcactgcccattaggaaccctgctttccaaacctatactcctcttactatgtcatcctgatgccctgtttagttgcttctcataagaatagaaatggtagccggccctggtggctcacacccataatcccattgctttaggaggccaaggcaagaggatttcttcagaccaggagttc

SEQ ID NO: 692769 - DNA, 634 bp, Homo sapiens
aaattggctttttaactacccacatataaagtcatgaaaagagatacaatgcaagccagttctgctttttcataacagatatgattaagcaggatattaaaaagaagtttcaaagtatgtctcttttcttaatttcccataccttcctctcctttactgtgtccaatgaaggaaaaattaagragaaagactaaatattttgagttaaaagcattaacctattcaaataattaataattattggctccaagaccttcttggattctacttcagaattacccccgaaatgtcaccagcatcattccttgttctgtctgtatctctgttttggattttaagagagttaagtgacatggcttctaagcccaggatctttcgtagtaaaatcacaggtgaaaatgccatcaatttcttgttgccttgttttcaggaacaaactagtttgatgttatttcttcttcgatttttccaggacatcacattcaattctcaactgtcctgtttttgaagaaagataagactttggttttgattgaattttccttgagatcagttattgccgagtccagtttattaaagaactaacgtggtatcagttctgaattctctgaggtcatactcaagttcatctttg

SEQ ID NO: 692770 - DNA, 634 bp, Homo sapiens
aaattggctttttaactacccacatataaagtcatgaaaagagatacaatgcaagccagttctgctttttcataacagatatgattaagcaggatattaaaaagaagtttcaaagtatgtctcttttcttaatttcccataccttcctctcctttactgtgtccaatgaaggaaaaattaagaagaaagactaaatattttgagttaaaagcattaacctattcaaataattaataattattggctccaagaccttcttggattctacttcagaattacccccgaaatgtcaccagcatcattccttgttctgtctgtatctctgttttggattttaagagagttaagtgacatggcttctaagcccaggatctttcgtagtaaaatcacaggtgaaaatgccatcaatttcttgttgccttgttttcaggaacaaactagtttgatgttatttcttcttcgatttttccaggacatcacattcaattctcaactgtcctgtttttgaagaaagataagactttggttttgattgaattttccttgagatcagttattgccgagtccagtttattaaagaactaacgtggyatcagttctgaattctctgaggtcatactcaagttcatctttg

SEQ ID NO: 692771 - DNA, 624 bp, Homo sapiens
aacaaggaggccagtatctccatttttattcaatattgtgctggaggtattacccagtgcaatggggcatgaaaacctgaaagatataatatttggaagaaaaattaataaaaataaccattaatctgcaatataaaagagcacatatggaaatctaaaataatctaatcacacgattaaaattacgagttgaatttgacaagctcactttttgtaattactatataaaatcaattctttctataaatcaaaacaaatagaaaaaattcaagtgtcactatttccaaagcaaattctttaaataagacacaaaaagcagtgacccataaaatatttgactactataaaatcaagaacatctgttcattaaaacatgcaatccrtggattaagaaaagatatttgaattcatatattcaatatttctttctagcaatgtcaagttttgtgatcaagattatgatgattctctaacattagattagaaatttttaattctatttaccttttcagtaagagtttgcaccatattgttgaggtttctgccttaaatattcagagaacttgaagtatgaagtcacaaggatctggcgaatactttgtggaagagttttaaattatagat

SEQ ID NO: 692772 - DNA, 1887 bp, Homo sapiens
acaggaaataggggcacagcatcccatcacagttaatgagagaatgacttctgctaggtcccgaaggagtaaaaaggagcaggctgggcttgcactgggcatggagatctttgattcaagattgggtaaaagacagtcattttccacttaagtatttcaccctccacctcctagttccacagcaggcttttcactttaagtttagtgcaacaaagcaggaagaattttgtaatcattaggaagaaattttgagttgagcttttattgtattttcttttgctcttaaaaccaaaattctacccatcttgtcaattccaaggaggaagacaactaatccttctaacagaatcatcaggatttcttaagcataaaaatgaataaaagagggggaaaaggatttctgcatgaaagttaattttatgatattgtagcataaattgtgacctggcagttccctctgcagtttaacagaactggcagcaggcaccacgacttaagcagactctgtataatgagaagcacagacaaatyggtgtgaaggacagggagaaggacattaccgcttccctcctggaggattaaaaatagtaaaatattgcaaccagaatttatctaaagggagatactatctgagaaagaaagaaagaaagaaaaaaacaaaccatgattttaagagacggccatagcccagcgtatcatgagcagagccagagagcctggtgctggcgtttgaaagaagtcaggcagcctgtgagggttgaccagttctccttctaaagacctggtggcaggtaattttttacattataattttgaagtgggacgattttctaaagcataattagagtgaaatgaacatgttactcctttttcactattaaatgcaggcaagagacgtgggtctgccaaataaatgagagaatttattgttagaagccaagagccagcctcggctgacaatcagacaggtgactctcaaagggtgccgtccagaggaggtggacaggcgctgtccaggtttgcgtggctgaatgtgtaatgggcctgctctgagctctgtatccacggaagcaatatcagagcaatttccaaaattacacagggcatgcagcttctaaatctcctagcagaacagccatattatcctgaggacttgcaataacaggaattatatgcaattttctgataatgactccattaatgtgagtcgctgctgacaatacaatttgttaaacattgctggattcctaaatcttacagtctatcactctgaaatccatcattaacacccctaccatcatcacgatgatcgtcagcatcaccgtcattgttgtcaccttcatggccttcatcatcatcatctgaatagctagggacctatttgagttcaccaatattaccttttcttgatttcactaacatttgaaaggaaaaaaaaaaacatgtctttatccattcaagtatgctttgtagtcgatgtgtttgattccttctttgggaaactaggacctcaaattaattaaatttaggccaggtatagcttagctttaaattgccttttatatcaacagaaactgccttggcaattaggtgctcaaatgagtgcctgtaaatatccattattttacattctaatatacctggacatagaatagaacctacagctcatggtctatctgatttactaattgggagcagcaactgcaccttgtgttttgaacctgaattaattaaccaaaacagattaaattgtctttgaggtattcaagggagtgacaccaaaggcagaattgaatgaggaaaggactatttaactttttttaatcacaaaggtcagcttttttaatgtagcagatcattagaaagtcttcaaaggtggaaggaaac

SEQ ID NO: 692773 - DNA, 1384 bp, Homo sapiens
gtgaagagtaaaccagactaacacatctaaagtattttcacctcattgtcttcatgctcaagaagattccatagttttctcattgcctagtgaacacaattataacctctttccctagattctagggatggttggacgctggattccaagtcacacagttccagtaggtcccatcccacaatactccgttccttggggacctggatgcgtttgcagtgctcagattagaccaggccctgcccacctggtcactgctgatctctacctctgtctccccatgtccagctatccccaaacaattaaaacacacatagagacggagataaaagagggagggacaggggaaggaagcagacaagctgtttcttcctctggagttgttttctgcctttttattttaatcactagattgcctcctgatcaataactcaatgagagagggttagctcctcatagaaatgtattcagaaacattataaaattgggtcttcaaatttttttttctgagaatcagtttgagaaatagcccattaaaaattatctctgggtattttataaaattccatagaagacactatccactatgttcttcaatatcactgatattttttaaaaaaatctgtcataatgaattgcctaattttttaaagtctttttaaatgacactgtattttattatataaaatattaaatttgctttttgctccaatggccagtttttaaccccattttttttttttttttttttttgagacggagtctcactctgtctcccaggctggagtgcagcggcgcaatctcggtcactgcaaccttcacttgccgggttcaagcgattctcctgcctcagcctccagagtagctgggactacaggtgcgtgccaccacgtctggctaattttttgtatttttagtagagacagagtttcacggtgttaggttggtcttgattccctgacctcgtgatccgcccacctcagcctcccaaagtgctgggattacatgcgtgacgtaccgcggctgatccagtttagcccaaatgttattcttgtttccaggaacttctgttaactcagtttttgaaacaattatctcagaaacccaactcacttctttcattactaggtctccctattatgcccttgttttaacattttgcattatgcttgcacctctgtagccatttttagtacttttttgacatctctatgaggaatctacgtgataaacagcaacaaaaaatcctcatgctaacgttattgttttgttttgktttgtttttctttgtgactgcagggcaatttggttgtggttatttctcttggagaacctagattaggcttactgaaaaacagttaaaacaataggggcttcttcatattaa

SEQ ID NO: 692774 - DNA, 865 bp, Homo sapiens
atgtgaagttttgtcagtagagagcattgaggaacactgtaagaggaagcggacttctcttcctggttgtggttgctgtgtttgcttctgtctgctcttgctgcaggattgtctgtggtgcgggtgtgtgggaactccagggtgctctgtccccaccacacacacggmacacagtaccttgaaaaacttacagcccccacctaggctggtgaccattttctacagttctcctgacatgaacaccatgcattccaggccttgtgcctgcaggaatgcccccaactttctctgcctgtcttctcactggtgtttgctcactagtcacttggaagtttattcctacttgctcagcaactgtgggcaaggttgggctaggaaaaccagccagcttctccatccagtagtctacaaccacaccttccttaaggagatgtgaactgcagcattaggaaggcatctgcctttcaatttactctttccttgaacactcccaccagctctagggtacccttgagagttctttttacattattacagttattctatccatagcttactaattatttatattaagctgccctatttaaattatcatttggtttctgtttcctgattgtacctggactgatacaaaagccaaggaagctgagtactacgtattatgacagacatgaagtacatgtgaaggagaacatcctttactcagtgcaggaaatgctggaaaaagttgtatcgagttctctctctctctctttctgtgtgtgtgtgtgcatgtgtgtgtttctatgtggatttttcagttaagagtagagattatacttacatattctaatgatgaatctctgtcccagcaagagaaaaatga

SEQ ID NO: 692775 - DNA, 1285 bp, Homo sapiens
cagaactgagcaacctgaaaggagtagcttagttcagttatgcagtaagaatggattgttctataaggcgtttatttttccgtatttatttatattttcacaatcatattggcaatgtgatagtgtgatcagaggtttggggccaaggaggatgctggtgaggaaagcttaggactcacatgtgaggtccttccatgttaggaagctaataaatacattgcatcattgcatatctccttattctaaatttttttttttttttttttttttgagacagagtctcgatttgtcgcctggctggagtgcaatggtgtgatcttggctctctgcaaccttcacctcccgggttcaaacaattctccctgcctcagcctcccaagtagctgggrttacaggtgtccgccaccacacccagctaatttttgcattttgtagtagagatcgggtttcaccattttggccaggctggtcttgaactcctgacctcaggtgatccacccatcttggcctcccaaagtgctggaattacacgtgtaagccactgcacccaggctgcttattctaattctaccatctcttagctagacatgattttggcaaataatttcttgcagcatctgtttcctcatatgcaaaatgagggtgatatctccttatatgggtactcttatgaccatgaagataattcaaagtgtttagcataacatctagcatctggtaggttgcacaacacatgttaactactgtcattatcattgttattttcatcattgttctcatttgacctgaagtgccctctgtgtaatagatgccatagacacaacttagaaatctgtgactattttgtaaaattttcaaataatctgtggatcctacctcttccctggggacttgatcatattttgcagttagctctgctgtatggtctaccttttgttatcttcacgggtgctgctttgttaaaggaaggcattgaaagcatggatgacttcatggagcagattgttaactactatctggaatggttatttaaatatctcatttctttgcacatttattcctgaaaatgtttcttgaaagagattcaaggcaggagttaggatttttataagaatttctggtataagtggacaatagtaactgagagtgtgagaaaaagcagtggctctctaatgagtattatttctgatctttgctttatagctagcagggaagacaggagtttgaggaatcatgagaaaaggagaactggtgggggtggtgtcccattcatacaacagggctc

SEQ ID NO: 692776 - DNA, 1187 bp, Homo sapiens
ttcccccactgaaatggtataaccagagaactggctagaagataccaccggacattttcaagatacctctaagaataagagcttaagtttccctgttcactccactgcagttgtcagtgaagtgctaactgaactagcaacttggtgaagttaaatatccacacaaactctacttgggagggcactcatgtcctaagatattcttgttgctgcaaaacacacaaagtaaaaacacaccagaatctgtatcacaaatcaaatataaaatttctagcactggtgaagtgttagatcaagaggaacacattcgttagctgctaaacagccttcaaaattattagcgggcatagtggctcatggctgcaatcccagaactttgggaggccaaggcaggcgaatcgcttgagcgcaggagtttgagaccagcctgggcaacatggcgaaactctgtctctactgaaaatacaaaaattagcaaggcatggtggtgtgtgcctgtagtcacagctattcaggaggctcaagtaggagaatcactggagcttgggaggtggaggctgcagtgagccaagattgtgtcactgcactccagcccacaagacagagtgagaccctatcttaaaaaataaataaataaataaataaataaataaaaacaagtagtagaaaacaaaacaaaaattattagcaacttgaaatggttatattacggagcgatatatgcttcgcaactttatattaaaacagctacaccaatagaccctatgaagaggaaaaataatagtattttttttaaaccaaggcttgttttcttccatattataatatattggtttttttcttctgtactggttagcatttttaagtcaagttcagaagaaaagaaaaactactcccttcaacaaaggaaatataaatccacattaaaaaaataaagtcaaaagaccaaacaacctctttttaaatatattttaatattaaaaaaattaacaacaacamagattttaaactcttcccactttctctttgggttcaaacaggtataaaaccaagaatctgctccatattctctcctttaaacatcagcatatataaaataaaacttgaaattttaccaaacaaatcaggaagaagcaagagttctaatattccttatactgggtaaggaatattagaaaaatgtgtca

SEQ ID NO: 692777 - DNA, 963 bp, Homo sapiens
ccagcattttaggaagcaaaggtgggcagaccatgaggtcaggagctcgagaccagccagaccaacatggtgaaaccccacctctaaaaatacaaaaattagcctggcgtggtggtgtgtgcctgttaatctcagctacttgggagactgaggcaggagaatcgcttgaacccagaacactgaggttgcagtgagctgagactgtgccactgcactcaagcctggatgacagagtgagactccatctcgaaaaaaaaaaaaaaaaaaagaaagaaagaaaaaagagtttacatgacccccaacgatacacagctagtggtacagagcccttaaaatcagaagaacaagatggaagggaaatcagggagattcaaagtatgaggaagatttgacctactcttgttggcttgaagatagagtgggtagtgtcaaaagcatgagaagaatatgaattctagracaaccattgatttagggaaaaatcccacactccagatgagaaccacagcatttgttgacagtttgatttcagccatctgagaccttgatcaaccatgccatgttggacttcagaactatgaaaacagagctcataaacagattttgttataaatagctaagtttgtggtaatttgttgtgcagcaaaagaaaaggaaaatttgtttattctgtcatttccactgcatgaaccatgagtaaaacattttttcttggtgtttccttctttctaatatcatagattgggtcgtctagaaacatggaagaaagaaacactgcctgaaagataataaaatgcaggtgcataaaagtagaatggacttggaaaaactgcttttacattttgatttggtcacttactggctctatgaccttaagcaagcctatttttattttctttaagtcttacatttcatggctgacaaaaagagaaaataacaacactatttcttagagttgttgtg

SEQ ID NO: 692778 - DNA, 963 bp, Homo sapiens
ccagcattttaggaagcaaaggtgggcagaccatgaggtcaggagctcgagaccagccagaccaacatggtgaaaccccacctctaaaaatacaaaaattagcctggcgtggtggtgtgtgcctgttaatctcagctacttgggagactgaggcaggagaatcgcttgaacccagaacactgaggttgcagtgagctgagactgtgccactgcactcaagcctggatgacagagtgagactccatctcgaaaaaaaaaaaaaaaaaaagaaagaaagaaaaaagagtttacatgacccccaacgatacacagctagtggtacagagcccttaaaatcagaagaacaagatggaagggaaatcagggagattcaaagtatgaggaagatttgacctactcttgttggcttgaagatagagtgggtagtgtcaaaagcatgagaagaatatgaattctaggacaaccattgatttagggaaaaatcccacactccagatgagaaccacagcatttgttgacagtttgatttcagccatctgagaccttgatcaaccatgccatgtyggacttcagaactatgaaaacagagctcataaacagattttgttataaatagctaagtttgtggtaatttgttgtgcagcaaaagaaaaggaaaatttgtttattctgtcatttccactgcatgaaccatgagtaaaacattttttcttggtgtttccttctttctaatatcatagattgggtcgtctagaaacatggaagaaagaaacactgcctgaaagataataaaatgcaggtgcataaaagtagaatggacttggaaaaactgcttttacattttgatttggtcacttactggctctatgaccttaagcaagcctatttttattttctttaagtcttacatttcatggctgacaaaaagagaaaataacaacactatttcttagagttgttgtg

SEQ ID NO: 692779 - DNA, 963 bp, Homo sapiens
ccagcattttaggaagcaaaggtgggcagaccatgaggtcaggagctcgagaccagccagaccaacatggtgaaaccccacctctaaaaatacaaaaattagcctggcgtggtggtgtgtgcctgttaatctcagctacttgggagactgaggcaggagaatcgcttgaacccagaacactgaggttgcagtgagctgagactgtgccactgcactcaagcctggatgacagagtgagactccatctcgaaaaaaaaaaaaaaaaaaagaaagaaagaaaaaagagtttacatgacccccaacgatacacagctagtggtacagagcccttaaaatcagaagaacaagatggaagggaaatcagggagattcaaagtatgaggaagatttgacctactcttgttggcttgaagatagagtgggtagtgtcaaaagcatgagaagaatatgaattctaggacaaccattgatttagggaaaaatcccacactccagatgagaaccacagcatttgttgacagtttgatttcagccatctgagaccttgatcaaccatgccatgttggacttcagaactatgaaaacagagctcataaacagattttgttataaatagctaagtttgtggtaatttgttgtgcagcaaaagaaaaggaaaatttgtttattctgtcatttccactgcatgaaccatgagtaaaacattttttcttggtgtttccttctttctaawatcatagattgggtcgtctagaaacatggaagaaagaaacactgcctgaaagataataaaatgcaggtgcataaaagtagaatggacttggaaaaactgcttttacattttgatttggtcacttactggctctatgaccttaagcaagcctatttttattttctttaagtcttacatttcatggctgacaaaaagagaaaataacaacactatttcttagagttgttgtg

SEQ ID NO: 692780 - DNA, 911 bp, Homo sapiens
atatcagtaatctgcttttctgtgtctgttagctcttaagttaaaatctgcttggattcagttttattacattgattcatttgtttaagtgtagttttttggcctcaatctcccatcctacatccagctaattttttgttaattttgaatatttacagcctctagataatatctcttagatattaattaggccagtctctaattaaaagtgaatgaaacctaagtggacaacctaagttgatctaatttgaaataaaactgagcggatcatacattttgctgacaagagaaataccattaaaaaaaaagtcgtagattttatgcaaaaaaggacttaagaggccaggcacagtggctcacgcctgtwatcccagcactttgggaggccgaggtgggtggatcacgagatcagaagttcaagaccagcctggccgatatggtgaaaccccgtctttactaaaaatacaaaaataagcttggcatggtgttgcatgcctttagtcccagctactcgggaggctgaggttagagtatcgcttaaatctgggaggtggaggttgcagtgagccaagattgtgccactgcaatctagcctgggcaacacagcgagactctgtttcaaaaaaaaaaaaaaaaaaagaacttaagatacatcatgtggttaaagcaatacaaaaacaaaaacaaaacatttgactatgactagaaatcgggtgaccttgattcaagtcctggcaatatcagtggttccaaaacttagtgaatcatcagaatcatatttccatgtcccaccagcagaagttcccaattgaatagccttacagtgggtctgtaacttgtcagccaaccgctaccttcccctctaaacatacaactctgcaggtgattttgataatcagattaggggatca

SEQ ID NO: 692781 - DNA, 911 bp, Homo sapiens
atatcagtaatctgcttttctgtgtctgttagctcttaagttaaaatctgcttggattcagttttattacattgattcatttgtttaagtgtagttttttggcctcaatctcccatcctacatccagctaattttttgttaattttgaatatttacagcctctagataatatctcttagatattaattaggccagtctctaattaaaagtgaatgaaacctaagtggacaacctaagttgatctaatttgaaataaaactgagcggatcatacattttgctgacaagagaaataccattaaaaaaaaagtcgtagattttatgcaaaaaaggacttaagaggccaggcacagtggctcacgcctgtaatcccagcactttgggaggccgaggtgggtggatcacgagatcagaagttcaagaccagcctggccgatatggtgaaaccccgtctttactaaaaatacaaaaataagcttggcatggtgttrcatgcctttagtcccagctactcgggaggctgaggttagagtatcgcttaaatctgggaggtggaggttgcagtgagccaagattgtgccactgcaatctagcctgggcaacacagcgagactctgtttcaaaaaaaaaaaaaaaaaaagaacttaagatacatcatgtggttaaagcaatacaaaaacaaaaacaaaacatttgactatgactagaaatcgggtgaccttgattcaagtcctggcaatatcagtggttccaaaacttagtgaatcatcagaatcatatttccatgtcccaccagcagaagttcccaattgaatagccttacagtgggtctgtaacttgtcagccaaccgctaccttcccctctaaacatacaactctgcaggtgattttgataatcagattaggggatca

SEQ ID NO: 692782 - DNA, 911 bp, Homo sapiens
atatcagtaatctgcttttctgtgtctgttagctcttaagttaaaatctgcttggattcagttttattacattgattcatttgtttaagtgtagttttttggcctcaatctcccatcctacatccagctaattttttgttaattttgaatatttacagcctctagataatatctcttagatattaattaggccagtctctaattaaaagtgaatgaaacctaagtggacaacctaagttgatctaatttgaaataaaactgagcggatcatacattttgctgacaagagaaataccattaaaaaaaaagtcgtagattttatgcaaaaaaggacttaagaggccaggcacagtggctcacgcctgtaatcccagcactttgggaggccgaggtgggtggatcacgagatcagaagttcaagaccagcctggccgatatggtgaaaccccgtctttactaaaaatacaaaaataagcttggcatggtgttgyatgcctttagtcccagctactcgggaggctgaggttagagtatcgcttaaatctgggaggtggaggttgcagtgagccaagattgtgccactgcaatctagcctgggcaacacagcgagactctgtttcaaaaaaaaaaaaaaaaaaagaacttaagatacatcatgtggttaaagcaatacaaaaacaaaaacaaaacatttgactatgactagaaatcgggtgaccttgattcaagtcctggcaatatcagtggttccaaaacttagtgaatcatcagaatcatatttccatgtcccaccagcagaagttcccaattgaatagccttacagtgggtctgtaacttgtcagccaaccgctaccttcccctctaaacatacaactctgcaggtgattttgataatcagattaggggatca

SEQ ID NO: 692783 - DNA, 622 bp, Homo sapiens
tgagtaccacaatattaatagatacatgcaaatgtgtatagtgattgtcatacctacatagaatgtaaaaatggccaataagattaaaataaacattatgtgtgtaatattatttaataaatgtattgtctttaatacatgaatgtttatttatatacttttattataattgtgtaacaaaattatatagtccattggcataataccaaagtaaaatgtattagaaaacccttagacatatgaatttcaaaatgcacccaagtaaaacctaaccagataatctagggttaacttgtattagmtactgttctaagtttggaggaagagatacaaaatgttcttgcttcttggtgataccagataaacttaacctttgaattaaaaaaatatgtattattattttttattttagagaggatcttgctctgtcactcaggctagagtgcattggagagataatagctcattgcagcctcactaattcctgagctcagctgatcctcccacctcagtctcctgagtagttgggttacaggtgtgtgccaacatgcctggctaattttttttttaattttttttgtagagatggagtcttgctttgttggccaggctgctcttgaag

SEQ ID NO: 692784 - DNA, 1481 bp, Homo sapiens
tcagactcttaaaatgccagtaattgtgaagtgtttccgatggatagagtgtaaatagatgcctgtggatttgacaggaagctgggaagtttccctgctcaaagatatagscctactgtggatagttgaaatgccactgataatgattcattgctttctgttgagctttttcctcatatagtggctcttttctgaattgcaaatactccagggaggtataacatactgtgtaactcacaccctattatgaaataattgatcgtatcttttctatcagaagagagactagaggggaagtactgacagaggactcgtgaaagaagactacctaaggatggtcctgatcagataagtataggctgcagaagattttcccttctatctaaacagatagctaagttccagtcctttttaaaaacaagtttctcaattgcaagtttaagctttgtcgatagacgcaaagtgaaatggaaatctgggacaattatccaaattatttcatttttaaaaaccttcattaaggctaaacagggagctttagcttaaattattcagctggactagttacattaaaattatctcaaattgccttgctccctcattcaccttatctgtttagagaggcagaccttaggctgtgtctgctttaccctgtatggattgatttggggacaaaaaattcaattaattctattcacattggatcgtcttagcattgcacaaatggcaagtgaatgctgccccattccactgtaaagcttgggagggtctgagtctaacacatttaatgatcttagttcagctggttcactgtgcatctgtgtgagtttccacttggcattttattttaaatatgttaccttcaaaaatggctttgctttgagacaatcaaaaaagccagttcattgtttgaggagcaaacaaaaacaaattgagccaatgtgttgctagctaacacctactgtgtacttaccatgcacctgatacttactctctcattaatctgagggcaattgtaaatggtgcacagacttcatccctagcagtttggggctataagtccatgtgcttaagtgcacagtactgtaatgaaaggcaatagagcatgctggtcaaaattatgggctccagtctcagatgctgagttatggaacctcaagtgcctcagtctccctctctgtaaaatgagagtaataacagttcctttctcatagttttgttgggaggatagaaagtgaatacatataaaactcttaaaagagtgcctggtacacagcaaatcgcttaataaatactacctgtatagtatcaacactgttattactatagtccttagagccaatgggagcggcgcttcccaaagagattatgtggaaatccctgtcttttgtcactgaatttacccttcccccatctttaatgccctctgcaccagtcccacccactcaccttatccagtctcgtatatctctcttatatat

SEQ ID NO: 692785 - DNA, 642 bp, Homo sapiens
gatttgaaacaccgtggtcattgttggtgaaactccatggaaccaaagcaccttcaacaaygaagcagcagctgaacagagtgctccaggacaggactgcctggggtcctcagggcactgtattttacactgggccagaataccatacttctcaaagggttccacagccagacatttgtacctcagaaaaaatggtgaaatagccatttttttaaagttattattagtccccttttacagattaaaaacactgaggaccagagagttacatgatgatatgcacccacctggttagtggtaggcacagaataaattctacggtttttatacccaaaaatctaatatccttttacagaggatttctcctgattaagtgaataccacattgtttaaaggcctaatattcactgaatgggattaagaaaccaatggattggaaaacataggctacgtttgattacggtttagagcatctaaatgtaataaaaacatctcagagtaaggggaggggaaaataaaataaagccagaagagccaagtttaccactcagcaaacatactcctgaatctctccatggtttgcacctcagacagccccagtccatgagaatggaagtgaaaagaaaatgcaaattcagctgc

SEQ ID NO: 692786 - DNA, 642 bp, Homo sapiens
gatttgaaacaccgtggtcattgttggtgaaactccatggaaccaaagcaccttcaacaatgaagcagcagctgaacagagtgctccaggacaggactgcctggggtcctcagggcactgtattttacactgggccagaataccatacttctcaaagggttccacagccagacatttgtacctcagaaaaaatggtgaaatagccatttttttaaagttattattagtccccttttacagattaaaaacactgaggaccagagagttacatgatgatatgcacccamctggttagtggtaggcacagaataaattctacggtttttatacccaaaaatctaatatccttttacagaggatttctcctgattaagtgaataccacattgtttaaaggcctaatattcactgaatgggattaagaaaccaatggattggaaaacataggctacgtttgattacggtttagagcatctaaatgtaataaaaacatctcagagtaaggggaggggaaaataaaataaagccagaagagccaagtttaccactcagcaaacatactcctgaatctctccatggtttgcacctcagacagccccagtccatgagaatggaagtgaaaagaaaatgcaaattcagctgc

SEQ ID NO: 692787 - DNA, 3085 bp, Homo sapiens
  misc_feature 209, 210, 211, 212, 213, 214, 215, 216, 217, 218, 219, 220,221, 222, 223, 224, 225, 226, 227, 228, 229, 230, 231, 232,233, 234, 235, 236, 237, 238, 239, 240, 241, 242, 243, 244,245, 246, 247, 248, 249, 250, 251, 252, 253, 254, 255: n = A,T,C or G
  misc_feature 256, 257, 258, 259, 260, 261, 262, 263, 264, 265, 266, 267,268, 269, 270, 271, 272, 273, 274, 275, 276, 277, 278, 279,280, 281, 282, 283, 284, 285, 286, 287, 288, 289, 290, 291,292, 293, 294, 295, 296, 297, 298, 299, 300, 301, 302: n = A,T,C or G
  misc_feature 303, 304, 305, 306, 307, 308: n = A,T,C or G
ccatccacagaagttgggcagctgcttccaaagaaatagttgttatgaaatttgcattttatctacccagacaaggatatataggacaataaatctacttcctaagctctgattaatagtttacagtgtcaaaaagttctggaaactccaagaaaacagcagtgtcttttacagtttcctaatacaacaaaatattattcataagttannnnnnnnnnnnnnnnnnnnnnnnnnnnnnnnnnnnnnnnnnnnnnnnnnnnnnnnnnnnnnnnnnnnnnnnnnnnnnnnnnnnnnnnnnnnnnnnnnnntttccacctctgattcattagggaagattcccatcataacgacagggattccctatgtgggctttggtatatgacttccttcttcagagcacagcactgtgctgactacaaagtgaaactgatattcctcacatctgcttgtgtgtgcctttctcagcatctgtatatcaccttgacttactgtcttaagaaaggacttagatgttcagtacctcttcacaatctcagaaagttttcctagagatctgaacagagactaacagcccttcttagatttctagcagcattctaaagcatagctacgcaagacagagcaaaatggatcttttgagcagtacttcctcactcctttgatgatggaaaatgactatgacacaatgccatcaactctgacccacctgaccaacatccacaaagctcagcgattttctctggcagtctacttagcatttgtcagagcaagctttactaggaaagacaggcattctagaaaaactgtcaaatgagatttagactccagaaggtgtactgggtgtttgtcctctgtcagctcctctttaaagaggactgtgtcacccagcaaggtatcctaaaactcaccagagcccagggaggtggggtagggagaggcttcgctttcatacagaaaacctacagagcaacccacccagcctcctcactttctccctttcaggggctgcctctggggctttctttccccccttgctgaaaagttttagaaaagtcatcagcgttagttcaagaaagttcccatttttcatgactatgtttatagtacaggctcagcatcccttatatgacatgcttgggaccaaaagtttttcagatttttaatttttttcaaattttggaatgtttgcatatacataatgacatatcttgaaaatggggacccaagtctaaagatgaaattcatttgtttcatatacacctaatacgtgcagcttgaagataatgtcatacaatattcttaataattttttgcatgaaacaaagcttgtatacctgaggtcaggtgtgggatttttccaattgtgatatcatgttgacgttcacaaattttcaaatttcggagaattttggatttcaaattttcagattagggatgctcaacctgtattaaaatccttgacagtatctattaatctatatctatcaattactagttatttattgaacactggtaaaaaaaaaaaaaaaaaaaaaaccgtagaaaagatgtggtcctgccctcaaggagcaatctatttgggtagtgtttcagttctacatttccataataacactgactaacaaataatcacatgcaaaataagtgcttagtgcttgcctattggaggttgtcaggtggatctgctgaccatggctgggttgtgtcacatgtctggggcttggctggctataggctggtctagcatggccttggctaggttgaccagggtgactcagctcccctcacatgtctttcgttcttcttctggaactagtaggctagcctaggcatatccctctcatgacagcagcagagtgcaaaaacgcagtcaaaatgcacaagcactttttaaaataggtctgcaaatgtcttattagccaaagcaggtcacatgcccaaatccagatcaagggagaagaatagactctgcctgtctagtaagaggaactrcaatgccaaatggcaaagaggaaggtcacagaaaggggtgagaattgggtctaggaatagaatcaatctacagcagatagctaagagggaaaatgcaggagggaatctatgaccaagctccttgggcatggccttcatgatctgcccagttctgacctacagctcaagcttcctggtctcctctcaactcactgtgtctccttcctacccatatcactccgttcctctcactaagtgacctaagtgttctctcacttcttgggcccatttctctctcgctgaaaggcccttccttccccatctcacctgacatttgcccagtaagctcctagtcattcctcaggcctcagcttgtccatcagttcctctggcaagtcttttctaaactctagaacttgagttagaagcccacctatatgccctccagcagcctgttccactccatcgtgggtattgtcattttctgtttacctgtctctagcttccactagacttcacattaagctgtgtgttcaaagagggtcagtactgcacgcccaggcctcacatagccccttgctcagagctctaaaatcaataagtgtttgatgaatgaaactgcttagggccttggcacagatggggtggggagaaaagggcagcaaaaaatgcattcaagaagggaaaggggccgggcgcggtagctcatgcctgtaatcccagcactttgggagcgcaaggcaagcggatcacttcaggtcaggagttcgagaccagcctggccaacatgatgaaaccctgtctctaccaaaaatacaaaacttagccgggtgtgtgcagcacctgcaatcccagctacccaagaggctgaggaggagaattgcttgaacctgggaggtgggggttgcagtgagccgagattgtgccacaacactccaacctgggtaacagagcgagactccatctcaaaaaaaaaaaaaaaatggaaagggtggattcttcctaaagcacatgagtaggaatggtgcacgttagagaaggccctgaaaactaaaatgaacatgtagaccatggatgggaataaagtaccactgaaagtttccaagaaaaggca

SEQ ID NO: 692788 - DNA, 1470 bp, Homo sapiens
tggaggttaataagaaaattttcagcttatatgggaaacaaaacaaatcataagatggtattatttgggcagataacccagtaaagccataagtgggtcagaacaacctttcacatgtgttttagaaaatgatcaggaaagcagagagagaatatttttagaatggtaaagtgattacatgtgtgtgtcatttaactagtcacagttgattattatgtacaaagataccatccatctgtgcttcctatgggctagaaaagaaattaaacatctttcagcttaaaaaaaaaattcccttaatttaagaaagttaactctgtttcaagtggaaatacctttaaaataatttttctcttctaccaccgtttgcaggggtaggtggtggctctgaaaggattcagagacggtcgaggcaaaagaaatgaaagcagtaggatagaaatcagtgctttctcatccatgccattgggtccatgtaattcctccctcctgaacctgccattgccaggacagaccactctctgccctgaggactccaatggcaggcacaggtatggcccagaagactcgaaggagaattttatttcagattccacctcttaatccactaagatgctgtcaatagcattgattcagtagctcgatagagaaaatttggcaaatcctaattcctaatttttcctaggaggaaatgaagaaaaatacctcagtgaaaacacattcctggtaattaaatctcattacaagctaaccagaaagtgaagaggagaaatattataaaaacgtattttctggccaggcatggtggctcacatctgtagtcccagcactttgggaggcccagaaaggcagatcacttgaggtcaggagttagagaccagcctggtcaacacagtgaaaccccgtctctactaaaaatacaacaaaaaaattagccaggcgtggtggtgggcatctgtagccccagctgcttggaaggctaagacaggagaatcacttgaacccaggaggtggaggttgcagttagccgagrttgtgccactgcacgctagcctgggccacagagtgagacttcatgtccccccgccccgaccccccgcaaaaaaaaaaaatgtattttcaacattgaaaatttcacaaaggagtagattttagatcaggtctgatgtattttgaggtccaatgctggttgatgttctcgtatattattatcattaatatttttaataccaacagtggttataacagccagatcctgagaatttttcaaatttgagatctcacatagagagtataagacttaataactgccatcaagtaatatttaggtcacacaaaacattgcaatttctgctatgcttattgttttaaacaaggaaaacaaaaaataatatgaagatttgtattatttataaagggaaatcttaaagatacactaaaatgagaagtccccagtcatcacaagaatta

SEQ ID NO: 692789 - DNA, 2210 bp, Homo sapiens
cccggcctatctgtgctttttttttttttaagtgactttaaaatttaaaaacccagaattttaggtacttttgtattatgaggaactcactatactaggaagcaacttatgagtgtgtaaatatttgatctagcagcaactttccactgatcctggcaggtgacagctctcagtgaacagcgctcatcacctaaagtgagaggctgtctattctcattgtgaatgtccctcagagtcactaggagccattgggcaggccaggaacttactgcctacttcctygtctgtcaggtggaggtgttgacacaagccttgaaccctcaacaaataagacaacagccacatggtgcctgtaagtattgtaagaatcggcggttgtggcatttcattttgtctgatctgggacccgccgtgggtttccctttgaactgaacattgcaactttctaggtatagacttttggcaagttacttaatgttcctgagcctcgatttctggatctatacaattggaattaacaagacctgctgtgcagtcttgctgcagattatagataatgtacataatatgcacatcaccgcccaacagataatagatattattattattactgttattattagctgatcatagtttaggttataaccatttccaaaagaatttcctttgtaagaacacacttagacaactcaggtgcattttctatttttctctacagactaccttctgatgtaaaatataattttagttctaactcctaaaaaatggaatgaaatgggttctccatcatttttcggcagtgttgtcactgacttgctgagtgacgtagggctgcaagggcctgagaaggtagaaggaaccagaagttgacctatgggcgtggataatactgcgccacacagttgaggatgagacacagcaacacctcaggggtaaatgctgaagttcagagcacgcacctttagatgtgactgacgggcattcccatgggaaggcaaacagtgcaccctcaattgctgaaaggttgtgggctatttaaatgcatttgaattcactcctaagttattcacacacgagcagggcgaacatctcggcaaggagcatacacttggtgcactcagaggacagggatggaattggaatgtagggcacagttatttaggacaagactgtttcctatgattaacttacaagatgtaattcacccggggtctcattaaagctcacagcagttacctatgaggctcaaaccaaggattgacatctaacatagtggagaagacggtattgtatacagacaaaagctgccagatttcacgcccttagtggatgctgataatggaaataataccatagcatatattttatttaacatgtactctgtgccaaaaactccctctttatacattacacaatgcaaccctcatagcatgcctatgagtaggaatctgagatgaagaaaaggttagaactcattagcctaaagttacaccactagtaagctgttggttggtggttcaaacctcaggagtcagctaccatagcctgtactgctgaccactgtgttattgcactctgtgtctttgggcaggaaagtggattaaacaccagtttcagcctgctatatagacagataaaaaaaggcccttctggaagattcaggctgacctgttcaaagtcacacagggagaaggagcagaatcagagatgtgactgtgattgccatgagggttacgttgaaaatcaacagaatccataagtagctgcattctaatacacaccaagaaggatgccaaggtcccagactgggggctgcagaggctcagcctatgcctcatcatggggctcggccctgttgacccagaacatttccaggtgtctgcagagctctgctcgggtgccatgattctgatttcaaggggtggcagaaatgttctgtggctgaacatgatttttggcgcttaaacttccaattctttcctcaaggttcccctccgctcctccagaaaccaatctgagacttcgcactgcaagccctttatcaacccatgcctccttttgctcaaaattaagccatgacggaaaaaacggaatgcactttggaggtcttaaaaattgacttggatacaaatctgcttccttctaggtacagacttttggcaagttacttagtgtttctgagcctccatttccgaatctatacaatggaa

SEQ ID NO: 692790 - DNA, 633 bp, Homo sapiens
  misc_feature 64: n = A,T,C or G
cgctggagactttctcttctcagcttgcaaaccggtactgccaatacagccctttctcctagtntacgacctcggtggccttttggatgatactgatggtgcatctaggcattctgacagccactcacgccacctaacctcaatcaaggaactatcaaagtacttctctgasgaactgaatggaaaggtctttcgacatgagcaccaattttcttttctctctgaaggtttgcatgtaaagaagattgggagctggtgatttcttgatttctcttatagctgtaagatgtataatttgtggaaatctttctgataaaaaaactaaacagactctgtcattttacgacctatgtttgcaaagctttcagacatcactgtgatgactaatttttgatggtggatcatcttcttctgtcagtgcagaacccagaataggcaggattcaatcctgcagccagaaagtgcgggaagagctgagggtccacattccctgactcgctcctgtctcatgggacaagtccgctgcctcctgcaggggctgatggatgggcaccttcagttggctgttggaagccacaccggaagagggagaggagcagatggaaaaggcttggcgggaaagctgtgccgtct

SEQ ID NO: 692791 - DNA, 465 bp, Homo sapiens
ctgccacagcaaccaaaatcaaaccaaagaggaacgagaactacccgacgtagctggaaattaatattggtagacatctgagaatctgtaggaacttttgggagaaaagtgaagggtatgtagtaactaaataagtgaaagcaaggcaagtattcctttgggtaaaacaatggrttgtctaaaaaacgagctgcaaccacaggatactacttggattagtcacgataatgtcatgcttatgactacggctttaagccagaattatgctatcaccatactaagaaaatggaaaaggaactaaaatgtgcggtggttataatctaaatctacatccttattttttttttctttgtgacaacgtctcgctctgtccaccgggctggcgtgcagtcgtgtgctctggactcttggactccctgccccctccgcctttggggctccggccctcctcccccctccgcctcc

SEQ ID NO: 692792 - DNA, 619 bp, Homo sapiens
aacccttactgccaggcaasggcacccaagttcccagagttcctgctgccgcctgcatttattaaagtcgtctgctataacgctcgctggtagccttcaccccgaaggtgagccgggccagccgagcgactaagcaagggaggggcggggtgaagagtgtcaaaggccccccttcatgtacacaaacacaccccctcccagcccctcccagcgctttgaaatcccatcccggctttgttgtctccctcccaaggggccggaatgctccgggcccgcggtataaaggcagccgcggtggcggtggcggcgcagagctctgtgctccctgcagtcaggactctgggaccgcaggggctcccggaccctgactctgcagccgaaccggcacggtttcgtggggacccaggcttgcaaagtgacggtcattttctctttctttctccctcttgagtccttctgagatgatggctctgggcgcagcgggagctacccgggtctttgtcgcgatggtagcggcggctctcggcggccaccctctgctgggagtgagcgccaccttgaactcggttctcaattccaacgctatcaagaacctgcccccaccgctgggcggcgctgc

SEQ ID NO: 692793 - DNA, 595 bp, Homo sapiens
gagttttgtcattttaacaatcaaggacaaaagtaacatatgtccacattttcatggcttacataaagttgcttttacactttattaatcattctcaacttgttttctgttattaatataaaattacrcataaaacttgtattgaattcctaattgaaaggatagccataaatcaggtgatcagagtggttccttagaaaccacaggaagttacaccatatctaaaaagattgttaatgtgatgtagagaatggtaagttaatgagatggctcattgcttagtttaaaggtactggaaaattaggaaggtgtatggagaattagaaacttcatccttcagcatggtttgatgatagcatacctgaaaccttatggtttggaagactgtgatactgttatagattgttatatcatgtctccttattgtttttattacatgtagacatcccagcaaccttgtatctctacttacatataaaagtatttaatgtggcaatttcatctcttatattcaatctaattatgtaatgacatggatacataaatatatattatagagacgcttattaaagcatttaatatagcaaaattctgg

SEQ ID NO: 692794 - DNA, 642 bp, Homo sapiens
tggcttatcttttatttaggtctttgatttcattcatcagtatgttattgttctcagcatgtagatcctgaatatattttstaagatttatatgtattttatattcttgtagtggtacttattaaatttcaatttctcatttttcattgctagcctatcaatagtttaattttcaaagatgttttagcactaaaagtgggaatggtgcacagtaaactgttaataaatatttttggtttagtgaataatgaataagtaaaatgagagaaagaataaaaaagcagtgtccagttctagagaagaaagtaaacctaaggaagtaaacagtcaagatgcccaacttgcatcttgatattactcaaatatcctgtggagtttatctcatgtttcttagaccttcagatatgcacctccttcttgacattcaggtctcaacttatatgaaacctacacagacaacccaatctttgccacaccgttagtcattttctgtcagttcaccttgttttaactttttcacaatgctttttattacttgaccttttctttttattgacttatttgattatttttggtcttccctcactagttttctttattgctatatcaaagcacttagaacaatgtctgatacacagatgg

SEQ ID NO: 692795 - DNA, 642 bp, Homo sapiens
tggcttatcttttatttaggtctttgatttcattcatcagtatgttattgttctcagcatgtagatcctgaatatattttctaagatttatatgtattttatattcttgtagtggtacttattaaatttcaatttctcatttttcattgctagcctatcaatagtttaattttcaaagatgttttagcactaaaagtgggaatggtgcacagtaaactgttaatamatatttttggtttagtgaataatgaataagtaaaatgagagaaagaataaaaaagcagtgtccagttctagagaagaaagtaaacctaaggaagtaaacagtcaagatgcccaacttgcatcttgatattactcaaatatcctgtggagtttatctcatgtttcttagaccttcagatatgcacctccttcttgacattcaggtctcaacttatatgaaacctacacagacaacccaatctttgccacaccgttagtcattttctgtcagttcaccttgttttaactttttcacaatgctttttattacttgaccttttctttttattgacttatttgattatttttggtcttccctcactagttttctttattgctatatcaaagcacttagaacaatgtctgatacacagatgg

SEQ ID NO: 692796 - DNA, 1281 bp, Homo sapiens
caaaacaacaacaacaacaacaacgataataataataataataataatgagrctcacacctgtaatcccaacactttgggagaccaaggtaggaagatcgcttgagaatgtgacacaagcctaggaaaacatagtgagactccatttctacaaaaaaaaaattagcggggcatggtggtgtatgcctgtagtcccagctactcaggaggctgaggtgggaggctcacttaagcccaagaggtcaaggctgtagtgagtgataatcatgccactgtattccagtctccagtctgggcaacagaacgagaccctgtctaaataataataataataataataatgaaatgtttctccttttagtaaatatttttaagttggcaaaacgacatctcctaaatatgtaaattaaggtatagagtacatagcctgctaaactctgcacactgtctttactgtagttatctgaagaactaccaccctttttcttcctatccaggtgaggcagagacacaaagatatggaagaacattggacagatttacatcgatatattaattaaggtgatttcagagttggagcaggagaggaagccttatagatatttttttttctttttgcttgcttgtattttctttttaattattattcagtatttcaagtagacagaaaagtacagaggataatacaacaaatatccaggataccaccacccagcatttttacatagtagcatttgatgttttgaaataagacataaaacattccaaataccctatcaccgaggatcctgcatcctcttcttttcccagaagtgaacatttctctgaatttgatgcttattatgcccatgcatgttgttatacttttactacatattttatgtagctacagcataatatgctatgtttactttatatagtgacctcatactatacatatcctcatgcaattttttagactctgtttgagaattatatattttgattcaggtagcttaagtttattttagctactcagtagtaatgtattctattaatctactaatatatatttcttgtctatggacattgaggttattttcagttttttctttaatgttgtagcaaaaactttcactcatttttcttgtgcctacatgggtatacacattgtgaacttgactaaacatttgcaaaaagttttctccggcgttgtaccagcttaggctcacaagcagcatatgaaagtcccagttgttctgtttcctcaccaaaaatcggggttatatcagtcagaataact

SEQ ID NO: 692797 - DNA, 1281 bp, Homo sapiens
caaaacaacaacaacaacaacaacgataataataataataataataatgaggctcacacctgtaatcccaacactttgggagaccaaggtaggaagatcgcttgagaatgtgasacaagcctaggaaaacatagtgagactccatttctacaaaaaaaaaattagcggggcatggtggtgtatgcctgtagtcccagctactcaggaggctgaggtgggaggctcacttaagcccaagaggtcaaggctgtagtgagtgataatcatgccactgtattccagtctccagtctgggcaacagaacgagaccctgtctaaataataataataataataataatgaaatgtttctccttttagtaaatatttttaagttggcaaaacgacatctcctaaatatgtaaattaaggtatagagtacatagcctgctaaactctgcacactgtctttactgtagttatctgaagaactaccaccctttttcttcctatccaggtgaggcagagacacaaagatatggaagaacattggacagatttacatcgatatattaattaaggtgatttcagagttggagcaggagaggaagccttatagatatttttttttctttttgcttgcttgtattttctttttaattattattcagtatttcaagtagacagaaaagtacagaggataatacaacaaatatccaggataccaccacccagcatttttacatagtagcatttgatgttttgaaataagacataaaacattccaaataccctatcaccgaggatcctgcatcctcttcttttcccagaagtgaacatttctctgaatttgatgcttattatgcccatgcatgttgttatacttttactacatattttatgtagctacagcataatatgctatgtttactttatatagtgacctcatactatacatatcctcatgcaattttttagactctgtttgagaattatatattttgattcaggtagcttaagtttattttagctactcagtagtaatgtattctattaatctactaatatatatttcttgtctatggacattgaggttattttcagttttttctttaatgttgtagcaaaaactttcactcatttttcttgtgcctacatgggtatacacattgtgaacttgactaaacatttgcaaaaagttttctccggcgttgtaccagcttaggctcacaagcagcatatgaaagtcccagttgttctgtttcctcaccaaaaatcggggttatatcagtcagaataact

SEQ ID NO: 692798 - DNA, 1370 bp, Homo sapiens
ctatatatgaactatttgtaaataataagaatgcaaaaattttcttttatttattctagaaatgttaccattttggtttttacacttttttgkttcaagttgatttttgtatgtggtacaagaaatggataatgatgcatttggtacaagttgtccaagatatcaccacttgttgaacgtagtgtcctttctctaaggacttaccctggaacgtttgttaaaggtcaatttgttatctgtgcgcattgctttttggacatcctattctgttccttttacatacatgtctgtccttatgccagtgctacataatcttgattaactgtacctctgtagtaaattctaaaatctaattaaaaaaagaaaaaaacgtattacggagtaaatcaggcagtaatatttctctagactttataattttgcagaatttttaaaatttataatttattatgacttcttattctgtaaatagctgttggtttttaccactaatttcgtgatggttatttttcttaaagagtttcgctctccctaattacataaacttcaggcccccaaccatggatctgtgtgggaatgtacagtctcccaaacataccttctgattatctgcctctgagaccacattctttttcaaggagtattaaattagaagtcaatacttctactcttaatagactaacagggattagcaccatgtatgataattatgagataataaggcagagactgctggggtttcaaggagtggggaggaataaaatggaatcagaagatatgtgttcgcttagtgtacatggatggctttgtgcacaatgaagactatttgtggctactttgaacaaaaataatttttaatttattactgtaataattttaaatcctagttctctttaagccccctagttgatattaaactttaaattcattttattctaattataaatacagtaagctttaaaaataatttttaaggaagtttttgattaccatgtaatcaacttatactgaataatgaaaataccctaaataatcaactttatgacttaattttattttttcaaatgttttaagctggttttgtaattgtaatatacttgatttcttttggaacatttggaatggctagcctaaaaagcacatcgtctttacctacccattcccctaaatctaattaaaacaatctttaaaatacagtgaatcccaagtacccttaaacattccagtattgttcacaaacctgttctcttattccttttgaccaaaaatctcaagctgtaaaacaaattaattatatattttaaattggaatcacagagctaatctgtcagacacacaaatatgccaaattctcttaaacataacacttt

SEQ ID NO: 692799 - DNA, 1370 bp, Homo sapiens
ctatatatgaactatttgtaaataataagaatgcaaaaattttcttttatttattctagaaatgttaccattttggtttttacacttttttgtttcaagttgatttttgtatgtggtacaagaaatggataatgatgcatttggtacaagttgtccaagatatcaccacttgttgaacgtagtgtcctttctctaaggacttaccctggaacgtttgttaaaggtcaatttgttatctgtgcgcattgctttttggacatcctattctgttccttttacatacatgtctgtccttatgccagtgctacataatcttgattaactgtacctctgtagtaaattctaaaatctaattaaaaaaagaaaaaaacgtattacggagtaaatcaggcagtaatatttctctagactttataattttgcagaatttttaaaatttataatttattatgacttcttattctgtaaatagctgttggtttttaccactaatttcgtgatggttatttttcttaaagagtttcgctctccctaattacataaacttcaggcccccaaccatggatctgtgtgggaatgtacagtctcccaaacataccttctgattatctgcctctgagaccacattctttttcaaggagtattaaattagaagtcaatacttctactcttaatagactaacarggattagcaccatgtatgataattatgagataataaggcagagactgctggggtttcaaggagtggggaggaataaaatggaatcagaagatatgtgttcgcttagtgtacatggatggctttgtgcacaatgaagactatttgtggctactttgaacaaaaataatttttaatttattactgtaataattttaaatcctagttctctttaagccccctagttgatattaaactttaaattcattttattctaattataaatacagtaagctttaaaaataatttttaaggaagtttttgattaccatgtaatcaacttatactgaataatgaaaataccctaaataatcaactttatgacttaattttattttttcaaatgttttaagctggttttgtaattgtaatatacttgatttcttttggaacatttggaatggctagcctaaaaagcacatcgtctttacctacccattcccctaaatctaattaaaacaatctttaaaatacagtgaatcccaagtacccttaaacattccagtattgttcacaaacctgttctcttattccttttgaccaaaaatctcaagctgtaaaacaaattaattatatattttaaattggaatcacagagctaatctgtcagacacacaaatatgccaaattctcttaaacataacacttt

SEQ ID NO: 692800 - DNA, 1370 bp, Homo sapiens
ctatatatgaactatttgtaaataataagaatgcaaaaattttcttttatttattctagaaatgttaccattttggtttttacacttttttgtttcaagttgatttttgtatgtggtacaagaaatggataatgatgcatttggtacaagttgtccaagatatcaccacttgttgaacgtagtgtcctttctctaaggacttaccctggaacgtttgttaaaggtcaatttgttatctgtgcgcattgctttttggacatcctattctgttccttttacatacatgtctgtccttatgccagtgctacataatcttgattaactgtacctctgtagtaaattctaaaatctaattaaaaaaagaaaaaaacgtattacggagtaaatcaggcagtaatatttctctagactttataattttgcagaatttttaaaatttataatttattatgacttcttattctgtaaatagctgttggtttttaccactaatttcgtgatggttatttttcttaaagagtttcgctctccctaattacataaacttcaggcccccaaccatggatctgtgtgggaatgtacagtctcccaaacataccttctgattatctgcctctgagaccacattctttttcaaggagtattaaattagaagtcaatacttctactcttaatagactaacagggattagcaccatgtatgataattatgagataataaggcagagactgctggggtttcaaggagtggggaggaataaaatggaatcagaagatatgtgttcgcttagtgtrcatggatggctttgtgcacaatgaagactatttgtggctactttgaacaaaaataatttttaatttattactgtaataattttaaatcctagttctctttaagccccctagttgatattaaactttaaattcattttattctaattataaatacagtaagctttaaaaataatttttaaggaagtttttgattaccatgtaatcaacttatactgaataatgaaaataccctaaataatcaactttatgacttaattttattttttcaaatgttttaagctggttttgtaattgtaatatacttgatttcttttggaacatttggaatggctagcctaaaaagcacatcgtctttacctacccattcccctaaatctaattaaaacaatctttaaaatacagtgaatcccaagtacccttaaacattccagtattgttcacaaacctgttctcttattccttttgaccaaaaatctcaagctgtaaaacaaattaattatatattttaaattggaatcacagagctaatctgtcagacacacaaatatgccaaattctcttaaacataacacttt

SEQ ID NO: 692801 - DNA, 606 bp, Homo sapiens
agggcatacctgactataaaatttctgtcttcccaaaactagtcaccattaaatgtgtaactcatcatataactttactgcttaaaacatttaatggttctcaatattaagtgtcataaaattcagattcctacaacttctttcagaatagctctaacaccactttatccactgaaacttttataatatattaaaaaatactctagtgtgaaatattatctccctgttttagtatttcatgagtacacatttttcggcaactttacaagtaagcaacttgaaatcagtaatatctatctctttttgccatggttttcttaattgcaaacggagtatgttatgtcaggggtaccaagttcccctccagctctaaacttctactagtcaaattttctccattccatgtgacaattgttcaaagctgaaccaaaaggaagcactaaaatagatattagcttatcgataacacattttagcataataggttatatgggcctgagtaatgaaattgtgaagatattactccaatcataataaaatttgtatgtgtaaagcaactttgctattacacaaagattttawgtcataaaaaaataaattcaaatt

SEQ ID NO: 692802 - DNA, 595 bp, Homo sapiens
ggtgcaatgcagcctttcaagctatctttcaggaaatgcttttagagagtgcaatgcagcctttcaacacacaacttttgaggatgctaggaagctcttgttcctatatcaacagttcatacccwttctcaacttgggggcactatcattttagtcaacatccacttcatatttatgaagtgatccaatatgacaggcacaaattttaggagtcaatagttagcagtaaaatacagaaaaaggaaaaacaaaatcaaacaaaaatccccacaatcctaacgcttacatttctaatggagtaagaccaacaatatgcaacatatatcagtaaaatgtgttcctagttgtcatgattgtcactgctccataagttcacagagagttccaatagacagtaatagggtcgtcaggttaggtctcattttgaaagtgtcatatgtgtaaaatctgaaggaaatgaagaagaaactattcagattttcttggaggataagagaaaacataattgcaagtgcaatggtctgaggctggagaaggtctagcaagttcagtaatagcaagaagaaaataatctaggaggcaagacaatgaatgg

SEQ ID NO: 692803 - DNA, 600 bp, Homo sapiens
  misc_feature 536: n = A,T,C or G
tattttatttttagcatgaattagctgagatcacttgcctaccagatgtgtytccaacaatttattataagacatttctattattttttcttgaaattattattgatgtttgctgtgaaggtattttttaaagccgatgctgtgaaagcatctggttaagttagctaggctggttcaagaggtgattctaaggctcattaactcagcactcccatcatccaataatgggcaccctagagtaactgtggaagaaatgaacacagtgcttcctgcctggtgcctttatggagaaatgttttaaaatcaatttatgaaagactgcttaaaaagtgttattgtttacctgctatttgcatattccagggtttttataaatgttttgggtaccgagaaaataaagttgttatgtatcctataaaccttacccaccaaaaacattttaaggaaaagcttaactgtaaaacagaatgactcatttcactgaggaataggctgacattttagtgacttgtcataaatagtgcagtgggactaangtaactgagtttaatgatgagttttacaaggtagtttgttccttcttcttcttgggctcaatga

SEQ ID NO: 692804 - DNA, 600 bp, Homo sapiens
  misc_feature 536: n = A,T,C or G
tattttatttttagcatgaattagctgagatcacttgcctaccagatgtgtttccaacaatttattataagacatttctattattttttcttgaaattattattgatgtttgctgtgaaggtattttttaaagccgatgctgtgaaagcatctggttaagttagctaggctggttcaagaggtgattctaaggctcattaactcagcactcccatcatccaataatgggcaccctagagtaactgtggaagaaatgaacacagtgcttcctgcctggtgcctttatggagaaatgttttaaaatcaatttatgaaagactgcttaaaaagtgttattgtttacctgctatttgcatattccagggtttttataaatgttttgggtaccgagaaaataaagttgttatgtatccyataaaccttacccaccaaaaacattttaaggaaaagcttaactgtaaaacagaatgactcatttcactgaggaataggctgacattttagtgacttgtcataaatagtgcagtgggactaangtaactgagtttaatgatgagttttacaaggtagtttgttccttcttcttcttgggctcaatga

SEQ ID NO: 692805 - DNA, 888 bp, Homo sapiens
gacaacatacattttactcctggtatctggcacttctctttcgatgcccaagcttctactgataatcacattaaatccatattttaaaagttctttatgaagttctgggtttgtatggttaaaatctgtacctgcaagaaaatgtaattagaatcatataagtaaaggcttactagcagtgatgcaggaaaggaaagatctagaataaccaaaacaattttttaaaagaaccagaatagaattcggaaatcgatctgtgcaaaaatggtcaaataattcttggcaaaggtgggtgttttagtacattttgcattgctataaaggaatacctgaggctgggtaatttataaagaaaakagatttatttggctcacagttctgcaggaagcattgagccagcatctgctcctggtgggggcctcaggaagcttccaatcttggcaggaggtaaaagggaaacaggcaggtcacgtggtgagagagggagcaaggagcgggggatgccaggctcttgaaacaaccagctttcccatgagctaatagaaggagagctcattactgtaggcaggcaccaagccattcatgagggatctggccacgtaacccaaacacatcctgccaggctccaccttcaacattgtgggacaaatttcaacatgagacatggagggataaatattctgattgtatcagtggggaaagggaagtttatcaacaaatggtgttggatcatctggattatctgtagaaaataacctatatgtgatggtccattttcaattctaagtggcttagtataggtttaagcaggctacatggaaatagggagataaagaagcagaatgtactgagccaacccccaccccccgccccttcctgctttccctt

SEQ ID NO: 692806 - DNA, 615 bp, Homo sapiens
actaggtaaggaagaaagaaagagaatattccaggaagaggaaaagcattaacaaatattttgtggtggaaggaaacaaagaggttcataaaaataaaagtccagtgtaatgacattgcagagtacagtttcacagatgtgtgtaggctagatcatttatatagaaagaaaacatataaatacaatttcttctgactgataaaacatatatcaatcctggtttctaatatttcctattctatcatttattggatttacaactcattgttttggcttttcaaaggtgatagaaaggttgtaactaaggacagaaaggttgttttagcaaattttgtttttaatctaaaaagctatcttatygtcctctaataatttccagtctcaacagtgtaactcacagaaattgaaaattataggatttaaggctactctctgtcattacaggcttatacttgacaggcaaaagtaatacattaaaatacaaagaaacaagggtaaaatgaatgtttcatacaaataaaagcaatctcaaagaagagaatatagcagaaaacaccatcaaaatctgtgcagttccttcattaagactgtcgaataaattttcactgagagaga

SEQ ID NO: 692807 - DNA, 605 bp, Homo sapiens
tattccattttaaaataacaaattttatttaataatcctcttcttattgggaatttgactcatttccagatttcagttattacaaaaagtgctgctatgtccatttttccacatgcattttagtaaaccctatatatatgtatatacaattctgtttggtttattcataggaagggaatgatagggtcatgggacttgcrtacgttcagcttttgtaggtaaagcttttgtcttttgaaggtcagtttgcatagtctgaagatgtttctaacacctccacacttttgtttgatcaatgactaagtcatcgtgtaggttgcaatcatatctaatgagtaaaatgtccataatacaaacaaggaatgccatttggaggtggagttgcatgaatatttacttacaaaatagataggctttgtatgtaacatccatggaatttctccttatgtgcatttctttttgtaaacatcttctcatttggttgaagtgtaaaagtacatttactagaagagtaaaatacttcaataattaaagaagatagtgaaaactgtgaatttaccttcaaaatgatcattaagatcttcaaacacttaactagggaaaca

SEQ ID NO: 692808 - DNA, 605 bp, Homo sapiens
tattccattttaaaataacaaattttatttaataatcctcttcttattgggaatttgactcatttccagatttcagttattacaaaaagtgctgctatgtccatttttccacatgcattttagtaaaccctatatatatgtatatacaattctgtttggtttattcataggaagggaatgatagggtcatgggacttgcgtacgttcagcttttgtaggtaaagcttttgtcttttgaaggtcmgtttgcatagtctgaagatgtttctaacacctccacacttttgtttgatcaatgactaagtcatcgtgtaggttgcaatcatatctaatgagtaaaatgtccataatacaaacaaggaatgccatttggaggtggagttgcatgaatatttacttacaaaatagataggctttgtatgtaacatccatggaatttctccttatgtgcatttctttttgtaaacatcttctcatttggttgaagtgtaaaagtacatttactagaagagtaaaatacttcaataattaaagaagatagtgaaaactgtgaatttaccttcaaaatgatcattaagatcttcaaacacttaactagggaaaca

SEQ ID NO: 692809 - DNA, 1056 bp, Homo sapiens
cctcttattttccaactattggcctctgccttctgcattccataaaaattttccagatcccagcactttgggaggccgaggcgggtggatcatgaggtcaggagatcgagaccatcctggctaacaaggtgaaaccccgtctctactaaaaatacaaaaaattagccgggcgcggtggcgggcgcctgtagtcccagctactggggaggctgaggcaggagaatggcgtgaacccggaagcggagcttgcagtgagccgagattgcgccactgcagtccgcagtccggcctgggcgacagagcgagactccgtctcaaaaawaaataaataaataaataaattttccagatctatattacaattcatgaattctccatttagatgcttctattacactatgcaacacttaagttttacattcgttatggttttcaattttaaaatttctagaggtgaatgctttcttaatcatgcagcttaacccttgtagccccaaaactggagtttcttctcccagtctaatagtgatttctactcaatgtttatgctgtggcccagaatgcaataggctcaacactttctactgctttcatttccatttatttaccccgccaaaatactggtgtgtagtctaacagatagtctgtatttatttgtttaaaagcaaccctgaattataattctagataatattaacataagcaaaggagataaaaacttggcctaacggctactaagaataactacgagtttattatgctaaaaaatggtatgatattgatgcaaaaagcaacaaagctgacctacagaccaggatttctgtgagatacatttatatctcagaatttaatacataataaagatggcatgcaaatcagatggttccataaattatgataggaaaattgctcattatggagaaaaattcacacctattaccacataaaaggatggaattcagatatattaaagaaataaatcaaggaaaactataaaaatagaaggtaatgtgccctagggtaagggaagaacttcttaaaactccaaagacatca

SEQ ID NO: 692810 - DNA, 1056 bp, Homo sapiens
cctcttattttccaactattggcctctgccttctgcattccataaaaattttccagatcccagcactttgggaggccgaggcgggtggatcatgaggtcaggagatcgagaccatcctggctaacaaggtgaaaccccgtctctactaaaaatacaaaaaattagccgggcgcggtggcgggcgcctgtagtcccagctactggggaggctgaggcaggagaatggcgtgaacccggaagcggagcttgcagtgagccgagattgcgccactgcagtccgcagtccggcctgggcgacagagcgagactccgtctcaaaaataaawaaataaataaataaattttccagatctatattacaattcatgaattctccatttagatgcttctattacactatgcaacacttaagttttacattcgttatggttttcaattttaaaatttctagaggtgaatgctttcttaatcatgcagcttaacccttgtagccccaaaactggagtttcttctcccagtctaatagtgatttctactcaatgtttatgctgtggcccagaatgcaataggctcaacactttctactgctttcatttccatttatttaccccgccaaaatactggtgtgtagtctaacagatagtctgtatttatttgtttaaaagcaaccctgaattataattctagataatattaacataagcaaaggagataaaaacttggcctaacggctactaagaataactacgagtttattatgctaaaaaatggtatgatattgatgcaaaaagcaacaaagctgacctacagaccaggatttctgtgagatacatttatatctcagaatttaatacataataaagatggcatgcaaatcagatggttccataaattatgataggaaaattgctcattatggagaaaaattcacacctattaccacataaaaggatggaattcagatatattaaagaaataaatcaaggaaaactataaaaatagaaggtaatgtgccctagggtaagggaagaacttcttaaaactccaaagacatca

SEQ ID NO: 692811 - DNA, 274 bp, Homo sapiens
aggaataaggacttcagagtctgcagatagtttgtggtggactttaagataatcacttactttccctgagcctcagtttcctcatctgcaaaatgagkcagtcagtcattcatgaactttattgagtccttactgtgttgagcacagttatcaggaatggggattcagctgtgaataagacaagtaagatgggacacacgtcatggagtttgcattctagaagggagatgggcaatagacagatgaacaaatagttcagatagggtaagtgctg

SEQ ID NO: 692812 - DNA, 544 bp, Homo sapiens
tgcaccataggtagtaaaggcttgtattatttcatgcaaatatttatatctataaacacacatacatttgtaagaatactaaatgtgacataaaattaatttcttaaggtaaactgatcaaaaagattgagaaacactacttcataggaaaggaacaattgttttctttgagtaacagctactcattttttacatttaacatattagtcgtatactgctacaatttagtcccttggtctagacgtatgcttatttgggtctggtattatgtaataagttttactcaatgacttttttgttttgatttttaaaattaytctttttagcttataaaatacaataaaataaaatacatttaaagcagaaacgacaagctgttgcccctcatttattctatctatgtagtctgacaggcacttggttttatcacacctgactagcctccactttaaaatggagataatagctgaactcacctcatagaattgtgaaaaataaatattttaattcacgtatagggttcagaacagtacttctataaata

SEQ ID NO: 692813 - DNA, 614 bp, Homo sapiens
  misc_feature 582: n = A,T,C or G
tggtaaaatatttgkatattttacatatccaaagtgtatgtaatactctttgacactaaaagaaaaaaaaaactagttaaaaaatgtaaaaaaatattgcagtacaatttatacattacagctaaaatgctcgtatttctttcacatttggcttttaatttagtttaatttaatttttatctttttgagatggagtttctttcttgttgaccaggctggagtgtaatggcgtggtcttagctcactgtaacctccgcctcccgggttcaagcgattttcctgcctcagcctcccaagtagctgggattacaggcgcctgccaccatgcctggctaaatttttttgtatttttagtagagtcggggtttcaccatattggccagggtgatctcgaactcctgacctcaagtgatccactcacctcagcctcccaaactgctgggattacaggtgtgatccaccatgcccggccacatttggcttttcaaatatactctcttatatgattccatttatagaaaactagaaaataatctataattcgagaaagtagtcagcggctgcctgaaggtggggcatggngaggagagggagacaggcagacgcaggagaga

SEQ ID NO: 692814 - DNA, 614 bp, Homo sapiens
  misc_feature 582: n = A,T,C or G
tggtaaaatatttggatattttacatatccaaagtgtatgtaatactctttgacactaaaagaaaaaaaaaactagttaaaaaatgtaaaaaaatattgcagtacaatttatacattacagctaaaatgctcgtatttctttcacatttggcttttaatttagtttaatttaatttttatctttttgagatggagtttctttcttgttgaccaggctggagtgtaatggcrtggtcttagctcactgtaacctccgcctcccgggttcaagcgattttcctgcctcagcctcccaagtagctgggattacaggcgcctgccaccatgcctggctaaatttttttgtatttttagtagagtcggggtttcaccatattggccagggtgatctcgaactcctgacctcaagtgatccactcacctcagcctcccaaactgctgggattacaggtgtgatccaccatgcccggccacatttggcttttcaaatatactctcttatatgattccatttatagaaaactagaaaataatctataattcgagaaagtagtcagcggctgcctgaaggtggggcatggngaggagagggagacaggcagacgcaggagaga

SEQ ID NO: 692815 - DNA, 1641 bp, Homo sapiens
  misc_feature 62: n = A,T,C or G
gcattaggtatttgtcctaatgctctccctccccttgtcccccacaccctgacaaacccggntgtgtgatgttccccttcctgtgtccatgtgttctcattgttcagttcccacctatgagtgagaacatgcggtgtttgtttttttgtccttgcgatagtttgctgagaatgatggtttccagtttcatccatgtccctacagaggacacgaactcatcatttttcatggctgcatagtattccatggcatatatgtgccacattttcttaatccagtctatcattgttggacatttgggttggttccaagtctttgctattgtgacgaatattatacaaaggcacctaaaggttcttgttcttgaagattctcacctaaaaaaattcaagtttaagtaggaacaaaaaatggaagaaatcatgtgtaggaccactgatcaaccacaaaaagcggagtgtaaattctttccacaaacacaaggaatatattagttttttaggctaacacatttccactaacttagaagcttaaaacccatttagtatcccacaatttttgtagagcagaattctgagaacagcttagctgggtcctctgctcagtctcacaaggctgtaatcaaggtgtcaatccagtctatcgtcttatctgagcttagggtcttctcccaaacttacatgattgttagaagaattcatttacttttggctgtacaatccaaagccatgaggacaatttgtctaacctctaggaaggcctaggccttccttttaaggggctttcctgattaggtcaggcctacccaggtaatctcccttttgattaactcaaagtcaaacttattagaggccttaattacatctataaaatctaattatcattcccatatagtgtaacataattatgagagtgacatacataatattcttatgtcctgcccacaatcaaaaggaagagattatacatggtgcatacactgaagggtaggaatcttggggatcatcttagaaccctgagtatcacggaagcaataaaactttctaacttgtagctctcacattctactggtaatccatacatcaatgtggcactgcctctgggttctatacagcccttttaaatgaatgccagataattactcatttaggcaagccaggatgagtacctacagtcatgcctgacacaaaacaaagaagtccagaaattccaaagcaaataaaaaccaatcttttctcaccagatacttctaatttaaagacagcttgaaatgctatttataaaaattggtaggtcacttctacaggcacaggccaagttaccaatgatgaacatggggagtcaaaaataagggatcccagaacaaatagaggagccatttcagggtctttaagatgagatccaagagtaatgcagcctttgtaaggttttgctgggatccaactttagaaagaactgaaaaaataaaacccaaaragatcctgggctaagcatctaaagacttagaatgtggccctaacctgcaccatcccctttgtgacatgaataactctcttcccatctatgggccacaccatccttacctataaaatatgagtgacctgcccaagttgagatgatgtctaaggttttcctcctcaa

SEQ ID NO: 692816 - DNA, 793 bp, Homo sapiens
gttctatatctagtaccctgagcttatgtggggctaatattctttgccatttttcaccacagatttgatttcctttttcttttgtggacactggtgagttccctaatataactttgacttggttatattttcacaatcggtggggattattacagattatcatccttcctctgcatttgaaaaaggagggaggcttcaagtcaggttagttgaccttcctttgttggtcttattatccataacataataaataaattgatgaggatgggcatggtggctcacgcttgtaattccagcatttagggaggctgaggcggcgttttagaccagcctagccaatgtggtgaaacctcatctctactaaaaatacaaaaaatatgccaggtgtggtggtgtgcgcctgcaatcctagctactcaggaggctgaggcaggagaatcgcttgagcctaggaggcggaagtttgcagtgagccagaatcgtgccactgtactcctgcctgggtgatacagtgagtctccatctcaaaaaaataagtttatgagaagtctattaaattgttacataatctatataggtagaaggtttctatttcaagtgaacsaaagtgtaacttgaatcgtctaatgcagactcacagcccaaaaataaattccaagacatgtccactttacaaatccacaattcctttgatggggtgggagggcagttctggataaggatggaccctgctagattgcaaaaaatttacagcactaattttttccccagagatctccataaggacctatgg

SEQ ID NO: 692817 - DNA, 651 bp, Homo sapiens
tctttaaaagaaaggattatttttaattgttgtttttaagattttatcactgtgaatatggagaacagatgtaatttctttccacacatgcaaataaatatgccagttacacagttaaaacactcactaacgtaatagagtagatcaatatttaatgaatgcttaatctggggttactaggaacttkacgttttcactgagtatgaataataacacatagttggcggtttcacacccatttcttaaaggtaagattactgctctcattcagggctatagaagctaataaggaatgagttttttttttttttttttttttgagacggaatctcgctctgtcgcccaggctggagtgcagtggcgcaatcttggctcactgcaaccttcgcctcctgggttcaagccatcctcctgcctcagcctccagagcagctgggactacaggagcttgttaccatgcccggctaattttttgtatttttagtagagatggggtttcactgtattagccaggatggtctcgatctcctgacctggtgatccgcccgcctcggcctcccaaagtgctgggattacaggcacccggccggaatgagttaagatacgaagccagttctgactccaaagcctgtacatttcctatctcatcct

SEQ ID NO: 692818 - DNA, 727 bp, Homo sapiens
gcgtggtgctttggcaggattgcattcaagaggaggtcccttacagcaagagaccttccagagagagtgaggtggcctcaacccagaaggggcagaggtcaggggagctttctggggagagaggacctagagtggggcttaggtgtccaggttgctgagaagcaggactggggagggcagcagcaacatacagtcttttacatgctcagggtttgttttacctgtagctagtggatgttgggtgcagtttttcagggtatgcaaaacaggctgaaaatatccttatttgggctatgtttaaagcaattgatataaaaatttgaatttggtatccgtgagctttgagttaatggwcagtctgaatgaagaagtaaacaacatggggtcaatatataaaggggtcacctttaacctggttctgtagcattaatgaaagagagtgaaataggtgctgggtggccaaaaaactgtaaatatccaccttgcttttggtttcactttctctcctaggacctccctgtggtactaccttagaactgacaggagaggccagcagtggtgatttgagagtgtgccctcaggtgtgtatatgaattggagaaggcagggcctaagcagttaaaggatatgctctgtcctgggctgaatgcagcctcattctggtacagtgtgtggggataattgcttgaaatgtttgtgtgtattttgaggatttgttgtaattgaa

SEQ ID NO: 692819 - DNA, 640 bp, Homo sapiens
ggctggtctcaaactcctgacctcaagtggttcacctgcctcggcctctcaacgtgttcggattacaggcgtgagccgtgcccagcccctatattctttagagatctctttactccctttagcagataatccctttttactagttaatacttctttaaattttcttcaaattactagtgtggtttttgtcccctgcctggacactggcagatgtgaccctgtctgagccagcagacccaaactagtgtttgggtctgagaaacggccggaactggtcaggcactgcagctcatgcctgtaatccctatactttggaaggccaaggcggcaggactgcttgaggccaggagtttggcaccagcctgggcaacatagtgagactccatctctaccaaaaaaaaaaaaaaaaaaaaaaaagggagccagacgaaagacccattcacaataaatacaaatataactaacacttcccgagcagctgctcagtgccaggtgaaaaattctaacgaaggctgggcgyggtggctcacgtctgtaatgccagcactttgggaggccgaggtgggcggatcatgaggtcaggtcaagaccatcctggctaacacggtgaaacccgtctctaccaaaaatacaaaaaaat

SEQ ID NO: 692820 - DNA, 593 bp, Homo sapiens
ttttcagttttccacactgcagatgacgtgatctttctgaagtacacaactgagtaactgacggtgtcactccctagtaatggctccctactgctcttaaatccaaatcccttagrtggcttaaaaggccttgatatctgctacacttcatctctccaacctcatcaaatgcatttgtcccttgcactctatacaacaggtacacttaaaaaaaaattttttttttttaatttttagataggattttgctatgttgcccaggctggacgaccttggcctccaagtagctgggactatacgtacctgctactgtgcctggcttgtgttggtagatatttatcaactagctaatagctagttcaaaaccaaaaagtctcccatttgctgcatatgctgatttccatggcgtgaatactcccaccatggctaacttcagtgcagacttgggaagggatgcacaaaactggctcttgccagcctgtaccgaccggctctagcacaacactggactagccacaccctatacaataaggtctcaatttcaatcttggtcaggggggtgtggactcttagaagtttgcttcttgagaatt

SEQ ID NO: 692821 - DNA, 629 bp, Homo sapiens
ttccagttttaaataaggacagaatctaatcctgctatttgtgcactcaaacttacccacctcaccttggtcccaggccggtccgatagtcttatttatttaaycatttaatttttataatatgtgacatttttagtttgaatgaatttgttgctcccccggtgcctggaagtttaggtagagtttacattatatatcccatgatatttgcaatgtccatatactaaaaagttattcacagacatttttctccttaaagacaatttttgtggccaaagtatttatttgctacactgagttttattttactaggtgtagtaggcataataatggcctcccaaagatgtccatgtcccaattcctagaacctatgattatgcttctttacatagcagataagaattaatgtcagcagacagaattaaagttgctaatcagctgactttcaaatagggaggttatcttagattaggtgaacgagaccaatgtaatcaaaaggatcattaaatttggaaagagacagaacagtcagtgtcttcatgatgtgatgttagaatgacttgacaggcattgctggctttgagatgaagaagccacaggccaaggaagttgggcagcttctaaagctt

SEQ ID NO: 692822 - DNA, 629 bp, Homo sapiens
ttccagttttaaataaggacagaatctaatcctgctatttgtgcactcaaacttacccacctcaccttggtcccaggccggtccgatagtcttatttatttaaccatttaatttttataatatgtgacatttttagtttgaatgaatttgttgctcccccggtgcctggaagtttaggtagagtttacattatatatcccatgatatttgcaatgtccatatactaaaaagttattcacagacatttttctccttaaagacaatttttgtggccaaagtatttatttgctacacygagttttattttactaggtgtagtaggcataataatggcctcccaaagatgtccatgtcccaattcctagaacctatgattatgcttctttacatagcagataagaattaatgtcagcagacagaattaaagttgctaatcagctgactttcaaatagggaggttatcttagattaggtgaacgagaccaatgtaatcaaaaggatcattaaatttggaaagagacagaacagtcagtgtcttcatgatgtgatgttagaatgacttgacaggcattgctggctttgagatgaagaagccacaggccaaggaagttgggcagcttctaaagctt

SEQ ID NO: 692823 - DNA, 1043 bp, Homo sapiens
atgtacgttcttagaatctgcatttgtgtagaaagtgtcagactcttaagaaggtagcaatcttggcttgtcacttggctggtcagccaccagctatgaatgtcrgttacctgctcttcactttgccatttttgtccttgttgcctgctccagataagagggagctgagaaacaagagggttgacataaattgaggttagattgtagtttattactaattctttctctagaccagatagactatttgaacagtttgtgaaaactaagcaccttccctttaacattgaaggtacatatagctttagaggaggtttcagagttttacattttcatggcccaacctaacagactgaaattacctgtgatgatcccatcgctttttcttggcaagactggggtgcctatatttaagggataagtgccattttaaatggaagtaaaatgattaattttatttcaaggatagaaattctggctatctctttacgagtatatccttttataattaaatggaagagttttggggcacctagagaagctcataatatatgcctgggaactttatacagtgaacccttgccataagtgccccatgtggtctcttcactgttctccatcacaactttggctttcagatgactttagcttcgctattcctttattttgtcctggcatgtattgaaagagaagttaaaaaaaaaaaaagacagggcactgaaagagagagagagagaaagaatggtaagaaaagacagaagggatggaaaaaggaagaaggaaagggagggggaaaggagagggaggaaagcagggagggaggaataaagaaaagggagggaaggaaggagagaggaaaggagggaacaaaggtgggaagggtaaagagggaagaagagagaaagggtcgtagatcgcatttccttgcttactcatagacaggacttgtattagcccatttcacacctctataaagaactgagtaatttattaaaaaaaaaaaaagataggtttaattgactcacagttctgcagggttggggagg

SEQ ID NO: 692824 - DNA, 1043 bp, Homo sapiens
atgtacgttcttagaatctgcatttgtgtagaaagtgtcagactcttaagaaggtagcaatcttggcttgtcacttggctggtcagccaccagctatgaatgtcagttacctgctcttcactttgccatttttgtccttgttgcctgctccagataagagggagctgagaaacaagagggttgacataaattgaggttagattgtagtttattactaattctttctctagaccagatagactatttgaacagtttgtgaaaactaagcaccttccctttaacattgaaggtacatatagctttagaggaggtttcagagttttayattttcatggcccaacctaacagactgaaattacctgtgatgatcccatcgctttttcttggcaagactggggtgcctatatttaagggataagtgccattttaaatggaagtaaaatgattaattttatttcaaggatagaaattctggctatctctttacgagtatatccttttataattaaatggaagagttttggggcacctagagaagctcataatatatgcctgggaactttatacagtgaacccttgccataagtgccccatgtggtctcttcactgttctccatcacaactttggctttcagatgactttagcttcgctattcctttattttgtcctggcatgtattgaaagagaagttaaaaaaaaaaaaagacagggcactgaaagagagagagagagaaagaatggtaagaaaagacagaagggatggaaaaaggaagaaggaaagggagggggaaaggagagggaggaaagcagggagggaggaataaagaaaagggagggaaggaaggagagaggaaaggagggaacaaaggtgggaagggtaaagagggaagaagagagaaagggtcgtagatcgcatttccttgcttactcatagacaggacttgtattagcccatttcacacctctataaagaactgagtaatttattaaaaaaaaaaaaagataggtttaattgactcacagttctgcagggttggggagg

SEQ ID NO: 692825 - DNA, 1043 bp, Homo sapiens
atgtacgttcttagaatctgcatttgtgtagaaagtgtcagactcttaagaaggtagcaatcttggcttgtcacttggctggtcagccaccagctatgaatgtcagttacctgctcttcactttgccatttttgtccttgttgcctgctccagataagagggagctgagaaacaagagggttgacataaattgaggttagattgtagtttattactaattctttctctagaccagatagactatttgaacagtttgtgaaaactaagcaccttccctttaacattgaaggtacatatagctttagaggaggtttcagagttttacrttttcatggcccaacctaacagactgaaattacctgtgatgatcccatcgctttttcttggcaagactggggtgcctatatttaagggataagtgccattttaaatggaagtaaaatgattaattttatttcaaggatagaaattctggctatctctttacgagtatatccttttataattaaatggaagagttttggggcacctagagaagctcataatatatgcctgggaactttatacagtgaacccttgccataagtgccccatgtggtctcttcactgttctccatcacaactttggctttcagatgactttagcttcgctattcctttattttgtcctggcatgtattgaaagagaagttaaaaaaaaaaaaagacagggcactgaaagagagagagagagaaagaatggtaagaaaagacagaagggatggaaaaaggaagaaggaaagggagggggaaaggagagggaggaaagcagggagggaggaataaagaaaagggagggaaggaaggagagaggaaaggagggaacaaaggtgggaagggtaaagagggaagaagagagaaagggtcgtagatcgcatttccttgcttactcatagacaggacttgtattagcccatttcacacctctataaagaactgagtaatttattaaaaaaaaaaaaagataggtttaattgactcacagttctgcagggttggggagg

SEQ ID NO: 692826 - DNA, 1043 bp, Homo sapiens
atgtacgttcttagaatctgcatttgtgtagaaagtgtcagactcttaagaaggtagcaatcttggcttgtcacttggctggtcagccaccagctatgaatgtcagttacctgctcttcactttgccatttttgtccttgttgcctgctccagataagagggagctgagaaacaagagggttgacataaattgaggttagattgtagtttattactaattctttctctagaccagatagactatttgaacagtttgtgaaaactaagcaccttccctttaacattgaaggtacatatagctttagaggaggtttcagagttttacattttcatggcccaacctaacagactgaaattacctgtgatgatcccatcgctttttcttggcaagactggggtgcctatatttaagggataagtgccattttaaatggaagtaaaatgattaattttatttcaaggatagaaattctggctatctctttacgagtatatccttttataattaaatggaagagttttggggcacctagagaagctcataatatatgcctgggaactttatacrgtgaacccttgccataagtgccccatgtggtctcttcactgttctccatcacaactttggctttcagatgactttagcttcgctattcctttattttgtcctggcatgtattgaaagagaagttaaaaaaaaaaaaagacagggcactgaaagagagagagagagaaagaatggtaagaaaagacagaagggatggaaaaaggaagaaggaaagggagggggaaaggagagggaggaaagcagggagggaggaataaagaaaagggagggaaggaaggagagaggaaaggagggaacaaaggtgggaagggtaaagagggaagaagagagaaagggtcgtagatcgcatttccttgcttactcatagacaggacttgtattagcccatttcacacctctataaagaactgagtaatttattaaaaaaaaaaaaagataggtttaattgactcacagttctgcagggttggggagg

SEQ ID NO: 692827 - DNA, 2758 bp, Homo sapiens
tgattgtggatagttcaaatcccagctcaatcactagttgtataacctgcattgacttgctcagagaaaatatctatctcatataaaagttatgtcaactaagataccactttcaagactcgtggtacgtgataggtgttcaagaatgttcattcttactggagtgacagaggagtttctatattattttattaaattatgtaaacttaagttatgctaacatttaataagtgaaattcagtgtgttcctacaattttaggccttatctacgaccatctttctcccacacccaaaatggccaaagtttccctaccagcctctaattccatgggccctaaaaggcaaagttgtccttattaagttttaaattttagggatttttttgagacattccaggcyttatggaggaaagtagtatcttgtgtgatttcaggtatccagaagttgacttaaaagttcctcttacaggttaggttcatttgcatttctctaatgaccaatgatgatgagctttttttcatgtttgttggctgcataaatgtctttttttgagaaatgtctgttcacatcctttgcccactttttgatggggttgaaactcttgtggtgatcctagttaaaacacaactctgcgtggataggtattgggtagcaattgactcttcctaagatttttttttttttcctgagacaaacagtaggaggttgacactatagccatcaccaaataaacaggagacactggagctttgaaaggttgaattatttgcacaagatcactcagttgatgaatggcagagcaaaagttttgaaaccagggttatctgactttagagctcttttattcttaggtacaaaaaaaattgtctctatttttgcaaagaccacagcttacatcagagcttggctgatttctctgatgtctacatctcatcaacaatctaccttttggcttctcaacacatactgattattaatgtagggtgaccactgttagagaggtcgaaaggtatgcatccctgagtttcctccctgctttccttccttcttttcttccttccttcctgccttagtccatttgggatgctattaaaaagtaatataaacagggtggcttataaagagcagaagtttacttctcacagttctcgaggttggaagtccaagatcaagacaccggcataggtgtctggagagagctcgttcccttctctgtgttgttatgtggtgaaaggtacaaacgagctccttcaggcctcttttataagggcagcaatcccatcacaagggcttcactccacgacttaatcacctcctcaaagcccgcaccttgtaatatcatcaccaccttgggggttggcatttcaacagatgaatggggagacagaaatattcaaacattcgggccacagcacttccttacctccttcctccctccgtcaatttattcattcatgtactgattctttcattcaagtgtcatttgtttaaacaaatacgtgagtacctcgtctctgctaggtacttctcaggggctgaggaagtaaggtaaccagacagtgcttgttactttagaagctcacagtgtagagaaggagagagatgtagaaacaatataaagcaacacagatgtggaggggaaagagagaaggaggaatttcagtgttttaccgtgtatactttctgctgtttaattcctttaccataaaaatgcgttgcactacatgattaagaaactctttggcccctaatgtgtcacctagttgtaatctatgcagaagtttgacatggtaagagcctgcctagaattatcgcttttaaccaggtagcaaaaaaaaaaaaaaaaaatcaaacattgaactcaaccaaggaaaaaatgtaatttccatttacagaatttcttctccttttttagcttctaaaatgggtggttttccaaacaaccaattgctctcatttataagtgggagctagggtatgagtacaaaaaggcatacagagtgatatgatggattttagagactcagaaggccgcagggctaggaatacaaaactacctattaggtacaatgtactctactcaggtgacaggtgtactaaaatctcagaattcaccgctatataattcatccatgtaacaaaaaactatgtgtaccccaaaaactactgaaatttgaaaagaagagagagaatttaacctctccttaatgattcatgtagcactttcatatcttgaaataaggtaatgtcagtcgtattaaatattggttaatttaatccatagatgtgtggaaagaggcagttgacagaaagtaatcttgcatgaattcaaaatgcaattttaatcaaaatgcaattttaaaatagctgcccttacatggtctggcattaaaaataaacttttttatagaatggaagaaataaaaaatgtttaaagggtggttttctttatatttccaaaaggaaagttgatagatgcagagacatgaaatgaataaggataaatgaataagtggatgaatcctcaatatcactattttataataatttattctggggaaaaaaaggcaccaaacctcagagccataagcagaaatgaaaatccaccagaaaatgcaaaattattgtgaagactttctatttgaataggaggagacttggatctgtaatcatgagtccatagatggaacattctcaggttacacccatgccataatttgaacatttgaatcaggaatgcaagctttttctctctag

SEQ ID NO: 692828 - DNA, 2758 bp, Homo sapiens
tgattgtggatagttcaaatcccagctcaatcactagttgtataacctgcattgacttgctcagagaaaatatctatctcatataaaagttatgtcaactaagataccactttcaagactcgtggtacgtgataggtgttcaagaatgttcattcttactggagtgacagaggagtttctatattattttattaaattatgtaaacttaagttatgctaacatttaataagtgaaattcagtgtgttcctacaattttaggccttatctacgaccatctttctcccacacccaaaatggccaaagtttccctaccagcctctaattccatgggccctaaaaggcaaagttgtccttattaagttttaaattttagggatttttttgagacattccaggccttatggaggaaagtagtatcttgtgtgatttcaggtatccagaagttgacttaaaagttcctcttacaggttaggttcatttgcatttctctaatgaccartgatgatgagctttttttcatgtttgttggctgcataaatgtctttttttgagaaatgtctgttcacatcctttgcccactttttgatggggttgaaactcttgtggtgatcctagttaaaacacaactctgcgtggataggtattgggtagcaattgactcttcctaagatttttttttttttcctgagacaaacagtaggaggttgacactatagccatcaccaaataaacaggagacactggagctttgaaaggttgaattatttgcacaagatcactcagttgatgaatggcagagcaaaagttttgaaaccagggttatctgactttagagctcttttattcttaggtacaaaaaaaattgtctctatttttgcaaagaccacagcttacatcagagcttggctgatttctctgatgtctacatctcatcaacaatctaccttttggcttctcaacacatactgattattaatgtagggtgaccactgttagagaggtcgaaaggtatgcatccctgagtttcctccctgctttccttccttcttttcttccttccttcctgccttagtccatttgggatgctattaaaaagtaatataaacagggtggcttataaagagcagaagtttacttctcacagttctcgaggttggaagtccaagatcaagacaccggcataggtgtctggagagagctcgttcccttctctgtgttgttatgtggtgaaaggtacaaacgagctccttcaggcctcttttataagggcagcaatcccatcacaagggcttcactccacgacttaatcacctcctcaaagcccgcaccttgtaatatcatcaccaccttgggggttggcatttcaacagatgaatggggagacagaaatattcaaacattcgggccacagcacttccttacctccttcctccctccgtcaatttattcattcatgtactgattctttcattcaagtgtcatttgtttaaacaaatacgtgagtacctcgtctctgctaggtacttctcaggggctgaggaagtaaggtaaccagacagtgcttgttactttagaagctcacagtgtagagaaggagagagatgtagaaacaatataaagcaacacagatgtggaggggaaagagagaaggaggaatttcagtgttttaccgtgtatactttctgctgtttaattcctttaccataaaaatgcgttgcactacatgattaagaaactctttggcccctaatgtgtcacctagttgtaatctatgcagaagtttgacatggtaagagcctgcctagaattatcgcttttaaccaggtagcaaaaaaaaaaaaaaaaaatcaaacattgaactcaaccaaggaaaaaatgtaatttccatttacagaatttcttctccttttttagcttctaaaatgggtggttttccaaacaaccaattgctctcatttataagtgggagctagggtatgagtacaaaaaggcatacagagtgatatgatggattttagagactcagaaggccgcagggctaggaatacaaaactacctattaggtacaatgtactctactcaggtgacaggtgtactaaaatctcagaattcaccgctatataattcatccatgtaacaaaaaactatgtgtaccccaaaaactactgaaatttgaaaagaagagagagaatttaacctctccttaatgattcatgtagcactttcatatcttgaaataaggtaatgtcagtcgtattaaatattggttaatttaatccatagatgtgtggaaagaggcagttgacagaaagtaatcttgcatgaattcaaaatgcaattttaatcaaaatgcaattttaaaatagctgcccttacatggtctggcattaaaaataaacttttttatagaatggaagaaataaaaaatgtttaaagggtggttttctttatatttccaaaaggaaagttgatagatgcagagacatgaaatgaataaggataaatgaataagtggatgaatcctcaatatcactattttataataatttattctggggaaaaaaaggcaccaaacctcagagccataagcagaaatgaaaatccaccagaaaatgcaaaattattgtgaagactttctatttgaataggaggagacttggatctgtaatcatgagtccatagatggaacattctcaggttacacccatgccataatttgaacatttgaatcaggaatgcaagctttttctctctag

SEQ ID NO: 692829 - DNA, 631 bp, Homo sapiens
taataaccatcatcacaaaatattttaatcttgtatattcaaaagccattcaaattaaatagagtagacatcaactcaattcccattaccaactttaaaacttagtaatgaaaacttcagcatactttgaagtgcctgagaccaaattttcttttagataaatgtacaggattctttccaaaattaaaaattttacccaatcacaaaatcttcyccatcaatcaaaagctacctattgagcgtcttccatcttctgagcactgaggcaactaccttggtgctttttgaaagacaactaggcataggacagcctgtccttcaagcaatagaacgcagggtgtccaggagtttaggctctgtgccagagaagtttggctttgaatcctagctttgcctcttctcttccagtataacttctctcatcctgtaaagtggagataacaatagatggtcattgttagagtggaaggccacattcattaaagcatctggtgttatgcctggcacaaagtgagcactccacaaagcttggctcttttgttatgaggaacaaattgctaaggaaacaaaatataagaatatctgattatcaaagtgacaaaacctgtgtggaaagtaccaaatgaacaga

SEQ ID NO: 692830 - DNA, 3618 bp, Homo sapiens
catattggttatatttttgttgaagatggtaraaatgtactatgtttatgcttctacatccagtttgtacaagctggaaaataaataaatataacataaagccttgcctatattcttaatgaatcatgcatgctttttattattaaattggaatagaagcctttcgtctcctgcagaagcaagtccttcggctggagagatttagcctcatggttattggaaactgcccaatagcctatttattttaggcagatctctgttgatccaaagcaattaatatcattaacgttagcaccagccaaaccatgttcagaattcagtgtttcttgaaaatgaagatgctgtcacaatatatttgcataacatttgtctcttctcaaccgtttccaacaataatctttatggtacgtaatattttggttcccagtatacatactgagagacaggacctcagagaaactgacattcaaggtcatgattattaagtggagagtacaatttagctagtgattctggacttctaactagtacacaatatgagtgctgatgtgtggtaagtctgaataatactttagtctatcagaagggcacttaattttaaaaggtaaaaaccagtaagtagcagcctgcttacgcacatgtttaaatgagtgactcatttcttttcctcaagcaagcataactaaaagtattagccatcagccactgagaagtctcagaagtcagagtggaagcaactggaagcagaggcaccaaacactggaacatgtgagggagcctgaagaggagcgggaggaaggtccctccagaagctaacaggaaaatggccagggctaggcttcaagatctttccaaggtattcgtgccagctattttgctgagaaattttgaaaacctggacaccaaaatagtcgggaaaattatttatttatttatttatttatttattttttaaccattctagtagcttcaaccacaccttttaaaaaatgaagaacctgcgtgtttgtgtatgttgttacatgctcatctctgttgtcttttcactttaaaacccattcctcagggactttcctagactgtcactcagcttaattttctcaaactttttttgaaaaaatactaagaatctgatgttttggagaataacctctttatcattactgtgtgtgttctgctaaaaatatgagacagtgacaaatagggcatggttcgttttccttttaggttttattagacttttatgttttaggatacttcctccgtgtagcacaagactggtctccacttaagggtttccagaaataagtatttgccaagtgtaacagtttgcagggacagagtttatgttatgttaataatagaactttgccaagttttagggatattgtagaaggttttggtgaaggtctgatgctctccaccctaatcaaagaggccacacagaccggggtctgtgttttcatacatacaggttgaagtcctcagaatgtttttctcagcctcaatccatttctctgcttttgggaggtatagattttatgctcatctatgatttaatatgttttacctttagttcactgataatatcccaaaatgaataatgcaagcttctgaggatgcatgtatcaacacaccttttggtctctgcctctcaacgccagtgcactacattcatgccaaagaaaaataggaaactctcttgagcgctttatcccatgataccagcattctttaaaaaaaaaaaaaaaaaaggcttacctagagaataaacgtaatgcagcaactgaggagtcaagttgttgattgcagaggtaaattattttgtgaagattcactaagggtataatatcagcagaggttgttgaaaggggcaataagacggaaatgtgtaaggcaaactgcagctgaggccaacatgacactttcaagaaagattttaaagtgagaatttacctatttgagagtgagacgaaaatactgactggaactgaaaaataatttatgaattgcctttttttttgagacagagtctcactctgttatccaggctggagtgcagtggcgcaatctcagctccacctcctgggttcaagcgattctcctgcctcagcctcctaagtagctgggactacagacgtgcaccaccacacccggctaatttttgtgtttttagtagagacggggtttcaccatgttggccaggctggtcttaaactcctgacctcaagtgatccacccgccttggcctcccaaagtgctgagattacaagcgtgagccactgtgcccggcctgagttgcattttttaaaagattcacattttagccaagtacaaggcaagctagttgttactatgccatagccatataccagaaaattttatagaggcaatcacgacattccatgcaaggttaagaaatgccagaaaagactttatttcatgggcaatcaagatggtaacaattcttatgggaaaaatgtctaagcctagaataaaatatctgaaataaattgagtcaaatgaccagctttataaagactgaaagtgaaatcaacttaattcagagtgttcaacacctcaaaaatagaagtaagtttaatacaatttaagaaacttttggccaggaacagtgggtcatacctgtaatctcagcattatgggaggctgaggcaagagggattgcttggtgccaggaattcaagaaccagcccaggcaacaaagcaagaccctatctctacaaaaaataaaaaatacagccagttgtaagggtgtgcacctgtagtcctagcttctcaggaggctaaagtaggaggatcacttaagcccaggagttcaaggctgcagtgatctatgatgatgccactgcactccagcctgggcaacaggacaagactctgtctcagaaaagaaacattttaataatattgtatgaccttgccaaatgcactgtggtcaaatggggaccaatgaagtaatagtatctcaacatacgtgaggttttctttaatttatatagattgaaacctttttccccaaataggactacaaaattggttttaggatcaggtgagtgtcacatttggtattaagatgaaaatatgtatatgtacaatgcttctagatacagtttagtgagctaatttactgtggtccaagcacttttctagatgctagatatttacagattttactaaagtgaaccgaggcaccttcgagttatactttcttactttagagaagtgtctcaggccctacatggaaaaacctacggagtgatcccaccatcttgatcacagctggattgaaggaggtgtctgatccaagagttgccaatgtgggctcaccagcagtctgtaagagggccctggaatgagtgccgtgaccagccagtaagaaggaaagcaacaactaacaaccttagcacattctctttggggaatttctatgaaaaggcaaaaaaaaaggacgcaccaaagaagtgagtattcagaagccgtgactaacagaagcaatgaggatgcagaaatcatgagcaagaaggggcccatgaggtcaagaaagcaattcatcaaaggcaggaatcctgttaaaaacttaagacacttcttagggaa

SEQ ID NO: 692831 - DNA, 2406 bp, Homo sapiens
agattcctttttattacttgttttcagaaattttattataatgagtcccaatgtagttttctttatgtttctttggctatgggtttatttatcattttgaatctatgctttacagttttcataagatttggaattttttagctcttatttcttcaattattttggattcttacttctctcttttttggactccaattgcatttagaaattaaatatatgataaccacacaaatatttcagtggagggggtaacagctatatagatactacagaagaagaaattacttttcttcagccatcaaaaattatacgtgtgcatccaaagaaaaagttgcaaaatgaagcacagagataaatatgtctttttttaaaaaaggcaaaacaaaaaaacaaagcttcagtgccctttgaggcagtacaaagcagtttaatacagattccttttttcttctcattacattcatattcttcattaaatccttgagtagactcagtatgttcactcttttaatgctcatatctgaagatgccatcatctctatcatttatgggtctgtttctactgacttatttccttcctgtgtttaggtcatgtttatctgcttcttcatatgtcttgtaatttcttaattgaaagctagacagcttaaattttgcatgggcatatgctagattttctgtatttcttatgaaatacattgaactttattttttatatcagtttgatgtttaagtcttgttttaaaccacttttaagacttgtccaaagtaccctttaatctatagctaatttaggtctgcttctaaggtgtggctcttctctactgaatgccttatgtataaacaaaacgattcccagccgtttgtgacctctggtcattttcatcatacagctcctttgtgaactctggtcattttcatcatacagctccctggcaattttaatttccccagaagtttttctttattcaacctgtgagttttttcccaatacatatggagattttttatcagccgaaggctcaagtgtgcctgtgtgcacatttttggaactcctgctttgcacagctccttccttccaggtgttctgtcctgtaagtcccaggaacatcagccttcccaaagtccaatctctttctcctcaattcagtgagaacaggaggctctgtttgggttgaccctccctgccctgcagtccagaaattgggagtgatagatctcatcttatttgtttttcttttttcaggtatcgtagttttgccctgcctgttgtccaattccagaaaatttgtttcctataagttgcccaattataagaataatatttttcaaatttgttcactgtaaaaaggtgattctgggctgtgtttccctcctatggccaagacataaatttcccttctatttatgctcaactataaaaacaactttctatgttttatcctcccattttcttcttcctccttgttatttaccttctcccacctctgtcttaccattgtcatgaccaacattattacaagcatcagctaatgttttttccaggtgctaagccaagcatgttacttgcattttagaatttacttctcttgcagggtaaagatgaataaattctgtggacctaatgtacagcatggtgattatagttactaataatgtgttgcaaccttgaaatttactgagagtaaatatcaaatgttctcatcataggcgcgcacacacgcaatgtaactgtgtgaaatgatgcacgagttaatagcttgattatgataatcatttctcaatatatatgtgccaaatcatcgcattggacaccttgaaaatatacaatttttatttgtcagttatatgtccacaaagctgaaaaaaagaaaaacacaaaatttaattctaacaacagccctaaaactaggctgccagaamcccctttatcttagccctcctgatacgtgtggtcatatctcatcattctcagccttccagccaacgctgcaaagatgctggtttaactcagtctcctaaaatgcatgaatatgtgcccctctggtcagttgggggtctttttagttacatcttattttattttattttatttttattttcatttttattgagatggagtctcattctgttgcccaggctggagtgcagtggtatgatctcagttcactgaaacctctgccttccaggttccagtgattctcctgcctcagcctccctagtagcagggattataggtgcccgccaccatgccagcctaatttttgtatttttagtagagacggggtttcactatgttggccaggctggtctcgacctcctgacctcaagtgatccatcctcctcggcctcccaaaatgccaggattacaggcgagagccactgaggctggcctacaactcattt

SEQ ID NO: 692832 - DNA, 2406 bp, Homo sapiens
agattcctttttattacttgttttcagaaattttattataatgagtcccaatgtagttttctttatgtttctttggctatgggtttatttatcattttgaatctatgctttacagttttcataagatttggaattttttagctcttatttcttcaattattttggattcttacttctctcttttttggactccaattgcatttagaaattaaatatatgataaccacacaaatatttcagtggagggggtaacagctatatagatactacagaagaagaaattacttttcttcagccatcaaaaattatacgtgtgcatccaaagaaaaagttgcaaaatgaagcacagagataaatatgtctttttttaaaaaaggcaaaacaaaaaaacaaagcttcagtgccctttgaggcagtacaaagcagtttaatacagattccttttttcttctcattacattcatattcttcattaaatccttgagtagactcagtatgttcactcttttaatgctcatatctgaagatgccatcatctctatcatttatgggtctgtttctactgacttatttccttcctgtgtttaggtcatgtttatctgcttcttcatatgtcttgtaatttcttaattgaaagctagacagcttaaattttgcatgggcatatgctagattttctgtatttcttatgaaatacattgaactttattttttatatcagtttgatgtttaagtcttgttttaaaccacttttaagacttgtccaaagtaccctttaatctatagctaatttaggtctgcttctaaggtgtggctcttctctactgaatgccttatgtataaacaaaacgattcccagccgtttgtgacctctggtcattttcatcatacagctcctttgtgaactctggtcattttcatcatacagctccctggcaattttaatttccccagaagtttttctttattcaacctgtgagttttttcccaatacatatggagattttttatcagccgaaggctcaagtgtgcctgtgtgcacatttttggaactcctgctttgcacagctccttccttccaggtgttctgtcctgtaagtcccaggaacatcagccttcccaaagtccaatctctttctcctcaattcagtgagaacaggaggctctgtttgggttgaccctccctgccctgcagtccagaaattgggagtgatagatctcatcttatttgtttttcttttttcaggtatcgtagttttgccctgcctgttgtccaattccagaaaatttgtttcctataagttgcccaattataagaataatatttttcaaatttgttcactgtaaaaaggtgattctgggctgtgtttccctcctatggccaagacataaatttcccttctatttatgctcaactataaaaacaactttctatgttttatcctcccattttcttcttcctccttgttatttaccttctcccacctctgtcttaccattgtcatgaccaacattattacaagcatcagctaatgttttttccaggtgctaagccaagcatgttacttgcattttagaatttacttctcttgcagggtaaagatgaataaattctgtggacctaatgtacagcatggtgattatagttactaataatgtgttgcaaccttgaaatttactgagagtaaatatcaaatgttctcatcataggcgcgcacacacgcaatgtaactgtgtgaaatgatgcacgagttaatagcttgattatgataatcatttctcaatatatatgtgccaaatcatcgcattggacaccttgaaaatatacaatttttatttgtcagttatatgtccacaaagctgaaaaaaagaaaaacacaaaatttaattctaacaacagccctaaaactaggctgccagaaacccctttatcttagccctcctgatacgtgtggtcatatctcatcattctcagccttccagccaacgmtgcaaagatgctggtttaactcagtctcctaaaatgcatgaatatgtgcccctctggtcagttgggggtctttttagttacatcttattttattttattttatttttattttcatttttattgagatggagtctcattctgttgcccaggctggagtgcagtggtatgatctcagttcactgaaacctctgccttccaggttccagtgattctcctgcctcagcctccctagtagcagggattataggtgcccgccaccatgccagcctaatttttgtatttttagtagagacggggtttcactatgttggccaggctggtctcgacctcctgacctcaagtgatccatcctcctcggcctcccaaaatgccaggattacaggcgagagccactgaggctggcctacaactcattt

SEQ ID NO: 692833 - DNA, 2406 bp, Homo sapiens
agattcctttttattacttgttttcagaaattttattataatgagtcccaatgtagttttctttatgtttctttggctatgggtttatttatcattttgaatctatgctttacagttttcataagatttggaattttttagctcttatttcttcaattattttggattcttacttctctcttttttggactccaattgcatttagaaattaaatatatgataaccacacaaatatttcagtggagggggtaacagctatatagatactacagaagaagaaattacttttcttcagccatcaaaaattatacgtgtgcatccaaagaaaaagttgcaaaatgaagcacagagataaatatgtctttttttaaaaaaggcaaaacaaaaaaacaaagcttcagtgccctttgaggcagtacaaagcagtttaatacagattccttttttcttctcattacattcatattcttcattaaatccttgagtagactcagtatgttcactcttttaatgctcatatctgaagatgccatcatctctatcatttatgggtctgtttctactgacttatttccttcctgtgtttaggtcatgtttatctgcttcttcatatgtcttgtaatttcttaattgaaagctagacagcttaaattttgcatgggcatatgctagattttctgtatttcttatgaaatacattgaactttattttttatatcagtttgatgtttaagtcttgttttaaaccacttttaagacttgtccaaagtaccctttaatctatagctaatttaggtctgcttctaaggtgtggctcttctctactgaatgccttatgtataaacaaaacgattcccagccgtttgtgacctctggtcattttcatcatacagctcctttgtgaactctggtcattttcatcatacagctccctggcaattttaatttccccagaagtttttctttattcaacctgtgagttttttcccaatacatatggagattttttatcagccgaaggctcaagtgtgcctgtgtgcacatttttggaactcctgctttgcacagctccttccttccaggtgttctgtcctgtaagtcccaggaacatcagccttcccaaagtccaatctctttctcctcaattcagtgagaacaggaggctctgtttgggttgaccctccctgccctgcagtccagaaattgggagtgatagatctcatcttatttgtttttcttttttcaggtatcgtagttttgccctgcctgttgtccaattccagaaaatttgtttcctataagttgcccaattataagaataatatttttcaaatttgttcactgtaaaaaggtgattctgggctgtgtttccctcctatggccaagacataaatttcccttctatttatgctcaactataaaaacaactttctatgttttatcctcccattttcttcttcctccttgttatttaccttctcccacctctgtcttaccattgtcatgaccaacattattacaagcatcagctaatgttttttccaggtgctaagccaagcatgttacttgcattttagaatttacttctcttgcagggtaaagatgaataaattctgtggacctaatgtacagcatggtgattatagttactaataatgtgttgcaaccttgaaatttactgagagtaaatatcaaatgttctcatcataggcgcgcacacacgcaatgtaactgtgtgaaatgatgcacgagttaatagcttgattatgataatcatttctcaatatatatgtgccaaatcatcgcattggacaccttgaaaatatacaatttttatttgtcagttatatgtccacaaagctgaaaaaaagaaaaacacaaaatttaattctaacaacagccctaaaactaggctgccagaaacccctttatcttagccctcctgatacgtgtggtcatatctcatcattctcagccttccagccaacgctgcaaagatgctggtttaactcagtctcctaaaatgcatgaatatgtgcccctctggtcagktgggggtctttttagttacatcttattttattttattttatttttattttcatttttattgagatggagtctcattctgttgcccaggctggagtgcagtggtatgatctcagttcactgaaacctctgccttccaggttccagtgattctcctgcctcagcctccctagtagcagggattataggtgcccgccaccatgccagcctaatttttgtatttttagtagagacggggtttcactatgttggccaggctggtctcgacctcctgacctcaagtgatccatcctcctcggcctcccaaaatgccaggattacaggcgagagccactgaggctggcctacaactcattt

SEQ ID NO: 692834 - DNA, 2406 bp, Homo sapiens
agattcctttttattacttgttttcagaaattttattataatgagtcccaatgtagttttctttatgtttctttggctatgggtttatttatcattttgaatctatgctttacagttttcataagatttggaattttttagctcttatttcttcaattattttggattcttacttctctcttttttggactccaattgcatttagaaattaaatatatgataaccacacaaatatttcagtggagggggtaacagctatatagatactacagaagaagaaattacttttcttcagccatcaaaaattatacgtgtgcatccaaagaaaaagttgcaaaatgaagcacagagataaatatgtctttttttaaaaaaggcaaaacaaaaaaacaaagcttcagtgccctttgaggcagtacaaagcagtttaatacagattccttttttcttctcattacattcatattcttcattaaatccttgagtagactcagtatgttcactcttttaatgctcatatctgaagatgccatcatctctatcatttatgggtctgtttctactgacttatttccttcctgtgtttaggtcatgtttatctgcttcttcatatgtcttgtaatttcttaattgaaagctagacagcttaaattttgcatgggcatatgctagattttctgtatttcttatgaaatacattgaactttattttttatatcagtttgatgtttaagtcttgttttaaaccacttttaagacttgtccaaagtaccctttaatctatagctaatttaggtctgcttctaaggtgtggctcttctctactgaatgccttatgtataaacaaaacgattcccagccgtttgtgacctctggtcattttcatcatacagctcctttgtgaactctggtcattttcatcatacagctccctggcaattttaatttccccagaagtttttctttattcaacctgtgagttttttcccaatacatatggagattttttatcagccgaaggctcaagtgtgcctgtgtgcacatttttggaactcctgctttgcacagctccttccttccaggtgttctgtcctgtaagtcccaggaacatcagccttcccaaagtccaatctctttctcctcaattcagtgagaacaggaggctctgtttgggttgaccctccctgccctgcagtccagaaattgggagtgatagatctcatcttatttgtttttcttttttcaggtatcgtagttttgccctgcctgttgtccaattccagaaaatttgtttcctataagttgcccaattataagaataatatttttcaaatttgttcactgtaaaaaggtgattctgggctgtgtttccctcctatggccaagacataaatttcccttctatttatgctcaactataaaaacaactttctatgttttatcctcccattttcttcttcctccttgttatttaccttctcccacctctgtcttaccattgtcatgaccaacattattacaagcatcagctaatgttttttccaggtgctaagccaagcatgttacttgcattttagaatttacttctcttgcagggtaaagatgaataaattctgtggacctaatgtacagcatggtgattatagttactaataatgtgttgcaaccttgaaatttactgagagtaaatatcaaatgttctcatcataggcgcgcacacacgcaatgtaactgtgtgaaatgatgcacgagttaatagcttgattatgataatcatttctcaatatatatgtgccaaatcatcgcattggacaccttgaaaatatacaatttttatttgtcagttatatgtccacaaagctgaaaaaaagaaaaacacaaaatttaattctaacaacagccctaaaactaggctgccagaaacccctttatcttagccctcctgatacgtgtggtcatatctcatcattctcagccttccagccaacgctgcaaagatgctggtttaactcagtctcctaaaatgcatgaatatgtgcccctctggtcagttgggggtctttttagttacatcttattttattttattttatttttattttcatttttattgagatggagtctcattctgtygcccaggctggagtgcagtggtatgatctcagttcactgaaacctctgccttccaggttccagtgattctcctgcctcagcctccctagtagcagggattataggtgcccgccaccatgccagcctaatttttgtatttttagtagagacggggtttcactatgttggccaggctggtctcgacctcctgacctcaagtgatccatcctcctcggcctcccaaaatgccaggattacaggcgagagccactgaggctggcctacaactcattt

SEQ ID NO: 692835 - DNA, 2406 bp, Homo sapiens
agattcctttttattacttgttttcagaaattttattataatgagtcccaatgtagttttctttatgtttctttggctatgggtttatttatcattttgaatctatgctttacagttttcataagatttggaattttttagctcttatttcttcaattattttggattcttacttctctcttttttggactccaattgcatttagaaattaaatatatgataaccacacaaatatttcagtggagggggtaacagctatatagatactacagaagaagaaattacttttcttcagccatcaaaaattatacgtgtgcatccaaagaaaaagttgcaaaatgaagcacagagataaatatgtctttttttaaaaaaggcaaaacaaaaaaacaaagcttcagtgccctttgaggcagtacaaagcagtttaatacagattccttttttcttctcattacattcatattcttcattaaatccttgagtagactcagtatgttcactcttttaatgctcatatctgaagatgccatcatctctatcatttatgggtctgtttctactgacttatttccttcctgtgtttaggtcatgtttatctgcttcttcatatgtcttgtaatttcttaattgaaagctagacagcttaaattttgcatgggcatatgctagattttctgtatttcttatgaaatacattgaactttattttttatatcagtttgatgtttaagtcttgttttaaaccacttttaagacttgtccaaagtaccctttaatctatagctaatttaggtctgcttctaaggtgtggctcttctctactgaatgccttatgtataaacaaaacgattcccagccgtttgtgacctctggtcattttcatcatacagctcctttgtgaactctggtcattttcatcatacagctccctggcaattttaatttccccagaagtttttctttattcaacctgtgagttttttcccaatacatatggagattttttatcagccgaaggctcaagtgtgcctgtgtgcacatttttggaactcctgctttgcacagctccttccttccaggtgttctgtcctgtaagtcccaggaacatcagccttcccaaagtccaatctctttctcctcaattcagtgagaacaggaggctctgtttgggttgaccctccctgccctgcagtccagaaattgggagtgatagatctcatcttatttgtttttcttttttcaggtatcgtagttttgccctgcctgttgtccaattccagaaaatttgtttcctataagttgcccaattataagaataatatttttcaaatttgttcactgtaaaaaggtgattctgggctgtgtttccctcctatggccaagacataaatttcccttctatttatgctcaactataaaaacaactttctatgttttatcctcccattttcttcttcctccttgttatttaccttctcccacctctgtcttaccattgtcatgaccaacattattacaagcatcagctaatgttttttccaggtgctaagccaagcatgttacttgcattttagaatttacttctcttgcagggtaaagatgaataaattctgtggacctaatgtacagcatggtgattatagttactaataatgtgttgcaaccttgaaatttactgagagtaaatatcaaatgttctcatcataggcgcgcacacacgcaatgtaactgtgtgaaatgatgcacgagttaatagcttgattatgataatcatttctcaatatatatgtgccaaatcatcgcattggacaccttgaaaatatacaatttttatttgtcagttatatgtccacaaagctgaaaaaaagaaaaacacaaaatttaattctaacaacagccctaaaactaggctgccagaaacccctttatcttagccctcctgatacgtgtggtcatatctcatcattctcagccttccagccaacgctgcaaagatgctggtttaactcagtctcctaaaatgcatgaatatgtgcccctctggtcagttgggggtctttttagttacatcttattttattttattttatttttattttcatttttattgagatggagtctcattctgttgcccaggctggagtgcagtggtatgatctcagttcmctgaaacctctgccttccaggttccagtgattctcctgcctcagcctccctagtagcagggattataggtgcccgccaccatgccagcctaatttttgtatttttagtagagacggggtttcactatgttggccaggctggtctcgacctcctgacctcaagtgatccatcctcctcggcctcccaaaatgccaggattacaggcgagagccactgaggctggcctacaactcattt

SEQ ID NO: 692836 - DNA, 652 bp, Homo sapiens
ccatgcccgtgtaaaatctagcactgggaatctcttgggattctccagaagctgatgccatcataaagtagatctctttctcaagaacatcagatcaaagcctattaataccagaaacaattaattgccacctctgtctttacctgtttcatttttcttttcatgactatcattttctctctgtgttggtttaggaattttgattgtaaaaatgagattctttaaggtttttcctctaatcatgccattttgggtaaatcagtattacacaagcctattaatatcaaacctccccttccatagacttggatggggaggagatctgttctgtgcaccgcaggtcagcctgggtgttcgttaacagacattactggttattctcatgtttatgcttgtctccctagtcatttgctctgttttctccaggggtttaaatgctgctatgcagccactcactcgacaaatgattgaaatatatataactacaaagaaaaccatcacaagacgctttgatggcagtcatcaacagccaggctgaggctgttcttggagtggtgtagatcaggagttctgaaaacaacaacaacaacaacaacaacaacaayaacaacaacaacaacaacgtatggtcaactgatgagactcagaatct

SEQ ID NO: 692837 - DNA, 678 bp, Homo sapiens
tcaatgtcattttacaactaagtttcagacaatttttgcaagaataaaacgtataagcatttgaaaatgctgatattctcagctgagtgttcctaattatgtctttagtttatatctgcttaaggtttttatgttgaaataatcccctcttcagtttcttcctttttcggtatatcatacttggctggtgctagaatgatgacattctttggctgttgtctctacttaccctctataatgggatgtttcaatgggatatgttgaaattagtgatgaaaaagatggacaaaattatctctctttaatcactgttttaaattacaagcagttgctttaagagataaaaaattcctttgaaacacaaagcaaagattccttttgaataagcaaagggataccattattttaccaagctccatagacaagaygtttcctcataaatattcttcataatggttcccaaatgtatttctcatttctatctttttggctgtgcagaattttctatattttatgatttttaatgaacaaagtcatttttccatttggaatgttaaattcataatttcacaaattgaggaataattaatcacattgaaaataaaatgagaatccactatgggcttgtactaaattgtaggttgttgtgacaactttacttgtttaaataaattttta

SEQ ID NO: 692838 - DNA, 591 bp, Homo sapiens
tgtgtgtgtgtgtgtgtgtgtgtgtgtgtttcctagatcacaagacaggaaggaagtggtacccatttcaactgggggtaaaccatgtgaaaaattaaaccaaaaatggaaatgacagaattctagagttgttttggagaaaaggaagaaagcaatggagcataaaaaaaaaaacaggtttgcaagaactgcatttctgtcaaaccttatatatgcagtgtcagaataagagacacgttccagaggcagggatcagagagtggtgctgagcagagaagaaaagacatgcactgtaaagtctggatggagagaagtaaaagcgcaaccacagaatgacaaggtcggggcaatggcasagcgtgggcatctcagtccaaagtcgaagagaaaaagggaactttactctgtaaactctccctgttgtttaaatatgaaaataagaaaaatattttgtatggtcttcctgatcctttgtcatttttattataagtgataaaattgaatttataacataaatcattgagggacaaatatttccactcacaactggttttcaaagcccttctgacaatagacgctgattcaatcagt

SEQ ID NO: 692839 - DNA, 881 bp, Homo sapiens
cttgtatttttctgttgtttattttctactatgagcatatatcactttaataatgagaaatacatgttttttagagttaaccaagtaattcttttcctatctataaaaatttgcaggtagtcacaattattttggtagttgcatggtttgagtgtccccaccaaaactcacgttggaaccttgattcccagggcagcaatgttgcaggtggaacttttaagaggtggagcctgatgggaggcatctggaccatggggcctccaccatcatggggagcttgatgctattcttgtgatagtgaattctcacacatgggactggattagttagtgtgagaatgggttgctataaagtgaagttcctcctcattttggctctttctttttttggcatacccactttcccttctgcttctctgccagctgcatgaggcccccaccagaagctgagcagatgccagcaccacgtttcttggacttcacagccaccagagttgtaagccaaataactctcttttctttataaattatccagtctcaggtatcttgttatagcaacacaaaacgaatcaagacagtagctgtcatcgcagtccactgtatgttgtatgtgtgtttctgtcggtgtgggtaagaaggagatggggatagggtagtgagagtggtggagttgagccaaatgattccttaytgattatatttttctcctgtcattattttcaagggttctggaatcaggttcatatgctgtcaatgtactttatttttcaaggtgcaatatactaatatatgtcagatgggattcatctatgtacttgaacatgtggaagacaaaggaataaaagaagtttctacatatgtaagagaaaacctatctcttgg

SEQ ID NO: 692840 - DNA, 595 bp, Homo sapiens
ctgaggccttcccagaagcagatgccagtatgctgcctgtacaacctgcagaactgtgagtcaatacaacctcctttcttataaactacccattctcagatgtttctttacagcatgcaagaatggcctaatacacagtttaatgaggatgctgtattttgcaaatatatttgtctccccacaaatcacctgatgtgttttgatcagatagctcttctaattaatattagaggatataatttatagaaattaatatatttttgtaatttttgttctgtaaaactattaataatatgtagtttgctataattataaaatataagctaagtttttgaaaatttattcacaattttgacagtgaaataaacacaagtatgttggtagcaacattattaaaatttaatttattttttaaaaatggtaatatgtgcattgagwagaaaagtaaaagaccataagagaatacaaagtaaaaatcaaaattcttttacctttctcctccagccaaccaaggaatcaaccgatagaaacaactctgtgtttgtaggtttgaatatgtgttatatgcacttataaattcttccagagaaactct

SEQ ID NO: 692841 - DNA, 230 bp, Homo sapiens
aattccagcwgctacctaaacatttttgtgtcagggcgcactgaaataaatggaataggctgctgatggtttcaggttggagaggagaagccacatctagacacacagatgtgtctagaccaccgagaagctctggcttgggacttaccagtgacccagacagctttaatattcctctcagcttgattaaacattagacatttaggcccctgaacttactttccttagaa

SEQ ID NO: 692842 - DNA, 988 bp, Homo sapiens
catctgcacacagcagagtgctcagcccaaatcatgtcagtccctcttcacatctttcagttttcctcttcggccaagacctcaaggcccagatttactttgtctcatgatgctgtgtccttattgttattcaaagttacactgtaatatcctcccctttaactccacctgctgctttaccttcttctgaaatacacaacacccagttgccttgtttttcggttattcctataggtcattcccatttcaagactcatgcatactaaagttaaatttttcatggctaaaaaaaagtatacataacaaaatctctgaatatttaaagttctactaatggggaaatcaaattttctaacagttgaagagatctatatgctgtatgttagcaaactatgaactcaaatgtctcttcaaaaatggcygtcctttcttatcacttatttggattactataacttaccatagcaacaatgcagtatctactagatgccaggcacttcggggttgatacattgacagacattgaccttcagttttcatgttaccacactgtcctggttttctacctaccagctgcttctatttatatatttttttttctgagacagatcttgctctgtcacccatgctggagtacagtggcacgatctgggctcactgcaatatccgcctcccaggttcaagtgattctcctgcctcagcctcccgagtagcagggattacaggtgcaagccactgtgcccagctaatttttatatttttttagtagagacagggttgtcccatgctggccaggctggtcttgaactcctgacctcaggtgatccgcccgcctcggcctcccaaactgctgggattacagcgtgagccaccacgcccagcaatctattcacatattttaattgacctctaaatgtttagtagttcagggattagccctagtccctctttattactctcttgtcctgaatgatttccatttagaaca

SEQ ID NO: 692843 - DNA, 988 bp, Homo sapiens
catctgcacacagcagagtgctcagcccaaatcatgtcagtccctcttcacatctttcagttttcctcttcggccaagacctcaaggcccagatttactttgtctcatgatgctgtgtccttattgttattcaaagttacactgtaatatcctcccctttaactccacctgctgctttaccttcttctgaaatacacaacacccagttgccttgtttttcggttattcctataggtcattcccatttcaagactcatgcatactaaagttaaatttttcatggctaaaaaaaagtatacataacaaaatctctgaatatttaaagttctactaatggggaaatcaaattttctaacagttgaagagatctatatgctgtatgttagcaaactatgaactcaaatgtctcttcaaaaatggctgtcctttcttatcacttatttggattactataacttaccatagcaacaatgcagtatctastagatgccaggcacttcggggttgatacattgacagacattgaccttcagttttcatgttaccacactgtcctggttttctacctaccagctgcttctatttatatatttttttttctgagacagatcttgctctgtcacccatgctggagtacagtggcacgatctgggctcactgcaatatccgcctcccaggttcaagtgattctcctgcctcagcctcccgagtagcagggattacaggtgcaagccactgtgcccagctaatttttatatttttttagtagagacagggttgtcccatgctggccaggctggtcttgaactcctgacctcaggtgatccgcccgcctcggcctcccaaactgctgggattacagcgtgagccaccacgcccagcaatctattcacatattttaattgacctctaaatgtttagtagttcagggattagccctagtccctctttattactctcttgtcctgaatgatttccatttagaaca

SEQ ID NO: 692844 - DNA, 988 bp, Homo sapiens
catctgcacacagcagagtgctcagcccaaatcatgtcagtccctcttcacatctttcagttttcctcttcggccaagacctcaaggcccagatttactttgtctcatgatgctgtgtccttattgttattcaaagttacactgtaatatcctcccctttaactccacctgctgctttaccttcttctgaaatacacaacacccagttgccttgtttttcggttattcctataggtcattcccatttcaagactcatgcatactaaagttaaatttttcatggctaaaaaaaagtatacataacaaaatctctgaatatttaaagttctactaatggggaaatcaaattttctaacagttgaagagatctatatgctgtatgttagcaaactatgaactcaaatgtctcttcaaaaatggctgtcctttcttatcacttatttggattactataacttaccatagcaacaatgcagtatctactagatgccaggcacttcrgggttgatacattgacagacattgaccttcagttttcatgttaccacactgtcctggttttctacctaccagctgcttctatttatatatttttttttctgagacagatcttgctctgtcacccatgctggagtacagtggcacgatctgggctcactgcaatatccgcctcccaggttcaagtgattctcctgcctcagcctcccgagtagcagggattacaggtgcaagccactgtgcccagctaatttttatatttttttagtagagacagggttgtcccatgctggccaggctggtcttgaactcctgacctcaggtgatccgcccgcctcggcctcccaaactgctgggattacagcgtgagccaccacgcccagcaatctattcacatattttaattgacctctaaatgtttagtagttcagggattagccctagtccctctttattactctcttgtcctgaatgatttccatttagaaca

SEQ ID NO: 692845 - DNA, 988 bp, Homo sapiens
catctgcacacagcagagtgctcagcccaaatcatgtcagtccctcttcacatctttcagttttcctcttcggccaagacctcaaggcccagatttactttgtctcatgatgctgtgtccttattgttattcaaagttacactgtaatatcctcccctttaactccacctgctgctttaccttcttctgaaatacacaacacccagttgccttgtttttcggttattcctataggtcattcccatttcaagactcatgcatactaaagttaaatttttcatggctaaaaaaaagtatacataacaaaatctctgaatatttaaagttctactaatggggaaatcaaattttctaacagttgaagagatctatatgctgtatgttagcaaactatgaactcaaatgtctcttcaaaaatggctgtcctttcttatcacttatttggattactataacttaccatagcaacaatgcagtatctactagatgccaggcacttcggggttgatacattgacagacattgaccttcagttttcatgttaccacactgtcctggttttctacctaccagctgcttctatttatatatttttttttctgagacagatcttgctctgtcacccatgctggagtacagtggcacgatctgggctcactgcwatatccgcctcccaggttcaagtgattctcctgcctcagcctcccgagtagcagggattacaggtgcaagccactgtgcccagctaatttttatatttttttagtagagacagggttgtcccatgctggccaggctggtcttgaactcctgacctcaggtgatccgcccgcctcggcctcccaaactgctgggattacagcgtgagccaccacgcccagcaatctattcacatattttaattgacctctaaatgtttagtagttcagggattagccctagtccctctttattactctcttgtcctgaatgatttccatttagaaca

SEQ ID NO: 692846 - DNA, 520 bp, Homo sapiens
tactggtggcaaattccaagacaagagaaaaaatcagtgtctgttaacctttttttttttttttttttgagatggagtctcactctgtggcccaggctggtgtgcagtggcatgatctcagctcactgcaacctccgcctcccgggttcaagcaattctcttgcctcagccccctgagtaggtgggatcacaagcacctgccaccacacctggctaatttttgtatttttagtagagacggggtttcgccatgttggccaggctggtcttgaactcctgacttcaggtgatccgcccgcctccacctcccaaagtgctgggattgcaggtgtgagacaccatgcccagcctgttaccttttgagccaggcctctcctgtgccgaagctgagcagttaccctttttaatatcagcgccagactgcactttagtgccactgagcagctccaggcctttgatgaggcttcaggtgttgaagcctggttccacattaaatctsttcctgctctctcctggcccc

SEQ ID NO: 692847 - DNA, 1473 bp, Homo sapiens
agcctttctcctgtctcagcctcctaagtaactggaattacaggcacccgccaccacgccgggctaatttttgtattttttgtagacacggggtttcgccacattggtcaggctggtctcaaactcctgacctcaggtaatcctccagccttggtctcccaaagtgctgggattacaggtgtgagccaccaagcagccagctaatattctatattatgatttacttacaactttgattaatacttgaatgaccataggacaagggagaaaataattaactttaggcaattagcccaattatcagaagataatttactcccttatagaaaaaacttggcactttatcattctatgggctattcccccagctcagagatgcatctgagatctgtaaaccttcagtgcagattgcttgtcacacatttgaaaatgagatagaaattttaaacattttaattaaaaaaaatgagtcaagtgccttttctcaatggataatacaaactttgctttgacctccaatatttcccattatatgtgccttatttgcaacaaaaaaaagtaatatttcgctttgagaaaatatgttaccctgcatggagaccctccccttagctcaaaaatagcttggttatcaaatgaggaaacaaaacaccaaatagtaagaattacagagtagtcagagcttcttcaaatttgtacaaggacgtaagtaatcaaacctctgcttacctctccaacttcagttgctttggcctactttctctttttctccaggctccccaatactgcatttattgtagttcctcactgcaccccataagattgtgtttcactgatggtgtaaatttgctaattgaaacgcacactttattctggcttattctttcaattctgctggaatcagcctaaggatgtctcaacttcactgtgacgcttttcctgcccccattttcaactctaattcagcgtcctgcatctaagatcgcattcaggaaacccaaaaaaatgtatctatcactggacaccagatgtagcaagcaaagagctgtctacaccctttgtgatagaagagaggagttttcttaggatgcactgggtctagctctttgcccaaagcctaagtgagcagaaacttcaggacataagcattgaaatgtccagtygggatagaggggatctggtaggggtccccagtcaagctaagagacatgatataatagttatgatagtatctaccatttagggggaatgcattcttaatgttccagacacagtgaggaagcaatactgattatccttacatgacagaaagtcttccctaagcaggaaggtcatagcgtgtacagagtcagagagtgaggatctgctaatgtccaagcttgtgcattttatatgcctcttctccgccagttctgtgttcatcagtggtgtgattgtacctaattcaaatccactgaacaaggttgtccatca

SEQ ID NO: 692848 - DNA, 1044 bp, Homo sapiens
tgaccaggatgtgagagccaggatcgtgcacactctccagctcatgatgacagtgtactggagagggtggcaaatggccacatacctatcataggacatcaccaccaaaatcagacactctgtagcagcaaaagagaaatacaaataggtctgcattatgcatggaagaaaggagatggttcttttcttgttcatcagatttgccaacatcttgggaacattgttggaagcataggacatgtcaatgatggccaggtgtgagaggaagaagtacatgggggtaggcagaatgtggtccagacagatgagtcccaagatcatgccatttgccagcaggctgaagatgtataacagggagaagatctaaaagaggagcacttccatctcggcactgagctgggattccaccaggatgaattctggtgaccatgattggttgactcccattccttaatggaagtctgtcaaggactgaagtgtgatagtaaggtcagaaatttgagtttttatctgaaaatgagctaagataaaggctatatatgttcgttcctattagataagccccttcaaattcccaagatttataccctttctgtttttagcatttaattatgaaataaatttaaacttaaaaatagtgtcacacagttttcaaagaactcccacttaatttcatagagattcagcaaatgttaacatttattatttgtcttattctctttctctatgtaatttttattttttgaaccagttgagattaaagtgtagacataataccaatttaattttaaatttctgatcttttagtaagaaaaaactaattcccactagcttgaccataatataagtattaaawtcagaaaatttaatattgacattgacatgtttaatattgatattgatattgatattgacatgtttcttttctctaatatacaatattctccctccaaccacaccagtctaggacctaacccaagattatgcattatatctaaagtcatctgtctttagtctcctgtacctgtaatatttactcagcct

SEQ ID NO: 692849 - DNA, 1138 bp, Homo sapiens
  misc_feature 669, 720: n = A,T,C or G
ctttttacacttaatagggtccttggcgtttttgagtcttcaactaatttgttttattctgcctcccttctgttgtagtcaggaaagtgagttgtcttaaagttaaacgtcttgtgatcagcctacatgaagggcactgcacaagtcccatcrtctgattgatgagatactctcctccctggtctgttttcctagccactggaacttagaggaatgggactcgaattgcagtacacaatttgttttgattatgactttatcctccccagctccttcagctcatggatcttatgtttttcatacaaatatttaaaaccaatgagacagtaattcattcatcaagggggtcttgtcaaagttctctgttctgtattttgcatagcattatcacataacaaaacattaagattccatctcaattaatcctgaccccaagattctgatatcaatactaaagaaagatagggctactgtgtcaatttccttggaaatcgagatacgactggattgtgcttttctcaagaatacactgcatctgatttttctggtgaattgggatcacattctgctgataagagttaagagttaatagtatttagtaatcactcactcatcaggtattatttagagactctgcctcagttctctatttcatcttttagtggcctnaaagagctaattcagtgctttactttagcaaaagcatgacttaatcactgngaataaattaacaatagagtaaaaataggatttacctgcatttctgtgtcagtgttgagctcattgaattgtccttggtaaaaataaaaattaatataaaagtgaattataccatgtaaatatctttgtgtgtatatcaaggttttatttttaaagtacttatgattcattgtttttaatggtacataatatatttattactattggtattcattatatcattaagttctaagcaaaagtaagttttgtctaactgtacataattgtgttgtcatttttatgggaaatgctttatcagcctaataacagagtgcttgcaaatccataactaaacactgaaaaacttcacttgctcaccaaagcttctgttactatttgaaagtaatatatgtgcatgctctggctatgagaatccgag

SEQ ID NO: 692850 - DNA, 1138 bp, Homo sapiens
  misc_feature 669, 720: n = A,T,C or G
ctttttacacttaatagggtccttggcgtttttgagtcttcaactaatttgttttattctgcctcccttctgttgtagtcaggaaagtgagttgtcttaaagttaaacgtcttgtgatcagcctacatgaagggcactgcacaagtcccatcgtctgattgatgagatactctcctccctggtctgttttcctagccactggaacttagaggaatgggactcgaattgcagtacacaatttgttttgattatgactttatcctccccagctccttcagctcatggatcttatgtttttcatacaaatatttaaaaccaatgagacagtaattcrttcatcaagggggtcttgtcaaagttctctgttctgtattttgcatagcattatcacataacaaaacattaagattccatctcaattaatcctgaccccaagattctgatatcaatactaaagaaagatagggctactgtgtcaatttccttggaaatcgagatacgactggattgtgcttttctcaagaatacactgcatctgatttttctggtgaattgggatcacattctgctgataagagttaagagttaatagtatttagtaatcactcactcatcaggtattatttagagactctgcctcagttctctatttcatcttttagtggcctnaaagagctaattcagtgctttactttagcaaaagcatgacttaatcactgngaataaattaacaatagagtaaaaataggatttacctgcatttctgtgtcagtgttgagctcattgaattgtccttggtaaaaataaaaattaatataaaagtgaattataccatgtaaatatctttgtgtgtatatcaaggttttatttttaaagtacttatgattcattgtttttaatggtacataatatatttattactattggtattcattatatcattaagttctaagcaaaagtaagttttgtctaactgtacataattgtgttgtcatttttatgggaaatgctttatcagcctaataacagagtgcttgcaaatccataactaaacactgaaaaacttcacttgctcaccaaagcttctgttactatttgaaagtaatatatgtgcatgctctggctatgagaatccgag

SEQ ID NO: 692851 - DNA, 1334 bp, Homo sapiens
  misc_feature 532, 534: n = A,T,C or G
aatgtaggctttggcctgcagcatttatgaatccacagaaggatgttgggcagcggagtgacctgatcagatttgagtttaacaatttgccaaacatccctaagcaactcacacctgctgactgcaatgaggaataaattacaatggatccaggctggggagaatgagagaagtgactctgactcatttgaggtttgtttccttagcttttgccttatctctattactgctttcttttaattaaattttgtctattttaaaaaattcatatattcactgattcacttgcttattatagttttctttataagtatcacctagttcgatgttaaagataatctaaaaggttgttggtcctttagtaagagaattttacctcttcatgatcaataacatattatataggttgacgctatttctgccacctattatttactttttaagtaaaattttatctgagtacaacaaacatacagaatagtgcacacattgtaaatatacagctgggtgaattttacaaagcaaacccctncnaaatcaagatgtagtttatttctgcactccagaagccttcttgtatccctcccatcattgcattcacaaaaggtaaccattgttctgcctttatcatttggcctggttttcaacttcacaaaattgggatcatacagcatgtactgttttgtatttagcctattttgtttaacattatgtctagatttatccatattggcacgtgtatcaaactgtcctccattttcattgctatatggcattccatcttatgaattgaccacgatctagttattccccatccttttcttaggctgcatgttgctgttgttwtttctaatttactcattcaggattggaaagaaatctatccagctggcatttaccagtggacagattaagtggagtctcatcaatccgcttcactattcacttagtgctagcatttgctacttctcagttgactatctgaaggtcaccttgatatacctgacttaagttgctgaatccagcaggcatttatttagagtagaccttccaggctagagctggaactctgacttaaccacaagctcagcacccagtgtagtacatgaaagacagcacctcctacactgcactgtttcctgggcattctcacttcggctccctacaacacttttcatagtaaataaaatattcccaaatgcaatatgcctctacctgttattctttagcctctagcattttaaaaatgctttttcttctctgttaatcatttgtcttctaatgtgtttcatgtgtcttctactgtgtttttgtgattaaataattttgggaaa

SEQ ID NO: 692852 - DNA, 360 bp, Homo sapiens
aactcctctttcaccaccttcccaagcttctagatctctttttattccacctacacagaaaccatgtgggagatcagaagccttcagtgaccttcggccacatctccacatcttttcaaaaatctcataaggatggttgtattagtcaaggttctccagagaaacagaaccaacagattagatatagatatagatgccctgagagaaatttattttaagaagttggctcatgcaattatggaggctaaatctcacaatctgccaactgcaagctggagacccaggtaagctggtggcatagtttgaaggccagaaagccagggagccaatggtatggatkccagtttgagtttgaaggtc

SEQ ID NO: 692853 - DNA, 1195 bp, Homo sapiens
ttgttccatgcttcctggtcttgtcttccaaattcattgatacttcatattttcagcctcatctcctgttgtttactcattacaatgttatagtaaattgtccattttttcttacattagacttgttattacatagcagcatcaaaagcttttcacctattcccttkaatctcagggtttcagtgagagccagccctctgtgtaaagcttttgtcttttgccctgacatttaaagtcctccgtacatttcacaaattctttcatggtgacttttttcagactgtgtgctcttgattccacctgaaaccatgcattcttttgtatgtttcaaaaaccagagtaagacattatgccacatttttttctgcaatgataactatatgttactcattttctttgattaatatatttgaagtttaatattattattcagtttcttagccaaataactctgcactctactttttgtttattttcatttataaactctaacagtttgatgcagccctgactgaaatgaacacaatgatatacttcttttattgcaaaattattctctaaaaaaacttaaattatttatcaaatcaatagtcagataataactaagttggccttttatgagttttaataaataaaactatttaaatatatgctcactgaaaaaaaaatcagtgctctaaaatcataaaaatatgttaccctggattttaaaatagcaccgacaaatatagtaattaaatcagttttctaattagaaatgttcacagtggcaagttttactttgaatttaattatttacactatcacaacaaacatactaacaagccaaaaataagtgaaaaaagcaaacctacaaacaggaaagtaataaatctcccatatactatgagaactatcggtattaaaaaattgtatcttcaaacaaaatttgtcattttcagtgcggatgcttttagacgaaaattagctggcatattaaaatagtgatgagctcacagtcttttttaaaattaaatgtcaatttagtaataagtgagccttccaaaaatattctagatatatgggaggggagaaatataaatatacatgttaggacggctacaccattaagaggaaaattgctcctttctagtctttgagttacttaagattaaattgttggctcagtgtctacgatcatcccagtggctgcacg

SEQ ID NO: 692854 - DNA, 1364 bp, Homo sapiens
atggtgtggtggatcagataatactcacttagggtaaccactttgtgtccttcacttaggtatgcaatttttccaagagactagtagacggtgtagaattgctttgcaataaatgcagtttgtcatagaatttgaaatggcwtgaatccaaaattccagttcttcacaatggaatattattttggggtcttgacaaaggcaacactgaacatccctatctgtaacatgttatatatctgaaaacactggatctattatatcacatagcacatgtggcagaataattagtactcaaggtcagcaggcgaaaacatttcttctttttctttctccctccgaacacctttttaaagttgcaacctttcaggctatttcaaatgtgatatatattgccatcaaaatacaaaaagagcctctttcttcatagtgaacactgtaagatttatcaacctccctcttaccttagaagtaatattataacattctacaaaacactggagcctgggcaacttaattaatgtgtcaagctgctttagttccctggggattatttctgatcctctgtcagacatgtattttagaagggtatttaaagcatctcctactttccgctcactaggaattagcataatctcatcaatgaaattgactttcatgatgctttttgggatattgtgataatcaagatccctttggaatataacactgagccaactgggcatatccttgaggtaaatatataaaggcatactgttgtccttactacatgaaaacaaaccacttctgatttttttttcctaatagtgatagggaaaaaatattaataggttgatgataacttcattcttcatcccagagtttgcttaatttgctctaatatatatacctcctttctaaattcagtttgaaatggtgtcaccaaataagagtttcaataattactagaatttattcacaagctacctgttgttattttttttttcactgccaaatagtcaagttaaatgggtatttggtcatattgaacaatcctgcaatttccagcatttcatgatctcattaaatcctacaataacctccctagagacagaactgtttttattattctgtttgaggggggagcattttttggggctttcatttctcccttcctgccatttctgaggtcaggagtttgatgcaataattctgccaactattaggtacatttattccattgtatattctctgattggaaaataaaccatgagataagtccgtggtcccaaatagagagaaagacagatgcatgactgcagtccatttaatcaaatttgactttaataagttcatctttagtggattacagtgatttttttaaggca

SEQ ID NO: 692855 - DNA, 655 bp, Homo sapiens
tatatcttttacttgttgctgaaccttctgggagaaattttgaattttaaattactggtcacttatatgtgtgtcctcttttccagacattctaytgaagttttacttataggaattacattttaatttacaataacttcgtcttctctgattccctcccttttagagaagttcataaaattttctaaacagaagatgctctagattctattctattgattacatagtattgcggttttgtcctcagatctatagatccagttttgtcactggaccaattgttgtcaatgttcatagtaaagattttctttaatgtaatctatagttaagaatttttgtctgttgttgtgcttttatgtttgagggcagcactatgataattagtatattttccttacagttgtagtagtctatttattcctctgaacgggagagctgtcgctgagacttcctttaagtaggcatggtttgtcgtcagcagactgaaataaggatgaagcctaaattggaatgcattagggtaatgttacattattgaatagaaaaacagatcatttagacttttttcatttttatatgtgtttgttatacaggtctgtagtgacacttggctatattctgcttttcaaccatatgatcttctcatgcaaatatt

SEQ ID NO: 692856 - DNA, 655 bp, Homo sapiens
tatatcttttacttgttgctgaaccttctgggagaaattttgaattttaaattactggtcacttatatgtgtgtcctcttttccagacattctattgaagttttacttataggaattacattttaatttacaataacttcgtcttctctgattccctcccttttagagaagttcataaaattttctaaayagaagatgctctagattctattctattgattacatagtattgcggttttgtcctcagatctatagatccagttttgtcactggaccaattgttgtcaatgttcatagtaaagattttctttaatgtaatctatagttaagaatttttgtctgttgttgtgcttttatgtttgagggcagcactatgataattagtatattttccttacagttgtagtagtctatttattcctctgaacgggagagctgtcgctgagacttcctttaagtaggcatggtttgtcgtcagcagactgaaataaggatgaagcctaaattggaatgcattagggtaatgttacattattgaatagaaaaacagatcatttagacttttttcatttttatatgtgtttgttatacaggtctgtagtgacacttggctatattctgcttttcaaccatatgatcttctcatgcaaatatt

SEQ ID NO: 692857 - DNA, 655 bp, Homo sapiens
tatatcttttacttgttgctgaaccttctgggagaaattttgaattttaaattactggtcacttatatgtgtgtcctcttttccagacattctattgaagttttacttataggaattacattttaatttacaataacttcgtcttctctgattccctcccttttagagaagttcataaaattttctaaacrgaagatgctctagattctattctattgattacatagtattgcggttttgtcctcagatctatagatccagttttgtcactggaccaattgttgtcaatgttcatagtaaagattttctttaatgtaatctatagttaagaatttttgtctgttgttgtgcttttatgtttgagggcagcactatgataattagtatattttccttacagttgtagtagtctatttattcctctgaacgggagagctgtcgctgagacttcctttaagtaggcatggtttgtcgtcagcagactgaaataaggatgaagcctaaattggaatgcattagggtaatgttacattattgaatagaaaaacagatcatttagacttttttcatttttatatgtgtttgttatacaggtctgtagtgacacttggctatattctgcttttcaaccatatgatcttctcatgcaaatatt

SEQ ID NO: 692858 - DNA, 487 bp, Homo sapiens
  misc_feature 467, 477: n = A,T,C or G
ctccagtctgggtgacagagcaagactccgtctcaaaacaaaacataaataaataaataaataaataaataaataaataaataaaataaggataagaatctgtccaaaatcatgtagctgtgaaatggttgagctgagatttgaccccagcagtctatctacagagctcttactcttaactagtaaactacgctgccttcctgtgaaggaaagttttagagtctcgtcccttttaaatctaggacaggttcttgtcatttgggatggtttagagcagtcacaagaagtaaggggctagttgtaaaataatctccagagggtaaggatatgaagtttgaaaatattccccaggtatcttaattatggcccctcgagtgacaacctctggcttaggggatgtcctacggagagctgagcatgatgccttcagataagtagggaccygctaactgagggttagaaggttnccctgcaatnccaaggcagg

SEQ ID NO: 692859 - DNA, 609 bp, Homo sapiens
ttgtaggtaagataagatagaagtaatcactccagtaccagggccctcataggtcaagtagatttaggggataattctggcctcttacctttcagttacaacaaaattaatcaggcatagagatcggcaagtatgttactacatgtaggtatatagtttgaaacatatataagcactggaaaaactttacaattgtgagttggtctggtgaattatctctgaccttctccctttacctggttacagacataaactctcttcttttccagtttgtctgcatcttgttattgggccacaagaacacacagccagacccggttcggtctgggaacaatgtcctcttatgaaagcatccttgaggctggagctactttttcttttctttgtttttaatgtgagaagggtacgtgtgtgccrtcacagtcaagtcctgttaagttcagtggcttcttgttttgactgcggatctcagaggaccaagagggctcaaaggagaggaaaccagaaagattcctggctaggaaaagagaagagatgaagggaaacttaactattttttcctttcttggaatccaactaggcttagcctgacaggcaaaagacagaatc

SEQ ID NO: 692860 - DNA, 646 bp, Homo sapiens
gatgcttcctttggatatacctcatacctaatccattttgccacctttgcaatagctgatgtttttcctggtgtacttctttttgttaggtgaattatccatggaaaactaaaaattccctccaaaattgttaaattctaagtagtgatttcagggccatagctacgtattttaatagaaatgaaaacataaatgaaaaataccttatgacaccacagcaattaaaaaatcctatctatctggttgtttcatcgaaagagtaattaattactttgtttaactagtctggaaccaatgacagcagggctgctggcaatgcctggtaatgagctgtcacatcaattagtgttggggggtccaattactttaaaaagcatctctattatggctaattctttactcagcagacaattcatgagtggctttgcacatttttaaagaattgattccaagagataactggaccgctaaggattaaagtcctatgctgctgtagacttaaagtttaagtgccttttagtccaaggcagttaaccaagaattctkccaagcgccctaccttcaataagacagatgctcaaaagtacttgttgaatgaccacccctctttccaaaatggaaaataagaaagttaaaatgtaaacat

SEQ ID NO: 692861 - DNA, 646 bp, Homo sapiens
gatgcttcctttggatatacctcatacctaatccattttgccacctttgcaatagctgatgtttttcctggtgtacttctttttgttaggtgaattatccatggaaaactaaaaattccctccaaaattgttaaattctaagtagtgatttcagggccatagctacgtattttaatagaaatgaaaacataaatgaaaaataccttatgacaccacagcaattaaaaaatcctatctatctggttgtttcatcgaaagagtaattaattactttgtttaactagtctggaaccaatgacagcagggctgctggcaatgcctggtaatgagctgtcacatcaattagtgttggggggtccaattactttaaaaagcatctctattatggctaattctttactcagcagacaattcatgagtggctttgcacatttttaaagaattgattccaagagataactggaccgctaaggattaaagtcctatgctgctgtagacttaaagtttaagtgccttttagtccaaggcagttaaccaagaattcttmcaagcgccctaccttcaataagacagatgctcaaaagtacttgttgaatgaccacccctctttccaaaatggaaaataagaaagttaaaatgtaaacat

SEQ ID NO: 692862 - DNA, 819 bp, Homo sapiens
  misc_feature 578, 672: n = A,T,C or G
ttttaataatattttatttaacctaatacgtgaaaaatactatttcagcgttaatcagtacaaaagttattaatgaaatttgtgtgtgtgtgtgtgctaagacttgaaaatctgggatgtattttatactttatagtgcatctccattcaaactagctgcatttcaaataggcacatgtggctagtggttaccatattggatggcacagctcctgcagtctaggacctaaatacactaaaagatacagtggtttaccaatacttttggataaaggctatgtgtcaagaacctttgaaacatactggaggttatttcattacatgactcaaggtttctcatctggagaattattggcgttgtaggtgggatcattcatgcattgcaggatgcttagcatctctagcacccagagtgcaagtatgggtagcacaacaatcagaagatgccctctgtttgtagagaggagtggtatcacagcttccactagagatgagaactgttaaagtttgagagacctctagagcactaacagataggaactaaagtaacaccagaagattttgaagatgtttattgngcccatttccactggaatattttggrtgtttgaaagatacttgaaactctttctctgtcattgagctactggtaccttaccatagatgaaaggngaaaggttaaggtttggggtagacaaagtaacattggtccttttcagaatgccctgaattcataaagacttgacaaatcagaattggctatacctaatgcctactttggctaacagggatcaaatctacctttgggctctttccgat

SEQ ID NO: 692863 - DNA, 635 bp, Homo sapiens
ttttagtagagacagggtttcacagtgttagccaggttggtctcgatctcctgacctcataatcckcccgcctcggcctcccaaagtgtgggattacaggtgtgagccaccgcacccagccaagactagcatcttttttaattgcccacacaaataaatcacttaaggcatttcaaaaagatctccatttcagctattgttgcttataaccatcgtgggttaggcaggaccacttacctcagcacttgtaaatatgaagacttttaaaaataacttttcatggctgggtgcagttgtgtctggaattggtgggttcttggtctcactgacttcaagaatgaagccgcggaccctcgtggtgagtgctacagctcttaagggggcgcgtctggagtttgtcccttctgatgttcagctgtgtttggagtttcttccttctggtgggttcgtggtctcgctggctcaggagtgaagctgcagaccttcgcagtgagtgttacagctcttaaggcagtgcgtctggagttgttccttcctcccagtgggctcgtggtctcgctggcttcaggagtgaagctgcagacctttgcggtgagtgtcacagctcataaaagcagtgtggacccaaagagcca

SEQ ID NO: 692864 - DNA, 635 bp, Homo sapiens
ttttagtagagacagggtttcacagtgttagccaggttggtctcgatctcctgacctcataatcctcccgcctcggcctcccaaagtgtgggattacaggtgtgagccaccgcacccagccaagactagcatcttttttaattgcccacacaaataaatcacttaaggcatttcaaaaagatctccatttcagctattgttgcttataaccatcgtgggttaggcaggaccacttacctcagcacttgtaaatatgaagacttttaaaaataacttttcatggctgggtgcagttgtgtctggaattggtgggttcttggtctcactgacttcaagaatgaagccgckgaccctcgtggtgagtgctacagctcttaagggggcgcgtctggagtttgtcccttctgatgttcagctgtgtttggagtttcttccttctggtgggttcgtggtctcgctggctcaggagtgaagctgcagaccttcgcagtgagtgttacagctcttaaggcagtgcgtctggagttgttccttcctcccagtgggctcgtggtctcgctggcttcaggagtgaagctgcagacctttgcggtgagtgtcacagctcataaaagcagtgtggacccaaagagcca

SEQ ID NO: 692865 - DNA, 657 bp, Homo sapiens
tgagagagaactgggggaccctggagagaagcagaaaccagaacaggtttctagaactggtgggagagaacaggagatgttgcacaagcactcgccaccaagaggcagmcccgagatggcaggagcaacgcaggaggctcagcaggaacagaccaggtcaaaggagaaacgcctccaagcccctgttggccaaaggggagcagatgggaagcatggagtgctcacgtggttgagggaaaatccagggggctctgaggaaagtctgcgcaagctccctggcccccttcccccagcaggctccctgcaaaccagcgtcacccctaggccctcgtgggctgaggccccttggttggtggggggccagcctgccctgtggagcatcctgctgatgccgcccagatatggcattcccttctaccatagcacccccaccactggagcctggcaggaggtctggcgggaacagaggtgagtggcggggtctagtgctctgcctccaggctgggagggcatggcccaggaggggcagccctgctgggtggaagggcactgcatctctactgcacagttcctgagctggggaagagacaagaagctgctgccacagggcacgccaaagcccagcccccgggggaggacttgggataccccctcttc

SEQ ID NO: 692866 - DNA, 663 bp, Homo sapiens
ggaaccccattattttctgaaccattgattgctaaagagaaggataaactattttctctctctctttcttctttagtttcttcttttcctcttcctcctgcttatttatgcctccagtatcctgtggttccacgtatggaagatggaatttacttttggaggaagctttttatacaagggaaggatcccttggtgagtgctttagtttatgcagtagtaagttacattmatattcatgtatccttgggaggctctgaaatttgtgaagtaaatgcaaattcctcagcttgagatagtatgatttcatttaattatgtcaaatatatcctcatttttgtatttacctgagtgataatgttgatattatttagcattttttggtggatttatccaacatattggagagtgtgggggctgtggacttagagggtgaagagaagatcatggagagctcttctctgtgaaacagaagagtgaggtcatgcgatgaggtgggggtcaagtgtggaaggagttggtcagtagggaattcctgtaaaagcactggataatggacagaacagtaatataaaatattcagtttaaagattttcttttactgaattgtaatttttgtgtgctatcctaaatgtttttgaagtttgttaaacattacagcctaca

SEQ ID NO: 692867 - DNA, 645 bp, Homo sapiens
tttggccctcagaggttcattcctacagatttcaactactgtaaatttctagctactgagaggtagaaaatggttattatcatgattataatgattattagaaacacacacacacacacacacacacacacacacacaaactcaccaaggagttacaaaatctatggagaccagaggccaactatcatcacctcatgtctgctctcaccaacagccttgcatttttcagagaactatctaaaaaaatagtcagacaccagtgtgatcactatctcctatgccaaacctattgggaatgaaacaagcagtattaccataaatgagaacattgaggcttacctttcaaggcttattctggtctcagaaattaattagatacgattattttctattgaaatgaattttagctaacataaaagactagtcctttactagctggtcttagggtaaaggtcgtacacatgagtcttaacctactctctgtcatagctaaagtcagctgaaaatccaaaattaaaagtatgccaaaaatcctaagtacaatcttttggaagtctgctgtgaaaaagcctttaaggatgtactaacttgaagtctaagygcaaggtcataagagctctaacgctgttagatcttcctcgtttg

SEQ ID NO: 692868 - DNA, 891 bp, Homo sapiens
ggaatgtccagtccagactgcctcatttgctctttcttggaataggattaggaatccctgtttcttcttggctaaataggggtcagtggagcactgcagggcataaagtaacaagtcaggcaggttacacttagaccatgactgtcaatgagtccatgagtgtcagaccgactacagtacatgaccaccctctcgggctgtggaaagtaatgtaatggggaataggagcccaatgtaatctaccttctcatagctttgcctcatttggaccaaatctttaagggattagacctctgcaaagatctaaaatgaaattcaggctgctgtgcttcagtaccagcagttttcactccctactcttcttggggctttagctgaactttgaggggagccctgctctgaggagctgctgccctgctattggctgctgtactggggcagcctgagtgacagctgctggtgtgggccctggcagttgctgctgggctcattgcagctcagacacagcaaaagagcctagaacctgggtcctagtttgcacctagaatatgaggcaagtggcgagagtgatcgtgttcctgaccctgagtgagttattttgggatgaagaggaatrggatctgggcctgatgatgctggaaaggaatctggaactttgcctgctagcagttgctctttatccaagatgtagagggatagcttcagggttccatttttctccaggcagctcctgagcatttatgtgagatgtgtctcagggcagcaaagattttcggggtttctaatccctagggtctatccatgggagggagatagtaaacctgacacttctgtgtatgcctgggataaatatttttgtactgaaacataaatgagaagtaaattgtatgt

SEQ ID NO: 692869 - DNA, 845 bp, Homo sapiens
agccaggcattcctgggtttgaatctgagatctcctgctgtaaagagtttgaccttagtcaaatacttttggcatttgagctttaatactttgtctataaaatgagggtcataatactatttttccagggttcttctgtggttaaaagactatcactaagaatgtcctggtttaatcagcactcatcagattaatgctatctatatcctgcattatcattgctattaaacctcacctgccaacccaaaaagctgtttggaggatgacatcacataccgggtgttcagactcttcagaaactgaaaaagacctgagccaatacaagaacatttttttgggagttaaaactcttggtctgtgacaaamagatcaataaattgatcaataaattgatctgctatttctctgtagaaagatcacatgatttttttaaacaaaatgatgtcccctcagaaggggagatgttgggaggggaaagggagatgcaaaattacttgttgggtacaatgtacactacttgggtgatgggtgcactaaaatccttgaactcaccactatagaattcatctatgtaaccaaaaaccacgtttacccctaaagctatgaaatagaaaaaaattttaaaaatgaggccagggtcataccattatttttttctctgagagagaaacagccaaaattatttcatttggaactcattagtacatttactcagcaaatgtttattttgtattatgatgtgataggcaatgatgtaatggaggaagtaccttattctccaatatagataagttttctgcacaaacgcaggttttattcttctgtgggcagacaacacaaacaaa

SEQ ID NO: 692870 - DNA, 1190 bp, Homo sapiens
aacagggacagcatcacttactcaaagcatgaattacagcaaaatggaagctaggaatggaacacagacattgtggccccttgtcacttgctttttccatgaaggatgtaaagtaggattcagtgtttgaaaaaaggagtggtatgttgtaattttaaactaaattatacttttattacttaattatatgttcattagaataaattaggagatataaacacccagaaaacatagaacactcctataatttcataacctagaaatgatagctattcgcatgcaataaaatttttggtgcacatgtaaagctatatttttgtataaatgtggtttataatacatcaagtatttattagcacacttttctttcaactttatatttaggtattttcaactcaggaagcaaatattgaagaataattttaaattattgcctagtttccattacataaatatgcttttttaaaaactcttttttttggtattgtttctacttatacagtattacagataatgtttttattaacatcattaaaggtgtagttttaatggaagtgaagttgctggaataaagaaaaacacatgatactgaatcccttatttccatggagctatttctcaccaaactgtaatttcaacagtagcacatgatgatgctaattttccaatattttaccaattgtaaacattattattttagattagcttccattttgttaagtaaaatattgttttttattattcttttcttttaatttgtgattttatacctttgattattaaaataaataaataaaatgagatgagaaaacatcagatgccatcacacagaayaggtatcctttcatacagtaacatgtattttttgaaagtgtgaaaaatactgctttggtccaagctaccttctaactggtctctcttttctcaaggcaatcaattctctatgtccttgctacttgaagtgtgagccagcattgtctgaacttgtactgattctcaggctctaccctaggctgattgaatttgaatctgcattttatcaagatttccaggcgattctatcacatcaaagtttaagaagcacccatctgatgagttgccagaatgattttttaaagtataaataaagagctttctccacttgtcaaacgtgcttcaatggctttctactgctcctggaataaagtgtg

SEQ ID NO: 692871 - DNA, 1190 bp, Homo sapiens
aacagggacagcatcacttactcaaagcatgaattacagcaaaatggaagctaggaatggaacacagacattgtggccccttgtcacttgctttttccatgaaggatgtaaagtaggattcagtgtttgaaaaaaggagtggtatgttgtaattttaaactaaattatacttttattacttaattatatgttcattagaataaattaggagatataaacacccagaaaacatagaacactcctataatttcataacctagaaatgatagctattcgcatgcaataaaatttttggtgcacatgtaaagctatatttttgtataaatgtggtttataatacatcaagtatttattagcacacttttctttcaactttatatttaggtattttcaactcaggaagcaaatattgaagaataattttaaattattgcctagtttccattacataaatatgcttttttaaaaactcttttttttggtattgtttctacttatacagtattacagataatgtttttattaacatcattaaaggtgtagttttaatggaagtgaagttgctggaataaagaaaaacacatgatactgaatcccttatttccatggagctatttctcaccaaactgtaatttcaacagtagcacatgatgatgctaattttccaatattttaccaattgtaaacattattattttagattagcttccattttgttaagtaaaatattgttttttattattcttttcttttaatttgtgattttatacctttgattattaaaataaataaataaaatgagatgagaaaacatcagatgccatcacacagaataggtatcctttcatacagtaacatgtrttttttgaaagtgtgaaaaatactgctttggtccaagctaccttctaactggtctctcttttctcaaggcaatcaattctctatgtccttgctacttgaagtgtgagccagcattgtctgaacttgtactgattctcaggctctaccctaggctgattgaatttgaatctgcattttatcaagatttccaggcgattctatcacatcaaagtttaagaagcacccatctgatgagttgccagaatgattttttaaagtataaataaagagctttctccacttgtcaaacgtgcttcaatggctttctactgctcctggaataaagtgtg

SEQ ID NO: 692872 - DNA, 2268 bp, Homo sapiens
tggggtgatggtttcgggatgaaactgtttacctcagattatcaggaattagttagattatcttaaggagcgagcagcctagatccctcgcatgcgcggttcgcaatagggttcgggctcctatgagaatctaatgccactgctgatctcacaggaggcggagctctggcagtaatgctcacctgccgctcacttcctgctctgcggccaggttcctaacaggccacagaatggtacagattccctgccgccaggggtttgggacccctgtttgggtggtagcagaggtttccaagcagtttctttaaggttttagctcaattgtattgcggaagatttgaaaattaaacatttttcattatgtacacaaaacttaaaagaagtttacgaccaactccctgaagagtcacctctgtagaactcatctgcttcaatgcaacgcagtccaacatagcataaagattatgcaggcggtaaccacctttccagagaactgagtgaaaagagctctttttaaaatgaggagtttagacgaaactggaaggtgacccatgaagagatttaggcatggtctctttttcactcttccaactgcaattatattcgccaagcccagatgaagctgatgattcaagttccgttagccatgttcattggtctaactacggggaaaagtcagccatagatttcaaagtgtgttcactgacttgaccaattactttatttctcagtacttacaaagatttttatcttgggaaagagaggataaaaatacaactgtattggagagtttaaacattaaaatcaactgagattggtcagctaaatggtcaaataaagtttttgcacctttttaataaaaagttttgtagccataaaattattgtgatgaaaattttgtaacataggaattaagttaatttatcaaatgaacaaagtcaaatacaaaatagtactatgccacttataaaacaaaataayatatgtatatagaaaaatatggatgggaacacacgcatgtttaggttaatttctaagagcaccgtaattatttagtagttgttttcatccattataacatttccaaggctatttcagagttgtgccaaaaacagttatgttaaaattattgtaaaaattattttctcctcttctgtcatagccttggcccttttgcacacggatcctctcaaactgacctttttttcgggggaggggaggggaaggtgggtctttctcccacaaagttttccttcctttctctttttttctttcatacgttttctgtgtttttctgctacaatcatgccaaagtacaaaataatactaattaacaaaatcacaagcactagaaaacagacatgaattataaaaggcctcataaataattctggaaagatcaaaaagtgacctttacagccagtaggggagtgatttcatccatcaaaacagctgccagagatgattcacatcagaagtaaaaaaacaaaaaacaaaaaacaaaaaccacaaacaccaccttaccagtataattaggatctcgttttgattctttaccaaatttaaggagagtatggtctgatatttcttggtttccctcactgattgtttctcttttcttcccagtgtatcttttattaagcacacatgaggggctgtcatcctttgattctccaatattttctgtctgggagaccccatgtacagaaacaaggggtggactgacagtttcaatttgactctagtgtcaaattgaagtgtttggctacttcctccaaaatctttcttcataggattttttttttgaaggttttctcaaagactacacctaactactgtacaaaaacacatcagtagagtctgcttaaaagacctccttcaaggtttcagtgagcatagatcgcaccactgcactccagcctgggtgacagagtgagactccatctcaaaatataaaatgaaataaaataaaaataaaaataaaaataaaataaaagacctccttcagaaggcattaatcatgtctttcttcctttttatctctctttctttccttccttccttccttcctttcttttttttctttctttttttttgtcacatccaatctgtatctccatgctgtctagagtgattagagtgattctctatcctttacagcaatggggcgcattagtccacatctctgtttttcttgctcactcacaggagataagattaaaaacaggtaaggataatattgttttatgaagcaggtattataatttc

SEQ ID NO: 692873 - DNA, 2268 bp, Homo sapiens
tggggtgatggtttcgggatgaaactgtttacctcagattatcaggaattagttagattatcttaaggagcgagcagcctagatccctcgcatgcgcggttcgcaatagggttcgggctcctatgagaatctaatgccactgctgatctcacaggaggcggagctctggcagtaatgctcacctgccgctcacttcctgctctgcggccaggttcctaacaggccacagaatggtacagattccctgccgccaggggtttgggacccctgtttgggtggtagcagaggtttccaagcagtttctttaaggttttagctcaattgtattgcggaagatttgaaaattaaacatttttcattatgtacacaaaacttaaaagaagtttacgaccaactccctgaagagtcacctctgtagaactcatctgcttcaatgcaacgcagtccaacatagcataaagattatgcaggcggtaaccacctttccagagaactgagtgaaaagagctctttttaaaatgaggagtttagacgaaactggaaggtgacccatgaagagatttaggcatggtctctttttcactcttccaactgcaattatattcgccaagcccagatgaagctgatgattcaagttccgttagccatgttcattggtctaactacggggaaaagtcagccatagatttcaaagtgtgttcactgacttgaccaattactttatttctcagtacttacaaagatttttatcttgggaaagagaggataaaaatacaactgtattggagagtttaaacattaaaatcaactgagattggtcagctaaatggtcaaataaagtttttgcacctttttaataaaaagttttgtagccataaaattattgtgatgaaaattttgtaacataggaattaagttaatttatcaaatgaacaaagtcaaatacaaaatagtactatgccacttataaaacaaaataatatatgtatatagaaaaatatggatgggarcacacgcatgtttaggttaatttctaagagcaccgtaattatttagtagttgttttcatccattataacatttccaaggctatttcagagttgtgccaaaaacagttatgttaaaattattgtaaaaattattttctcctcttctgtcatagccttggcccttttgcacacggatcctctcaaactgacctttttttcgggggaggggaggggaaggtgggtctttctcccacaaagttttccttcctttctctttttttctttcatacgttttctgtgtttttctgctacaatcatgccaaagtacaaaataatactaattaacaaaatcacaagcactagaaaacagacatgaattataaaaggcctcataaataattctggaaagatcaaaaagtgacctttacagccagtaggggagtgatttcatccatcaaaacagctgccagagatgattcacatcagaagtaaaaaaacaaaaaacaaaaaacaaaaaccacaaacaccaccttaccagtataattaggatctcgttttgattctttaccaaatttaaggagagtatggtctgatatttcttggtttccctcactgattgtttctcttttcttcccagtgtatcttttattaagcacacatgaggggctgtcatcctttgattctccaatattttctgtctgggagaccccatgtacagaaacaaggggtggactgacagtttcaatttgactctagtgtcaaattgaagtgtttggctacttcctccaaaatctttcttcataggattttttttttgaaggttttctcaaagactacacctaactactgtacaaaaacacatcagtagagtctgcttaaaagacctccttcaaggtttcagtgagcatagatcgcaccactgcactccagcctgggtgacagagtgagactccatctcaaaatataaaatgaaataaaataaaaataaaaataaaaataaaataaaagacctccttcagaaggcattaatcatgtctttcttcctttttatctctctttctttccttccttccttccttcctttcttttttttctttctttttttttgtcacatccaatctgtatctccatgctgtctagagtgattagagtgattctctatcctttacagcaatggggcgcattagtccacatctctgtttttcttgctcactcacaggagataagattaaaaacaggtaaggataatattgttttatgaagcaggtattataatttc

SEQ ID NO: 692874 - DNA, 1626 bp, Homo sapiens
aaattgtccccattgcacaaaatgtcctttctccatctccacagactaaacttctgtctcaacctcctatgactgtacttttggaaaggaaagtggggaacacagtaggtgagaaaagacatctgttttgctggttgataatctagaagatgtggtctagacattgaattattctcrtttcataatttataagaacaactattaaaatgcccagtggtcctggataatgtatagtcaccattcttatcttacaagacatagctgtcctgatgtaaagatacaacgtgtgtaatctttccttctctaaacttctcaatcactctttaatctttgttgctacttaccacttgatatgttgcattttgtttctgaaaattcatgtctataactataccatgatcagaatggctaaagtgaaaaagactacactaaatattgacaagaacatggagcaacagaaattcacatattcggctggaaggaatgtcaactggtacaatttcaaaaacatttggcaatatttactatagctgaacatgtgcattccctgtgatgcagaaattcaatttctacctatatgcccaataagaagttacatatattcatttgtaaaacatgtacaagaataagaacatgtattacatcagtgattataatatcctaaaactggaaagcaactcagatgcacatagcagtttcaaagataaataaagtacgataatgaaatactacccagcaatgagaatgaataaacttgccatatgctcaaggcagattgaatcacacaaatattactgagtgaaaaatgaaagcaaaagaaattcaagaaaaggcaagactaagctatgaagttgtaagtcaggagagtgaagataggggctatctttacaaggagatagtgactcagaaagagtacaagggaggcttctggatgttggcaatgctgtttctcaatttgggtgctggttacataggcgatttcactgcctatgtatgaaaattcaccaagctctacatttaagttttgtgcactattctgaatctatattatactttaaaagtttttaaaagaaaccttatccatcccattgactaaattttgagaacatacttcttattcaatccatcttcatagccccactgcccttcacattagccttcatttaaaacatgcttcataattgttttctcaataaaggactgagctacatgtttaaaaagatgctccggtcccaggtcctaggatctagtatgttatcagatggacttgaacttccctgtgtagcttgctaattactgctttgagtttagacctttggtattgatgtggtttttctctgtctccactcaaatctaatgctgaattgtaattcctagtgttggaggagaggtctggtgggaggtgattggatcatggaggtggcttctaatggtttagcaccatccacctagtgctctctcgtgatagagttctcaagagatctggttgtttgaaggtgtgtggcacctccccctttgctctctctctctctctctcctgctgggcatgtgaaagtgtacttgcttctccttcaccttctgccatgaatttcttagtttcctgaggcctcccagccatgcctccag

SEQ ID NO: 692875 - DNA, 883 bp, Homo sapiens
atgcgaattgttagatgatttgtctgtatattgccatgacttgctcttcttctttttatatttttttctttcccgttgagtgacctacttgatttacttaatttctgggtggatattccttccattacaagtcctagcctaagacttaaggaaaatgagcttgcttttctactttcctgactctggttccaaaggccgaattatttccattggaataaaaacttcttgattcttaacccttaaggagacttttagaaagtattatcctcaattgtaatattggtcttttcaaaattcacccatgagagcaaaatcaggaccctgttctgggaagaagcatgactacgtcccagggagccaggccatttggccatgaaactgtgattgtgaaaagacgtagatgaaagcatatgactttcacaaaaagtaatgacaagaagagggatttcttattcttgggacaatttggagagaattagtcttttcttcaggaaacatgtgcctaaatatcagaaaagaagtcatagaagaagaaagaaaatctcgttttcakttcattttgatgacttaaagatggatgggcaattttcctggggaatattaaggtttaaaagaacataaattttaggaaaagtttccagttattctcaataataagacagatataaaactattttccaaatctataatacaaaattgccctgtgataaatgacaggaaatttccgaaggtgatgggttgaaaacggtgtgatgtggtccctatatttctaaattaaattttcaggtagaataatcatagtgagataaaaaggaaatttttcagcctcaaaatataaaaggttttaaagtcatctattaaaagtctttgatatacattttgg

SEQ ID NO: 692876 - DNA, 638 bp, Homo sapiens
  misc_feature 373: n = A,T,C or G
ttatattgttatgacattttgaagtaattggcgattattttacaaccaagagaaatgtataaaattaattttgcctggctttatgtgaattgtcatttctattcttttcttaaaggcatgcacaggggaaaagtttctgcattttacttttctattcaaaatattttatctcaccacgggaaagagaacaaaaaacaaatgcccagttttattttattcaggaatcctttgtgcattgaagactttagattcctctctgcggtagacgtgcacttataagtatttgatggggtggattcgtggtcggaggtctcgacacagctggggtatgtktttaccacataagtgtgtatttttgtttttatacaatttnaagataccaagaatttcatacaagcatataaggcataggcaagcaatttactctgattcttttcatgttctatttatgttgatttcatgttatgttcatattgtattttaaatcaagtcttccaaaacttaaaaacttttttccctttattttattaactatattatggtaaagtcgctcacaacttgggacagcttgaaatagtgaaatagatgtggagtcagacttgaattttactcaaacttttaccgctctctagatttga

SEQ ID NO: 692877 - DNA, 638 bp, Homo sapiens
  misc_feature 373: n = A,T,C or G
ttatattgttatgacattttgaagtaattggcgattattttacaaccaagagaaatgtataaaattaattttgcctggctttatgtgaattgtcatttctattcttttcttaaaggcatgcacaggggaaaagtttctgcattttacttttctattcaaaatattttatctcaccacgggaaagagaacaaaaaacaaatgcccagttttattttattcaggaatcctttgtgcattgaagactttagattcctctctgcggtagacgtgcacttataagtatttgatggggtggattcgtggtcggaggtctcgacacagctggggtatgtgtttaccacataagtgtgtakttttgtttttatacaatttnaagataccaagaatttcatacaagcatataaggcataggcaagcaatttactctgattcttttcatgttctatttatgttgatttcatgttatgttcatattgtattttaaatcaagtcttccaaaacttaaaaacttttttccctttattttattaactatattatggtaaagtcgctcacaacttgggacagcttgaaatagtgaaatagatgtggagtcagacttgaattttactcaaacttttaccgctctctagatttga

SEQ ID NO: 692878 - DNA, 607 bp, Homo sapiens
cctcagcctccccaaatgctgggattacaggtgggagctactgtacgcctggccttatctaagctgtttccctgaaaatscccgtcttgggtaatgattccattggccccaccatgccctgtcctgccttcctggctgtgcccaagcttggtccctgcctgcctgcctcactctctgggtctcgagctcctgtgacacatgactcctctctcttcctggagtgatccaagccctgccacttcctgactttgcccacactgtaccctctgcctggggcaacttcatgtctgcccattgtcccttaggcctcagcccaggcacaagcccctgcctccggaggtcatccaggcctcaccaggctacaccctctcgtaaaattggattccctcccttcagggcaggtttataatgaaatcctcctcagaggccaggtgcggtgacacccatctgtaatcccagcactttgggaggctgaggtgggaggatcacttgaggccagggggtcgagaccagcctgggcaacataagagagactcttgtctctcttgtctctataacaaatttaaaaattagctcaccaggccaggctcagtggctcatgcctgta

SEQ ID NO: 692879 - DNA, 607 bp, Homo sapiens
cctcagcctccccaaatgctgggattacaggtgggagctactgtacgcctggccttatctaagctgtttccctgaaaatgyccgtcttgggtaatgattccattggccccaccatgccctgtcctgccttcctggctgtgcccaagcttggtccctgcctgcctgcctcactctctgggtctcgagctcctgtgacacatgactcctctctcttcctggagtgatccaagccctgccacttcctgactttgcccacactgtaccctctgcctggggcaacttcatgtctgcccattgtcccttaggcctcagcccaggcacaagcccctgcctccggaggtcatccaggcctcaccaggctacaccctctcgtaaaattggattccctcccttcagggcaggtttataatgaaatcctcctcagaggccaggtgcggtgacacccatctgtaatcccagcactttgggaggctgaggtgggaggatcacttgaggccagggggtcgagaccagcctgggcaacataagagagactcttgtctctcttgtctctataacaaatttaaaaattagctcaccaggccaggctcagtggctcatgcctgta

SEQ ID NO: 692880 - DNA, 607 bp, Homo sapiens
cctcagcctccccaaatgctgggattacaggtgggagctactgtacgcctggccttatctaagctgtttccctgaaaatgcccgtcttgggtaatgattccattggccccaccatgccctgtcctgccttcctggctgtgcccaagcttggtccctgcctscctgcctcactctctgggtctcgagctcctgtgacacatgactcctctctcttcctggagtgatccaagccctgccacttcctgactttgcccacactgtaccctctgcctggggcaacttcatgtctgcccattgtcccttaggcctcagcccaggcacaagcccctgcctccggaggtcatccaggcctcaccaggctacaccctctcgtaaaattggattccctcccttcagggcaggtttataatgaaatcctcctcagaggccaggtgcggtgacacccatctgtaatcccagcactttgggaggctgaggtgggaggatcacttgaggccagggggtcgagaccagcctgggcaacataagagagactcttgtctctcttgtctctataacaaatttaaaaattagctcaccaggccaggctcagtggctcatgcctgta

SEQ ID NO: 692881 - DNA, 645 bp, Homo sapiens
gcctgggagatgccgtgtgtgatccgaaagaggtcaggggacattttacctaagacttgcttcattgttaagtttttttcttaaaggtgttgatctacgcagtgtaaacacttgcaagctcccatcattggtcacaaggctgtttgtcttgtagtcattgtttatggttctagaaggctctctccccstggaggggaagggccctgggacagagatcacaggagttcttagggggcactcgctagtagcctccttccctctgctgatggggccttcctcccaggggatctttgggccttaatgccgtgcctttgaggcctggcccagagcccctcaaagagccaggcgaggagagctgacccaagtggagtcaggctgaattttccttctcaagagaagcacatcccagccactgtcctttcaaaggccatcaggccggccgaagacgaggatgtagcagactggctcacagcagtacccactggggcggagctccagcctgcagctgtgccagggccgggcatctcttccctgagtggtggctgcccccatgagggcaaagactgcactggctcttcctgtgcaggcgagagcgggctgggagcagggacaccacgtggaggcagccctggtggcaacggggct

SEQ ID NO: 692882 - DNA, 922 bp, Homo sapiens
cttgtggggccaaaagggctcagaattcacctcccctctactcctgctctgagaagccatcatctaagtgggcctcaattgtacctatttctattcracctctaaattctcttgctctgtagctctgtgtctcctacaagcatgccagtctggaacatgacaactattttgaatgtaactaaaggtatcactgaaccagttcattatttgcaaattatctttccttgcatggaatattcagatgctggagtcattgggaacagagatggccaagcagcaactctgggttgtgaaccacatacagccccgctattcttctatgtcaccgacagaccctgaaacaaggactattttgctttggagactaagcagctccccaccagtcaggaatgactctgcttttactttaggctgagaggtcagaaggatcatgccctcagtattctcctctccaagacagagtgtggccactctccatctcagtccctggaagttgtccagagttccctgagaatccctgctctgggacagaatcaccaaggctcatcctcaccagctcccaacaggctccagcagggctttcctgccaggtgcagggcacaggaatggctctgcctgtctcttagttagagggaggccatgcaatgatgtttgtataagagggactgggattctgggtctccattaaagtatttgataacattttctttgtttttgttttatttggccatctcaccaattaggacagcaatccctttacagttatattgttcttggcacttgggaaggtttttgtggttaagtcacattaagaaattgtgcctttttttcctgttcagatataacccaaggcagtgaaagaaacaacaataattttgaaagcagttacttatgcatcctatgataaaggtgttaagtttca

SEQ ID NO: 692883 - DNA, 922 bp, Homo sapiens
cttgtggggccaaaagggctcagaattcacctcccctctactcctgctctgagaagccatcatctaagtgggcctcaattgtacctatttctattcgacctctaaattctcttgctctgtagctctgtgtctcctacaagcatgccagtctggaacatgacaactattttgaatgtaactaaaggtatcactgaaccagttcattatttgcaaattatctttccttgcatggaatattcagatgctggagtcattgggaacagagatggccaagcagcaactctgggttgtgaaccacatacagcyccgctattcttctatgtcaccgacagaccctgaaacaaggactattttgctttggagactaagcagctccccaccagtcaggaatgactctgcttttactttaggctgagaggtcagaaggatcatgccctcagtattctcctctccaagacagagtgtggccactctccatctcagtccctggaagttgtccagagttccctgagaatccctgctctgggacagaatcaccaaggctcatcctcaccagctcccaacaggctccagcagggctttcctgccaggtgcagggcacaggaatggctctgcctgtctcttagttagagggaggccatgcaatgatgtttgtataagagggactgggattctgggtctccattaaagtatttgataacattttctttgtttttgttttatttggccatctcaccaattaggacagcaatccctttacagttatattgttcttggcacttgggaaggtttttgtggttaagtcacattaagaaattgtgcctttttttcctgttcagatataacccaaggcagtgaaagaaacaacaataattttgaaagcagttacttatgcatcctatgataaaggtgttaagtttca

SEQ ID NO: 692884 - DNA, 922 bp, Homo sapiens
cttgtggggccaaaagggctcagaattcacctcccctctactcctgctctgagaagccatcatctaagtgggcctcaattgtacctatttctattcgacctctaaattctcttgctctgtagctctgtgtctcctacaagcatgccagtctggaacatgacaactattttgaatgtaactaaaggtatcactgaaccagttcattatttgcaaattatctttccttgcatggaatattcagatgctggagtcattgggaacagagatggccaagcagcaactctgggttgtgaaccacatacagccccgctattcttctatgtcaccgacagaccctgaaacaaggactattttgctttggagactaagcagctccccaycagtcaggaatgactctgcttttactttaggctgagaggtcagaaggatcatgccctcagtattctcctctccaagacagagtgtggccactctccatctcagtccctggaagttgtccagagttccctgagaatccctgctctgggacagaatcaccaaggctcatcctcaccagctcccaacaggctccagcagggctttcctgccaggtgcagggcacaggaatggctctgcctgtctcttagttagagggaggccatgcaatgatgtttgtataagagggactgggattctgggtctccattaaagtatttgataacattttctttgtttttgttttatttggccatctcaccaattaggacagcaatccctttacagttatattgttcttggcacttgggaaggtttttgtggttaagtcacattaagaaattgtgcctttttttcctgttcagatataacccaaggcagtgaaagaaacaacaataattttgaaagcagttacttatgcatcctatgataaaggtgttaagtttca

SEQ ID NO: 692885 - DNA, 977 bp, Homo sapiens
aaggtascaggagggagagacacactcaggggctcagctgggttcctggagatcaacctttggggtctgagcccctctgagagtcgagctcctttcctgcgaggccccgtctaggaggggcctcaggaaaatcggggctgcccagctggttccgcaactccccccagttctgagggaggcttcaggggattacagacggtctcaagagggaggcccagccagtcccgcggcccctgacaccccatcaggccgctcaggcccagcagctccatggaggacgccggcgaggaccccaccacgtttgctgcccactctctgcccagtgacccccgtctcttggccactgtgaccaacgcatacctgggcacacgagtgtttcacgacacgctgcacgtgagcggcgtgtacaatggggctggcggggacacgcaccgggccatgctgcccagccccctcaacgtccggctggaggcccctgcagggatgggggagcagctgaccgagaccttcgccctggacaccaacacaggtagcgccacctggcctgcctcacccctgccccaggcattgttccaggtcggtggggcaaccacagcatcgaatcccaccagcacctcctgagtttacacaggaagtctcactaagacaggaggccccagaggcccgcagggtccccccttccctccacctggaggcctcctgtgcagctgtagcgggaacgagcagccgagggcccagagggatccgcctcattgtggggagaggcagcggtcgggtggtccactcctgccccagagaggccatagcttggcaacccacctgccttcgcttctgcctccccaggctcctttcttcacaccctggagggcccccgcttccgggcctcccagtgcatctatgcgcatcgcacgctgccccacgtgctggctttccgagtgtccatcgcccgcctggccccggggagcgggcccatcacg

SEQ ID NO: 692886 - DNA, 659 bp, Homo sapiens
cccctgaaatagtttgatccagagttcacatattgctaagaatataggtttgcccttgtgaccagtgtaacagtctcccaaaccagatagaagtgcaaaaggtcaagctggtatggcagatttgctcagtgaagtcagtggagcccaagatccttctgtcttgtttgtccatcatcctagcatgttggtcacacttgcgtggtccacagtggctcatggccaagctgctttctagtcaacaagaaggggagtgtgaaggagcaagggagaacatggagcaagggagaagaacatgggctccccttttggggcatgacttgtaagttttatacatttcttcccttcacattctatgggaccatctgctccaagataagctcagaaattgagagtcaagcacttagaatgttttataacagtatggcatcaccttaaaatccaaacacatgtttatttcattatttggagatataaaggcccatttgcaaatcagccacccagctgcaaagaagaaaatgtgcttgttttctggactgccgtgtgcccgtcaaatatggaattattgtggggggccagcagtatccgtgcaggcgcctttccaactccygtgtcttggttaactttgcttctcaaatagtgtcaattatttgccttattgt

SEQ ID NO: 692887 - DNA, 659 bp, Homo sapiens
atcaaagatctaattcaaatgacatctactcacagactcagtggtctgcttcatggattcaaaagttaatcaaaattcatactacaaatgctgttactaatcgccacagcagcaaactagaacccctccttgcccaccacttttacactccacccccagagaataacagacaacatgctgtttcttccagtaattcttaggatgttattgatgtattgtttatttttcatagagtccatgcacttaggaggaaacagggcataatatatatgcactttcagaaaactgttttaatgttataaataatatccaaaaccattaatgagttttagaggtggctgccttgcagcrgggaattacttaagcactggaaagccaatcaacaaatatttattttgcaacttctgtgtgcatgcctaaaaaatcttattccattagtaaaataagtccatctagaaaaatacattaattcaacgcatatttactccacactcacatgttgcaccacagctccaagtgtgaatgaggcagagaccctgcactcgagttaggaagacacagccaactgaactgatgacttaaacgcaaagggacagagcacaggctatggcaggattacagaaaaagggctcctcatcaagccttgagggaatcaggga

SEQ ID NO: 692888 - DNA, 585 bp, Homo sapiens
caactagaaagagattttcatggtcccttctacccagtaacagcagagcacagtggtttggaacatgtgccgtgcagtcaggcaagtgtgcctcaaatcatatctaccacttactggccaagtcatcttagacaagttactacattttccagtacttctgctgttttctcatttgcacaacagtgcccgtctcataaagtttcgtgagggttgtgatttaatagccgtatagcacatgccttagcaagtgtcgtcaacactcacctctctatcattcttagctagtactttcttcatcttgcctcagttattatttgaaatgtgcttgtttccttagtcattacattttctaatttgccaaatgttaaacaagggcaagagttggcactttctgtktctctctgcttcctcccaccaccactgtaagccccaaataaaataattgttttttacatttctgaaagcttttcactctgttacaaatcaaggggctccaacatgcccttgtttctaacaattctcaatgcagtttaatgctaggggtgaggtgggctcattgacttttgctcttggctgacatttcca

SEQ ID NO: 692889 - DNA, 2223 bp, Homo sapiens
tcggcattcctatgaatatcagcgggagaacagcagttaccgcagccagcgcagcagccggaggaagcacagacggcggaggaggcgcagccggacatttagccgctcatcttcggtgagtgccagcccaggcccttcctctccccactcttctgcaggccctctaggactctggtaagtgagcagtatccttgttctcagctgaacattggggcatgaacactgaggtgggcactgagtttgcctactttcttggaagctctccgactcttgaagggccctggatctgctttggagatggatgggcacggagcatttgtgacccccagtgctctccctggcatgttgggcttattgtgttgggagcagcttctccgccccagcggcctccactctttaatggggaccttgcttgttgaactgcctttttcccccaagccctgggctctgtagcccccttggcaggcgggcttgggtgggggcaaggggagatctgtgtctgcccggaagggcattgtgtagagcatggggttgtgggtgacattggcaacaacaccacttctctgctctgcccatgcctctccctgttcctgttttgggtttggggacttgggattatgcgccgctctctcttctcacaccgatccaccttactgcatctgacgtgttcccttccactgtcccccatcatcgtctgtcccccctggctgggcgcctgtgaccggtgacccctctaccacccaccccgcctccctccggcccccggctccgaacacygggcttggttcggaaccccccctgccccccgacagcagcacagcagccggagagccaagagtgtagaggacgacgctgagggccacctcatctaccacgtcggggactggctacaagagcgatgtacaagccaaatcgtaacaatcctatagcctgtaatggtcccatagccatcctaacgtcccaagccaacctgagtcacagcctcttgccttttgctcagtggtgttgtttatctgggtggtttgagttgctgttgagaattgacctctgttgtccactcccagctctcacggcccctgggttaaaggtggtgggaatcacgcaggggttttcttcccctgtgaccatctgtatctgttccccttccttcatctccaccccaggttgctgtccccttttttcttccaactcagctcattccccaccttctctccctccctctccccgaccctgctctctttcatttcagatgaaatcgttagcaccttaggagaggggaccttcggccgagttgtacaatgtgttgaccatcgcaggtaactgtcagtccctccctactatgtggggctaaagagatggttggggttatatggggcttttttgctaattaacctgaggtagaatttcttagtccccctacagccctgttcattttgagacattcttgagaacccagcaaaagcctctcctgccaacttacaggggtggggctcgagttgccctgaagatcattaagaatgtggagaagtacaaggaagcagctcgacttgagatcaacgtgctagagaaaatcaatgagaaagaccctgacaacaagaagtaagcaagcaaggaagtgtgtagggaggctgagagccccaacccctacacgggagagattcctagacctggtttaggcagacagggggagtcctagaccttctcatccattcatcttttgttcatcatcttagagtagtagaacatcagggtaggaaagggggggggcccatgacattccttaatccactccccttgttttcagggaagttagattgctctgtcgtttgaccccagcctagaatggcttctgtagagatataccctggacatagccctaggactgagcatcaacctcatcgaacaatgaattaagcttttataagtagaactatgctgataaggccacagacatttatgcagtaatattttgttcacatacattcacagtccaaaaatagaataaggactttaagccaagatatgaggccagtaggtataaataggagcccagtggtagctagtggtgaatgaatatcaggagttgggctggggtttgggatttaggatggacagtttgatgattccaggatctatactgtttggagcttggcactccacagctcttccagcaaatagtttttgaactatttaaaatgacgcaggaagatattttgaaacttg

SEQ ID NO: 692890 - DNA, 2223 bp, Homo sapiens
tcggcattcctatgaatatcagcgggagaacagcagttaccgcagccagcgcagcagccggaggaagcacagacggcggaggaggcgcagccggacatttagccgctcatcttcggtgagtgccagcccaggcccttcctctccccactcttctgcaggccctctaggactctggtaagtgagcagtatccttgttctcagctgaacattggggcatgaacactgaggtgggcactgagtttgcctactttcttggaagctctccgactcttgaagggccctggatctgctttggagatggatgggcacggagcatttgtgacccccagtgctctccctggcatgttgggcttattgtgttgggagcagcttctccgccccagcggcctccactctttaatggggaccttgcttgttgaactgcctttttcccccaagccctgggctctgtagcccccttggcaggcgggcttgggtgggggcaaggggagatctgtgtctgcccggaagggcattgtgtagagcatggggttgtgggtgacattggcaacaacaccacttctctgctctgcccatgcctctccctgttcctgttttgggtttggggacttgggattatgcgccgctctctcttctcacaccgatccaccttactgcatctgacgtgttcccttccactgtcccccatcatcgtctgtcccccctggctgggcgcctgtgaccggtgacccctctaccacccaccccgcctccctccggcccccggctccgaacactkggcttggttcggaaccccccctgccccccgacagcagcacagcagccggagagccaagagtgtagaggacgacgctgagggccacctcatctaccacgtcggggactggctacaagagcgatgtacaagccaaatcgtaacaatcctatagcctgtaatggtcccatagccatcctaacgtcccaagccaacctgagtcacagcctcttgccttttgctcagtggtgttgtttatctgggtggtttgagttgctgttgagaattgacctctgttgtccactcccagctctcacggcccctgggttaaaggtggtgggaatcacgcaggggttttcttcccctgtgaccatctgtatctgttccccttccttcatctccaccccaggttgctgtccccttttttcttccaactcagctcattccccaccttctctccctccctctccccgaccctgctctctttcatttcagatgaaatcgttagcaccttaggagaggggaccttcggccgagttgtacaatgtgttgaccatcgcaggtaactgtcagtccctccctactatgtggggctaaagagatggttggggttatatggggcttttttgctaattaacctgaggtagaatttcttagtccccctacagccctgttcattttgagacattcttgagaacccagcaaaagcctctcctgccaacttacaggggtggggctcgagttgccctgaagatcattaagaatgtggagaagtacaaggaagcagctcgacttgagatcaacgtgctagagaaaatcaatgagaaagaccctgacaacaagaagtaagcaagcaaggaagtgtgtagggaggctgagagccccaacccctacacgggagagattcctagacctggtttaggcagacagggggagtcctagaccttctcatccattcatcttttgttcatcatcttagagtagtagaacatcagggtaggaaagggggggggcccatgacattccttaatccactccccttgttttcagggaagttagattgctctgtcgtttgaccccagcctagaatggcttctgtagagatataccctggacatagccctaggactgagcatcaacctcatcgaacaatgaattaagcttttataagtagaactatgctgataaggccacagacatttatgcagtaatattttgttcacatacattcacagtccaaaaatagaataaggactttaagccaagatatgaggccagtaggtataaataggagcccagtggtagctagtggtgaatgaatatcaggagttgggctggggtttgggatttaggatggacagtttgatgattccaggatctatactgtttggagcttggcactccacagctcttccagcaaatagtttttgaactatttaaaatgacgcaggaagatattttgaaacttg

SEQ ID NO: 692891 - DNA, 2223 bp, Homo sapiens
tcggcattcctatgaatatcagcgggagaacagcagttaccgcagccagcgcagcagccggaggaagcacagacggcggaggaggcgcagccggacatttagccgctcatcttcggtgagtgccagcccaggcccttcctctccccactcttctgcaggccctctaggactctggtaagtgagcagtatccttgttctcagctgaacattggggcatgaacactgaggtgggcactgagtttgcctactttcttggaagctctccgactcttgaagggccctggatctgctttggagatggatgggcacggagcatttgtgacccccagtgctctccctggcatgttgggcttattgtgttgggagcagcttctccgccccagcggcctccactctttaatggggaccttgcttgttgaactgcctttttcccccaagccctgggctctgtagcccccttggcaggcgggcttgggtgggggcaaggggagatctgtgtctgcccggaagggcattgtgtagagcatggggttgtgggtgacattggcaacaacaccacttctctgctctgcccatgcctctccctgttcctgttttgggtttggggacttgggattatgcgccgctctctcttctcacaccgatccaccttactgcatctgacgtgttcccttccactgtcccccatcatcgtctgtcccccctggctgggcgcctgtgaccggtgacccctctaccacccaccccgcctccctccggcccccggctccgaacactgggcttgsttcggaaccccccctgccccccgacagcagcacagcagccggagagccaagagtgtagaggacgacgctgagggccacctcatctaccacgtcggggactggctacaagagcgatgtacaagccaaatcgtaacaatcctatagcctgtaatggtcccatagccatcctaacgtcccaagccaacctgagtcacagcctcttgccttttgctcagtggtgttgtttatctgggtggtttgagttgctgttgagaattgacctctgttgtccactcccagctctcacggcccctgggttaaaggtggtgggaatcacgcaggggttttcttcccctgtgaccatctgtatctgttccccttccttcatctccaccccaggttgctgtccccttttttcttccaactcagctcattccccaccttctctccctccctctccccgaccctgctctctttcatttcagatgaaatcgttagcaccttaggagaggggaccttcggccgagttgtacaatgtgttgaccatcgcaggtaactgtcagtccctccctactatgtggggctaaagagatggttggggttatatggggcttttttgctaattaacctgaggtagaatttcttagtccccctacagccctgttcattttgagacattcttgagaacccagcaaaagcctctcctgccaacttacaggggtggggctcgagttgccctgaagatcattaagaatgtggagaagtacaaggaagcagctcgacttgagatcaacgtgctagagaaaatcaatgagaaagaccctgacaacaagaagtaagcaagcaaggaagtgtgtagggaggctgagagccccaacccctacacgggagagattcctagacctggtttaggcagacagggggagtcctagaccttctcatccattcatcttttgttcatcatcttagagtagtagaacatcagggtaggaaagggggggggcccatgacattccttaatccactccccttgttttcagggaagttagattgctctgtcgtttgaccccagcctagaatggcttctgtagagatataccctggacatagccctaggactgagcatcaacctcatcgaacaatgaattaagcttttataagtagaactatgctgataaggccacagacatttatgcagtaatattttgttcacatacattcacagtccaaaaatagaataaggactttaagccaagatatgaggccagtaggtataaataggagcccagtggtagctagtggtgaatgaatatcaggagttgggctggggtttgggatttaggatggacagtttgatgattccaggatctatactgtttggagcttggcactccacagctcttccagcaaatagtttttgaactatttaaaatgacgcaggaagatattttgaaacttg

SEQ ID NO: 692892 - DNA, 2223 bp, Homo sapiens
tcggcattcctatgaatatcagcgggagaacagcagttaccgcagccagcgcagcagccggaggaagcacagacggcggaggaggcgcagccggacatttagccgctcatcttcggtgagtgccagcccaggcccttcctctccccactcttctgcaggccctctaggactctggtaagtgagcagtatccttgttctcagctgaacattggggcatgaacactgaggtgggcactgagtttgcctactttcttggaagctctccgactcttgaagggccctggatctgctttggagatggatgggcacggagcatttgtgacccccagtgctctccctggcatgttgggcttattgtgttgggagcagcttctccgccccagcggcctccactctttaatggggaccttgcttgttgaactgcctttttcccccaagccctgggctctgtagcccccttggcaggcgggcttgggtgggggcaaggggagatctgtgtctgcccggaagggcattgtgtagagcatggggttgtgggtgacattggcaacaacaccacttctctgctctgcccatgcctctccctgttcctgttttgggtttggggacttgggattatgcgccgctctctcttctcacaccgatccaccttactgcatctgacgtgttcccttccactgtcccccatcatcgtctgtcccccctggctgggcgcctgtgaccggtgacccctctaccacccaccccgcctccctccggcccccggctccgaacactgggcttggtycggaaccccccctgccccccgacagcagcacagcagccggagagccaagagtgtagaggacgacgctgagggccacctcatctaccacgtcggggactggctacaagagcgatgtacaagccaaatcgtaacaatcctatagcctgtaatggtcccatagccatcctaacgtcccaagccaacctgagtcacagcctcttgccttttgctcagtggtgttgtttatctgggtggtttgagttgctgttgagaattgacctctgttgtccactcccagctctcacggcccctgggttaaaggtggtgggaatcacgcaggggttttcttcccctgtgaccatctgtatctgttccccttccttcatctccaccccaggttgctgtccccttttttcttccaactcagctcattccccaccttctctccctccctctccccgaccctgctctctttcatttcagatgaaatcgttagcaccttaggagaggggaccttcggccgagttgtacaatgtgttgaccatcgcaggtaactgtcagtccctccctactatgtggggctaaagagatggttggggttatatggggcttttttgctaattaacctgaggtagaatttcttagtccccctacagccctgttcattttgagacattcttgagaacccagcaaaagcctctcctgccaacttacaggggtggggctcgagttgccctgaagatcattaagaatgtggagaagtacaaggaagcagctcgacttgagatcaacgtgctagagaaaatcaatgagaaagaccctgacaacaagaagtaagcaagcaaggaagtgtgtagggaggctgagagccccaacccctacacgggagagattcctagacctggtttaggcagacagggggagtcctagaccttctcatccattcatcttttgttcatcatcttagagtagtagaacatcagggtaggaaagggggggggcccatgacattccttaatccactccccttgttttcagggaagttagattgctctgtcgtttgaccccagcctagaatggcttctgtagagatataccctggacatagccctaggactgagcatcaacctcatcgaacaatgaattaagcttttataagtagaactatgctgataaggccacagacatttatgcagtaatattttgttcacatacattcacagtccaaaaatagaataaggactttaagccaagatatgaggccagtaggtataaataggagcccagtggtagctagtggtgaatgaatatcaggagttgggctggggtttgggatttaggatggacagtttgatgattccaggatctatactgtttggagcttggcactccacagctcttccagcaaatagtttttgaactatttaaaatgacgcaggaagatattttgaaacttg

SEQ ID NO: 692893 - DNA, 2223 bp, Homo sapiens
tcggcattcctatgaatatcagcgggagaacagcagttaccgcagccagcgcagcagccggaggaagcacagacggcggaggaggcgcagccggacatttagccgctcatcttcggtgagtgccagcccaggcccttcctctccccactcttctgcaggccctctaggactctggtaagtgagcagtatccttgttctcagctgaacattggggcatgaacactgaggtgggcactgagtttgcctactttcttggaagctctccgactcttgaagggccctggatctgctttggagatggatgggcacggagcatttgtgacccccagtgctctccctggcatgttgggcttattgtgttgggagcagcttctccgccccagcggcctccactctttaatggggaccttgcttgttgaactgcctttttcccccaagccctgggctctgtagcccccttggcaggcgggcttgggtgggggcaaggggagatctgtgtctgcccggaagggcattgtgtagagcatggggttgtgggtgacattggcaacaacaccacttctctgctctgcccatgcctctccctgttcctgttttgggtttggggacttgggattatgcgccgctctctcttctcacaccgatccaccttactgcatctgacgtgttcccttccactgtcccccatcatcgtctgtcccccctggctgggcgcctgtgaccggtgacccctctaccacccaccccgcctccctccggcccccggctccgaacactgggcttggttcggaaccccccctgccccccgacagcagcacagcagccggagagccaagagtgtagaggacgacgctgagggccacctcatctaccacgtcggggactggctacaagagcgatgtacaagccaaatcgtaacaatcctatagcctgtaatggtcccatagccatcctaacgtcccaagccaacctgagtcacagcctcttgccttttgctcagtggtgttgtttatctgggtggtttgagttgctgttgagaattgacctctgttgtccactcccagctctcacggcccctgggttaaaggtggtgggaatcacgcaggggttttcttcccctgtgaccatctgtatctgttccccttccttcatctccaccccaggttgctgtccccttttttcttccaactcagctcattccccaccttctctccctccctctccccgaccctgctctctttcatttcagatgaaatcgttagcaccttaggagaggggaccttcggccgagttgtacaatgtgttgaccatcgcaggtaactgtcagtccctccctactatgtggggctaaagagatggttggggttatatggggcttttttgctaattaacctgaggtagaatttcttagtccccctacagccctgttcattttgagacattcttgagaacccagcaaaagcctctcctgccaacttacaggggtggggctcgagttgccctgaagatcattaagaatgtggagaagtacaaggaagcagctcgacttgagatcaacgtgctagagaaaatcaatgagaaagaccctgacaacaagaagtaagcaagcaaggaagtrtgtagggaggctgagagccccaacccctacacgggagagattcctagacctggtttaggcagacagggggagtcctagaccttctcatccattcatcttttgttcatcatcttagagtagtagaacatcagggtaggaaagggggggggcccatgacattccttaatccactccccttgttttcagggaagttagattgctctgtcgtttgaccccagcctagaatggcttctgtagagatataccctggacatagccctaggactgagcatcaacctcatcgaacaatgaattaagcttttataagtagaactatgctgataaggccacagacatttatgcagtaatattttgttcacatacattcacagtccaaaaatagaataaggactttaagccaagatatgaggccagtaggtataaataggagcccagtggtagctagtggtgaatgaatatcaggagttgggctggggtttgggatttaggatggacagtttgatgattccaggatctatactgtttggagcttggcactccacagctcttccagcaaatagtttttgaactatttaaaatgacgcaggaagatattttgaaacttg

SEQ ID NO: 692894 - DNA, 1156 bp, Homo sapiens
aataaataaataaataaataaataaataattgtgttcggagtcagcatcattcttcctgaagttcaccactcctttgccaagaacacttcctgaaacactgacaagcaggaccttgaatartggggtatggttggtaacaactcactcattcaacaaacattgagcacctattttgtgcttgcctctaaatgaagagctggttgtattatttatttttttaggtgacagggctttccctatgttgcccaggttcgtctcaaactcctgggctcaaaagatcctcatcttctcaagtggttgaatatacacgctccagcgaccatgcctggctgaatgaagagctttgagattttgaagaaacaggaaccatgaaatttgctttgcaactgtttgcaacctttaaggaagactgaaaaggcattcctgaagcatgtgagaagcagtctgtgtgacctgatgactcagaactgcttggaatttagattaggacagatatgagcttaggcttcactctgccacatatttaacttctctaagtcttagttttcttttctttttttttttttttgagatggagtctcgctctgtcacccaggctggagtgcagtggcacgatcttggctcactgcaagctccgcctcccgggttcacgccatcctcctgcctcagccacccgagtagcggggactacagtcgcacaccgccacgcctggctaaatttttgtatttttagtagagacgggtttcaccgtgttagccaggatggtctcgatctcctaaccttgtgatccgcccgcttcggcctcccaaagtgttgggattacaggtgtgagccatcgcgtctggcctctaagtcttaattttcttatctgtaatgtagagttgtcaggctagtgcatgtaataagcactcatgaaagactgactattatcttgcgaaaaattggaagagatcatatgaggtacaaggaccttccatctgcactgggctgtacattgaatgttgtggttactgttgaagcattggtaaatcacatgaatccaatggtaaaaccacaccctaaggtcagactcagtggctcacgcctgtaattccagcactttgggaaaccaaggcaagaggattgcttgagctcaggagttcgataccagtcta

SEQ ID NO: 692895 - DNA, 1728 bp, Homo sapiens
ggcctgagtctttaactgtggtaaataccccatggtatccagagcttctacaatcatagagtatcacacacttcattgcttaacttattatgatagttttaaaaattattaatacaaaatatgctcaatgaggccaagaccatgtccaaggtttaatttttgtatcttcaacagtattacaggctctgaataaagtaggcgctctataaatatttattgaacaaaccagggttttatcagttcttgcctctctagctaagatatgatctcagctatctaaacatttctctctcaaaagtattgctgcaattatttagagattttcacattgtggtagactgaagaataatctcccaaaatgatcagatctgaatccttgaaaattatgaatatgttcgcttacattgctgaaaggattttgcagatgtgattaagttaaggatcttgaaatggggaggttttccttggttagctgagtgggcccaatatcgtcacacactttcctaaaatatcttaccaaaaccacaccacctctgtgaagccctctctcttttcccagacagatatggaggtttctttctttacgtgtttataacaaattaaagaaacttcaacttctatcactatgttatgatatttatggtcatgtctgactcttcctagactagaatggtttttgagggattggactatatgttcatttacctttgtaaatccagtatgtaggacttggtacaatatattggatacagaattataagcccgataggagcagaaaactttgttgctcatccttgtatcccagaatctagtactatgtccgatgagtgtagtaagagtgaggcaagaggatgcaagtcagaaaaaggctatgtgacaacagaagtagagatcagaatgacagacactttgaagatggaggaagggccctgagcccagtagtgcagatggcacctagaagctggaaaaggcaaagaaatggattctcccataaagcctacaaaaggaacaccacctgccaacaccttgatttttagccccaaagacttatttcagacttttatcctgaacaggacagaagcaaaaaaatggaatygatcaacataaaagcagaagttaataaggtagaaaattttgtaatgatagaactaagaaataagcaaatgagatcattgtttgccagccaaaagacagagaggacaaatatactaaaacagaagtgacaaggggaagtatgataaagtctatttttaaaaacaatattttgtataattctctgcaaacaacctaaaagcctaaatgaaatggctcacattataaatttaacaaaactgaccctaatgtggataaaaagcctaaacaaaacaatgactacaaaagaaataaataaatttgtaatagaatttcctcacagaaaagcgccagtcccatatagtttcttacagggatttttccacaccttttaaaatcagggactttgagaatacctaaaacattgcaaagtatagaagagtaggggaaatttctaaattattttcatgacatgaccttaatatttataacaaaactcaacaaaactgcaccttaaaaaaaaatctatagaccggccaggcgtggtggctcccatctgtaatcccaacactttgggaggccaagggggggcggatcatgaggtcatgagatcaagaccatcctggctaacacagtgaaaccccatctctactaaaa

SEQ ID NO: 692896 - DNA, 1728 bp, Homo sapiens
ggcctgagtctttaactgtggtaaataccccatggtatccagagcttctacaatcatagagtatcacacacttcattgcttaacttattatgatagttttaaaaattattaatacaaaatatgctcaatgaggccaagaccatgtccaaggtttaatttttgtatcttcaacagtattacaggctctgaataaagtaggcgctctataaatatttattgaacaaaccagggttttatcagttcttgcctctctagctaagatatgatctcagctatctaaacatttctctctcaaaagtattgctgcaattatttagagattttcacattgtggtagactgaagaataatctcccaaaatgatcagatctgaatccttgaaaattatgaatatgttcgcttacattgctgaaaggattttgcagatgtgattaagttaaggatcttgaaatggggaggttttccttggttagctgagtgggcccaatatcgtcacacactttcctaaaatatcttaccaaaaccacaccacctctgtgaagccctctctcttttcccagacagatatggaggtttctttctttacgtgtttataacaaattaaagaaacttcaacttctatcactatgttatgatatttatggtcatgtctgactcttcctagactagaatggtttttgagggattggactatatgttcatttacctttgtaaatccagtatgtaggacttggtacaatatattggatacagaattataagcccgataggagcagaaaactttgttgctcatccttgtatcccagaatctagtactatgtccgatgagtgtagtaagagtgaggcaagaggatgcaagtcagaaaaaggctatgtgacaacagaagtagagatcagaatgacagacactttgaagatggaggaagggccctgagcccagtagtgcagatggcacctagaagctggaaaaggcaaagaaatggattctcccataaagcctacaaaaggaacaccacctgccaacaccttgatttttagccccaaagacttatttcagacttttatcctgaacaggacagaagcaaaaaaatggaattgatcaacataaaagcagaagttaataaggtagaaaattttgtaatgatagaactaagaaataagcaaatgagatcattgtttgccagccaaaagacagagaggacaaatatactaaaacagaagtgacaaggggaagtatgataaagtctatttttaaaaacaatattttgtataattctctgcaaacaacctaaaagcctaaatgaaatggctcacattataaatttaacaaaactgaccctaatgtggataaaaagcctaaacaaaacaatgactacaaaagaaataaataaatttgtaatagaatttcctcacagaaaagygccagtcccatatagtttcttacagggatttttccacaccttttaaaatcagggactttgagaatacctaaaacattgcaaagtatagaagagtaggggaaatttctaaattattttcatgacatgaccttaatatttataacaaaactcaacaaaactgcaccttaaaaaaaaatctatagaccggccaggcgtggtggctcccatctgtaatcccaacactttgggaggccaagggggggcggatcatgaggtcatgagatcaagaccatcctggctaacacagtgaaaccccatctctactaaaa

SEQ ID NO: 692897 - DNA, 1728 bp, Homo sapiens
ggcctgagtctttaactgtggtaaataccccatggtatccagagcttctacaatcatagagtatcacacacttcattgcttaacttattatgatagttttaaaaattattaatacaaaatatgctcaatgaggccaagaccatgtccaaggtttaatttttgtatcttcaacagtattacaggctctgaataaagtaggcgctctataaatatttattgaacaaaccagggttttatcagttcttgcctctctagctaagatatgatctcagctatctaaacatttctctctcaaaagtattgctgcaattatttagagattttcacattgtggtagactgaagaataatctcccaaaatgatcagatctgaatccttgaaaattatgaatatgttcgcttacattgctgaaaggattttgcagatgtgattaagttaaggatcttgaaatggggaggttttccttggttagctgagtgggcccaatatcgtcacacactttcctaaaatatcttaccaaaaccacaccacctctgtgaagccctctctcttttcccagacagatatggaggtttctttctttacgtgtttataacaaattaaagaaacttcaacttctatcactatgttatgatatttatggtcatgtctgactcttcctagactagaatggtttttgagggattggactatatgttcatttacctttgtaaatccagtatgtaggacttggtacaatatattggatacagaattataagcccgataggagcagaaaactttgttgctcatccttgtatcccagaatctagtactatgtccgatgagtgtagtaagagtgaggcaagaggatgcaagtcagaaaaaggctatgtgacaacagaagtagagatcagaatgacagacactttgaagatggaggaagggccctgagcccagtagtgcagatggcacctagaagctggaaaaggcaaagaaatggattctcccataaagcctacaaaaggaacaccacctgccaacaccttgatttttagccccaaagacttatttcagacttttatcctgaacaggacagaagcaaaaaaatggaattgatcaacataaaagcagaagttaataaggtagaaaattttgtaatgatagaactaagaaataagcaaatgagatcattgtttgccagccaaaagacagagaggacaaatatactaaaacagaagtgacaaggggaagtatgataaagtctatttttaaaaacaatattttgtataattctctgcaaacaacctaaaagcctaaatgaaatggctcacattataaatttaacaaaactgaccctaatgtggataaaaagcctaaacaaaacaatgactacaaaagaaataaataaatttgtaatagaatttcctcacagaaaagcgccagtcccatatagtttcttacagggatttttccacaccttttaaaatcagggactttgagaatacctaaaacattgcaaagtatagaagagtaggggaaatttctaaattattttcatgacatraccttaatatttataacaaaactcaacaaaactgcaccttaaaaaaaaatctatagaccggccaggcgtggtggctcccatctgtaatcccaacactttgggaggccaagggggggcggatcatgaggtcatgagatcaagaccatcctggctaacacagtgaaaccccatctctactaaaa

SEQ ID NO: 692898 - DNA, 615 bp, Homo sapiens
caatactcctctttcaataattgatataacaaataattgatataataattgatagaaagtcgtaagagtacattcaatttgagcaatgttatcaactaatttgatctaaatcgcatttacagaatacagcttccaacaacagcaaaacacacctcaacaacagcaaaacacacctctctatgcatctctatgcatcacctctctgttccattatgcagttaattatgcaattaagcaatcttgtcaggaccataatgcaactgcattatgcaattgcatatgcataatttgcggaccaaattatgtttaattgcataattgcaattgcataayggaaccatagcactgtcactgtctgacagtgctatgcaatgtgagacattgcaaagcacacctcaagattgcttgaggacaggagtttgagaccagcctgggcaacatagtgagacccctatctctaaataataaataataaatgaataaataaataaataaaattagctgggcatggtggcgggcacctgtggtcccagctactcaggggctaaggcagaaggattgcttgagtctgggaggttgatgctgcagtgagctctgatcaccccactgtcctcc

SEQ ID NO: 692899 - DNA, 1180 bp, Homo sapiens
cctaaattttcttttcttttcttttcttttytttttttttttttagacggagtctcactctgtcgcccaggctggagtgcagtggcgcgatctcggctcactgcaagctccacttcccgggttcacgccattctcctgcctcagcctcccgagtagctgcgactacaggcacccgccaccacacctggctaacatttttgtatttttagtagagacggggtttcaccgtgttagccgggatgatcttgatctcctggcctcgtgatccacccgcctcggactcccaaagtgctggcattacaggcgtgagccaccgcgcccggccctacatttacctaaattttctctgaacgtggagtgggcatctgttgagatgaactagcaaaagcctaactagttagcaacaaaacaaaacacataattgagcaaaaaagtgaaatgtcaaataaattaaagatagaattacaggtattttcatcttgacttccatttctctttgttcttaattcaaacccaagatgaacaatattctttagatttagtattcaaattccatttaccataggcttctgagcctgtcatgattctgatctggctattgtgttcatgtaatcatgaatctgagataatgaatgtagctattgcaatgactgaaaatatcttgggatgggattggtgggaaggaacattatcttgacctttgaaaactttaatctcctaccacccagactgtgtagtaagccctccctggcctaagtcctctcttaacccatttggggcaagactgtaatagaagggagtcttctagggtggcagatgccttccctttccattggagccatagagaagtcctttcctccttatagcctcagttttcctcctgagcaatatgagaggtgtgcaacaactaactaaaagttaccatgtctctttggttaataaaaccaggaccattattagctcctaataatagttgctcgcatttgcaaagcattttatagatataaaaggaggcatacaatttcatagatttgaagatactctttttttcctgttgtaacatcctcaaaactgggatgcatctcaaaatcaatggcattttagattagatgaaatgtgtcatatttttcaaaatattggggaaacagtacacggttgtcaatatttcagtgttgccttg

SEQ ID NO: 692900 - DNA, 1180 bp, Homo sapiens
cctaaattttcttttcttttcttttcttttctttttttttttttagacggagtctcactctgtcgcccaggctggagtgcagtggcgcgatctcggctcactgcaagctccacttcccgggttcacgccattctcctgcctcagcctcccgagtagctgcgactacaggcacccgccaccacacctggctaacatttttgtatttttagtagagacggggtttcaccgtgttagccgggatgatcttgatctcctggcctcgtgatccacccgcctcggactcccaaagtgctggcattacaggcgtgagccaccgcgcccggccctacatttacctaaattttctctgaacgtggagtgggcatctgttgagatgaactagcaaaagcctaactagttagcaacaaaacaaaacacataattgagcaaaaaagtgaaatgtcaaataaattaaagatagaattacaggtattttcatcttgacttccatttctctttgttcttaattcaaacccaagatgaacaatattctttagatttagtattcaaattccatttaccataggcttctgagcctgtcatgattctgatctggctattgtgttcatgtaatcatgaatctgagataatgaatgtagctattgcaatgactgaaaatatcttgggatgggattggtgggaaggaacattatcttgacctttgaaaactttaatctcctaccacccagactgtgtagtaagccctccctggcctaagtcctctcttaacccatttggggcaagactgtaatagaagggagtcttctagggtggcagatgccttccctttccattggagccatagagaagtcctttcctccttatrgcctcagttttcctcctgagcaatatgagaggtgtgcaacaactaactaaaagttaccatgtctctttggttaataaaaccaggaccattattagctcctaataatagttgctcgcatttgcaaagcattttatagatataaaaggaggcatacaatttcatagatttgaagatactctttttttcctgttgtaacatcctcaaaactgggatgcatctcaaaatcaatggcattttagattagatgaaatgtgtcatatttttcaaaatattggggaaacagtacacggttgtcaatatttcagtgttgccttg

SEQ ID NO: 692901 - DNA, 681 bp, Homo sapiens
ttatcctcctgtttccttcttctccttctttgctgaagtcagtcatggaactcagacttcctcttctccaaggcggatcatagaaagtaaaattcttcttccccaaggcacgtcatggaaacaaaaattcttctccaaagcaagccataaaacctagaaggctcattctaacttytttcccttctcccttgaagacacttattctaggaaggtcctgcccatacctaggaggaagaaaccctacataaagaggctaataaatatttgaatagaaaggcattattgtgtttcccccttcagtctgttaccaatggattatacacttttgtccagtcaactttctacgtggatacccattcttcatgagcctaagcatcaaaatagacagttccccctgggtcattgggtcttcatttctgaaggctcctgtgtcatgtaaaaaattgattaaataaattgctatccttttctcttgttaatctctgtcttttgttacaggaatgtcagccatgacctatgatgtgtgaagaaagatatctcacacctttctaccccttcaccactgtctattccactcttaatctgcactcaactactgtgactctccccttggtctcttatcccagagtactgtgactctacctctaagccttgcttcctgctcttgtgccattttttaca

SEQ ID NO: 692902 - DNA, 638 bp, Homo sapiens
aaaaataaatctatcaagaatcaccatggggatacagtcagcaacaagcaaaatgtagaaaatatgctctaggtttttcaacaaacaaattttaagaaaattaaaaagagaaggataacatattaacagatttaagaggtgcattcccaggtgcaacataggagccttgctcaccctccaattcaagcacaccaatgatagaaccaaccttgatagatacttgaaattttacacaatgcaaaataagttttcattaattgtatgattatgtatttttatatctagacrtttggtggactcttttagtagctgttggtaggagagggctgcctctttgcagaagtatttttggaatatgtgttgaagtgtatgtatttctaaactttaggctctaaaggactgtaaattgctagaatgtatttatgtttctactctacataattatgcatttttctttacatcctcctccagttgaaaagctctttgaaggcaagaattaaatgaattgttttaccaaaaaaatgaaataaatgatgaactcaggtgtttttttgttttgttttgttttcacaaaaaaaaaaaaaaaaaaccaaaaaacaatgcttggaaagtaacatctgagtagctgctttgggtcg

SEQ ID NO: 692903 - DNA, 658 bp, Homo sapiens
ttagtattctgttacagacctctagtttttagactcttcaattaaagggccaatggttataacctgcattcccttttttgttcttctttatgtataatatatagttcatgtggcgctgcatgaaatcaagaagtgggtgtcttaggataaaagataccaagagtctacaaaaataaccatgtagtaagataaactgctgaacaaaggttttactgttagccaccttctcatgtgttttcttttctctttttctttttctttstttctttcttttttttttttttgagacagagtcttgctctgttacccaggctggagtgcagtggcacgatctcagctcaccgcaacctctgcctcctgggttcaagtgattctcttgcttcagcctcctgagtagctgggattataggcatgcaccactaggcctggctaatttttgtatttttagtagagatggggtttttccatgttggccaggctggtcccgaactcctgacctcaggtgatccgcgcacctcagcctcccaaagtgctgggattacaggcatgagctaccatgcctggccttctcatgtgttttctgattaaggctcttgacttccaaggctgtgtggggagatggggtggggctcttggactgatataaaactttgtcaaa

SEQ ID NO: 692904 - DNA, 658 bp, Homo sapiens
ttagtattctgttacagacctctagtttttagactcttcaattaaagggccaatggttataacctgcattcccttttttgttcttctttatgtataatatatagttcatgtggcgctgcatgaaatcaagaagtgggtgtcttaggataaaagataccaagagtctacaaaaataaccatgtagtaagataaactgctgaacaaaggttttactgttagccaccttctcatgtgttttcttttctctttttctttttctttctttctttcttttttttttttttgagacagagtcttgctctgttacccaggctggagtgcagtggcacgatctcagctcaccgcaacctctgcctcctgggttcaagtgattctcttgcttcagcctcctgagtagctgggattataggcatgcaccactaggcctggctaatttttgtayttttagtagagatggggtttttccatgttggccaggctggtcccgaactcctgacctcaggtgatccgcgcacctcagcctcccaaagtgctgggattacaggcatgagctaccatgcctggccttctcatgtgttttctgattaaggctcttgacttccaaggctgtgtggggagatggggtggggctcttggactgatataaaactttgtcaaa

SEQ ID NO: 692905 - DNA, 613 bp, Homo sapiens
tatttgggaagaaaaaattgcagttcaagcagactgggtggtcttcgatctgtccaaagaacaagagaaagttggggccagcctcggtggctcatgcgtataatccccagcactttgggaggctgaggcagaaggattgtttgggcctagcagttcgggaccagcctgggcaacacagtgagaccacatctctacaaaaaatttttggctggtggcttacgcctgtaatcacagcactttgggaggccgaggagggtggatcacctgaggtcaagagatcgagaccagcctggccaacatggtgaaaccccatctctactaaaaatacaaaaaattagccgggtatggtggcaggtgcctgtaatcccagctactcgagaggctgaggcgagataattgcttgaacctggaagayggaggttgcagtgagccgggatcacgccactgcactctagcctgggcgacagagcgagactccatctcaaaataacaataataataataataaaccatcaacctcattttgatggtaattgatgtgtgtgcatgcatgcatgtgtgtgtacacagttcctgtctcataactcccacagccctgttataatgttggggc

SEQ ID NO: 692906 - DNA, 652 bp, Homo sapiens
tggcaagtgaccaaacagagtgagtgtccggaaggcccgtcaccctgatattcacgcaaagaatctgtttctctgtgaatgggcggctgtggaggaggccgggggagcaagtggctggccagcctccaaggccagatgttctgtagtaccatatgtcaggataggaaggacggcaccgagggctcctagagcgtgtcagacctcagctcttgaactctgtaatcctcatgcccccttccgtcctcggtcaagaacgaacaatgcttccctctttgtctgcttttcaaccccacctcttttctccattagctttctggtctaaactcattattgagacccctccacaacattcaccttgcctctcctttgcctggccccaggctggctgcccctttttctggaatgwtgctgttttggtgcctgtttccctctcatctgaaacaaccacctcctcttctatgtctgctgcctccttggtatcttctaagcccaggcatgagcccccctccttggggaggcctgagcttttgattcccactcaggctgggtgttgagattgtcctcaggacctgacgtgcacatgtaagtactggtttctcttatagtgtgtattgtcttccctcttcaactaaagctttaggagggtaggttg

SEQ ID NO: 692907 - DNA, 603 bp, Homo sapiens
tgctgtggaaagtgaggtgcrtgtgataatggttatcaaacattatgctccccaaaatttccatcaccttgcagttgaatgaggcctatgtaactagtttattctaatgtaatacagaaagtagtgtgacactccactttctgtaaaggcaatgaaaaaaatttaccatccagtttcttcccctactgctgtgattaaggattttgcatgttctagatggtgcagctttgtcagcctgggtcttgagtgatactggagcagaactccctcaaattgttccttctgccacgctaaacttgttagatattagcataaataagaaataaaccatttagactgatactttgggacaattttttatcacagtgtaagttatatcctgactaaaacagtgctttggaaagatcagggaagggtttcttgagctacaaaagggagttaagaatgaagcaaaatgaaatatggcatctttaaatgacatgatgcaataaactctaaattgcaagttattcaatagttactgagcaccagatatgtgtcagacactgttctagatgcttgggatacaagtgggtgaacagcaggaccttgccttcatggagc

SEQ ID NO: 692908 - DNA, 2255 bp, Homo sapiens
caaaagaaataaagcttgttaaagcaatgtttgacaagaaggattcattttatttacgagaatcaaatccaaatggcaggtgggggatgtctctatagcagttaccaggatggtctctgataattttatggaaacaatragaactacatgtatttaattctattttaatttaaccattctatgttcagggggtagaattttgatgatgacaactacttcctcttccctggggcactgttgagaaacattgcccagtgtggccctggggagcagtttctgttctggcctgatctggattcctcttctcccagcttctgctgacctccttctgactctgatgctggtccttaaccgacacttgtccttaacctacgctgcctgctcaggaatcagtcacttccttctttcagggtctttattacttactatttgcggatgattcttggtgtctgaaatgtgattgctcaaatttcactttacataagtctgcaccagttgatatttagaaaagttttacttccctctaatatatgcgcaaaaaactgcctgcttgttcaacatctatacctgagttctttgcctcagtaataacaaggatgatatctacagcaatagtaacatagcttctactatttagtacttactatgtaaaaggcattgtgctactcctttgagtaattaacttaatattttccacaggtgaagaagctgaggtatacagcatgtattaaatagagtgtgataactactgtaacacacaaagccttattttattgctcatgtccatgtaccttagtggtcaagggtgtctactccacatagttattcacggattcaggctcctttcatatgggtctcagaatcctcccttaggtcctctgaatctggtggcactgacaagacaaaggagagaggaagtggagatcatacaaaagggtttagaacccaggcctagaagtagtgtattccttctgctcaaattttattggccaggaatcaattacatgcctttgttgaaatgcaagggggctgggaaatataatcttcttatacacctaggagaagaggaaacaattttggtgagtatctagccagtctctgccacacagaaattaaacaacttgtcatacaataaataagtgcagatctgggactcaaatacatattggttggactagaagcctaagctgttaggcacatgtctatcctctctttacctgtatatgtacattttttaatataaaaacttttatatatatatgaaaatacatttttaaagactgtgctgcagccacatggtgaaagcaagtttatagtctgctcttcgtcaggaagactcactacctgattaagggccaggctgaaaatgtcttctttgatgagacagaaaaatgcatgctgtgacacttcctgtgtgaagccatataaccttccttttcatgtcagcagctcagggatcctgttcctgcttaacctattccagccagagatcatgagatcatattagactaaggactttggaccttatcctgtggccagcctgctaatgaaactcttaactggatgcatttaaaatgcaagtgatagtctctctttgctgtatggggagggccttacaccagtgtaatgggtataactttgttctataagttcaggtgtgtaaaaaatgtactttacattttcctttaactcaaattaccatattttattaattccaatacatgcctttttgtatgctaacatctctgaaatctggatctaataattgatggcatgtttgaattgctatttgctgggtggcagtgctgatttatttgccattgtctgtatgtgtgtgaacatggtcataggtatttagatattgttacctctttagttgaataatatgcactgttggtattacccaggcagagtttagttgctgtttgcaatattttcaaaaagattatcctgagtttcagcaatgaaatgaaaacttataatgaacagaaaggctcagaaacagtagtggagtgtaaatatagtaaagcaaaaaaaaattataagaatcacttcaaagctacagtgtcatacagagtaagagaattaaattactataagtatacgaaactgcgatacagagttatgttaaaaagcattgcatgttagtacatgccaagcaagagcgcactcacattaaacctttttgttttttttgtttttttttttctttgagacggagtctccctctgtcgcccaggctggagtgcagtggc

SEQ ID NO: 692909 - DNA, 2130 bp, Homo sapiens
caacttctgtcttttcatgtgtatgtctaatgcacaatttaaaatataatctccactataatacatgtttgcattattatatttttgagccataatttagtaaaaattaaaaaatggtaatctttttagcagctgatacttcaaaaacaaacacctggtttactttccttttctacttctacctgtactataggcatttggatttgagacccttaactcagtgatttgccttagcaaatgacaagaagaaatctggctttgctgtctacatgcttttaaaataatgagtggaagctgatgatgactgacttctctgkctgggtatagacagattactatatttggcatgacagtagtctttggctaggtagagactatttattttttcattcaccttttctcagaattctaaaatttttggtgcccctttcaagaggctacccattttaaataatttagagcaagacttgaataaaatgtaaataaatattatattatgttcccagctaagataagcatattcaacttttgtgttttctaaaaaatatacatatagtcatgttcttaatattatgacagtatctcctgtcaaagttgtttgtgcttaattgtcacaattattgatagcaattatgattttcttgattagaatataaactccagaagatagtatttttaaaaacatcaactgacttcaaatacctaatagatggcctggtacataataggcactcaataaatgtctgttcaaatattatttcaaggatgactggagcaaaatccaatgtttgaggaatatatattagtcacgctagggtaagttgtgttgttggtaacaaccaacctccaaattttggtgacttaatgtacaaaagtttatttcttgctctgcaatgtgtcatcatggttgacagagggctctgcaccaggattgatggagactatgctcttgtagcagtattatctagattagtggtctccacttagatgttataataatggaagagagagactggagactcatgcatagcctattttgcacttgtttatttggctaaaagtagttatatgtctttacctagatgcaaagaggctggggagcattggagagcaaatagaatatttaatgaagattactatctctgtcacaacatggtaagcaaactagcaactaattcttacctgcagttgctgcatgtagcttctagaagtgttgtcagaccctttggtacaaatgtccgtgtatataacaagaagttcattccctaaaatgactataagcctgaccgctacgtacatcatgcactagggtatcctgaacattcacagttgtgtcacattgtttaaagtgataatttagagtgctctttgttttgtaaatttttaattttcatgggtacatagtaggtatgtttatttatggggtaccatgagatgttttgatacaagcatgaaatgtgaagtaatctagaaggctttttgaattattttgattaatagtaccacatggacaaatggtctctgacacaggtagtagatcctgtgggaggctaagaggatgggtctcaaaagtgggcccagaagtaaattctgatatattatccctcttttgttcaagaagtttcttctttctgccctgaaataagttctttggaagtaggctgtatataagttatttctagttatgaatcactgtattggttctgccaagaatgccagggttaccctccacattgaagttactactataacttatgaacaaagtaagtgagaggaggcaaagatcttccttctatgtgttttgcaggaaaggcttctcagaggagatgtcatctgagctaacttttgaaaatagatactttttatttgtgagcagataatattccagtgcagaaaggagcactgtgaggtataaggggagaaacctgactaaagtcaagaaggcatgaaagtacatgacatttctgggaacaaaggagaacaccaatgggttaaaacatgaggttcttgtgagggaagtggtataaaataaatagagaggtgtgtggttgctctaatgatggtatccaaagaatcacacctaccagtattgactaagcttgactgtgtgatgtaagttgaagcatgata

SEQ ID NO: 692910 - DNA, 2130 bp, Homo sapiens
caacttctgtcttttcatgtgtatgtctaatgcacaatttaaaatataatctccactataatacatgtttgcattattatatttttgagccataatttagtaaaaattaaaaaatggtaatctttttagcagctgatacttcaaaaacaaacacctggtttactttccttttctacttctacctgtactataggcatttggatttgagacccttaactcagtgatttgccttagcaaatgacaagaagaaatctggctttgctgtctacatgcttttaaaataatgagtggaagctgatgatgactgacttctctggctgggtatagacagattactatatttggcatgacagtagtctttggctaggtagagactatttattttttcattcaccttttctcagaattctaaaatttttggtgcccctttcaagaggctacccattttaaataatttagagcaagacttgaataaaatgtaaataaatattatattatgttcccagctaagataagcatattcaacttttrtgttttctaaaaaatatacatatagtcatgttcttaatattatgacagtatctcctgtcaaagttgtttgtgcttaattgtcacaattattgatagcaattatgattttcttgattagaatataaactccagaagatagtatttttaaaaacatcaactgacttcaaatacctaatagatggcctggtacataataggcactcaataaatgtctgttcaaatattatttcaaggatgactggagcaaaatccaatgtttgaggaatatatattagtcacgctagggtaagttgtgttgttggtaacaaccaacctccaaattttggtgacttaatgtacaaaagtttatttcttgctctgcaatgtgtcatcatggttgacagagggctctgcaccaggattgatggagactatgctcttgtagcagtattatctagattagtggtctccacttagatgttataataatggaagagagagactggagactcatgcatagcctattttgcacttgtttatttggctaaaagtagttatatgtctttacctagatgcaaagaggctggggagcattggagagcaaatagaatatttaatgaagattactatctctgtcacaacatggtaagcaaactagcaactaattcttacctgcagttgctgcatgtagcttctagaagtgttgtcagaccctttggtacaaatgtccgtgtatataacaagaagttcattccctaaaatgactataagcctgaccgctacgtacatcatgcactagggtatcctgaacattcacagttgtgtcacattgtttaaagtgataatttagagtgctctttgttttgtaaatttttaattttcatgggtacatagtaggtatgtttatttatggggtaccatgagatgttttgatacaagcatgaaatgtgaagtaatctagaaggctttttgaattattttgattaatagtaccacatggacaaatggtctctgacacaggtagtagatcctgtgggaggctaagaggatgggtctcaaaagtgggcccagaagtaaattctgatatattatccctcttttgttcaagaagtttcttctttctgccctgaaataagttctttggaagtaggctgtatataagttatttctagttatgaatcactgtattggttctgccaagaatgccagggttaccctccacattgaagttactactataacttatgaacaaagtaagtgagaggaggcaaagatcttccttctatgtgttttgcaggaaaggcttctcagaggagatgtcatctgagctaacttttgaaaatagatactttttatttgtgagcagataatattccagtgcagaaaggagcactgtgaggtataaggggagaaacctgactaaagtcaagaaggcatgaaagtacatgacatttctgggaacaaaggagaacaccaatgggttaaaacatgaggttcttgtgagggaagtggtataaaataaatagagaggtgtgtggttgctctaatgatggtatccaaagaatcacacctaccagtattgactaagcttgactgtgtgatgtaagttgaagcatgata

SEQ ID NO: 692911 - DNA, 1930 bp, Homo sapiens
gcaggtcctgtccactcagcacatcccagagcctggggctgcgtggagagggtagcaggcctggccatgggcatcttttcctgtgggtcccactattctggctcatccaatctgatcagcattggctgctgccttcaggtcacctgtacctgacccagatggtttctggttctgccagttttgtggagccatgctgcggctgctcgctctctaaagccgagtgcattgctgtcatcccagggctgtgttgtctcagggtatcctttgtgtaggctgtgctgggctcatttgaatttccatgcccaactgaaaacaaatcctccagttcacagcatcagccagcattcaacataccacacccccttgcagtggcaatctggcatgttcctgcgtgtcacttcagagtcaatcatgtcagtggtgacttccttgatttcctgataagttttctatcacataaaaaacacttaaaaccggtaagtctctatttctctcactgagtgcagctgagtattacaaaaagattcctgaccgtgtagtttactttctacttgaagaggaggaaagagagcttgcctgtgggaatggcactttgggtatttttctctgtccatgagtagcaacttctgtccacgtcatctggccagtcacccttgagacactgcagacaacaggaaamtaggaggaaggcgcacatgttggctgggcacatgcacaaaagttctttctccttctgtgtttgagcatttctcttcctttccagatgattagaagggaactaacgtagagcaccatccacggccatgctgagcactcactgacctgttgtctaaattcatcctacccacactttggattgataaattggtggcatttatgcttcttttatagaggaggaacctgaggttcctcctttaattaactttaatcttcgttggcctaaaaatcctctagcattgaggaacctgaggctcagaggagaggttccgctccatgctggatgttacagcctggggattctaaccatgtaacagaatttttctaacaccaaaacaatttagagaagcaaagagctttgctcctatcataaaagcaaaactacaggtaccacattttagtggtttccatgcatgctatcactcagtcctcttaattataatggacctcattaaagaggctgaggcagagacatgagatatttttgtgtgtttgtttatcccacatatcttgcagaaaggggaccaagaggtgactggaggtaaagagtcagaatttctaggggaggagctataaaaatgtctagactgcctaggagagtgtttctcaaaatgcattctgccaaatgagaccgagaatttctctatgagaaaagaattctttgttgaaacactttgggaatccccataataccctgccaacttagaaatctgccatgcagatttgcattgtagaccctctaaatgccttttgcttagaaatctgctgccatgcaaatttgcattgtagaccctctaatgccttttgctttttaaaagtagacaatgtcagagcttttgtttcacccagtattcctcaagtttctttgattttaaaaaatttttcttggccgggtgtggtggctcatacctgtaattccaacactgtgcggggccaaggtgagaggattgcttgagcccaggagtttgagaccatcctgggcaacactgggagacctgtctctattttttaaaaaataataggaaaagcctttttcttacacaatacccgttaatatgccatagaatcagtgccttgagaaaactactctggggacttctgacctagggcaggtgaagcaaaagattttatatggaatcccaactagaatcgtggtggtacactataggacgttgtgttgggatggattctgagggcttacctggtcattact

SEQ ID NO: 692912 - DNA, 1930 bp, Homo sapiens
gcaggtcctgtccactcagcacatcccagagcctggggctgcgtggagagggtagcaggcctggccatgggcatcttttcctgtgggtcccactattctggctcatccaatctgatcagcattggctgctgccttcaggtcacctgtacctgacccagatggtttctggttctgccagttttgtggagccatgctgcggctgctcgctctctaaagccgagtgcattgctgtcatcccagggctgtgttgtctcagggtatcctttgtgtaggctgtgctgggctcatttgaatttccatgcccaactgaaaacaaatcctccagttcacagcatcagccagcattcaacataccacacccccttgcagtggcaatctggcatgttcctgcgtgtcacttcagagtcaatcatgtcagtggtgacttccttgatttcctgataagttttctatcacataaaaaacacttaaaaccggtaagtctctatttctctcactgagtgcagctgagtattacaaaaagattcctgaccgtgtagtttactttctacttgaagaggaggaaagagagcttgcctgtgggaatggcactttgggtatttttctctgtccatgagtagcaacttctgtccacgtcatctggccagtcacccttgagacactgcagacaacaggaaaataggaggaaggcgcacatgttggctgrgcacatgcacaaaagttctttctccttctgtgtttgagcatttctcttcctttccagatgattagaagggaactaacgtagagcaccatccacggccatgctgagcactcactgacctgttgtctaaattcatcctacccacactttggattgataaattggtggcatttatgcttcttttatagaggaggaacctgaggttcctcctttaattaactttaatcttcgttggcctaaaaatcctctagcattgaggaacctgaggctcagaggagaggttccgctccatgctggatgttacagcctggggattctaaccatgtaacagaatttttctaacaccaaaacaatttagagaagcaaagagctttgctcctatcataaaagcaaaactacaggtaccacattttagtggtttccatgcatgctatcactcagtcctcttaattataatggacctcattaaagaggctgaggcagagacatgagatatttttgtgtgtttgtttatcccacatatcttgcagaaaggggaccaagaggtgactggaggtaaagagtcagaatttctaggggaggagctataaaaatgtctagactgcctaggagagtgtttctcaaaatgcattctgccaaatgagaccgagaatttctctatgagaaaagaattctttgttgaaacactttgggaatccccataataccctgccaacttagaaatctgccatgcagatttgcattgtagaccctctaaatgccttttgcttagaaatctgctgccatgcaaatttgcattgtagaccctctaatgccttttgctttttaaaagtagacaatgtcagagcttttgtttcacccagtattcctcaagtttctttgattttaaaaaatttttcttggccgggtgtggtggctcatacctgtaattccaacactgtgcggggccaaggtgagaggattgcttgagcccaggagtttgagaccatcctgggcaacactgggagacctgtctctattttttaaaaaataataggaaaagcctttttcttacacaatacccgttaatatgccatagaatcagtgccttgagaaaactactctggggacttctgacctagggcaggtgaagcaaaagattttatatggaatcccaactagaatcgtggtggtacactataggacgttgtgttgggatggattctgagggcttacctggtcattact

SEQ ID NO: 692913 - DNA, 1930 bp, Homo sapiens
gcaggtcctgtccactcagcacatcccagagcctggggctgcgtggagagggtagcaggcctggccatgggcatcttttcctgtgggtcccactattctggctcatccaatctgatcagcattggctgctgccttcaggtcacctgtacctgacccagatggtttctggttctgccagttttgtggagccatgctgcggctgctcgctctctaaagccgagtgcattgctgtcatcccagggctgtgttgtctcagggtatcctttgtgtaggctgtgctgggctcatttgaatttccatgcccaactgaaaacaaatcctccagttcacagcatcagccagcattcaacataccacacccccttgcagtggcaatctggcatgttcctgcgtgtcacttcagagtcaatcatgtcagtggtgacttccttgatttcctgataagttttctatcacataaaaaacacttaaaaccggtaagtctctatttctctcactgagtgcagctgagtattacaaaaagattcctgaccgtgtagtttactttctacttgaagaggaggaaagagagcttgcctgtgggaatggcactttgggtatttttctctgtccatgagtagcaacttctgtccacgtcatctggccagtcacccttgagacactgcagacaacaggaaaataggaggaaggcgcacatgttggctgggcacatgcacaaaagttctttctccttctgtgtttgagcatttctcttcctttccagatgattaraagggaactaacgtagagcaccatccacggccatgctgagcactcactgacctgttgtctaaattcatcctacccacactttggattgataaattggtggcatttatgcttcttttatagaggaggaacctgaggttcctcctttaattaactttaatcttcgttggcctaaaaatcctctagcattgaggaacctgaggctcagaggagaggttccgctccatgctggatgttacagcctggggattctaaccatgtaacagaatttttctaacaccaaaacaatttagagaagcaaagagctttgctcctatcataaaagcaaaactacaggtaccacattttagtggtttccatgcatgctatcactcagtcctcttaattataatggacctcattaaagaggctgaggcagagacatgagatatttttgtgtgtttgtttatcccacatatcttgcagaaaggggaccaagaggtgactggaggtaaagagtcagaatttctaggggaggagctataaaaatgtctagactgcctaggagagtgtttctcaaaatgcattctgccaaatgagaccgagaatttctctatgagaaaagaattctttgttgaaacactttgggaatccccataataccctgccaacttagaaatctgccatgcagatttgcattgtagaccctctaaatgccttttgcttagaaatctgctgccatgcaaatttgcattgtagaccctctaatgccttttgctttttaaaagtagacaatgtcagagcttttgtttcacccagtattcctcaagtttctttgattttaaaaaatttttcttggccgggtgtggtggctcatacctgtaattccaacactgtgcggggccaaggtgagaggattgcttgagcccaggagtttgagaccatcctgggcaacactgggagacctgtctctattttttaaaaaataataggaaaagcctttttcttacacaatacccgttaatatgccatagaatcagtgccttgagaaaactactctggggacttctgacctagggcaggtgaagcaaaagattttatatggaatcccaactagaatcgtggtggtacactataggacgttgtgttgggatggattctgagggcttacctggtcattact

SEQ ID NO: 692914 - DNA, 1930 bp, Homo sapiens
gcaggtcctgtccactcagcacatcccagagcctggggctgcgtggagagggtagcaggcctggccatgggcatcttttcctgtgggtcccactattctggctcatccaatctgatcagcattggctgctgccttcaggtcacctgtacctgacccagatggtttctggttctgccagttttgtggagccatgctgcggctgctcgctctctaaagccgagtgcattgctgtcatcccagggctgtgttgtctcagggtatcctttgtgtaggctgtgctgggctcatttgaatttccatgcccaactgaaaacaaatcctccagttcacagcatcagccagcattcaacataccacacccccttgcagtggcaatctggcatgttcctgcgtgtcacttcagagtcaatcatgtcagtggtgacttccttgatttcctgataagttttctatcacataaaaaacacttaaaaccggtaagtctctatttctctcactgagtgcagctgagtattacaaaaagattcctgaccgtgtagtttactttctacttgaagaggaggaaagagagcttgcctgtgggaatggcactttgggtatttttctctgtccatgagtagcaacttctgtccacgtcatctggccagtcacccttgagacactgcagacaacaggaaaataggaggaaggcgcacatgttggctgggcacatgcacaaaagttctttctccttctgtgtttgagcatttctcttcctttccagatgattagaagggaactaacgtagagcaccatccacggccatgctgagcactcactgacctgttgtctaaattcatcctacccacactttggattgataaattggtggcatttatgcttcttttatagaggaggaacctgaggttcctcctttaattaactttaatcttcgttggcctaaaaatcctctagcattgaggaacctgaggctcagaggagaggttcygctccatgctggatgttacagcctggggattctaaccatgtaacagaatttttctaacaccaaaacaatttagagaagcaaagagctttgctcctatcataaaagcaaaactacaggtaccacattttagtggtttccatgcatgctatcactcagtcctcttaattataatggacctcattaaagaggctgaggcagagacatgagatatttttgtgtgtttgtttatcccacatatcttgcagaaaggggaccaagaggtgactggaggtaaagagtcagaatttctaggggaggagctataaaaatgtctagactgcctaggagagtgtttctcaaaatgcattctgccaaatgagaccgagaatttctctatgagaaaagaattctttgttgaaacactttgggaatccccataataccctgccaacttagaaatctgccatgcagatttgcattgtagaccctctaaatgccttttgcttagaaatctgctgccatgcaaatttgcattgtagaccctctaatgccttttgctttttaaaagtagacaatgtcagagcttttgtttcacccagtattcctcaagtttctttgattttaaaaaatttttcttggccgggtgtggtggctcatacctgtaattccaacactgtgcggggccaaggtgagaggattgcttgagcccaggagtttgagaccatcctgggcaacactgggagacctgtctctattttttaaaaaataataggaaaagcctttttcttacacaatacccgttaatatgccatagaatcagtgccttgagaaaactactctggggacttctgacctagggcaggtgaagcaaaagattttatatggaatcccaactagaatcgtggtggtacactataggacgttgtgttgggatggattctgagggcttacctggtcattact

SEQ ID NO: 692915 - DNA, 1930 bp, Homo sapiens
gcaggtcctgtccactcagcacatcccagagcctggggctgcgtggagagggtagcaggcctggccatgggcatcttttcctgtgggtcccactattctggctcatccaatctgatcagcattggctgctgccttcaggtcacctgtacctgacccagatggtttctggttctgccagttttgtggagccatgctgcggctgctcgctctctaaagccgagtgcattgctgtcatcccagggctgtgttgtctcagggtatcctttgtgtaggctgtgctgggctcatttgaatttccatgcccaactgaaaacaaatcctccagttcacagcatcagccagcattcaacataccacacccccttgcagtggcaatctggcatgttcctgcgtgtcacttcagagtcaatcatgtcagtggtgacttccttgatttcctgataagttttctatcacataaaaaacacttaaaaccggtaagtctctatttctctcactgagtgcagctgagtattacaaaaagattcctgaccgtgtagtttactttctacttgaagaggaggaaagagagcttgcctgtgggaatggcactttgggtatttttctctgtccatgagtagcaacttctgtccacgtcatctggccagtcacccttgagacactgcagacaacaggaaaataggaggaaggcgcacatgttggctgggcacatgcacaaaagttctttctccttctgtgtttgagcatttctcttcctttccagatgattagaagggaactaacgtagagcaccatccacggccatgctgagcactcactgacctgttgtctaaattcatcctacccacactttggattgataaattggtggcatttatgcttcttttatagaggaggaacctgaggttcctcctttaattaactttaatcttcgttggcctaaaaatcctctagcattgaggaacctgaggctcagaggagaggttccgctycatgctggatgttacagcctggggattctaaccatgtaacagaatttttctaacaccaaaacaatttagagaagcaaagagctttgctcctatcataaaagcaaaactacaggtaccacattttagtggtttccatgcatgctatcactcagtcctcttaattataatggacctcattaaagaggctgaggcagagacatgagatatttttgtgtgtttgtttatcccacatatcttgcagaaaggggaccaagaggtgactggaggtaaagagtcagaatttctaggggaggagctataaaaatgtctagactgcctaggagagtgtttctcaaaatgcattctgccaaatgagaccgagaatttctctatgagaaaagaattctttgttgaaacactttgggaatccccataataccctgccaacttagaaatctgccatgcagatttgcattgtagaccctctaaatgccttttgcttagaaatctgctgccatgcaaatttgcattgtagaccctctaatgccttttgctttttaaaagtagacaatgtcagagcttttgtttcacccagtattcctcaagtttctttgattttaaaaaatttttcttggccgggtgtggtggctcatacctgtaattccaacactgtgcggggccaaggtgagaggattgcttgagcccaggagtttgagaccatcctgggcaacactgggagacctgtctctattttttaaaaaataataggaaaagcctttttcttacacaatacccgttaatatgccatagaatcagtgccttgagaaaactactctggggacttctgacctagggcaggtgaagcaaaagattttatatggaatcccaactagaatcgtggtggtacactataggacgttgtgttgggatggattctgagggcttacctggtcattact

SEQ ID NO: 692916 - DNA, 1330 bp, Homo sapiens
ctttcaatgcttgtaagggaattcttacaagctttcccttacaagcattgaaagaaattccttacaagcattgaaaaaatcccttacaagcattgaaagaaatgtcagcaaacatgatgtccatttctcattaactttatttcctacttgttatcagaacgaaattaatagctacctgattcaaacccttcacatatttatttaactattactcctctttgacagaaggggaaactgagacacagagtaacttgtccaaggtaataatttctgccaggagatggtggagccagaatctgaaccctatacacccaaattaatggacgcattttaaaagggatgggatggaaaaggagcagttaatttttttccccaaaatagcttgcaaraaaagattgttgtgaatgggaacaaaccgtttaaattacaaatgcaggtagatgagaatgcagagtacacaaactttacccctaaaaaagtaggggtatatttgttatatttgattacaaacactttgaacaacatcaaacccctgtgacggtcgactgagtaaataatttaatgtcaccgttcagacactgtattttacaggctaaataaaatacattatatattgaaggatgaggggggttggtgatgttaaccggagcaagagtttaaggaaaattactttcattatgagcagttaattagaaaagagtgcgtgtgtcaaccgaaggaggttaaaaaaaaagacaatcacattgccttaacgcactctctgtccgaaaaaagtaactaaatcaccgtgggtcagcgtctacgccaactggagaaccggcccagcgggatcttgtgaggggatgacaggagaccctagaagagggggaacagtggcagtgacaggaaagatggcatgtctcccatcccggaaaaaaaggggagaacacggggggcaatcggcggagaggggaaggcagaaaatgttaccagaggtgccaaatgaggtgagaaagaccagggtaggaaacataagaaaggcgggactctcgggcaggaaggtctgtttggggtagggaaggcatgtcaggacagagctttccggacagccgaccttccttctttccagcccctccatccccgacaaactcactttctcagcaaccctaagcccgtgggtcaccctcgccttgctccccgccccccaccccaagccggataagtggaggagggagcttcagcctcaccctccttgttggggaggagcgggcactggacatagaccagattcatggacgagaagaccaggagacgcagagaggcccaggacccgggtgacaagtcggggcgg

SEQ ID NO: 692917 - DNA, 1589 bp, Homo sapiens
atataatctcagcctaggctggctctgctcatgggagtgaagtggtctgcagcttgagagctcacaccagcacacctcacaatgaagatctggagagaatgacttgtccaccagccactgaacaaaattctcaggctttattttggttggaccaacatggatcaaatatctgtctttggaccaatcacaatgggatgctcctgtagctagaccatgggtggggactagagtggacttggggagatgcaagagagtgaacacaagcatttggactttagtctgtgtgtccttggagcatggtatgtattggtgcatggggtggcttgttcatctttgtggtaatagaactccaggggtggtaatgtccctggatttggcagaatcagggacaggaaggacactgcctggctgacactggctctactgtctcagcagaagccactaagctgggccatagagccaattctagaatctagtccatggaggtacatttgacacatcttggcattgggcaggaaggaggagaggcagagtgaaagggtgacagtaaaggacccagccagtcttcgttggtcaatgttgttctcctatggttttcatcactcttcagagaaaagaggctaagaatcttttaggggatcctgagggttggtgctttctgcaaaatacctctaaaaggccttgtggcttcccaggcagagcctgaggtgcaggaacctgagttcatgctttatggatttgagtcttttattctttttgcagcgtgtacatgcatagctcctctaggattggctttgattgatagttgcctttgcaacattaccatttcctcagggatctgatgtcttcagaatcgctgcgctggtttccatttgtatttagtgggccctcactgggtggttatgcgctctggactatgtttggagaattaatttgctttatgcctcaaagtcaataggacgctttttgtttctgctccttgaaatggacgtagaagcctttttaatagggggtcctctccctgagctggcaaaagagggcttttctgacttggtgattttcctcctgtgtgtggatctgttggggtggctgaaaactaagctgcagtaggggagataaaagggacaggatagtggtgggaacatgatgctccctgatttcagatggtcacactgctctagctggcttttgggagagccctagacttggaagaaaggggatgctggcaaaaaagctttgattatcagctttgtcattcctaagccatatgaccctaaacacttggcttttaaatttcagaaaacagtcatggaatacctgcatgccaggactatcttggacatgtgcatgcttcttttttttgaagtagccctaaggtgacagtgagcatgacgctcggagttatcaaggggctactttgtgcatggattgtgcccaagcttttcgtgtgctgttcagatcgtcatgaagccccatgaggcaggtattagtgtcttcactttacaaatgacaaaaacagaggctctgacaggttaagtaatttgcccaagatctcttagcaagtatgtgagrtgtaaatctgagagatg

SEQ ID NO: 692918 - DNA, 638 bp, Homo sapiens
cagtggagcagggcagagcctcataaaatccctcttaaacgtgtctgttcttttgccaaatttccattctggttgccagctacctttttcctcctctttctttccacagccactgccatcctcattatagccccagacaattcagctcttgaaagtgtatccagcaaaacaaaagtgyaacagcagctcagcaccacttggaaagcagttgcatagccacctctttctctacaagctcagtccttcctgaggttgccctctcacctattcccctacatcaaaagtgactcatcaaagtattcagtagacaaaattagtctctatccagggagaattcactacttggaaagtaagatgttctgtttctcattacatacaaaaaaaaaaagttgataaaatcacagaattcagtttgagagagaggaagatactaaatgtcatttgtcattctgaccttgaagtcacattgagtccaattcaatcagaaaagtgcaagtgaaaatttggatttttaatgagacaccaggactagaaatactgacttcaggggtcatccgcagagagaaaatagttgaaatgtttggaatggatgagatctccaaagcaacaagtgaagaaaaaggaacaaaggtccaaaa

SEQ ID NO: 692919 - DNA, 638 bp, Homo sapiens
cagtggagcagggcagagcctcataaaatccctcttaaacgtgtctgttcttttgccaaatttccattctggttgccagctacctttttcctcctctttctttccacagccactgccatcctcattatagccccagacaattcagctcttgaaagtgtatccagcaaaacaaaagtgtaacagcagctcagcaccacttggaaagcagttgcatagccacmtctttctctacaagctcagtccttcctgaggttgccctctcacctattcccctacatcaaaagtgactcatcaaagtattcagtagacaaaattagtctctatccagggagaattcactacttggaaagtaagatgttctgtttctcattacatacaaaaaaaaaaagttgataaaatcacagaattcagtttgagagagaggaagatactaaatgtcatttgtcattctgaccttgaagtcacattgagtccaattcaatcagaaaagtgcaagtgaaaatttggatttttaatgagacaccaggactagaaatactgacttcaggggtcatccgcagagagaaaatagttgaaatgtttggaatggatgagatctccaaagcaacaagtgaagaaaaaggaacaaaggtccaaaa

SEQ ID NO: 692920 - DNA, 1175 bp, Homo sapiens
tgcttggggacagaggaattaaggtttgcaagagtagtggggctccccagcccctaggtggcttcctgagggagtactgaggatccttcctcaaggccagagtggggttcatgaagggtgaggaaacggtcaacctggctactcccctctcactccactctgacctggcatcattgacaccgcattacccttgctgttaggatcccccagttgcgttcccagacattctcctctggctctggcttgggagtcctaatctgggagggtcctcgcagagacggagctccacgcttggaacaggattgccacccctctgactccagtggcatcactccaatccccttggagctgggaggagtcaggaggctgaccacacacctgtcccctgctccccacaaggcactgtcccccccagctccatgaccacagttaagccttggaggtggaaggaaygcttggttcctgctgcccagccatcacccccaacgtgcaaccaaattctattgcgtgctcctgccccagctccaccctcgctctgctccctccatctgggtgcttggccctgcttgccccacacccccacccaccgatcttggccgtctggcaccctctctcctcccatccctgggggagctggcatggacccagcatagcaatgttgtaatgtccctggcagcgcccatggagcggagctgctgggtctgttcccagttaacccaggccctccgcccgccaggggaacttgactgaggctctaggaggggagatgctggtcctgagctgagagaccagtgggagggagctgtgtggggctgttagtagaccacagaagctgcccaagtaaggggcattggagcattgaggcttctgagtgctgctcagtggggccacttggcttttcagagcagtgggccttttttctcaaaggaagattagcgtgggggtgtctatgtacttacctggtggcctcagaaggaggacttgtttggagtctattactccattcagggtgcaaaaagatggttggcaatgacactgagttaccagaatgctggggagcaacaggctggggtgggctgagcgtgggaaaggcaggatcctccttctgggacggctgttctgctatcactctgtcctgagcctgggccctagaccctgagttcccactctaggta

SEQ ID NO: 692921 - DNA, 1565 bp, Homo sapiens
gtattttcagattaaaccctctcttaaaaataacttgaggcctctctagactgtacatttttatagctataatgtactctttcagatctgagcaaataccacaaactcatctcagatcttatctctgacaacctggtttgaccttcatgatagttgggaagcctgtgttaaaggagaagggatttgaggagacttgcgattttgtgattgtgcctttctttctttgatcttctaggacaccttttgtctcctaactcctttatctcctaagactgagttctagactagcttctgtttatttatttatatatttatttacttatttatttaaagcatagggtcttgctctgtagaccaggctggagtgcagtggtgcaatcatagctccctgcagcctcaaactcctgggttcagatgaacctcctgtctcagcttcccaagtcgctgcaactacaggtgtgtgccaccacacctggcttgtttttgtttttgttttttgagacagggtctcactctgtcatccagtctgcagtgcagtgataaaatcttggttcactgcaacctccgcctcctgggttcaagtgattcacccacctcagccttcccagaagctgggattacaggtgcgtggcacaatgcccagctaatttttgtattttttggtagagccagggtttcaccatgttggccaggctagtctcaaactcctgacttcaggtgatccacctgcctaggcctcccaacgtgttgggattataggcgtgagccaccgctcccagccacgatgggctattttattttcgtagaaatggaatcttgctatcttgcccaggcatacctcaatttcctggcctcaagcgattctcctaccgtggcctcttgaagtgctgggattacaggcatgacccactgtgcctggcctcactcattcattcatttattaacccaagatttatttgttaatcacctatgatttaaaatttaatatgactaaaacatcatctttcatctaaaaaagtttgatcaggatttacgatcctggtgtcaacttcaggaaccccctatatatggatgacctacacaatgacatcctcaacctgggccttttatcctctctccatgtgttttcaggacacattttaaaacataatattctggaagcagaatgcatatgcatcgggttttccctaaatcactcgtgtcctcatttccccattttttatgaatattattcatcttcttgggcctctagtctgtcatcctttatgggcagggatgatctcttcgtttttgcttggcctcctcaaatagggtggcacgtggtgcatggctcatagcaaacttcaaacaagattgtctgactaagtcatttaaatgactaactgaatcctgagcggtgagaaggcactcagtacagttctgtatttagtctcgcagaggttgagtggcatgtgatagatgaggcaagaatagcaaaccgataaaattccatggtgtcagttgagcactcctttataagcttgactttgggtcattttrttcacgtattcttcagcattctttta

SEQ ID NO: 692922 - DNA, 547 bp, Homo sapiens
gagagcggagttttgccattgcgggagcatccaaccctggagctcatgactggaggaattgaaaggtagagtttcctgagaatggtttcctcctcttttctaccagcttttcccagtctgtagacatgataagtcactgcaaatctgcccttgaatctttctttgctttcgcttttgcttttttttttttttttttttgagacgtatcactctatcgctcaggctggaatgcagtggcgccatcccagctcaccacaacctccgcttcctgggttcaggtgattctcctgcatcagcctcctgagtagctgggattacaggtgtgagtcacaacacccggctaattctttttgtatttttagtagagatggggttttgcgatgttggctaggctggccttgaactcctgacctcaagtgatctgcccgcctcggcctcccaaaatgttgggatttcaggcataagccaccgtgcctggcctttgcttttgctttcgaaggggtgttcttttctgtgtacamaatggaaggagaagagccatggcctt

SEQ ID NO: 692923 - DNA, 840 bp, Homo sapiens
ccggtagccacaggcctcacccagctcccacgcagctcacaccctgaaaggatggtctcactcccactatgccccgcctacagcatcaagtttacttccagttcttgttgagaacttgcccaaagctacaagcctctcaagtgagaaagcaagcagactcacagttccttggctgtcccacagagcctgcaggagcaatccacctctttcaaaggctctggggatactcttggctttcctggtatattcctgtggtagttcttagaggaaaagctcacagtgtggatctctacatactgctctgtccctctgagtggcagctgcaagttaktccggtctcttaatctgccattttttcctccatgctcatttttatggagctctttcttgttttccacatctgatcatgttccactggtcagactttagtcacatgatcacacctaaatgcaagaaaggctgggaaatgtaggttgtgtgtccaggaagaagaggaaacagtgtggtatacttacacaatatgcaaatatgttaaaatcagcccaataacaataaaatgacagttcccagtgtatgccctggaggctggagaaatgaagcctagtctctcctaactgcatctttggtcctacccaggaatacctgcaagtaaataatatgttgtaagtttttctgtctaagaacctttaattgccaccacaggacttcaattcctaagaaatgaaagtaaaaagctccatttcaggggtaagtaaaagagtgtttgaggtaagacttgaaggagaaaaaaattatcaaaatatccttgggttagtttaaaaatgtaatttacccaaagcc

SEQ ID NO: 692924 - DNA, 1197 bp, Homo sapiens
tcagtttttaaaatggattttatgaccatatgcatgaaggaatagttctggcagaaaaacaccttcactctaatcaaagcccaacggagattcttgatgtcatagggtatgaagtgaggaacaaagggattttgctcccatattatgcatgtttgcctaaaaccaatacacacacttccttgtccccttcaatctgacccattatccaagaaatgcaaacactgaggtacagtctttcccatcgtatattttaaatatcacctgataccaataagagtatgttcaacagataaatactgctaacgaaattacatccttgggaagcagtttcattggacattttatcaagattagatgtgttcacattctttgagccaatgattgaacttctatcctcatttcaaaggaaatgctcttaatttcaggaaataaaggtcttacacataaatgttgtagaggtgattatggcaacaacaaccaactatagagatttgttaaattaatttggcatatagaatatagtgatgattgaacttatacctatgcatatatgtatagctccagccatacgtaaattcttacagattttgaattagtaaacttataataattggcttttcaagagctctagtgctaaaggaatcgtgagttcatgcgttagctttaagtgaacacattagtacatgctttctgaatggtagactattgcctttctgtttctaaggctgtggcattttaatgattttacatttgaaaatgggttgaaatttaatttaggtatcaagtggaaagtgatatcattttgcaataacttggtgacatgcttaaaagatatgctaagtaaaaaaaggcaggaaaaaaattgttagtatagccaaactgaaaccaaaaaatgaaatagagtaaaaatgttttaaaataaaataagttaatttttcccatttttgcctcttttttcaaaatttcttcaagaaaaaaataaaatattctttgaaaaaaataaatatatataaatttgcaaacaaaatttgcctcttaggtctatactttctcatatgtcaactgcaactcccaaattgtaakgatcacttaggttacatgaagcctgatattggccttgtatctccaatattttttatgcaactcaggaggcctcattcccagtggtggtatgagctcatattagtctgttctcat

SEQ ID NO: 692925 - DNA, 986 bp, Homo sapiens
tttgctttaatgctgaacaaaaatgtcccatgtaaaaaattcatgtgctatctgttcccaaactcagtttccacacctaattacagtaaatagaaaggagagaaaaaccaaactttcaagatggaaaggagaacccaggacagcctcaaacccaacacttagaatggtatttctgcatgcccaatctacagcaaactttcagacttaagaaggaagagagaatggataaaacgttacagaagacagtattacattttaaaaattggtaagatagtagaatgtttagatctggaaggactttaaattaatcttttttccttacattcagataagctttaatgtgtactaaattctatcccaaaatctctattctttgtgaccctactgtaccctacgcagatttttgttgactcaatactccactgcacttaatttgttttttagtctcagctagacctgaaacaactttaggaaagggatagtgtcttcttgcttacttttatttttcctaccaactagaatactaataatcattcaaatgtttattgaatgaattaatggataagcaaatgaattaatataattagttgcttatattttaccccccacactagcctatagctttaaagttgtggtgactacaatgtctagtcacttaacctcacmgggcagatttgctcaactaataagattttgaatgagaaagtgcttaaaaattctaaaagtgcttctctaatatttgttactattgtgttcaaagactgttagctaccaaatgaaggtttcatagtcaacagaggaggctgaatcccagacaattacaactgaggcccgggctactccaagtgtgatctttggagtatctgactcagcaaacaaacaagaatcacctcaacccaaaaccctaacccaaatagccatcattactacttccttccaatctccatctccacaccctccaataatgatgaattcttaaagcttga

SEQ ID NO: 692926 - DNA, 682 bp, Homo sapiens
aactcatgtatccaatgccaaaagtcttcaaaatcttcattaggtatttgttatgccaacttctttctcagccctcccggtttgtaactttttaaatctttacccagtgttgcacgaagactgttgagatggttccctctgccttcctctctctagkattctccctgggaagtttaaaatatataatgttatgtaaagtaactcactggggccttcctcttgggcctcacctctatacactgaagacaatgctttctagcaaggaggacccatgcttccagagaggagggtttgcaactggagtaacttgagtatgtctttgggattcttgagctcaacccaaagcagttcagaaacatttctttgaaacaagttcccaagatgaattctaacaactgtaatatcgcatttggcattttaaaaattttgattttacatttagacagagctattaggacatggtgggataaaaatggtagtatcgaaatatactgtttcaaatcaaattattgtattatttgttctcaatgacagacataacccaaacacattcttagtacccagaataaaggcacagccatgaaatcaggcagttattaataaaaacctagtgtagatagctaatgaaagatgaaaatgaagctgtgacatgattatgaactgctattagcaagcaatgtca

SEQ ID NO: 692927 - DNA, 1222 bp, Homo sapiens
tgcattattttgtttttaactttttattgtgaacgttttacaaatataccccaaagagaatggcgcaacaaacccccatttatccatcacttggtttcaagatcaatattttgttacccttgttttatctgtgcccacctccctatgaaagaatatcttgtaatattacacaaagttataaaacaaaaagcattcaaagagttgctgctgggcctctcgacctgagtcttatttagtgtttcagtgtacctaagcctaacgttctttctgatggacaattaatggcatgattctagttctttattcagtgacaacctaaaagagattagctgctaagtagactcttcatcatttaatgagattgcctgaaaaagtgaaagatgtttcagcttgtacgtatttcaattcaactgtgctcaatcaccttttaaaatgaataaaaagcggtctatagattatatattgctgctatatcttttgtaaaatgtgccattgtggaagagaatctgtactctttcaagagagtaagtaaaaggggagacttctaatttgtacatgtgaaagctaagaaatacctttacctctaaaaacatgatcacagatctactagcatattttaagagggttatattcatgtattttcaatagctgtaactatactgaatttacatgagtctacacagaagagatatccttaagcacattttcaagttatgattttttactgctccattgtcttttgacaatgattttcttctttgttctcactcacttgccatttttgacctagaattttcactataaaaatatcatgagagagagactcagagacacagagttatagactatttgatagtacattcttttctaccataaagtcaaggtaagtgttaggatgaatggacagaaccactataaacttttgcttcttcatttcatggagccaaatggaacatagaataattagttycaacaagttaatgatttttctgttcctactctgcatttggtagtttgatattttatttattttggaaatttagcagagcatatataaacattcttaaggcaggtcctttaggtttgcaaaagagtacagtagacaggctgatgggtgggggtcagaaagtagataaaaacagaggcatcattaaaactgaatagctaaaacttccttggcattacagtatagttttcaatgttcatataccacgcaggaaaa

SEQ ID NO: 692928 - DNA, 1710 bp, Homo sapiens
cattcatcatgccaaagagtacggattttatagggaggaatctttaggtttccctggaacttacaaaagatacaatggatgagaaagagagagagagagagagaatgcttttgattactatgcttaaatctattttagcatggaagatgaaacaaaaataaaattgacattcattgctcttaagtagcttataattttatagagaaaatatgtccataactaaaatccaatgcaaagtgataaaagtttatagctccttttaatttacagagtacttctacataaatgattgagtgaatgactgaagcaaagaaatggaatccaaaraggaaaagatattttgggaaaatgagtagtttgttttgaccaactagaaactcatataggagaaaagtaaaaaaagcctaacaaaaataattaagactagatcacataatatattgagcataatattccttgtttccgaacttataaaagtaagaacatagacctcagaatctctgagtacacaaatcgcacttgcttgcacttaaaccttgactagactaaatactatttcaaatgctggtgattccaagaaaaatctagtcaccactgacaaataaatactactgctgattcataatcaactacataaggccaactatgtgaagctgtagaaaactataacctcactgctttgatcttttcactggctcctgagtagtgacctaggatatttgcagtctgtctccacatatacttatttttgtctgttatctattactgtgtaacaaaccatccccaagagatagtggcttaggacaacagcaacttagtatttctgaaggttttgtggatatttctgattcacttggtatcagctgaggtgctgggaagactggatgttccaaaatgctcttacttatatttttagcagttggtgccctgactgggagctcagccaagggcctcagtttttatctacttgggcctcccccttgaactgcttgggcttcctcgcagcatggtagtgagcatggtagtgaagatctaaaaaggactgttccaagtggcaaaggtggaagttatagatcttttaacaacaaaactctgaagttacacagcataatatctgcccccattcttttgttcaaagtgggtcattggagcatcacaaatttaaggggagagaaaatagacttcatgtctcgataggaaagtggcaaggtcatatcacaaggaagtagatgggatggccgatattattataatcatctttgtaaaaacaatctaccactatttatcttctggacataagaattcatattcctgacacttgaaaaatattcttagcctatctccccaaaatctcatcccattttaacattaggctcatactcaagttccaggacttttttatctaaattagatcaggttaagaatgaatcctcttgggtacaaagacctatgaactatctactactccattcctatgcccaacaaacaatggggagatgtctccccgtaatagacattcccaatcaaaaaggggggaacaattacatttaggtcaactgtttatacaaattttgatatccagccagacagatgttggtaatctgtgtgccagtttcaaaaaatttacattgattggggcccactgctggtccctatgaataattctccttagttttttgttctgctttcaagatcttaggccagtgagtc

SEQ ID NO: 692929 - DNA, 1710 bp, Homo sapiens
cattcatcatgccaaagagtacggattttatagggaggaatctttaggtttccctggaacttacaaaagatacaatggatgagaaagagagagagagagagagaatgcttttgattactatgcttaaatctattttagcatggaagatgaaacaaaaataaaattgacattcattgctcttaagtagcttataattttatagagaaaatatgtccataactaaaatccaatgcaaagtgataaaagtttatagctccttttaatttacagagtacttctacataaatgattgagtgaatgactgaagcaaagaaatggaatccaaagaggaaaagatattttgggaaaatgagtagtttgttttgaccaactrgaaactcatataggagaaaagtaaaaaaagcctaacaaaaataattaagactagatcacataatatattgagcataatattccttgtttccgaacttataaaagtaagaacatagacctcagaatctctgagtacacaaatcgcacttgcttgcacttaaaccttgactagactaaatactatttcaaatgctggtgattccaagaaaaatctagtcaccactgacaaataaatactactgctgattcataatcaactacataaggccaactatgtgaagctgtagaaaactataacctcactgctttgatcttttcactggctcctgagtagtgacctaggatatttgcagtctgtctccacatatacttatttttgtctgttatctattactgtgtaacaaaccatccccaagagatagtggcttaggacaacagcaacttagtatttctgaaggttttgtggatatttctgattcacttggtatcagctgaggtgctgggaagactggatgttccaaaatgctcttacttatatttttagcagttggtgccctgactgggagctcagccaagggcctcagtttttatctacttgggcctcccccttgaactgcttgggcttcctcgcagcatggtagtgagcatggtagtgaagatctaaaaaggactgttccaagtggcaaaggtggaagttatagatcttttaacaacaaaactctgaagttacacagcataatatctgcccccattcttttgttcaaagtgggtcattggagcatcacaaatttaaggggagagaaaatagacttcatgtctcgataggaaagtggcaaggtcatatcacaaggaagtagatgggatggccgatattattataatcatctttgtaaaaacaatctaccactatttatcttctggacataagaattcatattcctgacacttgaaaaatattcttagcctatctccccaaaatctcatcccattttaacattaggctcatactcaagttccaggacttttttatctaaattagatcaggttaagaatgaatcctcttgggtacaaagacctatgaactatctactactccattcctatgcccaacaaacaatggggagatgtctccccgtaatagacattcccaatcaaaaaggggggaacaattacatttaggtcaactgtttatacaaattttgatatccagccagacagatgttggtaatctgtgtgccagtttcaaaaaatttacattgattggggcccactgctggtccctatgaataattctccttagttttttgttctgctttcaagatcttaggccagtgagtc

SEQ ID NO: 692930 - DNA, 1710 bp, Homo sapiens
cattcatcatgccaaagagtacggattttatagggaggaatctttaggtttccctggaacttacaaaagatacaatggatgagaaagagagagagagagagagaatgcttttgattactatgcttaaatctattttagcatggaagatgaaacaaaaataaaattgacattcattgctcttaagtagcttataattttatagagaaaatatgtccataactaaaatccaatgcaaagtgataaaagtttatagctccttttaatttacagagtacttctacataaatgattgagtgaatgactgaagcaaagaaatggaatccaaagaggaaaagatattttgggaaaatgagtagtttgttttgaccaactagaaactcatataggagaaaagtaaaaaaagcctaacaaaaataattaagactagatcacataatatattgagcataatattccttgtttccgaacttataaaagtaagaacatagacctcagaatctctgagtacacaaatcgcacttgcttgcacttaaaccttgactagactaaatactatttcaaatgctggtgattccaagaaaaatctagtcaccactgacaaataaatactactgctgattcataatcaactacataaggccaactatgtgaagctgtagaaaactataacctcactgctttgatcttttcactggctcctgagtagtgacctaggatatttgcagtctgtctccacatatacttatttttgtctgttatctattactgtgtaacaaaccatccccaagagatagtggcttaggacaacagcaacttagtatttctgaaggttttgtggatatttctgattcacttggtatcagctgaggtgctgggaagactggatgttccaaaatgctcttacttatatttttagcagttggtgccctgactgggagctcagccaagggcctcagtttttatctacttgggcctcccccttgaactgcttgggcttcctcgcagcatggtagtgagcatggtagtgaagatctaaaaaggactgttccaagtggcaaaggtggaagttatagatcttttaacaacaaaactctgaagttacacagcataatatctgcccccattcttttgttcaaagtgggtcattggagcatcacaaatttaaggggagagaaaatagacttcatgtctcgataggaaagtggcaaggtcatatcacaaggaagtagatgggatggccgatattaytataatcatctttgtaaaaacaatctaccactatttatcttctggacataagaattcatattcctgacacttgaaaaatattcttagcctatctccccaaaatctcatcccattttaacattaggctcatactcaagttccaggacttttttatctaaattagatcaggttaagaatgaatcctcttgggtacaaagacctatgaactatctactactccattcctatgcccaacaaacaatggggagatgtctccccgtaatagacattcccaatcaaaaaggggggaacaattacatttaggtcaactgtttatacaaattttgatatccagccagacagatgttggtaatctgtgtgccagtttcaaaaaatttacattgattggggcccactgctggtccctatgaataattctccttagttttttgttctgctttcaagatcttaggccagtgagtc

SEQ ID NO: 692931 - DNA, 1131 bp, Homo sapiens
tgataacattatgagctttctacattagcagggccccctggtgtggttttgtgcctggagatgtaaggttctgaactacaaaggaagcaaacaaaatgaagagatgatgcaaggaggcaaaaaagatggaggcattaggaaaggctttgagggcaggaggcacggggtcatcttctaaaataacctattggaatgcatgttttaataagctttgaagatcaaagagattaacaagaacaagaggaaaacaagggtaaattaggcactattgatggcctgacaaggacttttttctccctttctgcttacaataacctctcattttaccatgtggctagttggtttgtttacttgtttgtttacacttactcattactagctttccctataaagcaagggaaaacactctgtccccaggggccagctgcataacatgaatagatgaaatagaccagaccagatgcaatctgcagtcatgggaactctgaactgaagagaacatgccctcatttaaaggcatccaaatgaaacattttaaaaacactaaaataaagagaccccatgaaggtcaaacaaggcataatsagacacacagtgttttttattcttttgtttcttaaattcctttaaatatagccctttcataaatttggcaggatgtgctctcagtaaaatttctggtttagtaaactcttggtgacattatcaaattaaacagcaatcccttccaaattcccctaaagctaagacctttttttttttttttttgcatgtctttttttctctgataatcccagagtttatataacctcaaactataagcttgatgaattttagagttcattgtaatgcttttggtttaggtgacaaaactgatgcctacaaagataaactgatttgctgaaggtcatggacctagtctttattggagttgtaattcaatcccaggtgtcctaaatctttaatccatgccattttattgatattatatattaagattttttttattgtatatccaaagatttctattttaaactgagataacatccaacagagaattcagaagtagtatgaaattgattatcttccctctactggacattgttgccatacaagacgatatcattgacc

SEQ ID NO: 692932 - DNA, 1131 bp, Homo sapiens
tgataacattatgagctttctacattagcagggccccctggtgtggttttgtgcctggagatgtaaggttctgaactacaaaggaagcaaacaaaatgaagagatgatgcaaggaggcaaaaaagatggaggcattaggaaaggctttgagggcaggaggcacggggtcatcttctaaaataacctattggaatgcatgttttaataagctttgaagatcaaagagattaacaagaacaagaggaaaacaagggtaaattaggcactattgatggcctgacaaggacttttttctccctttctgcttacaataacctctcattttaccatgtggctagttggtttgtttacttgtttgtttacacttactcattactagctttccctataaagcaagggaaaacactctgtccccaggggccagctgcataacatgaatagatgaaatagaccagaccagatgcaatctgcagtcatgggaactctgaactgaagagaacatgccctcatttaaaggcatccaaatgaaacattttaaaaacactaaaataaagagaccccatgaaggtcaaacaaggcataatgagacacacagtgttttttattcttttgtttcttaaattcctttaaatatagccctttcataaatttggcaggatgtgctctcagtaaaatttctggttkagtaaactcttggtgacattatcaaattaaacagcaatcccttccaaattcccctaaagctaagacctttttttttttttttttgcatgtctttttttctctgataatcccagagtttatataacctcaaactataagcttgatgaattttagagttcattgtaatgcttttggtttaggtgacaaaactgatgcctacaaagataaactgatttgctgaaggtcatggacctagtctttattggagttgtaattcaatcccaggtgtcctaaatctttaatccatgccattttattgatattatatattaagattttttttattgtatatccaaagatttctattttaaactgagataacatccaacagagaattcagaagtagtatgaaattgattatcttccctctactggacattgttgccatacaagacgatatcattgacc

SEQ ID NO: 692933 - DNA, 599 bp, Homo sapiens
cctttttacatgtaaagttttattgtgaactaataatgatgatgttaagacccatctattttattgaggtcccaggaagttactagtttaagcatccgtcacttagataacaagcattaaggtaatttttaatttcagttaaaaaaatagattaaargcacaaaatagatttccaaacaaacaaacaaacaaacaaacaaaaaaaccaaaaaagccaccctaggataaatataactagaaggccaagatcagtttagaagtctacttaaagaaagacagaaacttctaaggactgtgtggaaagataattcatgcctataaaaaagtctctgtgctaactctagatttttttcactgtaagccttgtaacaaaggagagagagctattttggaaagctgaattagcctacatttgagctaacatgatccatctttgtgtcaagagaaagtcaaatattatagtccccagccaaaataaggcatgtgatctacatcaaaggcaattcctgaatgtgtatctacgtcctcatcccctctcctcttttttgtctcttgggtaatctataccaataacctcctgattcatgaaatttattatc

SEQ ID NO: 692934 - DNA, 599 bp, Homo sapiens
cctttttacatgtaaagttttattgtgaactaataatgatgatgttaagacccatctattttattgaggtcccaggaagttactagtttaagcatccgtcacttagataacaagcattaaggtaatttttaatttcagttaaaaaaatagattaaaggcacaaaatagatttccaaacaaacaaacaaacaaacaaacaaaaaaaccaaaaaagccaccctaggataaatataactagaaggccaagatcagtttagaagtctacttaaagaaagacagaaacttctaaggactgtgtggaaagataattcatgcctataaaaaagtctctgtgctaactctagatttttttcactgtaagccttgtaacaaaggagagagagctattttggaaagctgaattagcctacatttgagctaacatgatccatctttgtgtcaagagaaagtcaaatattatagtccccagccaaaataaggcatgtgatctacatcaaaggcaattcctgaatgtgtatctacgtyctcatcccctctcctcttttttgtctcttgggtaatctataccaataacctcctgattcatgaaatttattatc

SEQ ID NO: 692935 - DNA, 1426 bp, Homo sapiens
gccgggcgtggtggcacacacctgtagtccagctacttgggaagctgaggcaggagaatcacttgaacccaggaagcggaggttgcagtgagccaagactgcgccattgcactccagcgtgggtgacagagtgagactctgtctcaaaaaaaaaaaaaaggttaatatttctttctgtcctaaagccatctgtctcttcatttgacatacccactggacaatttcatacacttccatggctaaattatcttctgtagatgttggtggcatctaacctctagtccacatctcctgaatttcctatctatatatccaactctctacaggacatctttatttgtatgtctcgaaatgccttttaaatcaaactcatcatctcccaacactctcatttgscactgtatctcaagtacccaggaaacacattaagcctctaaaaaacattaatggccagacactgtggctcacacctgtaattccaacattttgggaggctgagacgggagaatcccttaaggcaaggagtttgagaccagcctggccacatgcatgtgtaaatgtcaaaatatcacatgtgccccataaatacgtacaattgttatgtatcactacaggcaacatattgagactgtctcttaaaaaaaaaaaatcggccgggcgcagtggctcacccctgtaatcccagcactttgggaggctgaggcaggcggatcacgaggtcaggagatcgagaccatcctggctaacacggtgaaaccccgtctccactaaaaatacaaaaaattagctgggcgtggtggcgggcacctgtagtcccagctactcaggaggctgaggcaggagaatggcgtgaacccgggaggcagagcttgcagtgagccgagatcgcgccactgcactccagcctgggcgaaagagcgagactctgtctccggaaaaaaaaaaaaaagaaagatcaaatgatcaaatgatgtgaggctgtggtgcccgctttgtagaaatgaaaggatctaattgaagacagaagttttgggcacagaggccacagcccaaatccttcacctaaaatcactatctctgagctactttttaactttaaaataaaaggaaaaaataaaaaataaaaaataaaataaaataaaaggaggctgggcgtggtgactcatgcctgtaatcccagcactttgggaggctgaggtaggtggatagcttgaggccaggagttcaagaccagcctggccaacatggcaaaaccctgtctttactaaaaatacaaaaattagccgggtgtggtggtgcgcgcctgtagtcccagctactcgggaggctgaggcacaagaaccgattgaacccgggaggtggaggttgcagtgagctgagatcacaccagcctggctgacagagtgagactctgcctaaaaataaa

SEQ ID NO: 692936 - DNA, 620 bp, Homo sapiens
ccacctcaaataggtgtaacaccaaagcagcaaaaaactaacataactaacttcatttttgtttaagggacctttacctattcccacggataggcaaggataattatagagcagtgagatcatacacaaaaacagcaatcatgtagtttttcagaaagaactctgagtttaaaggacaagtaactaygttttgttaaagatttatggaaatactgtgacctgaccagggaaaagaagttcccaacatcctcacaccctcgctggtgcccagatatctgcagtcatcagttacctcttgccctgagccctccatcttcctcctgccgttgacataaaaagagccaaaaatttggaatgacttaagatggtactttagcatgatagtgtgccatcatctgggtttgctggctttctgaataaacgtgcttttcctcccaccaacccttgtctcttgagtttggcctttcaagcagtgaggagccaaacttgggtttagttacaggggtactactgtacatattatacaaaatagctataattttatatatatcttaattatatgtgtgtgtgtataatttgtttgtactctataaatacatgttatctttttttaaaaaaag

SEQ ID NO: 692937 - DNA, 628 bp, Homo sapiens
agagtactatatggtgcccctgggccctgaaaaacttaatgtacaactctaagagtctaaattactgccagggagtgatgtaggtagtgaaaataaattccattaatatcttgctaagtggttaatcagcaagtcaaataataataataaagtgttagatctgttttctcattctgtcctttatggacagaaagaatacctgttaggtgtgttcctcttaaacagcctttaataaattttaaagtagtgatcaagacttcccttgggtttcttatctctaaactaaataaaccctattcctttcatctttacaagtaagatccgttttcatccctttaatcattttcattgttctcgccaatgttctcttcaatttattcacatctttataaatgtgatgaacaataatatttrtctgaagaagtactagaatataatttggatgttccttcttgactattttttgtttgtttgtttttgcttttttttttttttttttgaaacggagtctctctctgtcacccaggctgatctggtctcactgcaagctccgcctcccaggttcacgccattctactgcctcagcctcccgagtagctgggactacaggtgcccaccaccacgcctg

SEQ ID NO: 692938 - DNA, 678 bp, Homo sapiens
tgtacctcattattatgatggatgaagcccatgcctgggaaacaccaccataactgcatgtaaccagcacctcttatgcttcttagaaattcagctctaaatctccccattcatctttcattcaggaaataaagttggaatgtaagtgagaattacataccgtgaatcaaatctattgttttaaatgaaataattggcaaggctttgcaaattattctagcagcgaattatctatagcccatgccacaagtgtatcatggcattgattgaaatgcayggatcaagtcaaattgaatcctgtttatttattaagactcaaatcaaatcaactataattcagactatattcattcattcactcaacagttattcattgcctggaacagaaattgcacaaggtgtcagggctataaaaacagataaagtagttattctcaaaatgagcatggggcactcctcagttttttgtgacacatatttttgcacttttgagttgagcggatacaaaatccttctgaatacagctctcaaagcaaaaactctatttattagaaatagcacagagatagatatctccactacagttaaacagatagacatgtaaattaatagtcaatcagtaaactataatttgcagagttaggtaaacaagagcaaaactttaatgcctattcatta

SEQ ID NO: 692939 - DNA, 1407 bp, Homo sapiens
tttactgatagtcataccaaataaccttgttcttgcaggttagaaaactggaaaacaagcccatttgctaaaagacagagaagtttgcctgagatcaaaatcataaactgcaaatattactctagtttaatktctaacctacttacaggcattggccaagttacttaaacctcaaatggtttgtctataaaatggggattacaataatcccttaccctgtgatgatacacagaaaatgaagccttgctctgaatactttttgaagttcttcagcaaacagcaagccattattcagatatgcataaaggctatcatctgtaagaaaatagcatttgagaaaaaaataaaataaaacagggctgtaaccaaatgtgatgactctgttaagattatagagatgatcttgatatatacaacacatttccttcattctatctctattggatgttgtttaaaataaagtttttgaagaaagacattacacaaaataagtaaaacagagatggggcatcatctagaagagattgaggtagagaaattagggaaaatgtgtgggtttttaaaattctagttagaacaattgtaataggtaaattacttgggaagatttcaagtaaatgacatttaggaaagcagggaaggatctggggtctgtgtgtacttctggtgtaattcttaattatgtgaacccttagtcacagagtttctaaaaatgggaatatatgcgagctgactcctcccaaactcctgcttgcagcataaactcattatcaaatcattgcctttgaaaggtggcaaggatacttagcaaatgcagttctcctttggactgtgggctggcccagttatgaaaagattcaactagatcaaaacaacaaaaggagcgactacaactaaaataacaataaaatgagcagttttagcttggcttccatttctaaaaagacaattgtaagacattctagtccagttctccaatctcttttagaaaacatttttaaacaattttgttttacttttattacttcctataagggggatacaattttttttctagtgtctgatgttttcaataccatgtcttttgcaaacctttttaaagttccttaaaaacaaacaggaataatctaggctatagtggaagtgtaccttgacaatttgacaggagagaatgctcaggagtaataaatgtgtatttctccctaatatcttaaatatatctgttttttttttcttcatttggcatgaggagtgtcaaatgcagagttcatggggattgttttcatttacaaacacagttttcctttaagggggaaatgtgtgcttgcttaatttttaatcacaaaaggtatctgtgtgtgccctgttcatcttacaagtgaaggctgtgcaattgtgtcacaaaca

SEQ ID NO: 692940 - DNA, 1407 bp, Homo sapiens
tttactgatagtcataccaaataaccttgttcttgcaggttagaaaactggaaaacaagcccatttgctaaaagacagagaagtttgcctgagatcaaaatcataaactgcaaatattactctagtttaatgtctaacctacttacaggcattggccaagttacttaaacctcaaatggtttgtctataaaatggggattacaataatcccttaccctgtgatgatacacagaaaatgaagccttgctctgaatactttttgaagttcttcagcaaacagcaagccattattcagatatgcataaaggctatcatctgtaagaaaatagcatttgagaaaaaaataaaataaaacagggctgtaaccaaatgtgatgactctgttaagattatagagatgatcttgatatatacaacacatttccttcattctatctctattggatgttgtttaaaayaaagtttttgaagaaagacattacacaaaataagtaaaacagagatggggcatcatctagaagagattgaggtagagaaattagggaaaatgtgtgggtttttaaaattctagttagaacaattgtaataggtaaattacttgggaagatttcaagtaaatgacatttaggaaagcagggaaggatctggggtctgtgtgtacttctggtgtaattcttaattatgtgaacccttagtcacagagtttctaaaaatgggaatatatgcgagctgactcctcccaaactcctgcttgcagcataaactcattatcaaatcattgcctttgaaaggtggcaaggatacttagcaaatgcagttctcctttggactgtgggctggcccagttatgaaaagattcaactagatcaaaacaacaaaaggagcgactacaactaaaataacaataaaatgagcagttttagcttggcttccatttctaaaaagacaattgtaagacattctagtccagttctccaatctcttttagaaaacatttttaaacaattttgttttacttttattacttcctataagggggatacaattttttttctagtgtctgatgttttcaataccatgtcttttgcaaacctttttaaagttccttaaaaacaaacaggaataatctaggctatagtggaagtgtaccttgacaatttgacaggagagaatgctcaggagtaataaatgtgtatttctccctaatatcttaaatatatctgttttttttttcttcatttggcatgaggagtgtcaaatgcagagttcatggggattgttttcatttacaaacacagttttcctttaagggggaaatgtgtgcttgcttaatttttaatcacaaaaggtatctgtgtgtgccctgttcatcttacaagtgaaggctgtgcaattgtgtcacaaaca

SEQ ID NO: 692941 - DNA, 1484 bp, Homo sapiens
ttctctcacttggaagattttaacttatttattcattcattcaacaatattttaaatgtctcctgtgacctaaggactaccctaagcatcaagaatacaatgtggaacaaagcaagtcttctgttctcaaaacttactgttcagtctgtggaaacagtaaaaaccatgacaagagagtgttatttgtgctacaattgcatgagaagaggatgccagggcagacttaggaggagtacctagcctggttttaagaggtcactggagacctgctgaaggaaatggctttaagctaaatgctgaggtgtcagtagatattaatctgctcatggaggaccagggagtgtctcaggcagattgaccagttttctcaattatgtagtgacgacaactgagacgcagtaatataaaacacttacctgatcaccaggaagtttctcctccagcaatagaaaggcagattttaaacagatgttttgttatcgtttatgtgacctatttctcctctttccattcccttgcctagtaaaatttgtccaactgtaattaagagtatttacttctcctttattgtactgctttgcctcccacaaaattcaccaagaagagtttcacttgggcgttgaaaagggtcttgtacatcacacggcttcctgaaaatgataacaatagctactttttattgagagtcactatatgtgatttccctgtgatttagatgttatatccccattttatgaaagattaaattgaggctcagggacagacccaaatatcagccagctagtaagaggaaatctgtggtcttatcccagattctgaaaacagcacctttctaattatttcttatcatatagtttccttctaatatctggctgtgaaataatacaagtttttatgcaggggacaatttcagaagagggaaaaggaaatgtgtggtgattttaaaacatggggtgtggaatgacagctgtgggctattgctgtacttgagatttgctctatcagagatgagcagtaagcgaaatgattactctgagggtaaagagtacatattgccaggaaggaaggaaaggtgattggagattgagttcttgtcaaattgaattgatttcatcttcttagatacttcattcaagagtgagatcttttggtttaaattgcaagtrcatgacatatccaatattcctcactaaatccaggaatttctatgccataggaggctactaggatgtactcatttcacaggatgtgtaacacgtctctagcctacatccaggttattctcatcatagtctttgtggaaataaaacaacatgctgaagaaaaggacagtttagaaaactatctccttaactataaactttcatatcattaatgtgctgatattttgacagaactgatgccatgtgctattagcatacagtagtttttgttctttctttcttttttttggttttcacaatggtatagggtcacaagagcaa

SEQ ID NO: 692942 - DNA, 1724 bp, Homo sapiens
aaaatctgaagtctttttgtttgggattttcataaggatgcttgttcttatattttagatggatcatcttactcttcaacaaataatatggtctgaaagttacttttcaattagtggagacattttttgaataaaaacataatgtcttcagctggtcaacatgaattacaatatttatctaataaagaatgactgacttttgcccctatcatgaagtaaacgagaatgaattggacaaccaaagttttcattcatacaaagtcgtgctttgtttagaactcatcatccattacacatcctctgaactttatttctcttatttaccaagtatcatgattgagcaacaacagagaattgagaatctttctgtattaatttgttggttaatattatgaaagttccatatgaaaatgctttaacattttttaataaatattgcattaattaagttagaaagctactttttaaaaaaatttgtgggccgggcacggtggttcacgcctgtaatcccagcactttgggaggccgaggcgggcagatcatgaggtcaggagatcgagaccatcatgcctaacgtggtgaaaccctgtctctactaaaaatacaacaaaaattagcagggtgtggtggtgggtgcctgtagtcccagctactggggaggctgaggcaggagaatggcatgaacccgggaggtggagcttgtagtgagccgagatcacgccactgcactccagcctgggtgacagagcaagattctgtctcaaaaaaaaaaaaaaaaagaaaagaaaagaaaaaaagaaaaaaaaacttgtggcaaatactaatcattttaaattaagaagtggtaatataaagaagtgaacaaacttcaaacaagtatagaagtaattatactcaaaagtagaacattcatttattgattccaaaatatttattaagtatttgcctatgtgtcaaacccagcacaaggaactgggaatacagccatgaataaaatatactaaatgatagattctaaagaaaaatagatcaggataaggggattaaggctgatgctagttactattttagttggagtagttgaggaaggtttctttaaggaaaccacctaaatagagggaggatgtcagccttgtagacatcagagaggggaattccagggggtgaacaacaagtgcaaaagtcctggggtaagtatgggagtgacgtgttgtagagaatgaagtgacggagaagaatggttaaaaaaaaaaaattagggcagaatttacccaggagctggattttgcaagagtaatgtctttggatttttttctagacatgatgggttgctgtaggagggtttgagctggggagtgacatgatctgaattgtgttgcagaagcatcagtctggctgctctgtcaacaacagatttagtgacacaggggttggtacgcccattatgagactgtggcagtgtcgtgagagagagagaggctggcagtgacagagtggtgatgtcatcagactggtgacacattttgagagtacagctgagataaaaggcttttcctatcatagtgtgacgttaaaggaggagaaaatggaaaggagaraaaagggacactttacctagaagtgtacaatatttattttttaaacaataattattctctttgttgacaagatctcgtaatgaggaaaatcaaatttattttgatacatttataaggctgagactc

SEQ ID NO: 692943 - DNA, 627 bp, Homo sapiens
tattcagcactcgatggatttgatttttctttttaaaccacagtaatgataaggagagtggtgagttaatctttgacttcctttttaaaaaacacacataggaatagagaaaccgtctcttaaactttaccttacagatagtgacataaaacaaaaatgatatactttacagaaagtaaagtcaaataaataaacatataaataagtgaataaatcatgagaaacttaagacgttcaataatgatgagctcaatcttcatccaaaacattcttaaaattgagttttccatttatctttgtaaaacagtcttccagggaaatacattatawgaacagtttaatttgttatgaagggcacttgatagttggtcaaataattacgatcattttaagaacaacaagaactttgtaattagggaaatcaaaatttccaagggtaacaagttaacaacatataagttaataaggtaagggcagtaggttagaaaggttgtgacattagtattccctgttcctctctgccaggtagaatcttggcgttggctgttctccccaaccatcctgtaccatagctgtctctgagcttagacaaccctgactcctccctttgttcccagcatcatcact

SEQ ID NO: 692944 - DNA, 673 bp, Homo sapiens
atttaacattacgctaggagcagtaaatgttatctcatttaatcttctgaagttctccaagaaatgaatcgtattatcttcattttaacaaagaagaaattgagcctcagagagtatgtaactctctaaggtcacacagctaacaagtgtcagaacttggttttatagatattctcctgccatctagtttctgaagaaaatccactcctgttttgattttactcctagtaacaagaaggaactaaacaaaatgctaagacgaagttaagtaaaacaaagagaaaattacgaagtttcaagtttcaaaagttctcaccaaaagcattttcactagcagtgagccataatattgtcttcatttccttgctttctccctaaatctacccctatgtcttctattccagaatcgtggaagaccccactatactcttaacccaaagtccaaagccatcttctgttttcccttgcagcctttgtaaatttctttcttcacttaggaactgtagagaaaggcaacagacatgtggaaataataatagtaaaaataatggctaacatttattaagtgttgctatgtgccatagaattggcaatttaagtctctagttagacraaatatgattcattgacatttcaaatgaaaatctactcatcttttttttcacacgtacac

SEQ ID NO: 692945 - DNA, 647 bp, Homo sapiens
tttttaaaagaccatataaagcagggcttagcaaacttcttttgaataaaaggaccagatagtaaatattttaggtttcattggccttatggtctttgtcaaaactattcaactctgccactgtagcatcaatgcagctatagacaattagtgaatgaaggagcatagctatattatttacaaaaacaggtggcaaacaagatacctcaggccatagtttgtcttaaagtcttggcaaggacatgagaactgaamttctcatgctatcagtgaaaaaaagctaggcagtcatctttaaaaattaagcatacgcttaatatacaacacaaccattccacttctaggtatttatctgaaagaaatgaaaacatatgtttaaagacttatacgaaatccttgtagcagttttagcatggttaaatggataaattatagcctatccaaacaatagaatattactcggcaataaatggcaatcaactattaatacatacaacaacatgagtgaatttttaaatcattatgttgaatgaaagaagccaagacaaaaaagtatatattgcatgactccaattatgtaaaattctagaaaatgcaaactaatccctagtgaagaaatcagatcaatgattccctgtagattggag

SEQ ID NO: 692946 - DNA, 594 bp, Homo sapiens
gggaggaagtattgtggtttgaggtgaaatgcaaaaacttaaatccaatttcaactaggcaactcaaaggtgacataaggtccctaatgtaacgagaaaaagaaagattagggcagaattgaatcagaacaagtcttcgtaaaagcaatagggagatggaaagagaaaacataatgcatcatccctgagagaaagacatcaaggactagatgccaaaggagatatctggcaaagctaggcctgcagtttctatgggggggttggcaggaacatagtgtagaagaaagagtcaggaaaactggattattatcctggccgcatcacttcagcccttgtctgttgaagtcaaatgtgttagatgaatcgtagttcaattctgtaatatctaatataatatctgccacaaaagactagagagacctaagacagtttttygggagtaatataatttttacatgccagttcaagacatttggctctttctttataggaaagtgacccactgaagggatttgaatagaaacataacatgatcaaaatatttcacaaggattcatctggaggtggcatgaaggaaaaatttggaaaaaagat

SEQ ID NO: 692947 - DNA, 594 bp, Homo sapiens
gggaggaagtattgtggtttgaggtgaaatgcaaaaacttaaatccaatttcaactaggcaactcaaaggtgacataaggtccctaatgtaacgagaaaaagaaagattagggcagaattgaatcagaacaagtcttcgtaaaagcaatagggagatggaaagagaaaacataatgcatcatccctgagagaaagacatcaaggactagatgccaaaggagatatctggcaaagctaggcctgcagtttctatgggggggttggcaggaacatagtgtagaagaaagagtcaggaaaactggattattatcctggccgcatcacttcagcccttgtctgttgaagtcaaatgtgttagatgaatcgtagttcaattctgtaatatctaatataatatctgccacaaaagactagagagacctaagacagtttttcgggagtaatataatttttacatgccagttcaagacatttggctctttctttataggaaagtgacccactgaagggatttgaatagaaacataacatgatcaaaatatttcacaaggattcatctggaggtggcatgaaggaaaaattwggaaaaaagat

SEQ ID NO: 692948 - DNA, 880 bp, Homo sapiens
tatggcaattagagtaggaacactgtctcctattaggacacacctacgcagttctccttttggacctgggcacagttgctgtcagggagcagggagtaggagacatgatttagtgcttggagtcttccatgtccaagcagaattcttcatgccaaaaaccacaccttataaggagaaaagtctagagatgggaagtctctccctggcatagcttgtgaggaggataggtgtgggggagcagagaaccaggcatctcatctgtttgttctcgaacttgcggccaacattaactgtgtttaaataatattatgctatagcattgttcccaacgcgatgacctacagttcttgaaagaatgtctttttctttcttacaaatgtgccccatatgttaagacacacgtaaggagctaaaagcaacactctgagttttcatctccaggtgatgccctctgccagggaagaggtggcaatgatattcttggagatttcactgtgatcctgacctgttaggttctgtaggggaaggcagagatgatcacaaagaacatttcaattttagtacatgcctttacattggttaaaacaagcagctatggaaaattcagttataaaggtaagagaactatgtgaatcaagatcctatagctactactatggaatcctttctcagccagcagtgggactgggaagtggcagaggggctgctccagagttgttgtttttttgtttttttctgagacaggatcttactctgtcacccaggctggcrtgccgtggcgccatcaccactcatttcagcttcaacctcctgggttcaggtggccttcccacctctgcctcccaagtaccgggaactacaggcatgagccaccatgcct

SEQ ID NO: 692949 - DNA, 676 bp, Homo sapiens
atttgaggcactggcaaatagcttagttgatttgtaagggacctgaaaataacaagatttgatcatctgtgaggcaaggaaatgtggagaagatgcaatgtaaatgaacctatgttgggcacaaagcatcaagatatgtttgtcttctgacaatgagcatgtccactgtaaagaaggtgcccataaccaggtagcataatgactcagcctgcaaatgtcagatggcctctctcattgccccctccagtgctagtacgatcagcccataaagagaatatccatggtggcaagaatggagactatgcatgggtccaacaatctgtaccaagatgaatttaggtgattcaattgatggatgcccaacagctcagcagctgtaccttcaatatggcaccacttgtcaagaagatcaaccagccagttgatggaagtttgattacatcagatcccttctagtccagaggggacagcaattcatccttactagaatttatacctattctgcatataagtttrccttccctgcaagcagcacttctggcagcaccaccacttgagggcctatgaaatatttgatttagcaattcagaatctttcttaacatatactcaggatcttctacaacagataccaggctcatgatcacaggtcaccacaatatccagaaagaaggccg

SEQ ID NO: 692950 - DNA, 627 bp, Homo sapiens
cgcgcaccactgcttctggctrattttttttttttttaatagaaataaggtctctctgtgttgcccaggctggtctcaaactcctgggctcaagtacaggcatgagctactgcacctggcctcaatatttaattctaagagtaaaggaaagagaaagaaggtccttgattgttaaagtaaaaattgtttttcatttcagaataaaaaatagtccctaactcctgggcaattggacaagagatgaaatttcagacatttgcctgtttttaactcacagctatgttacggaaatagtcttataattacatacattgcgtttatgacaagcgttcacagtgggattttcattttgtttactaaaggaagttgtaaaggtgcactattgtctttgtatgggaaaggatgtcataagttactgtatgaatttgctagggctgccataacaaataccacagactgggtggcttaaacagaaatttattctctaacagttctggaggcaagaagtccaagatcaaggtgtcagcagattggcccttctgcgggctgtgagggagaaagtgttctacagctctctcctgccttttggtggtttgctggcaatctttggcattccttggtttcttc

SEQ ID NO: 692951 - DNA, 629 bp, Homo sapiens
agccctttgtgcaacattgatgttgtggaagcactagttaaagtgaaggtctgtcttcctgagtgtctgagtgccatgatgagagagccccctgctgaccttaaccagagatgaagcaagagtaaaatatgcacacttgtgttaaaacatgactcttcaggattgtaggttactgcgtcatagcctcaacaaacctgactattggaatgcttatgtagattgtgaatcactgcatatatttgtattatagtttacttttaaaattgtaaaaaaagtacaatttttactagaaacacgatttttacttatattttttaatttaaaggggtgtgacaacttgataatttaatgtagtttaatttttttaactcctcacaatacaggatttctcaggttatatttaatatatggtatagattttattaaggttttgggcgcatacaagtatatttggggaaggtgaattgatcattcataaaattttttgrcacttaactaataactcatggatataaaccaaaacaattgcagtcaaaaatcaatgaagttcaggaacacttttcactagttaactatgcgtaaagctctgtgataagttttgaggggggaaaaagaaaggaaaatacttg

SEQ ID NO: 692952 - DNA, 1213 bp, Homo sapiens
ttgctgaattttggtcaattgattgttaacacttagaaaatgtgctacaaaattttgacaacagtgattcgtatgttttgctatagctgagacatttttatgtttaagttactaattttggaacccccaaggaatccttataaattaaaaaaaaataatttacggtgtttaagttctatttgttacatcagtgttaaagtaactttgagtttttggcaaaatattagcataggtcattacaagaaggatatgtcaggcagggaactaaaaagtaattgacaaatacacattttattctatataaaagaaaatatgttcctactatgttctatggagggggcatctgaacctgttcccctgcctggcttccttctgcttgagtcctttctatatttccttctgctgcctccattgggaggagttgttaatctcatagtgcagcgtccttgtggggccacattttatactacacagggtccaccctcagagcaggatccatctccaccctttctctttcatctgcctacttcagacattggctgggtccagtccagcaaagcaggctgctttttctctttctccaaatctgcctagctctgcggatccttacactagttgtctgacagcctaggccttcctttctctgaatagtaccctgaatatcacttgaataggcctattccaaaatgtacaggaagtacacgaggctgggtaacatggcaacactaaactgcatgatgcatgtcagcctttttgaaatacctgctattgttattgtgctagtgaagttactcattaaaatgtaacgttttctaacayctgtaggatgtacatcgccctcaggagttcttaaacaaaaggatcaaatcacaggggcagaatttggtgatagctcttacctgaccccagtatcatgataataccaaaactttacctgcaactcttaattgtatttattcctgatcacaatattaatgccaaattaattaccaatgaaaaacaccttctgtatgagtttatcatcttccatacatatttttgattttgaattaatatctgagataattagtgctttcccaacagctgaatatataggcaggaagtttctacaattgggttctttacaaactttaacagcctctttcagtagttttttacaccattaaaacattttatcttaccttttgtgggatcttggcaagggctgatgcaa

SEQ ID NO: 692953 - DNA, 1213 bp, Homo sapiens
ttgctgaattttggtcaattgattgttaacacttagaaaatgtgctacaaaattttgacaacagtgattcgtatgttttgctatagctgagacatttttatgtttaagttactaattttggaacccccaaggaatccttataaattaaaaaaaaataatttacggtgtttaagttctatttgttacatcagtgttaaagtaactttgagtttttggcaaaatattagcataggtcattacaagaaggatatgtcaggcagggaactaaaaagtaattgacaaatacacattttattctatataaaagaaaatatgttcctactatgttctatggagggggcatctgaacctgttcccctgcctggcttccttctgcttgagtcctttctatatttccttctgctgcctccattgggaggagttgttaatctcatagtgcagcgtccttgtggggccacattttatactacacagggtccaccctcagagcaggatccatctccaccctttctctttcatctgcctacttcagacattggctgggtccagtccagcaaagcaggctgctttttctctttctccaaatctgcctagctctgcggatccttacactagttgtctgacagcctaggccttcctttctctgaatagtaccctgaatatcacttgaataggcctattccaaaatgtacaggaagtacacgaggctgggtaacatggcaacactaaactgcatgatgcatgtcagcctttttgaaatacctgctattgttattgtgctagtgaagttactcattaaaatgtaacgttttctaacacctgtaggatgtacatcgccctcaggagttcttaaacaaaaggatcaaatcacaggggcagaatttggtgatagctcttacctgaccccartatcatgataataccaaaactttacctgcaactcttaattgtatttattcctgatcacaatattaatgccaaattaattaccaatgaaaaacaccttctgtatgagtttatcatcttccatacatatttttgattttgaattaatatctgagataattagtgctttcccaacagctgaatatataggcaggaagtttctacaattgggttctttacaaactttaacagcctctttcagtagttttttacaccattaaaacattttatcttaccttttgtgggatcttggcaagggctgatgcaa

SEQ ID NO: 692954 - DNA, 606 bp, Homo sapiens
aatgactggtatctttatgagagaaaggactgggagatttgggcacagtgacccagaggaaaagatcacatggaaagagaggaaagattggagccagagtgccacagcctaggaatatcaggagccactagaagctcgaagaggcaaggaagtatgctcccctgaagacttcccatggagtctggccctgyccatatcttgatttcagatttttggcctccagaactgtgagatgatagattccggtgatttttaagccaccaagtttgtgataatttggcacagcagcccttagaaatgactaccaacaccagtgatactaatattcaactagacgtgagagccaccacttgaagctgtggcgccaaccttgccaggtgaactgttattgagctcaaggtagggcccaggtggaaatcactagcaatgagaacaccagctgcaataatcaccagaaaaccaccttcatcttcaaaacaaaatattaaaaacccactgtgttaaaaagtctttttttaagcaaggctgttgtgagacgcttcgaaatagttgaatataaaccaagacctatattatactgtagtcggatatcatctcaggattagc

SEQ ID NO: 692955 - DNA, 606 bp, Homo sapiens
aatgactggtatctttatgagagaaaggactgggagatttgggcacagtgacccagaggaaaagatcacatggaaagagaggaaagattggagccagagtgccacagcctaggaatatcaggagccactagaagctcgaagaggcaaggaagtatgctcccctgaagacttcccatggagtctggccctgtccatatcttgatttcagatttttggcctccagaactgtgagakgatagattccggtgatttttaagccaccaagtttgtgataatttggcacagcagcccttagaaatgactaccaacaccagtgatactaatattcaactagacgtgagagccaccacttgaagctgtggcgccaaccttgccaggtgaactgttattgagctcaaggtagggcccaggtggaaatcactagcaatgagaacaccagctgcaataatcaccagaaaaccaccttcatcttcaaaacaaaatattaaaaacccactgtgttaaaaagtctttttttaagcaaggctgttgtgagacgcttcgaaatagttgaatataaaccaagacctatattatactgtagtcggatatcatctcaggattagc

SEQ ID NO: 692956 - DNA, 606 bp, Homo sapiens
aatgactggtatctttatgagagaaaggactgggagatttgggcacagtgacccagaggaaaagatcacatggaaagagaggaaagattggagccagagtgccacagcctaggaatatcaggagccactagaagctcgaagaggcaaggaagtatgctcccctgaagacttcccatggagtctggccctgtccatatcttgatttcagatttttggcctccagaactgtgagatgatagattccggtgatttttaagccaccaagtttgtgataatttggcacagcagcccttagraatgactaccaacaccagtgatactaatattcaactagacgtgagagccaccacttgaagctgtggcgccaaccttgccaggtgaactgttattgagctcaaggtagggcccaggtggaaatcactagcaatgagaacaccagctgcaataatcaccagaaaaccaccttcatcttcaaaacaaaatattaaaaacccactgtgttaaaaagtctttttttaagcaaggctgttgtgagacgcttcgaaatagttgaatataaaccaagacctatattatactgtagtcggatatcatctcaggattagc

SEQ ID NO: 692957 - DNA, 606 bp, Homo sapiens
aatgactggtatctttatgagagaaaggactgggagatttgggcacagtgacccagaggaaaagatcacatggaaagagaggaaagattggagccagagtgccacagcctaggaatatcaggagccactagaagctcgaagaggcaaggaagtatgctcccctgaagacttcccatggagtctggccctgtccatatcttgatttcagatttttggcctccagaactgtgagatgatagattccggtgatttttaagccaccaagtttgtgataatttggcacagcagcccttagaaatgactaccaacaccagtgatactaatattcaactagacgtgagagccaccacttgaagctgtggcgccaaccttgccaggtgaactgttattgagctcaaggtagggcccaggtggaaatcactagcaatgagaacaccagctgcaataatcaccagaaaaccaccttcaycttcaaaacaaaatattaaaaacccactgtgttaaaaagtctttttttaagcaaggctgttgtgagacgcttcgaaatagttgaatataaaccaagacctatattatactgtagtcggatatcatctcaggattagc

SEQ ID NO: 692958 - DNA, 606 bp, Homo sapiens
aatgactggtatctttatgagagaaaggactgggagatttgggcacagtgacccagaggaaaagatcacatggaaagagaggaaagattggagccagagtgccacagcctaggaatatcaggagccactagaagctcgaagaggcaaggaagtatgctcccctgaagacttcccatggagtctggccctgtccatatcttgatttcagatttttggcctccagaactgtgagatgatagattccggtgatttttaagccaccaagtttgtgataatttggcacagcagcccttagaaatgactaccaacaccagtgatactaatattcaactagacgtgagagccaccacttgaagctgtggcgccaaccttgccaggtgaactgttattgagctcaaggtagggcccaggtggaaatcactagcaatgagaacaccagctgcaataatcaccagaaaaccaccttcatcttcaaaacaaaatattaaaaacccactgtgttaaaaagtctttttttwagcaaggctgttgtgagacgcttcgaaatagttgaatataaaccaagacctatattatactgtagtcggatatcatctcaggattagc

SEQ ID NO: 692959 - DNA, 1179 bp, Homo sapiens
aaaatgtttgaggattttatttcaataatgccaatctattcctcttcaacgttttgatctaatgtatgaattgtgactctgtcctcttggcaacaaaagtaatgctgggtcttaatcaatgtgcattagtatgctagcaaaatgatacttcttccatatgtagttatatattaaatatatataaaatagaagtgttagatacgactcttatgattaagatatatctttatttaaataactatcccttactggaaaataaatatgkatttatacatttttgattaataaatcaatactcatttataatctgatttataaatattttttatttataaacatttattgatttattaagtgcacatgatgtaataatggtttcagtgcctctgccaacaatcactggctgctaagagttgctagagtaatggattgaaaaatgcaaaagggcctgaaagcatggtacgaaagaccacagtgaatgatcggttatgtcggccaaggatgtgggactcagaaatggtagcaggcacatcaagagctttttttaaatctaccgcaacgtggaaaagtccagttgttctaccagtaggtgcttcacctttgtgaagtcacaattctctggctggctgtctactcatctttaaaatgagagttttgattagatgacctcttatgtcccttctagtttgaatattctatgatattctgaaaaaaaataataataatagctcttgtattagcatcccaagcagtctggtgtgggactagctaaatacaggcagcagtgagcttcgaggtgaaagctctgaggaaaaggcagagtagaagaagcaaactttcactgagctgtttagcctggagaatgatacctaaaaagcaaattaccctgtaagaggacttgggaggaaagtgcacagtgaataagtccatcatcttctcccatatattttcaaaaattattcctggaattatgttgcaaaggagtctcaggatgtttgcagccacaggaactggaaactatttcacaaaataggaagtgtagagatcgggcagattcagtgacctcacaatgttatgggtgaccccagatcttctgagctttttgctttagtgaccttgtgaagactttgtcttcaggctagttccctgaatggtgatgagatggctgcatgtagcaat

SEQ ID NO: 692960 - DNA, 613 bp, Homo sapiens
tgggcagagagaggcaaatttcagggctctggttgggtctggctaaggtccacctggcctcggggctacctaccgccttggccggttttttcttttttctggtcagagcgtcagaggggtgggaatctgacttgtccagagccagctgggaaaagagacggttagcaagttcagggaagggacttccgctgtgtcaaggggagaacaggcgagagccgcgcggggaggcggsccgaagcggtgacctttcccctagtttccgcctagggcaccctggcttgccctttcccctactttcggcgactgagcagtaggcaggtacctggcaccaagagggagatccctgccgatggcgggcgccgaacgggaccgccgctcccacacccccttgccaaggctgcggtgacttacctgagcggcacccccggcatagggccgccgggcagggccgggccggggctgccccaggagcgccgtgagccgcgagctgtggggagtgggggttcagtgccggcccggtgcccagggccgctgcccaccgtccctcttgtcacacacagaccttccgcccccgagcctcagcagctgccgccccaagctcgcggccatccga

SEQ ID NO: 692961 - DNA, 613 bp, Homo sapiens
tgggcagagagaggcaaatttcagggctctggttgggtctggctaaggtccacctggcctcggggctacctaccgccttggccggttttttcttttttctggtcagagcgtcagaggggtgggaatctgacttgtccagagccagctgggaaaagagacggttagcaagttcagggaagggacttccgctgtgtcaaggggagaacaggcgagagccgcgcggggaggcgggscgaagcggtgacctttcccctagtttccgcctagggcaccctggcttgccctttcccctactttcggcgactgagcagtaggcaggtacctggcaccaagagggagatccctgccgatggcgggcgccgaacgggaccgccgctcccacacccccttgccaaggctgcggtgacttacctgagcggcacccccggcatagggccgccgggcagggccgggccggggctgccccaggagcgccgtgagccgcgagctgtggggagtgggggttcagtgccggcccggtgcccagggccgctgcccaccgtccctcttgtcacacacagaccttccgcccccgagcctcagcagctgccgccccaagctcgcggccatccga

SEQ ID NO: 692962 - DNA, 613 bp, Homo sapiens
tgggcagagagaggcaaatttcagggctctggttgggtctggctaaggtccacctggcctcggggctacctaccgccttggccggttttttcttttttctggtcagagcgtcagaggggtgggaatctgacttgtccagagccagctgggaaaagagacggttagcaagttcagggaagggacttccgctgtgtcaaggggagaacaggcgagagccgcgcggggaggcgggccgaagcggtgacctttcccctagtttcsgcctagggcaccctggcttgccctttcccctactttcggcgactgagcagtaggcaggtacctggcaccaagagggagatccctgccgatggcgggcgccgaacgggaccgccgctcccacacccccttgccaaggctgcggtgacttacctgagcggcacccccggcatagggccgccgggcagggccgggccggggctgccccaggagcgccgtgagccgcgagctgtggggagtgggggttcagtgccggcccggtgcccagggccgctgcccaccgtccctcttgtcacacacagaccttccgcccccgagcctcagcagctgccgccccaagctcgcggccatccga

SEQ ID NO: 692963 - DNA, 613 bp, Homo sapiens
tgggcagagagaggcaaatttcagggctctggttgggtctggctaaggtccacctggcctcggggctacctaccgccttggccggttttttcttttttctggtcagagcgtcagaggggtgggaatctgacttgtccagagccagctgggaaaagagacggttagcaagttcagggaagggacttccgctgtgtcaaggggagaacaggcgagagccgcgcggggaggcgggccgaagcggtgacctttcccctagtttccscctagggcaccctggcttgccctttcccctactttcggcgactgagcagtaggcaggtacctggcaccaagagggagatccctgccgatggcgggcgccgaacgggaccgccgctcccacacccccttgccaaggctgcggtgacttacctgagcggcacccccggcatagggccgccgggcagggccgggccggggctgccccaggagcgccgtgagccgcgagctgtggggagtgggggttcagtgccggcccggtgcccagggccgctgcccaccgtccctcttgtcacacacagaccttccgcccccgagcctcagcagctgccgccccaagctcgcggccatccga

SEQ ID NO: 692964 - DNA, 613 bp, Homo sapiens
tgggcagagagaggcaaatttcagggctctggttgggtctggctaaggtccacctggcctcggggctacctaccgccttggccggttttttcttttttctggtcagagcgtcagaggggtgggaatctgacttgtccagagccagctgggaaaagagacggttagcaagttcagggaagggacttccgctgtgtcaaggggagaacaggcgagagccgcgcggggaggcgggccgaagcggtgacctttcccctagtttccgcctagggcaccctggcttgccctttcccctactttcggcgactgagcagtaggcaggtacctggcaccaagagggagatccctgccgatggcgggcgccgaasgggaccgccgctcccacacccccttgccaaggctgcggtgacttacctgagcggcacccccggcatagggccgccgggcagggccgggccggggctgccccaggagcgccgtgagccgcgagctgtggggagtgggggttcagtgccggcccggtgcccagggccgctgcccaccgtccctcttgtcacacacagaccttccgcccccgagcctcagcagctgccgccccaagctcgcggccatccga

SEQ ID NO: 692965 - DNA, 613 bp, Homo sapiens
tgggcagagagaggcaaatttcagggctctggttgggtctggctaaggtccacctggcctcggggctacctaccgccttggccggttttttcttttttctggtcagagcgtcagaggggtgggaatctgacttgtccagagccagctgggaaaagagacggttagcaagttcagggaagggacttccgctgtgtcaaggggagaacaggcgagagccgcgcggggaggcgggccgaagcggtgacctttcccctagtttccgcctagggcaccctggcttgccctttcccctactttcggcgactgagcagtaggcaggtacctggcaccaagagggagatccctgccgatggcgggcgccgaacsggaccgccgctcccacacccccttgccaaggctgcggtgacttacctgagcggcacccccggcatagggccgccgggcagggccgggccggggctgccccaggagcgccgtgagccgcgagctgtggggagtgggggttcagtgccggcccggtgcccagggccgctgcccaccgtccctcttgtcacacacagaccttccgcccccgagcctcagcagctgccgccccaagctcgcggccatccga

SEQ ID NO: 692966 - DNA, 1146 bp, Homo sapiens
ggaacatcacacaccactgcttgtcagggggtggggggctaggggaaggatagcattaggagaaatacctaatgtagatgaagggttgatgggtgcagcaaaccaccatggcatgtgtatacctgtgtaacaaacctccatgttctgcacgtgtatcccagaacttaaagtacaatacaaaaaaaaaaaaaagtgtaatccagtttacattttcaaggtcaaagtgggtacaatgctatctatcttgggctaagaagagaaaaggaaaaattcttgctttaaatcttagaagtctggtttttttccctgttttgtaccccatcctcttggtctctctagatatatttaagactcacataggacttgtcttttctacattatctcaaaattttagctcttatcctcaagatatgtgcccattttgctcaacttttatattgcatgattagcaaagcaaatccttttatgttctcaatctaacaatgaaacaccaaactagaaatttattgccattcctcaaactgacatcattcaatgatcaaaataaaatgcatccataatatcctagaaaatttacatgtcccattcttaaaaagaaaggcaaactatttttaacgtttaacgtgacatgcatttgtttttaaatgtctcagttttatataaccatatactcaaggtctttatcattcaaggtacaggaaggttgtgygtttaatctttagcatggttgtaggagatatgattcacagagtagaaaatagataaaaataagcatgcagccagtatggtgccaaatcatcagaactcgacatcttattgacaaatggaagtcattcttctttatttcttgagcaaagcagtttcataaaagataaatagctttcagtcagaatagcctaacctgcaatatgcatctttttgacatgtatattctaatactactctagaccataagattaaaataagaaaaatctcagagtagtgtgttgacaagaagcactggttgaatctgtattttttttttccatttttcatctcccagaatttggctctgtgtatgtttgtaccttactggctgtcattaagtaatcaacttctagtgaccttcaagcatcattttctaaagttttatgcaggggaataatt

SEQ ID NO: 692967 - DNA, 668 bp, Homo sapiens
aggatacataaggataaaatacaaaagtagttcatcttcagttcaatttctagcaaaacctttcacaatatacttggaaaaattactcagatgacacattctttytgtaaaattcagttgaaattataatggctcatttttacaaactaggatgaatatcatatcaatattatttaatcaaaagtgttagatttattgacatctatggtttatcttttaaagcacttttacttcttcatgttgtccttatgctctatttaccaccattactaatccattgagatctgatcctacaagcttaaactctgcatagttgtttcatgtcagttatttgcatcctaccagatcactagatatgaataaaacatgtacattttgcaattctaaagcaaagcttatctaaaaagctttacaaatctaataccatgcttgccacctagtcaagtgagaagcaaatcttgcataaaattagaaaagacagacaatttcaaaacaaattatattttcttgaaaacatctccaatgttttccatatttcaatagtttggattaaacctatgaatttcttaatattcatcagaatgtaattcaacattctttatttgtgagcatttctaaacattgataaaacttcagaatacacaaatgatatacactcagtttgattc

SEQ ID NO: 692968 - DNA, 668 bp, Homo sapiens
aggatacataaggataaaatacaaaagtagttcatcttcagttcaatttctagcaaaacctttcacaatatacttggaaaaattactcagatgacacattctttctgtaaaattcagttgaaattataatggctcatttttacaaactaggatgaatatcatatcaatattatttaatcaaaagtgttagatttattgacatctatggtttatcttttaaagcacttttacttcttcatgttgtccttatgctctatttaccaccattactaatycattgagatctgatcctacaagcttaaactctgcatagttgtttcatgtcagttatttgcatcctaccagatcactagatatgaataaaacatgtacattttgcaattctaaagcaaagcttatctaaaaagctttacaaatctaataccatgcttgccacctagtcaagtgagaagcaaatcttgcataaaattagaaaagacagacaatttcaaaacaaattatattttcttgaaaacatctccaatgttttccatatttcaatagtttggattaaacctatgaatttcttaatattcatcagaatgtaattcaacattctttatttgtgagcatttctaaacattgataaaacttcagaatacacaaatgatatacactcagtttgattc

SEQ ID NO: 692969 - DNA, 623 bp, Homo sapiens
gggtcaaatacagttgaaaagtagtaaggagaaagaaaagtgaccattggacctggcaacacagaggtcactactgacggcgacagctattttaatggagtactggrgacagagccctgttgaagtggattgaaaaagagaatggacataagacataaaaatcaataaagtagaattgggagtccataagtaaactcacttatttatgatccatatatttatgacaatatatttatggtcaattgatttttaacaagagtaccgagacaatcaaataggaaaagaatagtcttttcaacaaatagtgtaaggacaactatatatctacatgcaaaagaatgaaggtggactcttcctatatactgtacagtaaaattatcttgaaataaatgatacaccaaaatttaagagactattggcctcttagaagaaaacatgggaataaatcttcattacattagattagacaatggtttgttaaatatgttaccaaaagcacaagtgaccaaaaaaagataattggactacaataaaattaggaacatttgtgctacaaacaacaccatcaagaaaataaaaatacaatccacagaattggagaaaatatattatattgcatgtca

SEQ ID NO: 692970 - DNA, 623 bp, Homo sapiens
gggtcaaatacagttgaaaagtagtaaggagaaagaaaagtgaccattggacctggcaacacagaggtcactactgacggcgacagctattttaatggagtactggagacagagccctgttgaagtggattgaaaaagagaatggacataagacataaaaatcaataaagtagaattgggagtccataagtaaactcacttatttatgatccatatatttatgacaatatatttatggtcaattgatttttaacaagagtaccgagacaatcaaataggaaaagaatagtcttttcaacaaatagtgtwaggacaactatatatctacatgcaaaagaatgaaggtggactcttcctatatactgtacagtaaaattatcttgaaataaatgatacaccaaaatttaagagactattggcctcttagaagaaaacatgggaataaatcttcattacattagattagacaatggtttgttaaatatgttaccaaaagcacaagtgaccaaaaaaagataattggactacaataaaattaggaacatttgtgctacaaacaacaccatcaagaaaataaaaatacaatccacagaattggagaaaatatattatattgcatgtca

SEQ ID NO: 692971 - DNA, 623 bp, Homo sapiens
gggtcaaatacagttgaaaagtagtaaggagaaagaaaagtgaccattggacctggcaacacagaggtcactactgacggcgacagctattttaatggagtactggagacagagccctgttgaagtggattgaaaaagagaatggacataagacataaaaatcaataaagtagaattgggagtccataagtaaactcacttatttatgatccatatatttatgacaatatatttatggtcaattgatttttaacaagagtaccgagacaatcaaataggaaaagaatagtcttttcaacaaatagtgtaaggacaactatatatctacatgcaaaagaatgaaggtggactcttcctatatacwgtacagtaaaattatcttgaaataaatgatacaccaaaatttaagagactattggcctcttagaagaaaacatgggaataaatcttcattacattagattagacaatggtttgttaaatatgttaccaaaagcacaagtgaccaaaaaaagataattggactacaataaaattaggaacatttgtgctacaaacaacaccatcaagaaaataaaaatacaatccacagaattggagaaaatatattatattgcatgtca

SEQ ID NO: 692972 - DNA, 629 bp, Homo sapiens
tcaataaaaaataaataaaaatwaaaaaaaagagagagagagattaaaagtcaaaaaataaaaaaaaaataaaaaacataaaaagaaataaaaaaggaggatgtaagaataatttaaggtatattatgcaagtatccacaaaatgaattttaatagaaaataaatttaaattctgggtacccatgcctaatatttccaaaaaaaaagaaaataggaagagaaattcaaactatctctctttataggtgatataattctatgcctagaaaacccaaaggctccaagatttgataatcaacttcagcaaagttttaggatacaaaatcaatgtacaaaatcagtagcatttctatacagcaataatgtcaaagctgagagtcaaatcaagaacacaatcccattcacaacagccataagaagattaaaatgcctaggaatacagctaatcaaggaggtgaaggatctcggcaatgaaaattacaaaacactactcaaggaaaccagagatggtacaaacaaatggaaaaacatttcacgcttatggatagaaagaatcaatattgttaaaatgaccatacttcccaaagcaaattatagattcaatgctattcctatcaaactcccaatga

SEQ ID NO: 692973 - DNA, 1181 bp, Homo sapiens
ctccccatctcttgttccagctctgtgtgggccccagccaatttcacaccagtacccctctcatctcccacccaacactcccatgttgacatcactgcagactccactaatgcccacgctctggaatgcacaatccagaggagcaagggggtgaatcttagaccaagcacatcccgggagtaagttcttctccctttccccactccatcacagggctggttctgagctcccatttatccaccttcttgggagtgtggtctgtggattgagcaatcagtcacactcggcagctcagtactcctccatattggctctccatcctttccagcatctctccccttgtacctcmttcctccctaagagtatagtccctgataaaataacaacccattcatttttttcaataaatactctttaggtgtttactgtgggccaggcactgactctggcactgtgagtacagagatgaacttttatattcaatgacttatctgatattagatgttttctcagaagccatattgtttaatgccctttcttggacgtcaggaaattctggccacgtggtggagggctccgcttgcctgaatgggttaaggattagaaatggtttgagaaacggaataggaagcaaaactagacaaaatctctcaggaccaggttctgaaagcaaagatatcaggcactctttcctcatggaaattgtctgagcctccagacaattaagaggtttatttttcaaaaagcttttttaaaaattcaaattttattttaagttctgcggtacatgtgaaggatgtgcaggtttgttacataggtaagtgtgtgccatggtggtttgctgcacttatcaacccaacaccttggtattaagccctgcatgcaatagctattcatcctgatgctctctctccctccacccgccgacaggccccagtgtgtgttgttcctctccctgtgtccatgtgttctcattgttcagctcccacttataagtgagaacatgtggtgtttggttttctgttcctgcagtagtttactgaggataatggcttccagctccatccatgtccctgcaaaggacattatctcattcctttttatggctgcatagtattccattgtctatatgtaccacattttctttatccgatctatcactgatggacatttgggttgat

SEQ ID NO: 692974 - DNA, 469 bp, Homo sapiens
ttttctttctccttgttttataaaaccaccaataatatccagaaatacatgaatactctgatactgtaaacctgagatcaaatgcagtataatcaatttttcacagtggttaaaaaggcccatggagaaaagcatgttycagctgactacagagtcagagacttattattatgatacaaagtgactttagtatatttaccaaagtaaattattcaataaattagaacaaaatccttgatatttttaaatgactctttttggtgcttgtaacattaattcacataaagtgtttataattaaatactgagctttttaccatagaaacaaatggcaagaaaggacattaagctgctggtgtccttactttccctgcagtagagcaacataacctgtaaaccttcagggagagcctagggctgcatggtctgatgcagtagccattagctacttgaacttatttaatgtaaag

SEQ ID NO: 692975 - DNA, 606 bp, Homo sapiens
aataaatcattctaggcagaaagaaggcatatgtgatgaatatcctataacgagtttgtctatttaaaaaagatgcaartactttgttttttcattctgaaacataaaggctatcatttattataaagtgccaggggagaaaaaaattagtaaattaaactaatttactggttatttcaattcttatgaaaaatgtaaggtagtgtgaatttctaaatgttatgaagaaaggataatgccaatttcacaaccacaacaacaaaaaactcactgaattctgactttttcaaaataactagtagtctataccgtgaagtcctgattaatatttattacaacagttagcagttttctacatttgtatctccattttagaaaaagttttaatatacatttatgtgtatatttaaaactatttttactcttatacacacatcctaccccaagttttgcagcttaaagttatgatgctaaaaattaccaaatttaaaactcaaatgtaccttttatttcaagtaatgttttcatatgtccaaagtaagaggaaaaactaataccagaaaatgaaggttaaaaaatatgggaatcaaatatgttcactttgct

SEQ ID NO: 692976 - DNA, 1650 bp, Homo sapiens
tgctgctgctcaagaaatgcaccttattcaaataatcatattcactttttccactataataatgtttaaaaaacttcagggtttctatttcttagctatcactgcaaggcaattcaaaataatggaagccaagaaataatactgttttcctgtttctcaggagtctatatacatgatctggtaaagtgacctatgcttgccaataaactctactacagtgtggtcccatagaggagcctgactgttgggacgccaattctcaaaatttaaaatcgcaagcaagttgcaattattcagctataaacatactaaaagtggcactattgataatagcaaaaaatagaaataaatgtccaacaataagaaatcgatagacagtttttctaggacaactagtacaacatatagtgaaatactatgaagtcaataaatatgatgtagcagaatatacgctgctataaaacagcgtgtaatttattagaaagtgaaattaaaagttatttaataataaacatacaaatctatgtttgcaggtgcatgtctatgtgtgtgagtgagcatgtctgagtgtgcatgtgcctgtgtgtctgtgtccagaagtaaatacattaaaaacgttgaaaacttattttcttctttttgcttgtttatattttctaaaatgtctataatgaacatatatcttgataggaaagataatgccaagaaatcctaatttaacacccttttctcttttcctggacttttcccaatttgtttctccacttaatccctagcctcaccctagaggccacctcctctcctgaaacccacaggagctaagtagaaatttggtcactttcatcatgatcacccatacttcaaataattcatatatgagtaatgacatatgatctctgaaggaacataaagaacaaagataggtttatagttttaagatttcagtgggatgaaactgaattattcacatccattaaacagagtttgaatgattcacagccaattttatttttataattgtaatgaaacagctgggattagagtctattcatggactcataagaaatttgcaccccacctactaaaattagtttctgcatccaaaattctgatttgaacatctgactgtgaacaaaacaggcatcatcgctcaatgccaagaaactgaggaaggagactttaagcatgtcactttctcatagaattattttctcattgtgcttactttcctttaacttcattcatmagcagccccttgacatgattcttttgcagcaaagttgtttccaaagaatgggctttcttgtacaagataagttcaaataatacaatttttgaagctttcagactgtatgtgtgacagttgcttataacttatggattctcagccactggttggaaatcatatttaagaatttgtagttcatatatatatatagatatagatatagatatagatatagatctagatctttggacatcagcatcattacgtccaaaatataagattttgtcttaaagttgcctcgggtatcaattcatagatctgaatgtttaaggttttaaaggaaatttacttgactctagatttgcttgactctgcaattgtaaagagatttgagaaactgcatacttcaaactataatcttc

SEQ ID NO: 692977 - DNA, 1650 bp, Homo sapiens
tgctgctgctcaagaaatgcaccttattcaaataatcatattcactttttccactataataatgtttaaaaaacttcagggtttctatttcttagctatcactgcaaggcaattcaaaataatggaagccaagaaataatactgttttcctgtttctcaggagtctatatacatgatctggtaaagtgacctatgcttgccaataaactctactacagtgtggtcccatagaggagcctgactgttgggacgccaattctcaaaatttaaaatcgcaagcaagttgcaattattcagctataaacatactaaaagtggcactattgataatagcaaaaaatagaaataaatgtccaacaataagaaatcgatagacagtttttctaggacaactagtacaacatatagtgaaatactatgaagtcaataaatatgatgtagcagaatatacgctgctataaaacagcgtgtaatttattagaaagtgaaattaaaagttatttaataataaacatacaaatctatgtttgcaggtgcatgtctatgtgtgtgagtgagcatgtctgagtgtgcatgtgcctgtgtgtctgtgtccagaagtaaatacattaaaaacgttgaaaacttattttcttctttttgcttgtttatattttctaaaatgtctataatgaacatatatcttgataggaaagataatgccaagaaatcctaatttaacacccttttctcttttcctggacttttcccaatttgtttctccacttaatccctagcctcaccctagaggccacctcctctcctgaaacccacaggagctaagtagaaatttggtcactttcatcatgatcacccatacttcaaataattcatatatgagtaatgacatatgatctctgaaggaacataaagaacaaagataggtttatagttttaagatttcagtgggatgaaactgaattattcacatccattaaacagagtttgaatgattcacagccaattttatttttataattgtaatgaaacagctgggattagagtctattcatggactcataagaaatttgcaccccacctactaaaattagtttctgcatccaaaattctgatttgaacatctgactgtgaacaaaacaggcatcatcgctcaatgccaagaaactgaggaaggagactttaagcatgtcactttctcatagaattattttctcattgtgcttactttcctttaacttcattcatcagcagccccttgacatgattcttttgcagcaaagttgtttccaaagaatgggctttcttgtacaagataagttcaaataatacaatttttgaagctttcagactgtatgtgtgacagttgcttataacttatggattctcagccactggttggaaatcatatttaagaatttgtagttcatatatatatatagatatagatatagatatagatatagatmtagatctttggacatcagcatcattacgtccaaaatataagattttgtcttaaagttgcctcgggtatcaattcatagatctgaatgtttaaggttttaaaggaaatttacttgactctagatttgcttgactctgcaattgtaaagagatttgagaaactgcatacttcaaactataatcttc

SEQ ID NO: 692978 - DNA, 1650 bp, Homo sapiens
tgctgctgctcaagaaatgcaccttattcaaataatcatattcactttttccactataataatgtttaaaaaacttcagggtttctatttcttagctatcactgcaaggcaattcaaaataatggaagccaagaaataatactgttttcctgtttctcaggagtctatatacatgatctggtaaagtgacctatgcttgccaataaactctactacagtgtggtcccatagaggagcctgactgttgggacgccaattctcaaaatttaaaatcgcaagcaagttgcaattattcagctataaacatactaaaagtggcactattgataatagcaaaaaatagaaataaatgtccaacaataagaaatcgatagacagtttttctaggacaactagtacaacatatagtgaaatactatgaagtcaataaatatgatgtagcagaatatacgctgctataaaacagcgtgtaatttattagaaagtgaaattaaaagttatttaataataaacatacaaatctatgtttgcaggtgcatgtctatgtgtgtgagtgagcatgtctgagtgtgcatgtgcctgtgtgtctgtgtccagaagtaaatacattaaaaacgttgaaaacttattttcttctttttgcttgtttatattttctaaaatgtctataatgaacatatatcttgataggaaagataatgccaagaaatcctaatttaacacccttttctcttttcctggacttttcccaatttgtttctccacttaatccctagcctcaccctagaggccacctcctctcctgaaacccacaggagctaagtagaaatttggtcactttcatcatgatcacccatacttcaaataattcatatatgagtaatgacatatgatctctgaaggaacataaagaacaaagataggtttatagttttaagatttcagtgggatgaaactgaattattcacatccattaaacagagtttgaatgattcacagccaattttatttttataattgtaatgaaacagctgggattagagtctattcatggactcataagaaatttgcaccccacctactaaaattagtttctgcatccaaaattctgatttgaacatctgactgtgaacaaaacaggcatcatcgctcaatgccaagaaactgaggaaggagactttaagcatgtcactttctcatagaattattttctcattgtgcttactttcctttaacttcattcatcagcagccccttgacatgattcttttgcagcaaagttgtttccaaagaatgggctttcttgtacaagataagttcaaataatacaatttttgaagctttcagactgtatgtgtgacagttgcttataacttatggattctcagccactggttggaaatcatatttaagaatttgtagttcatatatatatatagatatagatatagatatagatatagatctakatctttggacatcagcatcattacgtccaaaatataagattttgtcttaaagttgcctcgggtatcaattcatagatctgaatgtttaaggttttaaaggaaatttacttgactctagatttgcttgactctgcaattgtaaagagatttgagaaactgcatacttcaaactataatcttc

SEQ ID NO: 692979 - DNA, 1650 bp, Homo sapiens
tgctgctgctcaagaaatgcaccttattcaaataatcatattcactttttccactataataatgtttaaaaaacttcagggtttctatttcttagctatcactgcaaggcaattcaaaataatggaagccaagaaataatactgttttcctgtttctcaggagtctatatacatgatctggtaaagtgacctatgcttgccaataaactctactacagtgtggtcccatagaggagcctgactgttgggacgccaattctcaaaatttaaaatcgcaagcaagttgcaattattcagctataaacatactaaaagtggcactattgataatagcaaaaaatagaaataaatgtccaacaataagaaatcgatagacagtttttctaggacaactagtacaacatatagtgaaatactatgaagtcaataaatatgatgtagcagaatatacgctgctataaaacagcgtgtaatttattagaaagtgaaattaaaagttatttaataataaacatacaaatctatgtttgcaggtgcatgtctatgtgtgtgagtgagcatgtctgagtgtgcatgtgcctgtgtgtctgtgtccagaagtaaatacattaaaaacgttgaaaacttattttcttctttttgcttgtttatattttctaaaatgtctataatgaacatatatcttgataggaaagataatgccaagaaatcctaatttaacacccttttctcttttcctggacttttcccaatttgtttctccacttaatccctagcctcaccctagaggccacctcctctcctgaaacccacaggagctaagtagaaatttggtcactttcatcatgatcacccatacttcaaataattcatatatgagtaatgacatatgatctctgaaggaacataaagaacaaagataggtttatagttttaagatttcagtgggatgaaactgaattattcacatccattaaacagagtttgaatgattcacagccaattttatttttataattgtaatgaaacagctgggattagagtctattcatggactcataagaaatttgcaccccacctactaaaattagtttctgcatccaaaattctgatttgaacatctgactgtgaacaaaacaggcatcatcgctcaatgccaagaaactgaggaaggagactttaagcatgtcactttctcatagaattattttctcattgtgcttactttcctttaacttcattcatcagcagccccttgacatgattcttttgcagcaaagttgtttccaaagaatgggctttcttgtacaagataagttcaaataatacaatttttgaagctttcagactgtatgtgtgacagttgcttataacttatggattctcagccactggttggaaatcatatttaagaatttgtagttcatatatatatatagatatagatatagatatagatatagatctagatctttggacatcagcatcaytacgtccaaaatataagattttgtcttaaagttgcctcgggtatcaattcatagatctgaatgtttaaggttttaaaggaaatttacttgactctagatttgcttgactctgcaattgtaaagagatttgagaaactgcatacttcaaactataatcttc

SEQ ID NO: 692980 - DNA, 1274 bp, Homo sapiens
tgaataaatcataaatactaattgattagactttcagaggttttttttggttattacagaatcaaacaactacagataaattatcacagaagtggggaaaagggaggtgattcaaatacttaaatttaaatgtagttcaagtaggtctgaaatctaataaagttagtcatttttgtaatatatgcattgttgctataaatgtctacaatgagtggcatgtggcattactgccactgtaaaatgataaaatgaaaaacgagaagagagtagcaggaacaaagacaaaaacagaattacagatggattattaggtcagtccttgagaactgtaaactagttaaaagaggagaaatagtctacagaacataatccaagaaaaattgaaattctggatgaaaataattatgttgtttactcatcttgcatttttaagttgaaataatctgattaggatttgctcagtaatagtaactggcttttggggacatgggatgaggtgctcacatcttcaagtggtagaaaaaacactactaacaccatatcttaaaaatcaaacttagaatcccctttcaaaaggtaaacattccctacaaaatgttcatgtagaaagtctttcaataaaatagaargtaaataaggaataggaaattatttatacaaatgtcaatggaattgaaactgtggctaaaatgtatcttattccaagacttgataactgttcttgcatagtattcagaagcattagttccgaaatttctaataaatcatgtatacaaataaaggtaatattgctttgtgaggttttatttgtttgtttgtttgtttgtttggtgaactataacatcctgggtaactttttgtctcatagtgggtatttactaattgaactatcatgtttatttcaaggtattataagcaactgatttattaggtattatttttaaaaatatgacacataacatacacaaatttaaatgtaagatagagattgagcaggagctaaattaatttgactacctactgcaaccaatgtcaactctttcagtctgattttacccattttacgtctggaagttgcaagcactgtttaaaaattttaaaatgcattcgtaaatctcctaatacacagtcttgtcatcgcatacactaccaaaatatgtgtgtagttttccacattttagccaacaatgaacattttaatatttgtactagaccataattatattactgagttggtagtagttctttcacagtaagttatttaatagtgagat

SEQ ID NO: 692981 - DNA, 1274 bp, Homo sapiens
tgaataaatcataaatactaattgattagactttcagaggttttttttggttattacagaatcaaacaactacagataaattatcacagaagtggggaaaagggaggtgattcaaatacttaaatttaaatgtagttcaagtaggtctgaaatctaataaagttagtcatttttgtaatatatgcattgttgctataaatgtctacaatgagtggcatgtggcattactgccactgtaaaatgataaaatgaaaaacgagaagagagtagcaggaacaaagacaaaaacagaattacagatggattattaggtcagtccttgagaactgtaaactagttaaaagaggagaaatagtctacagaacataatccaagaaaaattgaaattctggatgaaaataattatgttgtttactcatcttgcatttttaagttgaaataatctgattaggatttgctcagtaatagtaactggcttttggggacatgggatgaggtgctcacatcttcaagtggtagaaaaaacactactaacaccatatcttaaaaatcaaacttagaatcccctttcaaaaggtaaacattccctacaaaatgttcatgtagaaagtctttcaataaaatagaaggtaaataaggaataggaaattatttatacaaatgtcaatggaattgaaactgtggctaaaatgtatcttattccaagacttgataactgttcttgcatagtattcagaagcattagttccgaaatttctaataaatcatgtatacaaataaaggtaatattgctttgtgaggttttatttgtttgtttgtttgtttgtttggtgaactataacatcctgggtaactttttgtctcatagtgggtatttwctaattgaactatcatgtttatttcaaggtattataagcaactgatttattaggtattatttttaaaaatatgacacataacatacacaaatttaaatgtaagatagagattgagcaggagctaaattaatttgactacctactgcaaccaatgtcaactctttcagtctgattttacccattttacgtctggaagttgcaagcactgtttaaaaattttaaaatgcattcgtaaatctcctaatacacagtcttgtcatcgcatacactaccaaaatatgtgtgtagttttccacattttagccaacaatgaacattttaatatttgtactagaccataattatattactgagttggtagtagttctttcacagtaagttatttaatagtgagat

SEQ ID NO: 692982 - DNA, 1526 bp, Homo sapiens
tcagcccttgaatcttgttattgaatatttgagagatgcttaaagcatatggttggatattgttcaatgtgtttctttcataccaatcttatcaaatatgagaatggaaagttgagtcagagtgaaatatctaggtgttcgcacctagaattcaataggagcaagcttgcatgggggtggagagtgggaggtaggtgagaaattctttcacacatgaagttacctcccatctaaacaaatttagtactttggtaagcctagtcgaaccttatttttggtgcaattaaaatttctggaagtagcagagaaggtgggagaagtgggtagtgtcctgagctgtgtcactacagaaccacatctttctaaaacaccatacagatgcgagccctgacctggtcacactgtgtacaatgtaacctggcaggacacagtaagggatttcctttgaagttatcaacatccttagcccaatcaaggacagggaagcagcctgttaccaaaggaacgcagagtagaagcctcctgtgccctattttcaaaaacaaagcttggctttaacttaaagaaaaagaaaagcactaacgatcttatttcattcatactttatcctgcatggcagttttaaaatactttgtcactctcctttgcagtaagcctattaaggacagaaatcctgtttcctaatcgtcactgaacattctaaggaataagcacctaggacagtgctctgttaggctaaacattaagaaagttgaaaataatcctgcctgctatttctatcgttatttttagaaaaaaaaaatattttaggaaaaaaagtagtgtttgttttcttaaaatcccttttaaatgtcgtccattcaggctgacaaattaatctggagttgggcagagatggttgatgatatagaagacacattcaagaaaattcattgtccactcctactttccacactttttttttttttttgagatggagcgttgctctgttgcccaggctggagggcagtggcgcgatctcggcccactgccacctccgcctcccgggttcaagtgattctcttgtctcagcttccagagtagctgggattacagacgcccgccaccatgcctggctaattyttgtatttttagtggggtcgggtttcaccacgttgaccagcctggtctccaactcctgacctcaggtgatccaccggcctctgcctcccaaagtgctgggattacaggtgtgagccaccgcacccagccccacatgtatttttgagaaggagctgatgccaggtacttgctaagtgctgggggcagctctcttttatctttaacattacagtcacaaattgctgatggttctatctgtgtctgtttatgtttaaataataaatttctccttttcccacaagctgtcttaagagacaataatttgtacctccatcacctcgtgcctgagagggaagaattatgggtcatatggataagatcagtgctgggagggaaaaaggataggaataagtagctagccgata

SEQ ID NO: 692983 - DNA, 624 bp, Homo sapiens
gactgcagatatcgctacagaaagaataccggttgtatgtttcctgaattattactaaaaacatttgtttaaatgtctcatatataaaggtgatggccttatctctgacaatgaattagggcctaaggagaaagcaaattggaacactgttaacattaaaaagtcagctagtctttgaaatacyattataatactaccttggaagatacagcaactcaaatcttgttcacccaccagataagaaacaaagtagagggagcctcagctcttagggccaggctgcctggactgaaatcctgactctgctacttgctacctgttgtagcctaggcaatttattatactttcctgagacccagttctctccattctataaaataaaaatgacagcagtttctatctcaagtgaagacaacatacagcacactgctcaaccagtgtgaatcaggatcagcattttaaggcggccccaatggaagacaaacctcttggaacgcagcctttccctggtcaacctagctcacctatggcctgaggttgcactcacttttacttagtaatcagtgcttagctgcgcatctaccaagtcagttattactacacgcagctcatttctatgcaaac

SEQ ID NO: 692984 - DNA, 624 bp, Homo sapiens
gactgcagatatcgctacagaaagaataccggttgtatgtttcctgaattattactaaaaacatttgtttaaatgtctcatatataaaggtgatggccttatctctgacaatgaattagggcctaaggagaaagcaaattggaacactgttaacattaaaaagtcagctagtctttgaaataccattataatactaccttggaagatacagcaactcaaatcttgttcacccaccagataagaaacaaagtagagggagcctcagctcttagggccaggctgcctggactgaaatcctgactctgctacttgctacctgttgtagcctaggcaatttattatactttcctgagacccagttctctccattctataaaataaaratgacagcagtttctatctcaagtgaagacaacatacagcacactgctcaaccagtgtgaatcaggatcagcattttaaggcggccccaatggaagacaaacctcttggaacgcagcctttccctggtcaacctagctcacctatggcctgaggttgcactcacttttacttagtaatcagtgcttagctgcgcatctaccaagtcagttattactacacgcagctcatttctatgcaaac

SEQ ID NO: 692985 - DNA, 672 bp, Homo sapiens
aaacctgggcatctcaaagcaacattacctatggttgtgctcagctcctaaccctactcatcaatattcatgttagatctcctgactctaaatcacccttgccccctcagcatgcaagcattgggcccacttacaagtaactttcatcctgaagccaagwcataagccattgtcctcaaacatcacaacacaacctttgggcctgagaacattcaaaacatggacgttaaaaaggcacatttctgactcatgaccttagagcctaacactgttatcctcaattaaggacacaccatgtatcatcttgcatctctgattagttcatagtgtctcacatataatatcagtaaagtacaaggctgcctgtgttctcctttttttatacttttcaaatgaattcaggcttcccctttgccttagtttcactgacactgtcccacttcgctaaatgacattaatcgataaaaggcaggatttgcaagcacactgcaaaatacaacatactccgttgcaaccagtggtatcctaccttaggaacgatatattagggcaaacatcaagaaacatctagaacttatgcaataccagataatctttattttcctctgaaacctgacaaaccaatttcacaattttctcagtacctgaaagtctatgttgccagccaaagtg

SEQ ID NO: 692986 - DNA, 672 bp, Homo sapiens
aaacctgggcatctcaaagcaacattacctatggttgtgctcagctcctaaccctactcatcaatattcatgttagatctcctgactctaaatcacccttgccccctcagcatgcaagcattgggcccacttacaagtaactttcatcctgaagccaagacataagccattgtcctcaaacatcacaacacaacctttgggcctgagaacattcaaaacatggacgttaaaaaggcacatttctgactcatgaccttagagcctaacactgttatcctcaattaaggacacaccatgtatcatcttgcatctctgattagttcatagtgtctcacatataatatcagtaaagtacaaggctgcctgtgttctccttttttwatacttttcaaatgaattcaggcttcccctttgccttagtttcactgacactgtcccacttcgctaaatgacattaatcgataaaaggcaggatttgcaagcacactgcaaaatacaacatactccgttgcaaccagtggtatcctaccttaggaacgatatattagggcaaacatcaagaaacatctagaacttatgcaataccagataatctttattttcctctgaaacctgacaaaccaatttcacaattttctcagtacctgaaagtctatgttgccagccaaagtg

SEQ ID NO: 692987 - DNA, 475 bp, Homo sapiens
cttaaaacctaatctatctctcagcttcattagccatgtataagctacagaattgcatttggacttttcctagattccaagaatggtccrtaatcaatctacaactggattataatccaaatagccagaagataatgctatttaattagcttctataaaatatccacgatagtctgtgttcacaaatatgcctcatgaggtcaagtataaaatagtttaaagaatgtctgaaaaggagttttccaaaataggtgactacattagcatagttgtgattcaggggaattaaaatacagttaagtgtatactgatttatcaggagggcaaatcccttaagaggtggaaataaacattaaaatacagcaactcatcttatttaaaccttatctggatatcacctgttataaaaaccaacaaaaaacggtgttttctgataaacaaagcccagaataagagctattttgccttattttga

SEQ ID NO: 692988 - DNA, 653 bp, Homo sapiens
ttggtcattggtggccactggaggagtgctgccttcagttttggttgcttttgtaaaatcacactgtttcacattttctgaacctaaaaatgatttttatctctggtacaactatgcctttaaaaaaagagtatgagcctrgccaacatggtgaagccccgtctctactgaaaatacaaaaattaagtgggcgtggtggcacaagcctgtaatcccagttacttgagaggctgaggcacgagaattgcttgaacccaggaagcataggctgcagtgagctgagaccaagccactgcactccagcctgggcaacagagtgagaccctatctcaaaaaaaaaaagagtatgtacagattttatttcatttagcattttagttcctacataacaagaaggtttctgtaggaacctattccgcctagtgataataaaggaggctgcattatgattcttatctcaaaacaaaaataaatctgttttagagagtttggtgaagaataaaaaagaattgttttttttatgtaatattactattgctatatggttataaataatttttactttttttagctagcttctttatttggatgctgcttttccctagcaaagcttcctgcatgatacaactgaagttaagcactctgccacaggc

SEQ ID NO: 692989 - DNA, 605 bp, Homo sapiens
acatctactggtttctatcctcactaccactcaatttcattgtatgcttatcatttttgtggaccacarcaatgacattctaactttgtatctataggctattgccctttccattctcttttccaaaacctacttttatcagctttccttcttccaatatgtaaatatagcaaattgctatatttgaccaacttgctcatgaagaatataagattctacacaatcatgccaataatatcttctttcatataatatcgagttttttgtctgtttctctctcttttgttatggtatgaacaagatgagatttgtgttgttcactgatgccttcttggggccaggtacatttgtaggactcaaatatttatttaatgaatgactgaatggccacactgccctttagatttctcaaaggttcaatacggtcttccatggtagaatcattttaaatattacttctttttttataatactctgtcttttatttctatactaattaagtcctatctatcatcagggctcaatgagaaggttttaactgttctcaaatatttgacacatttcctgtattttacgcttcacaaatcaattttttcattacagca

SEQ ID NO: 692990 - DNA, 673 bp, Homo sapiens
cgcctcagccaggacgcctatcgccgcaacagcgtccgttttctgcagcagcgacgccgccaggcgcggccgggaccgcagagccccgggagcccgctcggtgagtgcagcggagagggcaggaagggcaagccgtagaggcggagtcagcgggagaggcggggccagaggtagggccagagtagcggggcgggaccagagggcggaatcagagggagaggcggggactggaggcggggkcagaggaggagccagcgcttagggggcggagcgatccctaagaggcggagtcagagggagaggcacaagcgggaggcgaggccagagcgcggagcaggagttggagaccgcggcggggcgaggccagagagcgctgtgggcggggccagtgtgcggggcggggcgtctgactcggccccgctctctgcccgcagaggaggagcggcagacgcagcgctctaaaccgcagccggcggtgcccccgcggccgagcgccgacctcatcctgaaccgctgcagcgagagcaccaagcggaagctggcgtctgccgtctgaggctggagcgcagtccccagctagcgtctcggcccttgccgcccttgccgccccgtgcctgtacatacgtgttctatagagcctggcgtctggacgccgagggcagccccgacccct

SEQ ID NO: 692991 - DNA, 1349 bp, Homo sapiens
tgaacagtagaacacataactggcctcaagatccctctaccaaaagctcattcagaggcagactcctgaatgtctaacaacttcaagggtgagctgaattgcatttctccagtctccgaacttggcatcaaagaagaaaaattggagtaaaaaggagagatgatcacaatgtgagagtgaaccaagatacaggggcaggagctgatggggtgggagggtgatgggaacagaaactatcaggaagctcactgaggacctgtgatcttgcaagtggactggaaatcttctcctggaaggccaaagcaggccaagggtcgcctacaatatctgctaacggatggtgatgggtgggggacaggcttggtgcctctgactggtgcagtagtttccttacctctaagttagtcctcgccttctttaaaacatcatgtgttctggttactgaaacaacaaaagagcaccacagagtagaaataccagcagaaattaaccctacttgcttagcgtgagaattctaaagcatttatttctttctggctattcagcttggagtctccttctatccaccccctgtcctcccctccctctgcagccacaattgctcctggtacaggaggtttggggacatcaaatcagtctcmactcccaacatccccaagcccccctgatcacttctcatctgaagcacaagtggggcatcgggaagactgcctgtttcttcccccattccctctcagggaacctacgctggctgacgatgaactgctccatgctctccttctgctggttggcgttcttcagatgctcagctgtgctctgaagtagccgctcctgtttggatactttggttctcagttccagaagttccctttctgttgattctccctggataagaggaacagactcttactgaccaggcagaaggcctaaagcaccctgtgctttgtggctctttccagttcaaagaaggattctacaatcttctcaaccctcctgaactggatttcctccttcacagcctcgaatacctccagctgaggacagtttaggatgaggccattaggcaggaataatgagactctggaattccccatgcagactagcacaggcctacacacctgtagcttaagagaacctcgcctcaggctggtatcaaactcccaactctgaagaggaccttgctttagtcctgatatcagttctgtcactctcccttcacaggtaagattgagagttcagaaatgttatgctggggagagagatctggactcaggaaagtttgcaagtttgtaaatatttgtgccaacatgaagatggcacaacaccctctccctggaattagcatagtt

SEQ ID NO: 692992 - DNA, 1349 bp, Homo sapiens
tgaacagtagaacacataactggcctcaagatccctctaccaaaagctcattcagaggcagactcctgaatgtctaacaacttcaagggtgagctgaattgcatttctccagtctccgaacttggcatcaaagaagaaaaattggagtaaaaaggagagatgatcacaatgtgagagtgaaccaagatacaggggcaggagctgatggggtgggagggtgatgggaacagaaactatcaggaagctcactgaggacctgtgatcttgcaagtggactggaaatcttctcctggaaggccaaagcaggccaagggtcgcctacaatatctgctaacggatggtgatgggtgggggacaggcttggtgcctctgactggtgcagtagtttccttacctctaagttagtcctcgccttctttaaaacatcatgtgttctggttactgaaacaacaaaagagcaccacagagtagaaataccagcagaaattaaccctacttgcttagcgtgagaattctaaagcatttatttctttctggctattcagcttggagtctccttctatccaccccctgtcctcccctccctctgcagccacaattgctcctggtacaggaggtttggggacatcaaatcagtctccactcccaacatccccaagcccccctgatcacttctcatctgaagcacaagtggggcatcgggaagactgcctgtttcttcccccattccctctcagggaacctacgctggctgacratgaactgctccatgctctccttctgctggttggcgttcttcagatgctcagctgtgctctgaagtagccgctcctgtttggatactttggttctcagttccagaagttccctttctgttgattctccctggataagaggaacagactcttactgaccaggcagaaggcctaaagcaccctgtgctttgtggctctttccagttcaaagaaggattctacaatcttctcaaccctcctgaactggatttcctccttcacagcctcgaatacctccagctgaggacagtttaggatgaggccattaggcaggaataatgagactctggaattccccatgcagactagcacaggcctacacacctgtagcttaagagaacctcgcctcaggctggtatcaaactcccaactctgaagaggaccttgctttagtcctgatatcagttctgtcactctcccttcacaggtaagattgagagttcagaaatgttatgctggggagagagatctggactcaggaaagtttgcaagtttgtaaatatttgtgccaacatgaagatggcacaacaccctctccctggaattagcatagtt

SEQ ID NO: 692993 - DNA, 667 bp, Homo sapiens
ttcttgttagtattacaggttgagcatccctaatctgaaaatctgatatctgaaatgctaaaaaacccagaactttttgagggccaacaggacaccacaagtggaaagttccacaccttatgtgatggggcacaaagtgtaggggcacaacacatagtttattcagtgtccctaagggaaaaagactctctcaaccccctttagccgtgatatatctttgtatacatgcatagtatattagtcctcgcattgctatatgcattctcgcattgctataaagaactacctgagactgggtaatttataaagggaaragttttaattggctcacagttctgcaggctgtataggaaacataactcggaggcctcaggaaacttacactcatagtggaaggtgaagggcaaacaagcacgtcttatgtggccggagcaggaagaagagagagaggtgggaggtgccacacacatttaaacaactacatttcttgagacctgtgtcacgagaacagcaccaaaggggggaaatcagcccccatgatgcaatcacctcccaccaggcccacctccagcattggggattgcaatccgacatgagatttgggcagggacacgaatccaaaccatatcacctagattccctcacacaagtactccctcaaaggaca

SEQ ID NO: 692994 - DNA, 908 bp, Homo sapiens
gtgtgagggaataagggggcagtatcaacatggtgtggggtgctatgagttacaggacactacatcagagtactgtttttcaggctgagatccaacagcatttttaaaaaatagaaaatatcagaatatatcccagggaataagtgcaaatgttgtttcatgaagctttagttaacattattttaatgcacatatacacatcacacacaaatgcatatatgctaagtaatcatgtaaaatgtattcttttctttttcctgcagaccttgcattcagataaaatgtaattttttactgtgaatagttaaaaacaattcgtaaaactatgttagaacaagccaattaaaaaaayagtcaaaaaatctaaccactctggcagtgttaaacacactccaagtgttttttctactctcactcaacaacaatcaacacaggagacttctgtgaccaagtgtgcgggctggggggagggtgttttcccacacagcaagcagcggacacctggtgtccatcctccaatgcaattcaatacccagagacagcctgggatcccacaggttgagggctcagtcccacaagactccccccaacccccttcgaacaccagtcgaaagtctgggcctccagaatttctgactgaccagctataaattgggattcccacaatacttttttgggggttcaactaacttgctagagcagctcacaaaacccaggaaacacgtctgccagtttattatagagaaaattacaaaggatacagatgagatgcacagagtgagatatgggggaagggacgtggagcttccatgccctccctggggtgccaccctctagaaacttccatgtattcagctacccaaaagctcccagaacccaatccttttgggattctttggaagcttcat

SEQ ID NO: 692995 - DNA, 1560 bp, Homo sapiens
taaagttaatgccttagctaaagtttgctcatgctgtatgtactttaaagtaaattacagagattgtaatacatgtcttatacaaagctgaaccatggcaatggcaaacatactgcacctggggctaggacccctggattctgattttagggcacccaccttggacacaccgtctctttggacctcattttcctcgtctagaaaataaatggattgacttaggtcacatttctcaaatttgtcctacagaaacttagggttttgtggaggagattcaggaatcctacaaacctgtgatatacatttttatatcatttatttgcagtgtgtttttaaagaaaaaaagagaaagtatgatgtacatgtcagcatagcatgcacacacccagcaaaattcaacagagtagacttagtgctaccagaccaacttgtttttttcaatcttagaataaagcttctctaaccatatctgtaaatgatatataaagatactataaacatgtgattgagaaagtagattgtaactcaaccttttttgttgttaaatttaggcccatgcatgtcaactcatgtaaaagtacgtgacaagggacatgactaagatacaggtaatgtacttggcttaatgccaggaaaagcttaaggatggaggccttcatcacagcatagttgtcagttatgcaatagaaaggaaaggcccaacattttgtgcatttattgtaagttcttgttaaaatttgactctttaattttaaggctagatgcattgtaagtcttggggtctttttacctaactgtttcttttccccaggtaagaaaaataaatccttctaaagctgaaaattgatatgaatcactggttaaaaataaagcttccaagaagatttgttgatggatatggtgaatggatgtggctcaagttaaactgtcaaaatgcctgatgatcaccagctgatttttcaaccaggattccattcacaactgcacgtcaaatgaaggaaacctctctcaaactgcataacacaacttgaagacaataaagaatgagagtacattgcccattcattgagagtacattcaatgggttcgagtgaaattcttcaaaataattttgccttcaaatatactccagtgtaaatctgaaacaaaacatagtgaacatacaacataaactcagatttttcaacagtaattgaacaatttataggaaacatatgcaaacaatacttacatctaacaacaaaaatgcattaacttttatcttcagatgctgctctgtggcaggtctgggagaagctgttagaaaaagtttattatatcctggactcttgataccagcatgtcaactagagtgcatgcatgatgaagcagggactttgcttggttaactgcttatctccaggatctaggatgacacatactaggttctcaataaatgttgttgaatgaataaatgaatgagtaagttgatacaaaaatrtacttagcattattatcagagctgagagaagaattcagatatgtacactacagatgcgtaaaaatttattctaagaaatg

SEQ ID NO: 692996 - DNA, 516 bp, Homo sapiens
aaaagttcccaagcacagtgctgaagtgytgtctagtatatgtgttaggcaagcttcattcaaacctgagctacagtattgttggccatgagttcaatactaacaatccaacaatagacagtaaataaggtgattttaaatagaaacacacataaggtatgtgatgatcagatagtgaacatactgtgaccagaggctcctgggagcataaccctgtatttcccctaggagcaatggttcagtatttgctaattcagtgtttacagtgactttatagaagacaattactatgaataatgagaatcaactgaactgcatcacattatggtcctggagtatgaataggacccagaacagacagtaatgttaaaatataagggcctggggccaggcatgatggctcatgcctgttattctagcactttgggaggccaaggtgggcggatcacctgaggtcaggagtttgagaccagcttggccaacatagcaaaaccccgtctctaataaaaatacaaa

SEQ ID NO: 692997 - DNA, 1288 bp, Homo sapiens
acactgcccttatgtcattcccctacacatacattcccccacacacacatccacatatgcatgcacgcgtatacatgcgcacactcttccatatacagcctgtatatgtacacccagcacacacccatgcacttctcccctcaccccaccccacaaatatatacacatccgtgtacatggggctgcatctgtatccatacatgcacacacacctctacccaggcccaaccgcatcccycaagtctccccacacttccttaccccgtatatgcacacgtacacactctttgtactctaagcatgtcccctgcacactcccacccatcacacacatactcccatgcatatgcactcattgccgaaatgcctcctcatatgcacccatacacctccccacccccgcattctctgctgtgcacaagcttgtgtcagtcatttaggctgcccttgaaccctgtaccttccttggtgaccacccatgcctatctatggccaaggtcttgaggtaaacgagtgcctcagagagggtgactaagcacacagggccctgctcatgctcccccaagccccgcatccctgtagtggcatgaagaagccaacttcttcctggaggaagagtttcagcgggagtgtaggctcttggtcaggtctgtaggcatatgggtgctaaaccagcagttaggcgtggcttattccatggctaactaggggacacgaccatatttgattttattttcatttaatttttgagacagggtctcactcttgcccaggccagttttgaactcctgagctcaagtgatcatcctcccacctcaagggccttattttaatttgcttatttatttatttatttatttatttatttatttattatttttattttgtttttgaggcagagtctcactctgtcgcccaggctggagtgcaatggcaccatcttggctcactgcaacctccgcctcccgggttcaactgattctcctgcctcagcctcctgagtagctgggattacaggcacctgctaccatgccaggctaatttttgtatttttagtagagacagggtttcaccatgttggccaggctggtctcgaactcctgaccttaggtgatctgcctgcctcagcctcccaaagtgctgggattacaggcatgagccaccacgcctggcccttaattttctcttgactatattgctttgtcagttccaatctcagaggctccggggctgcatttcacttctgggtgcagttgtatgcccagaacggcaatcttctcttggttta

SEQ ID NO: 692998 - DNA, 608 bp, Homo sapiens
  misc_feature 535: n = A,T,C or G
ttccccaaaggccaacagcattggcctggccagaccaggtgaccttagatttggtgaacaacgtactatggaagccacatcactattgggcccccaggtctgatctgggttttgcctctgcccttggggaaatgctatcagaaattcgccccattttctttacagtcttttgtgtctgtcatttctctttcaaaaaggcggtgttttttgttgttgttggtttttttttttttttaaagaaaagttcttaaaacactaacggaaacccatggagtttgtcctttgtaaaaattttaaacacagtgtcttgatataaaaataaaaaatccagttagcactcccaacctgcctcccttgcacaggccttgccccaacagacctccgaacagggtgcctctgcgggctgggaatcaggcaatcaggcagcctccccctgcctcctgtatctttaagctgagtctgggctgcactgtgcggggttgggggttgggggttgggggggttggggggkttgggggccccctgcatgaaggcntctccaatcttaatcaggttgctcttcccatccccctgcccccagcgcgctgggttcctgcagctgaagcctc

SEQ ID NO: 692999 - DNA, 603 bp, Homo sapiens
  misc_feature 27, 425: n = A,T,C or G
cattttttgtagatacagggtctgacntgtattgcccaggctggtcttgaactcctggcctcaaaggatcctcccacctcagcctcccaaaatgccgagattatgggtatgagctactgtacccgaccaagaactttctattatatagattttaattaaaaacagtcctgttgagtggcctctttatcaaatgcattctcacataacctcatagaagtgagccctcttactgaattatgtggctggggttcttgggtatgttttgttctattttctggttggtggttttctttctgtcgggtcccrtgggctctttttggacctcttctcagaatgtttttcgttttttttattttttgagatggagtcttgcactgtgtcctgggctggaatgcaatggcaagatccctgctcactgcaacctnccgcctctcgagttcaagcgattcttctgcctcagcctcctgagtagctgggattacaggtgcatgccatcacacctggcaattttttttttatttttagtagagatggggtttcaccgtgttaggcaggatggtctcgatctcctgacctcgtgatccacccacctcggcctcccaa

SEQ ID NO: 693000 - DNA, 603 bp, Homo sapiens
  misc_feature 27, 425: n = A,T,C or G
cattttttgtagatacagggtctgacntgtattgcccaggctggtcttgaactcctggcctcaaaggatcctcccacctcagcctcccaaaatgccgagattatgggtatgagctactgtacccgaccaagaactttctattatatagattttaattaaaaacagtcctgttgagtggcctctttatcaaatgcattctcacataacctcatagaagtgagccctcttactgaattatgtggctggggttcttgggtatgttttgttctattttctggttggtggttttctttctgtcgggtcccgtgggctctttytggacctcttctcagaatgtttttcgttttttttattttttgagatggagtcttgcactgtgtcctgggctggaatgcaatggcaagatccctgctcactgcaacctnccgcctctcgagttcaagcgattcttctgcctcagcctcctgagtagctgggattacaggtgcatgccatcacacctggcaattttttttttatttttagtagagatggggtttcaccgtgttaggcaggatggtctcgatctcctgacctcgtgatccacccacctcggcctcccaa

SEQ ID NO: 693001 - DNA, 633 bp, Homo sapiens
gaaagatgacactttatgtgttttcactgagtcatcgtctgtataggtatatatttggagattactaaagagccaaacgcttctgatacctaaatgaataaatttctactggtaaaaatttaagtcgttgtcgtatctgaatgtggaagataactatggttggagtagaaacttcctaatcataacagcagccctgacttttattaaaacattgaaaaagggaaaagacacatggaaacagctggttttgtaggatgttsaagatccaaagcaagagatactgcaattaatctgtgaggaaggaaaaatatttctatgattctcacaaatgctcacaaatcactttcactttattaattttattttgtaaatcattccctatggtcacctcaaggggtgcattgttcttctctcatttttttcaaggtgaagaaattttggctgaaagagactcactgactttccagaggttatctagggattcattaacagaataaaaattaggctccagctaatgtcactaagccattgctatcctctgcatcttcttgcttccctcaatccaaagaggttctaaataaggagataacataattacataactttagggaaaatgcaaatgaaccaaatctg

SEQ ID NO: 693002 - DNA, 587 bp, Homo sapiens
cttgacccccccgggctcagacaatcctcctacctcagcctccagtgtagctggaaccacaggtacacaccaccatgcctgactttttttttttcatgtttcatagagaccaggtctcactgtgctgcctaggctggtctcagactcctgggctcaaccaatccacacacctcagccttccaaagtggcaggattacagatgtgagccaccatacctggcgccaaattttgataattgttaaatgtaagtaataggcctttgaggaatcattttattattctctttccttttgtgaattcttggaatctttcataataaacacatttaaagaattggtttcccaaacttctagacttttattcacttaggattagccttagcacccatagcagtgtgtccggaattggtgggttcttggtctcactgacttcaagaacgaagccgcggaccctcgcggtgagtrttacagcccttaaggtggcgcgtctggagtttgtcccttctgatgttcagatgtgttcggagtttcctttttctggtgggttcgtggcctcgctggctcaggagtgaagctgcagaccttcgc

SEQ ID NO: 693003 - DNA, 615 bp, Homo sapiens
tggaaagaaggcagttgggaaggtgttggtcaaaggatataaaatgtcaattagatagaaagagtaagttcaagatatttattgtataacatgatgacaatagttaacaacaatgtaatattttcttgaaaattgctaagagagtagattttaagtgcttttatcatgaaaaataaatatgtgaggtaatgcgtacgttaattagcttgatctagccattacacaatgtataaatatttaaaaccatcatgttgtacaagaggtatatacaatttttctttctcagttaaacattatttttaaaatggtgtgttttatgttatacaaattatagctgagttaaaaaaagaactttaaaaatcatttattttgagttatacactaattccagtaatcttttctgccactctgtatatgaatattttaaactaattgagagctaaagcacctttttatttcgaagaatggtccttcctcaaaacacactatttaaaaccaattccccatggagtgtcattcttcacttgcagagaatatctttcttagtctaaactatrtgaatacagactcaggttctcttaacctgtccaaaacatttgtaagctactaactaaa

SEQ ID NO: 693004 - DNA, 1689 bp, Homo sapiens
agaagcaataaactagagagagtgtttcttgaaaagacaatgttttatttgccaccaggcagaacagaatgagcattggtagagaaggctccctcttggtatgttactgataaacttgtacttcctcatacttgtttgtggttctactgacttatttccaaacttaagagtaatgtacttcgaaaacaacttgsttattctttaaatttcaggtaaaaccccttttcctaacactcatcttatttccactgtcttatttcctctcagatgttcatatttcacatgttcaaaatgaagcgtactatttcccctccaataaacgaagtctcctgccaacttcactgtctctgttaataacgttaccctaagagttcaggcttcaaacaccgagtcctccctcatatccatatcattaaaacagataatattgtcttcttacttctgaatcctactgaaggtccaacattttttataaaataatgtcatgaagatactaccactggcctctgaaactgtaactttgcctttattctaattcatcacaattgtcactgccacactgttccatccattgcacatgttccatgcattgtacatgttacctgcagtatctaatttgttcataaaataaggtaaaatgatcattttctagatgaggctgagggatagagacatttagaaacttatcctggataagacataagggggcaggttcaggattcaaatcctgtgctattcaagttcatagtctttccagcatatgtgcttcaactattcttgtcatttcagttttctgctctggaatgtctagtgactccctgtttcaaaccatgtcaggtctttgtaatctggatcttttgcaatttacataatcctcagttatttaaatgtagccttactgttaaatggactacacttgttttcctctattacctttgtattgttttcctcttctggaaaattctccactgtttattgtccctctgtaaacccagacaatccttcaaacttcatttctcttcctatgagaagtaatccattactgaaagcctttcatggtatcctgcattgtaccaacatatggaggaactacatcagtgattaataatatagtggaacaggcatgaactctgcagtcttggactcaaattttcactctggcaatttactagcagtgtgatcttttggaacttcactatccttgtctgtaaaatgggaataatgcccagcttagagccttgttttgagaattaagtaaagcaaataaagtacctagaaactgttactaaataaatagaaatttcattagacattagggttgtccatgtgccagctattaagcttagaggctggggatggatatggaattaataagatcacagcctatagactaatggaaacataaaaatatttttcaacaagataggtgctatcagagagtacaaggagatgaaagataattagacttgtaggtggaggggtttttgggaaatagatgatgaatgttaattaaaacagtggtcttctcatgtcttttgactgtgagtggcctctctaaagcatttcactcctggtacacctgtctttgggtactcctgaaagtagcgcaagagataagacttgactgtatttagtttattcaggaaatgttccaaggaattgaaatgagggagaaacaaaggtgtggga

SEQ ID NO: 693005 - DNA, 563 bp, Homo sapiens
ggtgcaacattttgcacaatctcttggaagttcatgctcagtaataataccaccagctgtgggtatttgttgtcataatatagtgatcatttctccaaagagattraggaatatcacacttggataacagtcatttgattcttccatttcttcttttctaaattcgtattggattacttcaatatacataaataggatctaccaaatactctattagcataacttttgaaatcatcaactttcacttcagtttcactctgcttctaaaatgatcctaggttgggccatgctcctttatctagggctcttatacttattatctcaaatttcaacaccttgttttcgaaatataacctatttgcctttctggctatcatttgtcccttaatctagggcatatttcctttgacaacagtgtgatcttctgtgtcatttcaaccattttcattagagcatctgcatcctttgattttcacaacatgaaaaaatcagagctctgagtattggttaataaaaactgtctccttttccactacaacagcagaatgcccactttcataagg

SEQ ID NO: 693006 - DNA, 920 bp, Homo sapiens
tctgctgtaattgatgggaacgaattcttctgggatgtgttaatacagctgcaggcagtaaggcaagcagcgaatggaaactaaatgggttcaggagctctagagacaatgatgttgctggaggcggagaggtaggcagccactaataactacagctaaacagtgggacgaaatcatgcactaggtttgtttcaccaatcagtatatatcatatgcatttggcagttcggagtaattctttctttcccaaaccaattagcccttcactgtggtgctaactagtgcatatgtagctgctagttagaataatcactagcattaggagatatacgtaatgtaaatgacgagttaatgggtgcagcacaccaacatggcacatgtatacatatgtaacaaacctgcacgttgtggacatgtaccctagtacttaaagtataaaaaaaaatgtaaaaaaaaaaaaaaagaataatcactaggcctttgattttatgtgcccatgttaaagatatagattttctttggtgttttgaagacaaactatgtctttcttaatcttgaatactttttccaaagaccatgattctatttagcttgaaattaagattattcctggccgggcgcggtggctcacgcctgtaatcccagcactttgggaggcagaagcgggtggatcatgaggtcaggagatcgagaccatcctggctaacacagtgaaaccccgtctctactaaaaatacaaaaattatcggggcttggtggtgggcgcctgtagtcccaactactcgggaggctgaggcagaatggcgtgaaccctggaggcggagcttgcagtgagccgagattgcgccactgcgctccaacctgggagacagagtgagactccgtctcaaaaaamaaaaaaaaaaaaaaaagattattct

SEQ ID NO: 693007 - DNA, 920 bp, Homo sapiens
tctgctgtaattgatgggaacgaattcttctgggatgtgttaatacagctgcaggcagtaaggcaagcagcgaatggaaactaaatgggttcaggagctctagagacaatgatgttgctggaggcggagaggtaggcagccactaataactacagctaaacagtgggacgaaatcatgcactaggtttgtttcaccaatcagtatatatcatatgcatttggcagttcggagtaattctttctttcccaaaccaattagcccttcactgtggtgctaactagtgcatatgtagctgctagttagaataatcactagcattaggagatatacgtaatgtaaatgacgagttaatgggtgcagcacaccaacatggcacatgtatacatatgtaacaaacctgcacgttgtggacatgtaccctagtacttaaagtataaaaaaaaatgtaaaaaaaaaaaaaaagaataatcactaggcctttgattttatgtgcccatgttaaagatatagattttctttggtgttttgaagacaaactatgtctttcttaatcttgaatactttttccaaagaccatgattctatttagcttgaaattaagattattcctggccgggcgcggtggctcacgcctgtaatcccagcactttgggaggcagaagcgggtggatcatgaggtcaggagatcgagaccatcctggctaacacagtgaaaccccgtctctactaaaaatacaaaaattatcggggcttggtggtgggcgcctgtagtcccaactactcgggaggctgaggcagaatggcgtgaaccctggaggcggagcttgcagtgagccgagattgcgccactgcgctccaacctgggagacagagtgagactccgtctcaaaaaaaaaaamaaaaaaaaaaagattattct

SEQ ID NO: 693008 - DNA, 920 bp, Homo sapiens
tctgctgtaattgatgggaacgaattcttctgggatgtgttaatacagctgcaggcagtaaggcaagcagcgaatggaaactaaatgggttcaggagctctagagacaatgatgttgctggaggcggagaggtaggcagccactaataactacagctaaacagtgggacgaaatcatgcactaggtttgtttcaccaatcagtatatatcatatgcatttggcagttcggagtaattctttctttcccaaaccaattagcccttcactgtggtgctaactagtgcatatgtagctgctagttagaataatcactagcattaggagatatacgtaatgtaaatgacgagttaatgggtgcagcacaccaacatggcacatgtatacatatgtaacaaacctgcacgttgtggacatgtaccctagtacttaaagtataaaaaaaaatgtaaaaaaaaaaaaaaagaataatcactaggcctttgattttatgtgcccatgttaaagatatagattttctttggtgttttgaagacaaactatgtctttcttaatcttgaatactttttccaaagaccatgattctatttagcttgaaattaagattattcctggccgggcgcggtggctcacgcctgtaatcccagcactttgggaggcagaagcgggtggatcatgaggtcaggagatcgagaccatcctggctaacacagtgaaaccccgtctctactaaaaatacaaaaattatcggggcttggtggtgggcgcctgtagtcccaactactcgggaggctgaggcagaatggcgtgaaccctggaggcggagcttgcagtgagccgagattgcgccactgcgctccaacctgggagacagagtgagactccgtctcaaaaaaaaaaaaaaaamaaaaaagattattct

SEQ ID NO: 693009 - DNA, 573 bp, Homo sapiens
caatagatacttcttgagcctccaacatcactctttggaaatgaggcattcattcatccagctaccaggaatgatgccaactagctcactaaggccagctgttggctcatctgaggctttcctaaagatctgtctttccgaaaggaaatacatytttcaaggttcctaaccatccttcaatggtcaggcaaaatggtgaatgccttggtataaagacacaactgttttgcctcaatttggaacaactcagaaggtttcagctttagagcttactgtggtattaactaaagcctattttgcaactgcattgaaattcagctcctctttcttctaagcccactctccctactctcctaccagcagcattcccctgaaattttctagctacaaatttccatctgtaagtccatttccaggaagccctgccaaatacaggaaccacgaacaaaaccaaattagaagaaacatgtagagaacttagttgatatttatggtgctttgggatctgcaggagcctcgtggatacatggacttggagctcattaaggtgggctgagctggagatgtattttg

SEQ ID NO: 693010 - DNA, 2184 bp, Homo sapiens
atgatgtaagcaagatagttcacaaaaaaggaaatataaatagctctagaagttatgaaaagatgctcaaccacactcataactgtactaatatactatttatttttacctctcagatttaaaaacaacaacaacagactactcactgtctattgacaaagctacagggaasaggcacgctcataccttaattgtcgagggtagatctggtgctcccctatggcagaaaatttgtcaatattcatcaaaattatgactgcctgctctatgttgcctagctattcaattttaagattttatcctatagaaacacttgctctcttgtgaaatgatgggcacaccaggctattcactgaagcattatttgaaatagcacaagattgggcacaacccaaatgtacaacaggagaggactggtgaaataaattgtatcatgtacatttaatagctgtaaaaataaataaagcagatctccatctacttacatggtaagatctccaggatatactttaaagtgaaaaaagtatgagtagactattgtgtactcattgctatctttaggatgtagaactgacatgtacactcatatttgtttgtatatacataaagaattagggaatgactctatgatatacatttttcacattttaacatctgtgaaattgaaatgtcttccattatgtggcattttagaattacaattagccatattattttttttctaagtggtacataaaataatgatgcatcttaaaatggatgacatcttagatttgatggaatacagtaataacagtagttgcctatggtgaggggagactggggaagggatgaggaggagcctcttcacttatatgccttgtaatggtttttatttgagccatgttaatttatgcctactcagaaattgaataaataatagtcaaaaaaataagataataggaactaatatataaatggacaatagattatttcctggggtctatgtcctcctgcaatactggtctaagtaagagattcagttctaagatattaaaatgtgccacaaagtgcccaacacttagcatgtgctagtcaatgagacacaacagctgtgtgctgtgttgacctgggtcctcctgggaagctctttactccttggcatcacacctggtttggccagtaggcagaacatattatttttccagatgaggctagtgcaacgttagtttgggaaccggaaagacattgtgtcatcataaagccttatgagaggtggagacacaccatttaggcatctactgtgacctagtagacaatttcagaactctcagacaaaaatcaatgcttgggcaaacacagaactgaaccaagatcttgctttgacttttttctgccttgagaagactagataagctccaagttagaaacgtttttctttttggtatgtattttagtagtaagggcaattgctcctctttccctcttccctacttccacaaaccttttcagcctcttctgggttaaatgcattttctgggtaagatgttggcaaaaagcaaggtaataaatgccacaggaagggccagatggatagtattttgagttgtgtttcaaatatattgtaatgaaaaatagaacctggagaaatcccagcagatctttccttttgtgaaaggaaaggtttgtagctttatggaatgcctagtttaggttcaggaaaccaggattttagtttcaggttcttcagtaaaccgctgcatgatttctgggtattgttttagtggttcttttgctcagtttccttatctgaaaaatgaatgtgctagtaccttttctgcttttcttaaaggactatagaaagaatacatgtcatagtgtttgggaagacatttaaagataagtttatcaagttgctacaggtagaggtaaggttctatttttgccataattttaaggggacttgtgttgagcagccatttgatagagactggtcatgtttcagctagagaggcctctttcccaactgcactgtgtgacagttaggaaaatctctgaaaaatgacaactgggagcagggaggggctaggcctgtcaccatctgaggaagtaacaacaacggccaaatgttctttgcaaagtactttctcaccttttataccacatcatcctctcaatagtcctttgaggtaggtattagcatta

SEQ ID NO: 693011 - DNA, 2184 bp, Homo sapiens
atgatgtaagcaagatagttcacaaaaaaggaaatataaatagctctagaagttatgaaaagatgctcaaccacactcataactgtactaatatactatttatttttacctctcagatttaaaaacaacaacaacagactactcactgtctattgacaaagctacagggaagaggcacgctcataccttaattgtcgagggtagatctggtgctcccctatggcagaaaatttgtcaatattcatcaaaattatgactgcctgctctatgttgcctagctattcaattttaagattttatcctatagaaacacttgctctcttgtgaaatgatgggcacaccaggctattcactgaagcattatttgaaatagcacaagattgggcacaacccaaatgtacaacaggagaggactggtgaaataaattgtatcatgtacatttaatagctgtaaaaataaataaagcagatctccatctacttacatggtaagatctccaggrtatactttaaagtgaaaaaagtatgagtagactattgtgtactcattgctatctttaggatgtagaactgacatgtacactcatatttgtttgtatatacataaagaattagggaatgactctatgatatacatttttcacattttaacatctgtgaaattgaaatgtcttccattatgtggcattttagaattacaattagccatattattttttttctaagtggtacataaaataatgatgcatcttaaaatggatgacatcttagatttgatggaatacagtaataacagtagttgcctatggtgaggggagactggggaagggatgaggaggagcctcttcacttatatgccttgtaatggtttttatttgagccatgttaatttatgcctactcagaaattgaataaataatagtcaaaaaaataagataataggaactaatatataaatggacaatagattatttcctggggtctatgtcctcctgcaatactggtctaagtaagagattcagttctaagatattaaaatgtgccacaaagtgcccaacacttagcatgtgctagtcaatgagacacaacagctgtgtgctgtgttgacctgggtcctcctgggaagctctttactccttggcatcacacctggtttggccagtaggcagaacatattatttttccagatgaggctagtgcaacgttagtttgggaaccggaaagacattgtgtcatcataaagccttatgagaggtggagacacaccatttaggcatctactgtgacctagtagacaatttcagaactctcagacaaaaatcaatgcttgggcaaacacagaactgaaccaagatcttgctttgacttttttctgccttgagaagactagataagctccaagttagaaacgtttttctttttggtatgtattttagtagtaagggcaattgctcctctttccctcttccctacttccacaaaccttttcagcctcttctgggttaaatgcattttctgggtaagatgttggcaaaaagcaaggtaataaatgccacaggaagggccagatggatagtattttgagttgtgtttcaaatatattgtaatgaaaaatagaacctggagaaatcccagcagatctttccttttgtgaaaggaaaggtttgtagctttatggaatgcctagtttaggttcaggaaaccaggattttagtttcaggttcttcagtaaaccgctgcatgatttctgggtattgttttagtggttcttttgctcagtttccttatctgaaaaatgaatgtgctagtaccttttctgcttttcttaaaggactatagaaagaatacatgtcatagtgtttgggaagacatttaaagataagtttatcaagttgctacaggtagaggtaaggttctatttttgccataattttaaggggacttgtgttgagcagccatttgatagagactggtcatgtttcagctagagaggcctctttcccaactgcactgtgtgacagttaggaaaatctctgaaaaatgacaactgggagcagggaggggctaggcctgtcaccatctgaggaagtaacaacaacggccaaatgttctttgcaaagtactttctcaccttttataccacatcatcctctcaatagtcctttgaggtaggtattagcatta

SEQ ID NO: 693012 - DNA, 689 bp, Homo sapiens
tttatttggatctaagcatgcaagtaaaaaaattcatccctgttatagtatttcaggtttgcagtacgttatgacatttgtagatcattgatggactatgaatattcaagggacctggcaattgtacccaggggattgagatccagatacttgtttgtttgcccatagatataaaattaggagcttcctgatatctaatttacttttttaggaataacacccatgagatacagttctcatctactgccctactcctgtccttagataaataacaccggaagaagaagactctctggcctcttacatcagggacacatgaaaagccacactgaatatgtatgaactccaatatactttcacagaagggtttaaggatgccatccctggttataatttttaggaccaaatatatatatatatatatatatatatatatatatatatatatatatatatatayatacacacacacacacatttaggatagatatatatttaggatatataggataaatatatatatttactgccatggtttgggtcatgaggaggtttgatgacataaaaattatgctcataagtattatgctgagacccattcttgggaggagatgtgggggtgtcctaggctgtgcaaaacatagctatggaaacagaagttattaagagaaaagaacaagcagtcagtg

SEQ ID NO: 693013 - DNA, 689 bp, Homo sapiens
tttatttggatctaagcatgcaagtaaaaaaattcatccctgttatagtatttcaggtttgcagtacgttatgacatttgtagatcattgatggactatgaatattcaagggacctggcaattgtacccaggggattgagatccagatacttgtttgtttgcccatagatataaaattaggagcttcctgatatctaatttacttttttaggaataacacccatgagatacagttctcatctactgccctactcctgtccttagataaataacaccggaagaagaagactctctggcctcttacatcagggacacatgaaaagccacactgaatatgtatgaactccaatatactttcacagaagggtttaaggatgccatccctggttataatttttaggaccaaatatatatatatatatatatatatatatatatatatatatatatatatatatatayacacacacacacacatttaggatagatatatatttaggatatataggataaatatatatatttactgccatggtttgggtcatgaggaggtttgatgacataaaaattatgctcataagtattatgctgagacccattcttgggaggagatgtgggggtgtcctaggctgtgcaaaacatagctatggaaacagaagttattaagagaaaagaacaagcagtcagtg

SEQ ID NO: 693014 - DNA, 637 bp, Homo sapiens
catgaaggactgcttatagcagtccttgaaaactttctacagaatgtgaactgggagaagctaaatgctgtactcacaagctgggtgacttctccattgatttttaccatagctcactgaaacattttctaaattaacaggtataaattcacagacagatcagaatagatccttggtcctttccatttttctggcacttttgttgccaggaattcaaatacaactaagagaaaaagtgggtagctagcaagaacagatagtttctcaaatattagtggcagtaacccaactttgagaaaatatggagaaagagaagaaaaaacccttaagactgcagtgttagctgcccagttacaattattcacaaagtgagcaaatacttatttgggccaccaataaataagagggcacaagctaaygggaaattaatacgtcactcatgtaaaaagtcaacacattagaaaaaggaatcttggatgagattgagaaagatgcaagggataaaacctgacaagctttacaacctccttgaggaggtcttccctactctgtaaaatcagacagaaaatcattggcaaatggagcaaagcatgggcaaaactgatataatgaggaaacagagctgggaaaggataaa

SEQ ID NO: 693015 - DNA, 589 bp, Homo sapiens
gccaataggatattattcagtgttataaagaagtggcctatcaagccatgaaaagccatgcaagacactttaatgcrtattagtgagtggaaaaggtcaatctgaaaatcatgcatacaaccatatgacattctggaaaaggcaaaactatggaaacactaaaaagtttcagaagatgggggaggcaggattgaataggaggagggcagaagatttttagggcagtggaactactctgtataatatcataatggtggatacatgtcattatacatttgttcaaacccacagaatggacaacactgagagtgagtccaaatataaactatggactttaggtaataataaggtatcaacatagtttcaccaattatagtgaatgtatcactctggtgggggatgttgataataggggaggctatacgtacacagaagcaggggatatgtggaaaaacttgtaccttctactcagctttgtattgcatgcagtgctctaaaaataaagtatgtatatataaagtaaaaaatagaaaatacatacaaaaatgaatatatatgtgtatgtgtatgtatgcatatacatatatat

SEQ ID NO: 693016 - DNA, 589 bp, Homo sapiens
gccaataggatattattcagtgttataaagaagtggcctatcaagccatgaaaagccatgcaagacactttaatgcatattagtgagtggaaaaggtcaatctgaaaatcatgcatacaaccatatgacattctggaaaaggcaaaactatggaaacactaaaaagtttcagaagatgggggaggcaggattgaataggaggagggcagaagatttttagggcagtggaactactctgtataatatcataatggtggayacatgtcattatacatttgttcaaacccacagaatggacaacactgagagtgagtccaaatataaactatggactttaggtaataataaggtatcaacatagtttcaccaattatagtgaatgtatcactctggtgggggatgttgataataggggaggctatacgtacacagaagcaggggatatgtggaaaaacttgtaccttctactcagctttgtattgcatgcagtgctctaaaaataaagtatgtatatataaagtaaaaaatagaaaatacatacaaaaatgaatatatatgtgtatgtgtatgtatgcatatacatatatat

SEQ ID NO: 693017 - DNA, 589 bp, Homo sapiens
gccaataggatattattcagtgttataaagaagtggcctatcaagccatgaaaagccatgcaagacactttaatgcatattagtgagtggaaaaggtcaatctgaaaatcatgcatacaaccatatgacattctggaaaaggcaaaactatggaaacactaaaaagtttcagaagatgggggaggcaggattgaataggaggagggcagaagatttttagggcagtggaactactctgtataatatcataatggtggatacatgtcattatacatttgttcaaacccacagaatggacaacactgagagtgagtccaaatataaactatggactttaggtaataataaggtatcaacatagtttcaccaattayagtgaatgtatcactctggtgggggatgttgataataggggaggctatacgtacacagaagcaggggatatgtggaaaaacttgtaccttctactcagctttgtattgcatgcagtgctctaaaaataaagtatgtatatataaagtaaaaaatagaaaatacatacaaaaatgaatatatatgtgtatgtgtatgtatgcatatacatatatat

SEQ ID NO: 693018 - DNA, 589 bp, Homo sapiens
gccaataggatattattcagtgttataaagaagtggcctatcaagccatgaaaagccatgcaagacactttaatgcatattagtgagtggaaaaggtcaatctgaaaatcatgcatacaaccatatgacattctggaaaaggcaaaactatggaaacactaaaaagtttcagaagatgggggaggcaggattgaataggaggagggcagaagatttttagggcagtggaactactctgtataatatcataatggtggatacatgtcattatacatttgttcaaacccacagaatggacaacactgagagtgagtccaaatataaactatggactttaggtaataataaggtatcaacatagtttcaccaattatagtgaatgtatcactctggtgggggatgttgataataggggaggctatacrtacacagaagcaggggatatgtggaaaaacttgtaccttctactcagctttgtattgcatgcagtgctctaaaaataaagtatgtatatataaagtaaaaaatagaaaatacatacaaaaatgaatatatatgtgtatgtgtatgtatgcatatacatatatat

SEQ ID NO: 693019 - DNA, 633 bp, Homo sapiens
caacctgattttccttacaagaaaattaaaatacaaataaactatctcctaggtcctgtagaaaataatactctaaaagatttagaaattgaaaaatttgcagctagaaatcttgtaaaaagtgtatactgtgatactccagaaaaccaaatagtaaragccaatcatcaaaatagatcaatatctattcatgccatactacattaattttcaatataaaattataaactttataatcttatatgtaagctaatgtggcatttttggggctgcttttgatcaacaccagattagttatctataaattatctgtaggactcaggcagtgcaaaaaatatgtcttagcctgtaaaattactctcactgagaaaatattcactccttgagagaaacatgtgggtacagagacctctgtgtttgtatttgttttcttgttctgtgttttagtgaataattatggtttatgattttttaaaatttaatttgtaaagtaatacagtactaggaaagttgaaattattttctatatactggttcaccaacaaagcttaaatagataccttacaggtaaagacagatcctatttcccatgactattttttagcatttccctttaaattatttaaaagtata

SEQ ID NO: 693020 - DNA, 641 bp, Homo sapiens
tggaatttcaaaaggctctgactgcaaattctgccgtacatctttacttgtttgtatggttcttgggcatacaggagacgggacaaaattgtactgggaaggaggcagctgtgttattgcaggaaaaggagctacatgccagcaatacaatggtgaacataaatagacctgacactgatagcttaggataagtctattcttgcatagccctgcagacacatataaaacacacaaaaatggatgcacacacttggttctcaccgtccaagttcccatacaaacaactccaaggccaaatctcccagaaaatatcagattaagtcactaatctagactgtagctacgaaatcataggtaaaagccaaaggaagagtctgaagaaatgatcattatctaaggacacttcctccttccaagtcacgttaacatgtgacggctctgtgctaaaaggctgtgaggctgggcygggcgcagtggctcacgcctgtaatcccagctctttgggaggccgaggcgggcggatcacgaggtcaggagatcgagaccatcctggctaacacggtgaaaccccgtgtctactaaaaatacaaaaaattagctgggcgaggtggcgggcgcctgtagtcccagctactcgggag

SEQ ID NO: 693021 - DNA, 671 bp, Homo sapiens
taaactctgatggcaagcttcagatttgtcactccctaatgtagcagtggctacagccagctgacatcaagctctggggagcgatgcagtaaatcattttcccttttgtgcaagaagaaaaagtagaaaattacattcttctcaaatttcgcttttgagtgtgctggtgcctctgtcaagtgctccttcttgcaaacaagaaaacggtatgacccccagggagcaggcttttcaataggagctatctgtgtaatccccacacaaagagggagaatggtgagcagcaatcagaacctgttgtcccatcagatcacaagctagaggttaagttctctattctgcaagttggggactgagattcaggaaggttgggaattcactcaagtcatcccattcacctggaaagaggaagagstgggcctgaaatctgagctggagttcagagtcgtgcactggcccagtggtccatttggtcctgggtgcaagtaaggactgagggccatcaacctatgtagggctaaaacccacctaagtaatgaaagtgcaaaacaatggtgctgctgaaaatgatgatgattataatcttttcattaactccttgggaaatcagagaaggaaattatacacgcagaaaagcctcagctgcactcacactttatgccctgtggtca

SEQ ID NO: 693022 - DNA, 671 bp, Homo sapiens
taaactctgatggcaagcttcagatttgtcactccctaatgtagcagtggctacagccagctgacatcaagctctggggagcgatgcagtaaatcattttcccttttgtgcaagaagaaaaagtagaaaattacattcttctcaaatttcgcttttgagtgtgctggtgcctctgtcaagtgctccttcttgcaaacaagaaaacggtatgacccccagggagcaggcttttcaataggagctatctgtgtaatccccacacaaagagggagaatggtgagcagcaatcagaacctgttgtcccatcagatcacaagctagaggttaagttctctattctgcaagttggggactgagattcaggaaggttgggaattcactcaagtcatcccattcacctggaaagaggaagaggtgggcctgaaatctgagctggagttcagagtcstgcactggcccagtggtccatttggtcctgggtgcaagtaaggactgagggccatcaacctatgtagggctaaaacccacctaagtaatgaaagtgcaaaacaatggtgctgctgaaaatgatgatgattataatcttttcattaactccttgggaaatcagagaaggaaattatacacgcagaaaagcctcagctgcactcacactttatgccctgtggtca

SEQ ID NO: 693023 - DNA, 622 bp, Homo sapiens
tcttctttttattttctattatttcaatttcagtagtaattttgggcatttaaggagttaaatggttgcactcatttcacagtctcaaaataaaagttcatatatctttctaacagtggcctctttgcttccctttactactgaaccttttctcttgcttgtcctgagttgcaaggaggtggtaratatttcctggtttccaaattgttgcgctaatttaatttaatttatttttccccatgtagcaatcctctataatccatggcaggtttggagaatttctaaaatattgtttattatcaacctttctttctggtaaatcagagttattagcttaaaacttttagtacaactatttaatataaattttagataatagatgtcacataaaagcttgaccaagaagaataggtaggattcttccgattacattgtatcagagcaaaatgggcctttaaagaccattcattctaactccatcattatacatatgtgggataaactgagttaaatgaattgcttcagttcccacagctagttagggatagaaccaagagtatgtcttagttcaattgtgttttgcactataacattatgcttctcaccataaaatgatgatgac

SEQ ID NO: 693024 - DNA, 1947 bp, Homo sapiens
attgaggttgaatatatttttacatttgttatccatttgtaatatccaaatgtaatattacatttgttatccatttgtatattccatttgtaatccaattgtaataccaatatccttggtaattatttgtccacatcctttcttcaattttgtattttctttgatgttttaattactgattcatattagctcctcatatatcaggaatgttgatatttttttctaaaccctagtctgttgcttagctcaaacattattgatttttttgttacagagaagtgtaaaattaaagtgtacagaaatattttcatctttcccaagttcataaaaatgtgctcctaaatattttaatatattcagtatttgttgttcacatttagtagcattttattccattgtgcataaaagcctaactttattttctaaaaggatacatttgtccagtgcaacttattgaatacttcataatttcctcattggtcataaattgttctttcatcctacactaaattcctgtatacatatgaatctattcctggaacccttgatttaatttcacttattctttttctatttttacctcagtaccaaactttaaatttgtcaggtttgttaaaataactaattcatgcgcaagggtcataattaagtacaaagatgtctacagtgaaaagtaaatctctttaccatttgtgcccaagtgtcaacaagttcccctgtgaggaggcaacacctatcaccagtgttttggtgcatacacatcatgacacacaaatattctagtactacaatgcttcatttctttagttttatagtatttgttgttcattattagatgaaatatcttctcatagcatttttcaaaatataattacaagcattttcttataaaccttaagcttgacaagtttttaatttattttaattgacaaatgaaaaatgtacatatttatggcatacaacatgatgttttgaaatatgtatacattgtggaatgtctaaatagacatatttattaacatatgtattacctcacatccttttggtgagattgcttgaaatctactcttctagcgagtttcaaatatacaatagattgtcatggactattgtcaccatgttgtataatagatctcttaagttcattcctaccgttgaactgaaatgttgtatcctttgagcaacatttcctcaatctttaagaatattgtgttgggaattttattagaagtacattacattatagaaaatcttgaaaccactagtatctataaaatatttcgctctctccagtcagaaacgtgctatatttccatttactcgggtcttcttttcaatagatgttttgtttaaagaaaactttctaaattgaagtatagcatatatggaaaaaatgcaaaatcctaattgtacagcgcaatgaatttttgttaaatgtaaccactatcagggtcagaaaataaaaaaaaaattaacacmccagaaccatctctttatgtctttcttggccattgtccatactccccccacaaagataactaatatcctgatttcttatagtagtttcacttgtttttaaactttatataagtcgaataatattctttatactccagtatgtactttcttgtgtatggcttgttttattcaacatgattttgagattcatccacgttgttgcaaaagctatagttcattaatttttagtgctatgtagtagtctcttctataaatataccacaattatatatccctcctactgttgatggacatttaagttttatctcgtttgatactattataagtaatgttgcaataaaacatttgtatacatttcttttgctgaacacatgtccacattttgttgtctgtataactaagatgagaattttggggtcatagggtatgcatattttcaacttattagatactgccaagaagtttcca

SEQ ID NO: 693025 - DNA, 964 bp, Homo sapiens
acccatttamacaggacttaggcatgcttgggaatcttttttgtttccttaggctgaggcagaattgaaaccaagaggaaaggaggttgcagttgtggccacaagtagacataaaagctaatggtctgatcctgagggaagagattataactaaagtcacccaaataaagactgcagaatggccctgggccattcctaacagtcagggtagccttagagggtgtcaattgtgatagcccagcagcaaaggacttgatgacagagtaatagtgctgttgatgacattgtcaccaagcacctactacatgcttcaccttgggatagatacttcgacagtatcttatttaatcccgacagctcgataaggtggttattgtgcccgatccataaatgtgagaaatggtgctctgagagaagttgaagagacataataaacaggagaaatttctcctttcgtgtaagaaaattagaaagaaaagaaaaataaaataggggaaaataagtatattttagaaaggttaatggtcgaggcaaagtcatagatggatcattcaagattttttctcaatattgctgaatggctgaagtactaaatgtttattcggaatacaaatagtctggagtgaagaggactttaagagggtagtaataagtagagtttgtttactccccgagatctagagttttgatgtgatcaagaacatttcctacctgaagcataacctgtcacctgtggcttctgcttctgttagaaatagcatttgcaggatattctaaaaaggaaaaagatttttgtttggttatcaggttgaagagaaatcttaaatgaccataggcagggtgaccatatgtctactatagtcctggtttacacctattatcttggcatattaaagtttgctttttccaaagtgtccaagttttggccataagttatttgatcactgaagccacagaaggtgta

SEQ ID NO: 693026 - DNA, 604 bp, Homo sapiens
ctcttttttttgctcatgatgttatctctacttgaaaattccttgatatttgtcttcastgagctaaatcctacagacattcaatgcttaccccagacattactccctcttcaaaggtttccctcttgatattcctaacacatcacctcacatgtgagtagaaagttgaatttattaggttggtgccaacgtttgcaccaacctaatacttaatctcctcattactaccactaacagagtctcaaaaaaggaagacatacctataacaaaagtctagaagcaaaagttttggagttaaatgacctgcttttgcctgggcacagtggctcacacctgtaatcccagcactttgggaggctgaggcgggcagatcatgaggtcaggagattgagaccatcctggctaacatagtgaaaccccatctcttctaaaaatacaaaaaattagccgggcatggtggcaggcgcctgtagtcccagctactcgggaggctgaggcaggagaatggcatgtaccctggaggcagagcttgcagtgagccgagatcgtgccactgcactccagcctgggcaacacagcaagactccgtctcaaaaaaaaaaaa

SEQ ID NO: 693027 - DNA, 625 bp, Homo sapiens
gtatcatcgaaaaaaactatcccatttaaaatactttgtaaggattattttttctttgttcaaaaacaaaaaacaagtcatactttaaaataaaggtggattccctgttcatggaaggaaaacctcttttccctatctcacttcagttcactcctgattcagagactttgaatcattgagtagtttatctcttccttcaagaaatcatttgtttacacccaagcatcttgtagtaataggaaacttttattatcatagctgagtttgttggtttgcctaggcttgttttgttttgagcatccaaatttsacaagacccagattttgaagaccaaaagatttttcaaaaatgtatgaggtatagaacatccaactttgagagcactttaaaaaaactctaaatattagtctcacctaccttgccatagagccagtcatggtgatttttacatatatattcaaaatctcttaaaagtcagcttaagtatatgggctgggcgcggtggctcatgcctgtaatcccagcactttgggcggccgaggcaggcggatcactaggtcaggagttcaagaccaaccagttcgagactagcctggccaacatggtgaaaccccgtctccactaa

SEQ ID NO: 693028 - DNA, 608 bp, Homo sapiens
gattacgaagtcaggagatcgagaccatcctggctaacatggtgaaaccccgtctctactaacaatacaaaaaattagcctggcatggtggtgggcgcctgtagtcccagctacttgggaggctgaggcaggagaatggcgtgaacccgggaggcggagcttgcagtgaccagagatcgtgccactgcactccagcctgggcaacagagcaagattccacctcaaaaaaaaaaaaaaaaaattaaaagctaactctaaacttacatttttttttgtaatacaccatgcttttgggggaaattctcccttctgtaatctaaacaacctcccttcctttaaaacactcacattagaggatccaccatccatagctcctgaaaagggaagaggatgatgtgaagacgattatcaagctagggtggcgatacgtcctaatatgcctaggacagtccctgtgtaggctgattgtaattatcctgatgtaattgtgatgtaattatcaacaattccgccctctctttttactctcaaaaagttttggtttgaatctgaggtggttaacactgactctttacagtgaagrttaaccagaatcaccaagaaattac

SEQ ID NO: 693029 - DNA, 653 bp, Homo sapiens
tgtctcaaaaataaataaatacataaaaatactaaaaaaagaaaaaatctcagtagcaacacaacattatcctatttaaattttaatatgtacttgaactaatgctttagccgaatttacttctatagctcaaaaaaataaaaatagtgccagcttatcattatctaataggctacaaaataaaaagaattgacatgctcctggaaaaaaaataagcaaacacaattgaaaattttttgtgtctctccttgttctatctcaaagacatagyggagctaggatagatccaaaaaaggatactgaacttcagtaaacagaaatcgagtagtattatatgcaaaacacagtgctaggcattaaggaaacagataagtaaggcagaatccctgacctcaagtagttcatcactaaaaacaggcggcttccactggaagaataaatactctgctgatatgtctcactatatggtaagaataagaaaatcaggccaggtacaatgaatcctgcctgtaaccccagcactttgggaggccaaggcaggaggatcacttgaggccaggatttcaagaccagccctggcaacatagccagacagctatctctacaagaattaaaatttaaatttaaaaattagtgaggtgtggcagcatgca

SEQ ID NO: 693030 - DNA, 660 bp, Homo sapiens
atgtggaccctcttatgccaagagtggggttctgctggtcttgcctgggggcactgagctccctgtctctgcccattgtctagcatctgctcactgtccagcttatatgagttctttgcagggttgtttccttctgagggctgtgaggagaatctgttctgggcctctgtacttgacttgcagatggtcatcttctctctctctctgtcccccccttctctctccctctctctctccctctttctttctctctctctctcttttttgagacagggtctctatctgtcacccaggctggagtgtactggcatgaacatggctcactgcagccttgacctcatgggcttaagtgatcctcctgcctcagcctcctgagtagctggggccacaggcacgcgccaccatacccagctgattttttaatatattgtagagatgggggtctccctatgtagcccaggctggtcttgaactcctaggctcaagcaatcctcctgctttggcctcccaaagtgttgggattacaagtgtgagccactgcaactggcccctgtgtcttttcaaattatcttccctctatgtgtgtctgtttctgtgtccaattttccccttttttgtaaggacagcagtagtattggattagaaccsacactaatgaca

SEQ ID NO: 693031 - DNA, 624 bp, Homo sapiens
gggtatgtgtgcgaaaagaatagcatgcatcttccaagtcattttatcatgtttttaatcttctggaaacttggtatgacataaattcatagagtggcagaggctgctatgtgttcacaaagtctctttctttctccttctcctacaatagctagaccacatttcccagtctctcttgcaacagggtgggtcaggtgactgagtactggccaatgaaacatgggcagaagtaattcatgccacttctagatctgacctgaaaaatctccaactgagctcttcatgcctgctttattctcttgtcccctaactaatacaaatgagcaccagaaagctttgggagataataggtttagaaaaagctggaatgccatgacaccactgtaaagagaatacccccacctagaaatcctgtgtttatggtatgagagagaaatacattttcattttattaagtcactgaatgttttaggttgttaattacagcagataactaacctataactgaacaatatatacagctaacactatgcttatttatttrgtgtactgaaacagggaaactttgagatgtacctagggtaactgaagtctgctttccatctgagtctgagaaaccacatg

SEQ ID NO: 693032 - DNA, 1061 bp, Homo sapiens
ctttctctgtgcaacctctctgccccttaataaatgtttttggtactgactactgctgctcctgctaataccatcctgtagaaatttttcttgagtgaggaatagtttttagaaggcttttatgatgataacttttaaatttatttttaactatgccagcaggttattagatatataggttcaaaggagattgaggctggagtctgttcaaacattttcagaggtgaagatgacacagggttcatggagatttccttcatggtaccagaacagggcagggtttcactgcatgataatacccatgtttccattgcttgtagacctaatcatttttacttattgattggcactgtgggccaagatcgtgacatccatcctaataagcaggtctcatcaaaagccttagaatggagaaaattttaataatgctttattagttggttaagtaagccctgatgtttggctttctagtgaccggtcattgccctgcagactctgtaatgggacagtttggctgggtgtagggggtcatgccaggctgaggtgggaggattactgtaggccaggagttttgagactagcctaggcaacatagaccgccccccatccctataaatatttaacaattagctgagcataatggtgtgtgtgcttgtagtcttagctgctgaggaggctgaggtgagaggatcacttcagctcaagagcttgaggttacagtgagctatatgattgcaccagtgaactccagcctgggcaacacagtgagaccctgtctcaaaacaaaaacaaaaacaaaaacaggtagggagagacaaggagaagggtagtactgacatggcctgtctttactttcccctctcagccctggaactctccacagggaaaggttttttgttccttcttcttgtytaataaatggcttgacttgaggggtatcttggaggcattctcaacccaaccctgaaggtttatcagcactttcctggtggacagcacctcagcctctgccctggctcctttcatcctcatcccctagagccaggatcccagcatttaca

SEQ ID NO: 693033 - DNA, 2732 bp, Homo sapiens
ttcaaggatggcccacactccctatagagctgggtgcatcggacaacaaaacttcagcagccgtgatgtaaggctgccttagaacgcagcccagggaagcagcaggggcagacacacacttgtaaagaaaagagggggccgggagcagcagcacgtgcctgtggtcccagctgctcaggaggccaaagtgggagggaagattgcgtgagcccaggaggtcgaagctgcagtgaggccagattgtaccactgcactccagcctgggtgacagagcaagacactgactcacaaaaaaaaagaaaggagcagacagaccaagtctgcagtggggaggctgtcacttaacggtagttggcattgagtttttcatggtatctatcatgtgccactttgcacaacttcacgtagaggcagtgctgcaggaataagctggagaaagcacagctttccctcggagcgctggtgggcgagcatgtgagggggtggtgcacgtgcccagcaccgcggcagcggggagaagcggcaggagcacaggggactaggagtggggaagcgggagggcccctgtctctctctgttttccaagctttcttacttctttttttttttttttgagacaaagtcccactctgtcgcccaggctggagcgcagtggcacgatcttgcaatctctgccttctgggttcaagccattctcctgcctcagcctccggagcagctggaattacaggcacacaccaccacacccagctaatttttgtatttttagtagagacggggtctttcatgatgttggccagcctggtctcaaactcctgacctcaagtgatccacctgcctctgcctcccaaagtgctgggactgcaggtgtgagccaccgtccccggcctcttccttctttatactacatgtttgtcattaggtgtccattttaaagaaaaacccaaagacctttttaaaaattggtaacaaattgtcctggtcaaagacagtgtcctggaacaaaactggaacaaaccaggcaccgccatccagggtccgcatcggcagacaccccccgccgaggtttgtggcgaggaaagtaccagcagcaccgcagrgaagagcagtcacagccaagagcgcctggggggtggcactacccagggacactgagacgcagagcaccaaggtgacgctactgtgctgaggagcccaggctgcagggccggaggacgtttccaccactgggccctgtgcccacctccgcagtcctgaggaaaggcaaacggctcacctcgactcccttctcccaggacctgagggtggacattcaaaaccacagacaaacctgccgacggccggagctcccaaagtgctgcatcgggcagcccccaccctccagccaacaccatccaccccagccaggggttcgacattcctcccgagagaaggtggcctgggagacggggcccctgagagaagggtacccaggagcactggagacagcctgtgcacggcacccacacaacgctcggcccctctgctcccctcagcaacccaccggccagaagacgcagagtccacgggatctggccttgcaagtgtcatggagctgatacaaacaagaaacgtggactccaaaccccacaggattctctccacagacacagcagcaggctcctggcacactccacacccacccccagtgttagctcaccccacaaggaccctccagaaccccaagggcagtgcagccaatggtggatgtagcatgtgccccgggagcagcgtggcttcttgctgtcctgtgagctcccagccagggtaacaaggcaagagaaacacgtcaaaggcctaagaatggagaagcaagagacagaaccaccgccgtccccatacatggcatggtcatgatgcagaaaatgccaaaggatcaacagctactgggactgagggcttcagcaaggccttggggtgcggccgaggtttgcagcgaggaaagtaccagcagcaccgcagggaagagcagtcatggccaagagctccccggggggtggcacgacccagggacgctgaatgcagagcgccaaggtcacgctactgcactgaggaacccaggctgcggggccagagggcactcctggcctcctgagccacacctggcctgtgtcctcagcatctgcccaaactaccccatcccacctggaaaggaagaagccccagagaactgcttcagtcctaagtcaacacaggacaggctcccgaggcccggatgcagggccccaccgccggggatggtgcaggacaggctcccgaggcccggatgcagggccccaccgccggggatggtgcaggacaggctcccgaggcccggacgcagggccccaccgccggggatggtgcccgagggagtggctgtgctgctcacctagaggcgtcctgctctgggaggtacagccactcgcagctcttggtgggttcagctagtctgggggccccacctagggaacctcgcaagacagcctccacgacctgcctacacctcagacaagcacacatcagaaaaccacagtgcccagggcccctgaacatgacaggccggccacgcgcccacagaggaagggatagccctgtagccggggggcactcgctgccacctcccatgaggagtagtgtctgaggagtgaatgaggagagcctgctgcacaggctcggcctgggccttgccaggcggggtctggaaaacacac

SEQ ID NO: 693034 - DNA, 781 bp, Homo sapiens
gctttttttggcaagggcggagagcaccagtagcgtggggggtttaaatgcactttccctgaatgcaacagagaaatgccgggctggagggcaaactccaccgggacagggaggcgggagatagcctgagcgcccccccatcccccacactctgagcgtcgcaaccccgggggcacctccagggactacttgccttgtgcgtcagcgagtgacagcgtcacacacacgccccctcccgcacatgcccgctgcaccctccctttccccctccccttcccttctctcttttcccctagctcttcccaccaggcagagaggctcagccgacccacacgctcccagagcactgaaagctaaaaatatagccggtgtgttagcaacagccttcccattggtcgggggaaagggagaagcggtgtctgattgggtttaggatccagccgctaagactgggcccttgggagtgtgcgtttgcgccagcgggcacggcaagggatgctggtatttgtagtcattgattaaggcagccatgtaaataggtgggtttacatcccagttcggctacckactgtgtgatcttgatttaatgcagcaaaacgcttgacatcaccaaacctcagtttccccatctataaaatggagctcgtgtcggggattaaatatgatgctgtatgtaaagcctggctcaaatcgttgctattcttaatttaaagattagtgtttgggccaaattgcctctgcacatcctgcatatcctgggctgagtatggtgtccactctc

SEQ ID NO: 693035 - DNA, 635 bp, Homo sapiens
gaagggaggccaccctgccaaatgctgcaggtgctgggggcacaggtccaaggcaggtccaagcctgccagccccagacgtgggaggagccacctgtgccatctgggcgtgggggcaggggctatggcaggcacgaggaagtttattcaatgaaagtcaaaaattgttttttacatgactaaaacctgttgcctaaaacctgtttgttcctattttgagttttggctgtattttaaaaatgagtaatattatagcttaatgataaaaatagccatcactcaaattgactgaacatacctgtgtgccaggcactattcttggcctttcatataaagtacttaatcctcctaatatcccagtgaggtaggtgctattactatccccattttacaggcgagaaaactaagacttcccttcattgcatactttcasctttttcctgattattttcctgctcttggttctctcatcctagaaatcccccagagctggagtcggggaagaggtgggtatgggcccggcttttctcctgcctctgccacctctcttaggacgtttctgagctgagttttctcatccgtaaggtgaggggttggctgcaatggctgactggctgcactctgacaccctgtggg

SEQ ID NO: 693036 - DNA, 635 bp, Homo sapiens
gaagggaggccaccctgccaaatgctgcaggtgctgggggcacaggtccaaggcaggtccaagcctgccagccccagacgtgggaggagccacctgtgccatctgggcgtgggggcaggggctatggcaggcacgaggaagtttattcaatgaaagtcaaaaattgttttttacatgactaaaacctgttgcctaaaacctgtttgttcctattttgagttttggctgtattttaaaaatgagtaatattatagcttaatgataaaaatagccatcactcaaattgactgaacatacctgtgtgccaggcactattcttggcctttcatataaagtacttaatcctcctaatatcccagtgaggtaggtgctattactatccccattttacaggcgagaaaactaagacttcccttcattgcatactttcacctttttcctgattattttcctgctcttggttctctcatcctagaaatcccccagagctggagtcggggaagasgtgggtatgggcccggcttttctcctgcctctgccacctctcttaggacgtttctgagctgagttttctcatccgtaaggtgaggggttggctgcaatggctgactggctgcactctgacaccctgtggg

SEQ ID NO: 693037 - DNA, 593 bp, Homo sapiens
tctgtattttgcatacgtttttgcaaacttttgccctcagattgtcattttttgtctgttttatgaggtggttggcctatctttgcattgcatgactatacagtttagctcttggagtgagggcctgtcttctaaattctgggaggatgtcactcaatggctgtcaaagtgctcataaacagagaaaactagggaattccctgataaatgtggccacaagaattcatctttttattagataacccagtcccttcccaactcactctcagcccatttccttattttacgcccatataaaaaaaacctgccaatgccagttattaagctattatctctcagctccaaactcatccctctgtactttgttgtgatactggatttgggacttcccaaccacagtgatgtcagctggttcctggtaccctctgccaacttgggtgctagagggaagstgtgagctgtgaggttggaggaagagaggacttgcaccttcctgcctacttgctgctccagtgagcctcactgtaggaatacttcttcacccttcaccctagcagcagcaattatttcctgtggcagcatttaaatccatt

SEQ ID NO: 693038 - DNA, 645 bp, Homo sapiens
catccagcagttttatttatattgttccagtatacagatataccaacaccacaggataattcatgagttgtataaggaatgtatttaatgctaaacaagcaactacacagaaacctaccttcatgaaaattagaataatctagaattatgtagcacaagagacaaagtccccagcaatttcttttccctagttccatagcttattcttttcaccacatgtattcttccagaacattttctaagcatgatacragcatatagtttttcttttcctgtttgttttttgttttgttttgttttgtttttgtgacagagttttactcttgtcgcccaggctggaatgcagtggtgcaatcttggctcactgcaacctctgcctcccgggttcaggtgattctcctgcctcagcctcctgagtagccgggattacaggcatgagccaccacacgtggctaatttttgtatttttagtagagacagggtttcaccatattggccaggctggtctcgaactcctgacctcagatgatccgcctgtctcagcctcccaaaatgctgggattacaggcttgagccactgtgccaggatggtagtttttctttttacagaaatgggattattttatttatatatatatatatata

SEQ ID NO: 693039 - DNA, 645 bp, Homo sapiens
catccagcagttttatttatattgttccagtatacagatataccaacaccacaggataattcatgagttgtataaggaatgtatttaatgctaaacaagcaactacacagaaacctaccttcatgaaaattagaataatctagaattatgtagcacaagagacaaagtccccagcaatttcttttccctagttccatagcttattcttttcaccacatgtattcttccagaacattttctaagcatgatacaagcatatagtttttcttttcctgtttgttttttgttttgttttgttttgtttttgtgacagagttttactcttgtcgcccaggctggaatgcagtggtgcaatcttggctcactgcaacctctgcctccygggttcaggtgattctcctgcctcagcctcctgagtagccgggattacaggcatgagccaccacacgtggctaatttttgtatttttagtagagacagggtttcaccatattggccaggctggtctcgaactcctgacctcagatgatccgcctgtctcagcctcccaaaatgctgggattacaggcttgagccactgtgccaggatggtagtttttctttttacagaaatgggattattttatttatatatatatatatata

SEQ ID NO: 693040 - DNA, 645 bp, Homo sapiens
catccagcagttttatttatattgttccagtatacagatataccaacaccacaggataattcatgagttgtataaggaatgtatttaatgctaaacaagcaactacacagaaacctaccttcatgaaaattagaataatctagaattatgtagcacaagagacaaagtccccagcaatttcttttccctagttccatagcttattcttttcaccacatgtattcttccagaacattttctaagcatgatacaagcatatagtttttcttttcctgtttgttttttgttttgttttgttttgtttttgtgacagagttttactcttgtcgcccaggctggaatgcagtggtgcaatcttggctcactgcaacctctgcctcccgggttcaggtgattctcctgcctcagcctcctgagtagccgggattacaggcatgmgccaccacacgtggctaatttttgtatttttagtagagacagggtttcaccatattggccaggctggtctcgaactcctgacctcagatgatccgcctgtctcagcctcccaaaatgctgggattacaggcttgagccactgtgccaggatggtagtttttctttttacagaaatgggattattttatttatatatatatatatata

SEQ ID NO: 693041 - DNA, 645 bp, Homo sapiens
catccagcagttttatttatattgttccagtatacagatataccaacaccacaggataattcatgagttgtataaggaatgtatttaatgctaaacaagcaactacacagaaacctaccttcatgaaaattagaataatctagaattatgtagcacaagagacaaagtccccagcaatttcttttccctagttccatagcttattcttttcaccacatgtattcttccagaacattttctaagcatgatacaagcatatagtttttcttttcctgtttgttttttgttttgttttgttttgtttttgtgacagagttttactcttgtcgcccaggctggaatgcagtggtgcaatcttggctcactgcaacctctgcctcccgggttcaggtgattctcctgcctcagcctcctgagtagccgggattacaggcatgagccaccacacgtggctaatttttgtatttttagtagagacagggtttcaccatattggccaggctggtctcgaactcctgacctcagatgatccgcctgtctcagcctcccaaaatgctgggattacaggcttgagccactgtgccaggmtggtagtttttctttttacagaaatgggattattttatttatatatatatatatata

SEQ ID NO: 693042 - DNA, 3888 bp, Homo sapiens
tgccaccaaaactataccacaggggttaagggaaaaaagagttaattcatgcacaaataatcacagattcacatccaatacaaggtaataatgaagacatggattaaggggaataatggtagtttgcrtagtagtttattctattcaattaataccttggtgatcacagaatgtatggcactgtgttaaaaataactgaaagagaaggagaagtattgaactatattcaaacaaatcagagcattttaaatctaaccgtaagtaggttctaaaagtataaacatataatgaatgattcaattaaatcttaaaaagcctagctaaccaatatggcagatctagtaacaaatattccaagataatgctatgtagagtaactacttaattgctgttattttctacttagaattctcaacacagaacctaagatacagtcatgactatttttctcagtctttttcattcataaaatctcagccttcctcagggagattctgatagcccattcatgttctccatcaccacctggagttatgccccagtaccttttgcttaaggctaatataaaagattttgtagtgaagatggtttgtccctgtttgaaattgatattatgaaaacaacatggttatttttccattttccaagtataaaactactttatattgaacatctctttttaaatcagacatgtctctctagagatcccaatggcctctacattcttactgatataaagcatatagtcaaggtgaaaataaataattgtttattgatgttaatcaataaagctatcaataccccataaacctataaaagggttacttcggggaagtttttttccctaaatatacactgaaaaaagcaatttgttttaaaatgcttacaaattttatagccaaatgccttcatgacatctctactagtcctcaaaaggctcagggcccagctggacatcaccaggaccccattaaaggcctccaggctgcctgagcccttgagacagatgtcttcatccaagaaacattattcattcaagaaaaatacttaacaggagagacaaaagcattgttttgaataactgaaaaatcattaggtactaatgataacattactatttaagcagtaacaaacaagaactataaaaattcagacacctagaactcacaatccttgaaacgcttttcttcccaaatcatactcctttttttcaactctactaccagtattttaatattcatttaaaaactaaagctagtcccaacatgccactacttcaatcagtcattatcaagacctattaaagaacaacctacatcaaatttctgacgaacagaagaaagctttttctttcccttgggttttccaggttttgctgcggaaccccctggccaaggcaaagatccagcaccatctaggagacagaaatatataaccataagtaaaaataatgacaactgataactgctaagtttgttttcatttggggtaaaaagcatggaatgctcatgaaatgcaaataactaatgaatgcttaaatcaaaaccttctctttctacttctctaaataaaattatcgatcctctcaaatcacatttttttcctagctgcaactaaaatttttttaggaagacaaatttttttatattttcaattaatgtttattgggtgttttgtttattagcagtagtattattatagatgtaggacagaatttgctggtctaagatgatgaactgagcacatgtatttatctcctctcccaagacgctacaaaatatgaaagtaaggaaggtaaatggcacacttgcacaacagaggttaaaaaggaaaatgagtggcagacacgatgagatgtcaacaaatttctaggatggactaaaagggtgcagactcgtgaagcagacccatagaagctgtaacctaggctaggcaaggaaggtggcaagtgaggcagaagcacgtcaacctgcctggaagaaacccacaacctggattgggagaatgtgagtgagtggaaaccaggagggatctgtaaggctaaaaacaaaattaatggaatgtctatatccttaaatcatccacacaaacccattcactcacccccaaaactgggttcagtacaaaatcaaagtgctgggcctcgtgtttaaaaattaagaatttcaagataatgatggtacaaaccaagtgcagggcccttctgtgcaatgcaggtcacaggcccaggaaggctcattcccatgcacagaatgacacagagcagggtatttataatagctaagtcagggggttagaaggaaggtggggagggaataaggactcttctctagttaaaccgaacacaatttctgggatttactaaggtagctggtatggatgttggtaccctacagcaaagctctctgtatatgggaatttgggagacccccagtttaacagtaggcttcctgtcagcttactctaaagcaaagtctccaggcagttttatgcttcattcttaaacatgaaaaggacaataattaatcaccagatatttgacaatattctttcacatgacaagaaagagcaagctaaaaaaataaaaataaaaaaaaagaggtcctagacaggaaatgcaaaagaattctgataaatttccaacaggtatccgcagaaaactttcagaacatgttcatccatgaaacaagatgctattaaaattgctgaattaaagaatgcattcaacagaaaggcccaaagagttcaggaaatctcaaacacagagcaataagacagagatgttaaaatcagttaatccagaaacagatttaagcaactatgagggctaaagaggtcccaccagaagaacaaaaaacaaaaagtagttgcctttgggaataggtctaggggtgggaacaagcttttatcataaaaccttctgtgctactgatatttttttaaccatgaacatatattgtttaatgttaaaaaaaaaaaaaagtaacacaacctcactacagtacacttaaaaagaaaactcaaggccgggtgcggtggctcaagcctgtaatcccgacactttgggaggccgaggcgggcagatcacgaggtcaggagatcaagaccatcctggctaacatggtgaaaccctgtctctactaaaaatacaaaaaaaaaatattagccgggcgtggtggtgggcacctgtagtcccagctactcgggaggctgaagcaggagaatggcgtgaacctgggaggcggagcttgcagtgagccgagaaagcaccactgcactccagcatgggcgacagagtgagactccgcctccaaaaaaaaaagaaaactcaaaaaaatttttaagaaagaaaaaatcacccataatcatagtaaaatgttcctacaattttgatatttttggaaagaaacgtttttaacgctttgaaaaaaaaaatattccagattcctcagtttaaaaagaactgtttgggaagtcaggttcctcttatctttggcatgcacagatctcacttgataaggtcagccaatcttagatgattttcccaagaaatcccttcctgataaatgaaactggatgccaagtgatgacaggaaagtaggctggacatgcagacgatgatgcaaaggagcaggcctgcaaactcacagcttaccagctgctgctgcgtggccaagcgaagcacgctaaggcctaaccctgacaaaatggaaggctttttagtagcacttagatttcagttttgatccaacacatccaattactagctggataaggcctaaggcaagtttttcttttgttttgttttctcttctcttaattttgtttccttatctataaaaacaggctaacacctaccatgcagaattgttgtgaggattaaagata

SEQ ID NO: 693043 - DNA, 3888 bp, Homo sapiens
tgccaccaaaactataccacaggggttaagggaaaaaagagttaattcatgcacaaataatcacagattcacatccaatacaaggtaataatgaagacatggattaaggggaataatggtagtttgcgtagtagtttattctattcaattaataccttggtgatcacagaatgtatggcactgtgttaaaaataactgaargagaaggagaagtattgaactatattcaaacaaatcagagcattttaaatctaaccgtaagtaggttctaaaagtataaacatataatgaatgattcaattaaatcttaaaaagcctagctaaccaatatggcagatctagtaacaaatattccaagataatgctatgtagagtaactacttaattgctgttattttctacttagaattctcaacacagaacctaagatacagtcatgactatttttctcagtctttttcattcataaaatctcagccttcctcagggagattctgatagcccattcatgttctccatcaccacctggagttatgccccagtaccttttgcttaaggctaatataaaagattttgtagtgaagatggtttgtccctgtttgaaattgatattatgaaaacaacatggttatttttccattttccaagtataaaactactttatattgaacatctctttttaaatcagacatgtctctctagagatcccaatggcctctacattcttactgatataaagcatatagtcaaggtgaaaataaataattgtttattgatgttaatcaataaagctatcaataccccataaacctataaaagggttacttcggggaagtttttttccctaaatatacactgaaaaaagcaatttgttttaaaatgcttacaaattttatagccaaatgccttcatgacatctctactagtcctcaaaaggctcagggcccagctggacatcaccaggaccccattaaaggcctccaggctgcctgagcccttgagacagatgtcttcatccaagaaacattattcattcaagaaaaatacttaacaggagagacaaaagcattgttttgaataactgaaaaatcattaggtactaatgataacattactatttaagcagtaacaaacaagaactataaaaattcagacacctagaactcacaatccttgaaacgcttttcttcccaaatcatactcctttttttcaactctactaccagtattttaatattcatttaaaaactaaagctagtcccaacatgccactacttcaatcagtcattatcaagacctattaaagaacaacctacatcaaatttctgacgaacagaagaaagctttttctttcccttgggttttccaggttttgctgcggaaccccctggccaaggcaaagatccagcaccatctaggagacagaaatatataaccataagtaaaaataatgacaactgataactgctaagtttgttttcatttggggtaaaaagcatggaatgctcatgaaatgcaaataactaatgaatgcttaaatcaaaaccttctctttctacttctctaaataaaattatcgatcctctcaaatcacatttttttcctagctgcaactaaaatttttttaggaagacaaatttttttatattttcaattaatgtttattgggtgttttgtttattagcagtagtattattatagatgtaggacagaatttgctggtctaagatgatgaactgagcacatgtatttatctcctctcccaagacgctacaaaatatgaaagtaaggaaggtaaatggcacacttgcacaacagaggttaaaaaggaaaatgagtggcagacacgatgagatgtcaacaaatttctaggatggactaaaagggtgcagactcgtgaagcagacccatagaagctgtaacctaggctaggcaaggaaggtggcaagtgaggcagaagcacgtcaacctgcctggaagaaacccacaacctggattgggagaatgtgagtgagtggaaaccaggagggatctgtaaggctaaaaacaaaattaatggaatgtctatatccttaaatcatccacacaaacccattcactcacccccaaaactgggttcagtacaaaatcaaagtgctgggcctcgtgtttaaaaattaagaatttcaagataatgatggtacaaaccaagtgcagggcccttctgtgcaatgcaggtcacaggcccaggaaggctcattcccatgcacagaatgacacagagcagggtatttataatagctaagtcagggggttagaaggaaggtggggagggaataaggactcttctctagttaaaccgaacacaatttctgggatttactaaggtagctggtatggatgttggtaccctacagcaaagctctctgtatatgggaatttgggagacccccagtttaacagtaggcttcctgtcagcttactctaaagcaaagtctccaggcagttttatgcttcattcttaaacatgaaaaggacaataattaatcaccagatatttgacaatattctttcacatgacaagaaagagcaagctaaaaaaataaaaataaaaaaaaagaggtcctagacaggaaatgcaaaagaattctgataaatttccaacaggtatccgcagaaaactttcagaacatgttcatccatgaaacaagatgctattaaaattgctgaattaaagaatgcattcaacagaaaggcccaaagagttcaggaaatctcaaacacagagcaataagacagagatgttaaaatcagttaatccagaaacagatttaagcaactatgagggctaaagaggtcccaccagaagaacaaaaaacaaaaagtagttgcctttgggaataggtctaggggtgggaacaagcttttatcataaaaccttctgtgctactgatatttttttaaccatgaacatatattgtttaatgttaaaaaaaaaaaaaagtaacacaacctcactacagtacacttaaaaagaaaactcaaggccgggtgcggtggctcaagcctgtaatcccgacactttgggaggccgaggcgggcagatcacgaggtcaggagatcaagaccatcctggctaacatggtgaaaccctgtctctactaaaaatacaaaaaaaaaatattagccgggcgtggtggtgggcacctgtagtcccagctactcgggaggctgaagcaggagaatggcgtgaacctgggaggcggagcttgcagtgagccgagaaagcaccactgcactccagcatgggcgacagagtgagactccgcctccaaaaaaaaaagaaaactcaaaaaaatttttaagaaagaaaaaatcacccataatcatagtaaaatgttcctacaattttgatatttttggaaagaaacgtttttaacgctttgaaaaaaaaaatattccagattcctcagtttaaaaagaactgtttgggaagtcaggttcctcttatctttggcatgcacagatctcacttgataaggtcagccaatcttagatgattttcccaagaaatcccttcctgataaatgaaactggatgccaagtgatgacaggaaagtaggctggacatgcagacgatgatgcaaaggagcaggcctgcaaactcacagcttaccagctgctgctgcgtggccaagcgaagcacgctaaggcctaaccctgacaaaatggaaggctttttagtagcacttagatttcagttttgatccaacacatccaattactagctggataaggcctaaggcaagtttttcttttgttttgttttctcttctcttaattttgtttccttatctataaaaacaggctaacacctaccatgcagaattgttgtgaggattaaagata

SEQ ID NO: 693044 - DNA, 3888 bp, Homo sapiens
tgccaccaaaactataccacaggggttaagggaaaaaagagttaattcatgcacaaataatcacagattcacatccaatacaaggtaataatgaagacatggattaaggggaataatggtagtttgcgtagtagtttattctattcaattaataccttggtgatcacagaatgtatggcactgtgttaaaaataactgaaagagaaggagaagtattgaactatattcaaacaaatcagagcattttaaatctaaccgtaagtaggttctaaaagtataaacatataatgaatgattcaattaaatcttaaaaagcctagctaaccaatatggcagatctagtaacaaatattccaagataatgctatgtagagtaactayttaattgctgttattttctacttagaattctcaacacagaacctaagatacagtcatgactatttttctcagtctttttcattcataaaatctcagccttcctcagggagattctgatagcccattcatgttctccatcaccacctggagttatgccccagtaccttttgcttaaggctaatataaaagattttgtagtgaagatggtttgtccctgtttgaaattgatattatgaaaacaacatggttatttttccattttccaagtataaaactactttatattgaacatctctttttaaatcagacatgtctctctagagatcccaatggcctctacattcttactgatataaagcatatagtcaaggtgaaaataaataattgtttattgatgttaatcaataaagctatcaataccccataaacctataaaagggttacttcggggaagtttttttccctaaatatacactgaaaaaagcaatttgttttaaaatgcttacaaattttatagccaaatgccttcatgacatctctactagtcctcaaaaggctcagggcccagctggacatcaccaggaccccattaaaggcctccaggctgcctgagcccttgagacagatgtcttcatccaagaaacattattcattcaagaaaaatacttaacaggagagacaaaagcattgttttgaataactgaaaaatcattaggtactaatgataacattactatttaagcagtaacaaacaagaactataaaaattcagacacctagaactcacaatccttgaaacgcttttcttcccaaatcatactcctttttttcaactctactaccagtattttaatattcatttaaaaactaaagctagtcccaacatgccactacttcaatcagtcattatcaagacctattaaagaacaacctacatcaaatttctgacgaacagaagaaagctttttctttcccttgggttttccaggttttgctgcggaaccccctggccaaggcaaagatccagcaccatctaggagacagaaatatataaccataagtaaaaataatgacaactgataactgctaagtttgttttcatttggggtaaaaagcatggaatgctcatgaaatgcaaataactaatgaatgcttaaatcaaaaccttctctttctacttctctaaataaaattatcgatcctctcaaatcacatttttttcctagctgcaactaaaatttttttaggaagacaaatttttttatattttcaattaatgtttattgggtgttttgtttattagcagtagtattattatagatgtaggacagaatttgctggtctaagatgatgaactgagcacatgtatttatctcctctcccaagacgctacaaaatatgaaagtaaggaaggtaaatggcacacttgcacaacagaggttaaaaaggaaaatgagtggcagacacgatgagatgtcaacaaatttctaggatggactaaaagggtgcagactcgtgaagcagacccatagaagctgtaacctaggctaggcaaggaaggtggcaagtgaggcagaagcacgtcaacctgcctggaagaaacccacaacctggattgggagaatgtgagtgagtggaaaccaggagggatctgtaaggctaaaaacaaaattaatggaatgtctatatccttaaatcatccacacaaacccattcactcacccccaaaactgggttcagtacaaaatcaaagtgctgggcctcgtgtttaaaaattaagaatttcaagataatgatggtacaaaccaagtgcagggcccttctgtgcaatgcaggtcacaggcccaggaaggctcattcccatgcacagaatgacacagagcagggtatttataatagctaagtcagggggttagaaggaaggtggggagggaataaggactcttctctagttaaaccgaacacaatttctgggatttactaaggtagctggtatggatgttggtaccctacagcaaagctctctgtatatgggaatttgggagacccccagtttaacagtaggcttcctgtcagcttactctaaagcaaagtctccaggcagttttatgcttcattcttaaacatgaaaaggacaataattaatcaccagatatttgacaatattctttcacatgacaagaaagagcaagctaaaaaaataaaaataaaaaaaaagaggtcctagacaggaaatgcaaaagaattctgataaatttccaacaggtatccgcagaaaactttcagaacatgttcatccatgaaacaagatgctattaaaattgctgaattaaagaatgcattcaacagaaaggcccaaagagttcaggaaatctcaaacacagagcaataagacagagatgttaaaatcagttaatccagaaacagatttaagcaactatgagggctaaagaggtcccaccagaagaacaaaaaacaaaaagtagttgcctttgggaataggtctaggggtgggaacaagcttttatcataaaaccttctgtgctactgatatttttttaaccatgaacatatattgtttaatgttaaaaaaaaaaaaaagtaacacaacctcactacagtacacttaaaaagaaaactcaaggccgggtgcggtggctcaagcctgtaatcccgacactttgggaggccgaggcgggcagatcacgaggtcaggagatcaagaccatcctggctaacatggtgaaaccctgtctctactaaaaatacaaaaaaaaaatattagccgggcgtggtggtgggcacctgtagtcccagctactcgggaggctgaagcaggagaatggcgtgaacctgggaggcggagcttgcagtgagccgagaaagcaccactgcactccagcatgggcgacagagtgagactccgcctccaaaaaaaaaagaaaactcaaaaaaatttttaagaaagaaaaaatcacccataatcatagtaaaatgttcctacaattttgatatttttggaaagaaacgtttttaacgctttgaaaaaaaaaatattccagattcctcagtttaaaaagaactgtttgggaagtcaggttcctcttatctttggcatgcacagatctcacttgataaggtcagccaatcttagatgattttcccaagaaatcccttcctgataaatgaaactggatgccaagtgatgacaggaaagtaggctggacatgcagacgatgatgcaaaggagcaggcctgcaaactcacagcttaccagctgctgctgcgtggccaagcgaagcacgctaaggcctaaccctgacaaaatggaaggctttttagtagcacttagatttcagttttgatccaacacatccaattactagctggataaggcctaaggcaagtttttcttttgttttgttttctcttctcttaattttgtttccttatctataaaaacaggctaacacctaccatgcagaattgttgtgaggattaaagata

SEQ ID NO: 693045 - DNA, 970 bp, Homo sapiens
tctctcttgggccaccagcttggttccagttgtggccagggtggccatgtcatccatagtttttgattctgtgctcagggatggcgctgaccaatgtggaatcctgcatatttgggaggctggtttagggtcattcaacagggtacctcattgtaccaacccaagggtaaccattctcagtgcagtctatgtaaacggtatccctgggagcccattaccatttatggtacagtgtcgtgaatggtgcctactggagggttgtgaaccctgcagcagccctggatttcagtctgttaagggcaaatctgtcagggctttgatgtgaagataggagttttaggtacagagtaactaatagtcaaatctgctcttcatcaagcatttatctagcaycagctgttggccaggggtttggactagaaactggggtggtgggagcaatgacacctccaaggtcactttcatgggtgggacttctgaattcattttgtgaatctgagtgtgtccgttaggcacaaatagccatttcacaggtggtcccagctatagcaggaatggttcccagaagggccctgggtacagggccaggcaagtggcaggcgttcggcaagtgtctgttgaataggtgagggaagtccatgtcattgaatgggttttctaggaggatcctgacctcttctagctcgcctgactgcttaacatttgagcttttcgggtcacaacccccaaagttgtttgcatgcactgaagcaccagtgtgggacgtgttggtgctacagcaaggaactagggcactgtgcctggcatctggtacatagtaagtgcacaggcttgtcttccggaggggacagggcatggccccagcccagtgatgtactcctggactgcaaagggcagtgattagggcgtcatccaggcatggcctgactgtcccaatgctgtggggaccaggcagacaccctctgatacc

SEQ ID NO: 693046 - DNA, 970 bp, Homo sapiens
tctctcttgggccaccagcttggttccagttgtggccagggtggccatgtcatccatagtttttgattctgtgctcagggatggcgctgaccaatgtggaatcctgcatatttgggaggctggtttagggtcattcaacagggtacctcattgtaccaacccaagggtaaccattctcagtgcagtctatgtaaacggtatccctgggagcccattaccatttatggtacagtgtcgtgaatggtgcctactggagggttgtgaaccctgcagcagccctggatttcagtctgttaagggcaaatctgtcagggctttgatgtgaagataggagttttaggtacagagtaactaatagtcaaatctgctcttcatcaagcatttatctagcatcagctgttggccaggggtttggactagaaactggggtggtgggagcaatgacacctccaaggtcactttcatgggtgggacttctgaattcattttgtgaatctgagtgtgtccgttaggcacaaatagccatttcacaggtggtcccagctatagcaggaatggttcccagaagggccctgggtacagggccaggcaagtggcaggcgttcggcaagtgtctgttgaataggtgagggaagtccatgtcattgaatgggttttctaggaggatcctgacctcttctagctcgcctgactgcttaacatttgagcttttcgggtcacaacccccaaagttgtttgcatgcactgaagcaccagtgtgggacgtgttggtgctacagcaaggaactagggcactgtgcctggcatctggtacatagtaagtgcacaggcttgtcttccggaggggacagggcatggccccagcccagtgatgtactcctggactgcaaagggcagtgattagggcgtcatccasgcatggcctgactgtcccaatgctgtggggaccaggcagacaccctctgatacc

SEQ ID NO: 693047 - DNA, 3402 bp, Homo sapiens
ataatttcccaaagaagaaagaaatcaagaaacaaaaggagggaggaaggggctagaatggagatgaaaagaggaaggggaaggggccaaagagaggggaagatgtggtgggaggtgaggactaagctctgattttttcttgcccaaattcccatctaaggggtctggggagtcatgccctagaaataataaatcctcaatggatgggttttatttaaccctatatattatgacttattttccaacctgactctggcataacattatgagacaaggaagaaaatcaaaatattttatgccaaaacatgattttttgccatattttgaaatggccctgcaaagctgttctttgtgggggaaatttgcatctgtagcgaatctctattaacatacctggatcttcttcttccagaccctcccaatcctaaagagattaactaagatctgaataggaaacacttgtaatctattgtctttaagggcagccactataagactcaaaagaactttggtctccacaatttttgtcttaacctgaacattccctttctatcaatcccaggtctttagacaaactcaactaattgtcaaccagaacatgtttacgttcatctgtagtctggaagcccccgctttgaattgtcctgcctttctggaccaaaccaatgtwtttctcaaatgtatttgattgatgtctcaggcctctctaaattgcataaaaccaagctgtgcccaactaccttggcacatgttctcaggacctcctgaggggtgtgtctcgggccatggtcactcatatttggctcagaataaatctcttccaatgttttatagagttcagttcttttcatcgaccaagggatgagcctcatccttcctcccctgtacctgggcttgctggcgatgctcccaccagggcaccccctgctgtgccacttctgccctttgccttaaagcacatcccaagccccatcttcttctgtgaagctttcagcaccaccagaatcagagcttttccttccctcagcatctggtgaagacggtggccactgttgctgaactgagtggaatgactcctcctgtccctgctcactctgggaggaatgtcccgggtcatctcatcatggtttacagcagggcattttcctcctcccctccagagacagtgccagactcaggttcgttcattcttactgtaccaagaacctcccctgcacgtaaccccactgaggctcagtcacgtctaactcaaaacagtcaatgaatgcaagctgaaggcagggggatgtcagaccaaaagcacatattcctgtgggttatatcaaaggctaaccagcattatgggatcacaaaagaaaatggttaaaagacaatgacttccacatttccctaccctggaattcttcaaaacaagcaaatgcggaatgaatgctcactgacagctgtgattgttttccacgtaactttgctgttggttagcgtcaatcttgcatgcaaaacctgaagcacggcttgaattatcaagtgaatgtgaatgtgaatgtgtctttttctgaggtctattttcgtgtttagctgctcttccaaaatcgtcacgtcctgctaaagacccagggatgaaatggtcgctgtggcttcccctgtgcctaagcattttatggcagcactggcgtgggaggcagctgccagcacagtgatgtggggcggccgcagaggcaggctgcagtgctgtgggtggagcacgctccacgcagcgctcagctccctgcggccttcagctgctgcagatgccacaggcctggggatgtggaattcctagcagatggcaagagtgaatgttacaattagctttcttccaagtagatgaaagggattaaggatgggaagggtcaattaggtaatttaatccattctcttgtcgttctggcatttgtctttaaagaatgtcttggatctctcataccctgtaagccagggtcagaatcaatgcggttaagtgtcatgtatagttatttagaattcaattatgtactcatcagaaaaagtgtgttcagagtgaaagggatagatgggagtgattgaagggcatttaaaggtcttcatgcatagagatcagtgcctgttatcaatgagctgtgaggggcacctcttcaggtaggctggattgacccagtggctgtggctgctgaggccggggtccatattctgtcccccgagtctctgaggttcgtggaggaggagagtgacgttctggaacccacagtccttcaagggtgcagaagccatggctcccctcgcccatcctctcttcccttcacttgacatttccaaatgtcagatgtgagacaaaatctgtgtcttccctacatttttgatcccatacatgttctgctgcgtggggtcaatctatatttttgtgtcatgttattgcacatttcaaataagataatttccatggacaaaatcctaggcaatggggccctcgtgggctggtgccgcacctgctggtggctcctgccccacagccctgggtcccctcagctgacagggaggttgtcctcatggtactgggttcccaggagcactcccagctgcctgtacggagtacaggacctctccgcttctctgccccaacatggcctcctgaaccacagatggcacagcccacgtgcaggaggcgggagttccagttcccaggtgaagccagggaggacaggtgggtgcccaggccctccatacaaatcagggtggttaggggcactattgaaaaatccctcatctggtactcagagcaacctcatctccctgcactctgccttcctgctttcactttgtcagcacagtcacgggcgggggctagtggagtcactcctcaaagaaatctgcacccatgtgctggtttcagggtctgcttgaggaaatgccgctgaaagccgtggggatccacatcgtatgcctttattcaatcagcaaattgacattaagcatcttctgtgtagcaggcactgagctgggcacccagtcctgggcgttaaagatgaacaagatagctgcaagctttttctcttggaagcaattgaacaaggaatatgagtatgagatgttcgtgtgtgtgtgtgcatgccacctggaaggagggggagagaaggggcttgttacataagaagcccagtatctgcactgagccgggggatggagcccaggagtccatgttcaaacgctccaggtaacgggcagccccgggacccacgtcttgttcagtctcagcagcttacaccgggccgagagtcacagaagtcattcctttagatgagattttcatctattttttactcattgtattagtattctctggagaaacaggtaataagatgtgtataaacacacatacatacacataat

SEQ ID NO: 693048 - DNA, 1541 bp, Homo sapiens
cttttggaggaatcaagaaaaagcatcattaaggaggagttatttaagacaagccttaaagatgagtgggattttgacaggtaggattggaggaggaggttgttcttraacaagatgcaaaggacacacaggcacgtgggtacaaggcttattatgttcaagaaatagcaaatagtcctatcagcagggatgtaggattcttgtggtgtagtaaggaaaattggggctgaaaagtggattgtggtgaaactgtggagagctgtgaatgtcacgaggaaggatttaactttgtagaaggaagttagcatcttttgtgcactttttagcagcaattgcttgatttcagccaagcatgtctctcaattgttcctgtgaataagatggacagtaatgctgttcgatggatttataactggatgtataaataaactggggcatgtccaacatcaacatgaaattgcaaagggcaccaagcttccttccttttgcatattttctaaacatcccaggggtaagtttcatgagggcagggatttaatctgatgtgttccctgctgagtccttagctaatgctgaacaggaggctttgtgagggagagaagccctgttgctgaaggaggagtttgatgatcttttgcctgtatcttcatagcaggatacttgcattttagggaagttagcaaaatgttctccagttctaagttctgccataaattaaccctgattcccctgtattctgtagtgtttgaaggaaacatgataacctagatgtaaaagcaacccctttaaagagtagcagttagaacatgacagtcatccatattggtcaaactcatggtccagccgtagttctcaggccgtacactaagaattttggaaggaaacaggcatgctcttacacacaccaactacagacagttagaccagccattaacatcattgtaaatgcaaaaaatacgagtgtgacctccaacagtgaataaatatcatcctgcatccaagagatgcaaggtaagagatgagctgcagccatccttgtttttcctttaaagtatttatggatctagcttgaacttacactgtcaccatgaatattctacctcttaatagctctctgtgtatatatatatatatatatatatatatagttttggggagtgtatgttgagatgcggtctcactatgttgtccaacttggagtgcagtggcatgatcatagctcactgcatcctcaaattcctgggctcaaatgatcatcccacctcagcctcccaagtagctgggactataggcatgcgccactactcccagctaattttttaaaatttttttagagacaaggtctctcgatgttgcccagactgatctccaactcctgggctcaaacagtcctcctgcctcagcctcccaagtaactgggactacaggcgagatctgccacatccagctcagtattttcttttatatgatctcaatttactttcaaacttcatacgtctatctcctgttttgcatgttttgagagcagatgaatgtgtcga

SEQ ID NO: 693049 - DNA, 1541 bp, Homo sapiens
cttttggaggaatcaagaaaaagcatcattaaggaggagttatttaagacaagccttaaagatgagtgggattttgacaggtaggattggaggaggaggttgttcttaaacaagaygcaaaggacacacaggcacgtgggtacaaggcttattatgttcaagaaatagcaaatagtcctatcagcagggatgtaggattcttgtggtgtagtaaggaaaattggggctgaaaagtggattgtggtgaaactgtggagagctgtgaatgtcacgaggaaggatttaactttgtagaaggaagttagcatcttttgtgcactttttagcagcaattgcttgatttcagccaagcatgtctctcaattgttcctgtgaataagatggacagtaatgctgttcgatggatttataactggatgtataaataaactggggcatgtccaacatcaacatgaaattgcaaagggcaccaagcttccttccttttgcatattttctaaacatcccaggggtaagtttcatgagggcagggatttaatctgatgtgttccctgctgagtccttagctaatgctgaacaggaggctttgtgagggagagaagccctgttgctgaaggaggagtttgatgatcttttgcctgtatcttcatagcaggatacttgcattttagggaagttagcaaaatgttctccagttctaagttctgccataaattaaccctgattcccctgtattctgtagtgtttgaaggaaacatgataacctagatgtaaaagcaacccctttaaagagtagcagttagaacatgacagtcatccatattggtcaaactcatggtccagccgtagttctcaggccgtacactaagaattttggaaggaaacaggcatgctcttacacacaccaactacagacagttagaccagccattaacatcattgtaaatgcaaaaaatacgagtgtgacctccaacagtgaataaatatcatcctgcatccaagagatgcaaggtaagagatgagctgcagccatccttgtttttcctttaaagtatttatggatctagcttgaacttacactgtcaccatgaatattctacctcttaatagctctctgtgtatatatatatatatatatatatatatagttttggggagtgtatgttgagatgcggtctcactatgttgtccaacttggagtgcagtggcatgatcatagctcactgcatcctcaaattcctgggctcaaatgatcatcccacctcagcctcccaagtagctgggactataggcatgcgccactactcccagctaattttttaaaatttttttagagacaaggtctctcgatgttgcccagactgatctccaactcctgggctcaaacagtcctcctgcctcagcctcccaagtaactgggactacaggcgagatctgccacatccagctcagtattttcttttatatgatctcaatttactttcaaacttcatacgtctatctcctgttttgcatgttttgagagcagatgaatgtgtcga

SEQ ID NO: 693050 - DNA, 1541 bp, Homo sapiens
cttttggaggaatcaagaaaaagcatcattaaggaggagttatttaagacaagccttaaagatgagtgggattttgacaggtaggattggaggaggaggttgttcttaaacaagatgcaaaggacacacaggcacgtgggtacaaggcttattatgttcaagaaatagcaaatagtcctatcagcagggatgtaggattcttgtggtgtagtaaggaaaattggggctgaaaagtggattgtggtgaaactgtggagagctgtgaatgtcacgaggaaggatttaactktgtagaaggaagttagcatcttttgtgcactttttagcagcaattgcttgatttcagccaagcatgtctctcaattgttcctgtgaataagatggacagtaatgctgttcgatggatttataactggatgtataaataaactggggcatgtccaacatcaacatgaaattgcaaagggcaccaagcttccttccttttgcatattttctaaacatcccaggggtaagtttcatgagggcagggatttaatctgatgtgttccctgctgagtccttagctaatgctgaacaggaggctttgtgagggagagaagccctgttgctgaaggaggagtttgatgatcttttgcctgtatcttcatagcaggatacttgcattttagggaagttagcaaaatgttctccagttctaagttctgccataaattaaccctgattcccctgtattctgtagtgtttgaaggaaacatgataacctagatgtaaaagcaacccctttaaagagtagcagttagaacatgacagtcatccatattggtcaaactcatggtccagccgtagttctcaggccgtacactaagaattttggaaggaaacaggcatgctcttacacacaccaactacagacagttagaccagccattaacatcattgtaaatgcaaaaaatacgagtgtgacctccaacagtgaataaatatcatcctgcatccaagagatgcaaggtaagagatgagctgcagccatccttgtttttcctttaaagtatttatggatctagcttgaacttacactgtcaccatgaatattctacctcttaatagctctctgtgtatatatatatatatatatatatatatagttttggggagtgtatgttgagatgcggtctcactatgttgtccaacttggagtgcagtggcatgatcatagctcactgcatcctcaaattcctgggctcaaatgatcatcccacctcagcctcccaagtagctgggactataggcatgcgccactactcccagctaattttttaaaatttttttagagacaaggtctctcgatgttgcccagactgatctccaactcctgggctcaaacagtcctcctgcctcagcctcccaagtaactgggactacaggcgagatctgccacatccagctcagtattttcttttatatgatctcaatttactttcaaacttcatacgtctatctcctgttttgcatgttttgagagcagatgaatgtgtcga

SEQ ID NO: 693051 - DNA, 770 bp, Homo sapiens
aaaaaaaaactaactgaattacatgccctgcaagggtgacgtgcctaagtgactcagttagctggagagtgactctcctctccagtccttccctactcatggccatcttcccagggtacatttaataatggattgtatatttcaaaattgccaagacagaagattttaaatgttttcactgccaaaacatgataagtatgtaaggtgatggatttgttaattagcctgatttaatcatcccacattacaaatatgtatcaaaatgtcatcccatgaatatctacaattattatttgtctagtaaaatttttttttwaatttaatgtttctttgtagaaagcggctctgaaactaagtcagctgagggtgccagggttgtgtatgttatcatggcccttgaggttatgattccagatctgaggacggtcctcacggaggccagatgtctgctgtggttttcacatgctgacctggcttggaagggaaagccaggtttggggcatttcacaaaaataacatttttttcattactcttgtttctctcaacatcatccctctcaccacaaggggtcagtcagcacattttgcctttgaccaaggcaaaacgccaggcgagtgatcatccctaggcgggcctcgtgttctgaaggaactgatggagctcctgttgacctctttcttgcagccaaggggaatctgatttagtagattagtgatgctagactctcatttctgttccagatatactgccaataggccctttattatag

SEQ ID NO: 693052 - DNA, 770 bp, Homo sapiens
aaaaaaaaactaactgaattacatgccctgcaagggtgacgtgcctaagtgactcagttagctggagagtgactctcctctccagtccttccctactcatggccatcttcccagggtacatttaataatggattgtatatttcaaaattgccaagacagaagattttaaatgttttcactgccaaaacatgataagtatgtaaggtgatggatttgttaattagcctgatttaatcatcccacattacaaatatgtatcaaaatgtcatcccatgaatatctacaattattatttgtctagtaaaatttttttttaaatttaatgtttctttgtagaaagcggctctgaaactaagtcagctgaggrtgccagggttgtgtatgttatcatggcccttgaggttatgattccagatctgaggacggtcctcacggaggccagatgtctgctgtggttttcacatgctgacctggcttggaagggaaagccaggtttggggcatttcacaaaaataacatttttttcattactcttgtttctctcaacatcatccctctcaccacaaggggtcagtcagcacattttgcctttgaccaaggcaaaacgccaggcgagtgatcatccctaggcgggcctcgtgttctgaaggaactgatggagctcctgttgacctctttcttgcagccaaggggaatctgatttagtagattagtgatgctagactctcatttctgttccagatatactgccaataggccctttattatag

SEQ ID NO: 693053 - DNA, 770 bp, Homo sapiens
aaaaaaaaactaactgaattacatgccctgcaagggtgacgtgcctaagtgactcagttagctggagagtgactctcctctccagtccttccctactcatggccatcttcccagggtacatttaataatggattgtatatttcaaaattgccaagacagaagattttaaatgttttcactgccaaaacatgataagtatgtaaggtgatggatttgttaattagcctgatttaatcatcccacattacaaatatgtatcaaaatgtcatcccatgaatatctacaattattatttgtctagtaaaatttttttttaaatttaatgtttctttgtagaaagcggctctgaaactaagtcagctgagggtgccagggttgtrtatgttatcatggcccttgaggttatgattccagatctgaggacggtcctcacggaggccagatgtctgctgtggttttcacatgctgacctggcttggaagggaaagccaggtttggggcatttcacaaaaataacatttttttcattactcttgtttctctcaacatcatccctctcaccacaaggggtcagtcagcacattttgcctttgaccaaggcaaaacgccaggcgagtgatcatccctaggcgggcctcgtgttctgaaggaactgatggagctcctgttgacctctttcttgcagccaaggggaatctgatttagtagattagtgatgctagactctcatttctgttccagatatactgccaataggccctttattatag

SEQ ID NO: 693054 - DNA, 770 bp, Homo sapiens
aaaaaaaaactaactgaattacatgccctgcaagggtgacgtgcctaagtgactcagttagctggagagtgactctcctctccagtccttccctactcatggccatcttcccagggtacatttaataatggattgtatatttcaaaattgccaagacagaagattttaaatgttttcactgccaaaacatgataagtatgtaaggtgatggatttgttaattagcctgatttaatcatcccacattacaaatatgtatcaaaatgtcatcccatgaatatctacaattattatttgtctagtaaaatttttttttaaatttaatgtttctttgtagaaagcggctctgaaactaagtcagctgagggtgccagggttgtgtatgttatcatggcccttgaggttatgattccagatctgaggacsgtcctcacggaggccagatgtctgctgtggttttcacatgctgacctggcttggaagggaaagccaggtttggggcatttcacaaaaataacatttttttcattactcttgtttctctcaacatcatccctctcaccacaaggggtcagtcagcacattttgcctttgaccaaggcaaaacgccaggcgagtgatcatccctaggcgggcctcgtgttctgaaggaactgatggagctcctgttgacctctttcttgcagccaaggggaatctgatttagtagattagtgatgctagactctcatttctgttccagatatactgccaataggccctttattatag

SEQ ID NO: 693055 - DNA, 624 bp, Homo sapiens
tctgtgcccctcattcctgtttgggccaaggccgaggacctgcgagtagggctcagttgcctggagccccttcagcccatcccccagttcactttgcttgtgggatctccccgttgctcctgcccctggactgagtggcaggccatcctacaaacacccgsacactcgacatcactggtgtcaagacaactctaagaaggttttccgtgatcctgcaagacctgtgttccatcctggtgattctgtcttcaatttcactgcacaggtaccacagtaagccagtgctgtgtgctccgagttccagggcatcccccagctcagccactacactgagcacaaggactctgtggggcccaggagcaggtagtcacccctttggggtccacaacacccggctgtccccagacttgtgtccagggaagatagtgttgagggccctcaaggagagcggggcagggatgcctgagcaggacaaggaccccagagtccaagaaaatcctgatgatcagagaacggtccccgaggtcaccggggatgcacggtctgcattttggcccctgcgggacaatggaggcccctctccctttgtgcccaggcccgggcctctgcagacagacctccacg

SEQ ID NO: 693056 - DNA, 624 bp, Homo sapiens
tctgtgcccctcattcctgtttgggccaaggccgaggacctgcgagtagggctcagttgcctggagccccttcagcccatcccccagttcactttgcttgtgggatctccccgttgctcctgcccctggactgagtggcaggccatcctacaaacacccgcacactcgacatcactggtgtcaagacaactctaagaaggttttccgtgatcctgcaagacctgtgttccatcctggtgattctgtcttcaatttcactgcacaggtaccacagtaagccagtgctgtgtgctccgagttccagggcatcccccagcycagccactacactgagcacaaggactctgtggggcccaggagcaggtagtcacccctttggggtccacaacacccggctgtccccagacttgtgtccagggaagatagtgttgagggccctcaaggagagcggggcagggatgcctgagcaggacaaggaccccagagtccaagaaaatcctgatgatcagagaacggtccccgaggtcaccggggatgcacggtctgcattttggcccctgcgggacaatggaggcccctctccctttgtgcccaggcccgggcctctgcagacagacctccacg

SEQ ID NO: 693057 - DNA, 1285 bp, Homo sapiens
taaaaggtttttatttatattggttacctgaaaaaataattcaaaccacaatgagatgtaagtacttgtcattcagaatcctgaatttgaaaggaatattttagaattctaagttgaagagaaagtgcaaagtattgatgagaatgttgactaattagaacactcaaattgatgttattggcataacttagttcaaataatttggataaagatatgtattaggccccaaaattctacttgtaaagatggtttctccagaaatgcatgcatatatatagctaaaaaaaatgtgtactcatgaaaacacttttcagaataacaccaaaataaccccaaactgtggcccaaaagtggactaaaatacttataaagagtacagtaaacaaataagttgtaatatgatcacctaataaaatattagagaaataaatataaatagtttcatttgcaggtcatatagtcaattcgtctcacaaatataatattaagcaaaaaaatgtggttcaaaacactacacacactatttgattccttactggtaaaagttagaatagtgttatgttaggagggatgggtggaaatcaggtgtgtgactattacattttcttattctggatgatcatagtattttaaaactcactaagctttaaacttatgtgcatttacccatgtgtatacaatactttaatagaagcttcaaatcaatgagaaaacatgaaactgtctgatggaaaaatagcttgaggaaatgaacaggtatagcagaaaagaagggctgcatatagtttaaaaacttgaagagatgtttaatctctttgcaaatagaaaaacatacgcatttaaattgaaataccattttcatgttccaaaattaaaattattagaaatatgatggtatacagtgatggtaatatgggagaaaggaaacatcctaggcaatttggctaagcttttctgagaaagatttaggcaatatgccattaaaagatttaatgtgaacaaatgggaaatttgcccacataaataaatggaaagatactctatttttcctaatttaatctgaaaatacctaagcccctgatattttagagacataattttcactgcgatggtcataattttaaaaggttgcatcatccatttttagttaacatatattgtactaacatcacatatctatgtaacagaaaaatagagtcaactcatgtagggayagacatgaaaatgacaaatacatatagagatagaaaggtatcttgtgcattatactgagaaagacaataga

SEQ ID NO: 693058 - DNA, 1814 bp, Homo sapiens
tgataattgtacatcctcagatgtgtttgaatctgagatttactctaaactcagagaaaaaaaagtgaaattttgtttccattgtggcacctttgtttcctttttaagttttcaaaatttcttaaaaattatttttccctttcataatttattcaacaagtatctattgttaggtgttgggaacacaagacctaaaactcctgacaaatatattctatttmtgaggtcaatttgtacattaataaatgcatatataataccagacaagattgtaatgctaaccagtttgactttgaggcacggtattcagaatgtaaatgcccctggaaaaaacattgaatataaatgcccctggagaaagaatgtagttggaaaaaacattctgaggtaaaattatgcaatattggtatgactaattagagtgaccagaggttcacacatttttgtgacatgccattggtagaaaaagagccatagctgaaaaaatatggcagtcataagatgtcagtggaaatgaagacaaggataccttttggtcaattttcttgaaaatattggctttttcaacagtgtagtttatttaaaatttagtcccagttcttagcaattatttatatactgatggacttatatccagggtcttcttgaattaaaaaaagtcaaaaaataattttataaatttaaaatattataaaattatgatatatacaattcttgctctctctgtcatatttttccaattttttgtctgtcttgttttttcttgccttttcttccctgtcctttccctttcgtttcttttctttttgtttcctttgtctggccttgctttgagtttcttttccaaacgaattcactggaggtggtatttttatgcataatatacacagcaaatgtctagggcctctcattttttacaaatctttgtaagaaaaggctatctattaacccaatgacattgtcataaccttttctaaatttcaatgatattcagtttctcacagctattacattacaaagtatacctcagtaaaaatctagtaggtcatagggctgatgttgctgattgctcacttgctcaagccagaagcttagaatacatgcttgattcttcactttcctgtgggtttatgccaaatcaatttcaaatctatagatcttatcctctaaataacatacagcatgcctacttttttctctctctcgactactgtcacattaattcaaaagaaaaagactgatgattcctaacttcctggcttcagtaattggcaacgatgacatcactactaaggcttcacttctcacctctgcttccatatgagtgtaatgttattttctcctatgacagataagtttatttttcaccattaaaaggtaagaaactcacgcataaccaaagttggaggagacagttattttttttccccagcttgcctgttaaaaccataaggaatgattaatctgccatggtgcttgatgtggcccagggatgtgctcagactcagtcatgtaggggcaggtggtattaacattagttcaaacatggaaccatggcatgtgttagaaataatggcttatattagaaaccggacataaaattgtcgtgagcaagaaagttacctcaatttgagtctactagaagtttcagagtgccatttcacatggccacaaagttcaaaagttccaaaagaagcaaaagtttgaccaagaaatcagtgattttttaaaaaagagaaattgagctcaatcatgttttttatatcttctactgtactaaaagtttttttctcaataattgactaaaagttcat

SEQ ID NO: 693059 - DNA, 1814 bp, Homo sapiens
tgataattgtacatcctcagatgtgtttgaatctgagatttactctaaactcagagaaaaaaaagtgaaattttgtttccattgtggcacctttgtttcctttttaagttttcaaaatttcttaaaaattatttttccctttcataatttattcaacaagtatctattgttaggtgttgggaacacaagacctaaaactcctgacaaatatattctatttatgaggtcaatttgtacattaataaatgcatatataataccagacaagattgtaatgctaaccagtttgactttgaggcacggtattcagaatgtaaatgcccctggaaaaaacattgaatataaatgcccctggagaaagaatgtagttggaaaaarcattctgaggtaaaattatgcaatattggtatgactaattagagtgaccagaggttcacacatttttgtgacatgccattggtagaaaaagagccatagctgaaaaaatatggcagtcataagatgtcagtggaaatgaagacaaggataccttttggtcaattttcttgaaaatattggctttttcaacagtgtagtttatttaaaatttagtcccagttcttagcaattatttatatactgatggacttatatccagggtcttcttgaattaaaaaaagtcaaaaaataattttataaatttaaaatattataaaattatgatatatacaattcttgctctctctgtcatatttttccaattttttgtctgtcttgttttttcttgccttttcttccctgtcctttccctttcgtttcttttctttttgtttcctttgtctggccttgctttgagtttcttttccaaacgaattcactggaggtggtatttttatgcataatatacacagcaaatgtctagggcctctcattttttacaaatctttgtaagaaaaggctatctattaacccaatgacattgtcataaccttttctaaatttcaatgatattcagtttctcacagctattacattacaaagtatacctcagtaaaaatctagtaggtcatagggctgatgttgctgattgctcacttgctcaagccagaagcttagaatacatgcttgattcttcactttcctgtgggtttatgccaaatcaatttcaaatctatagatcttatcctctaaataacatacagcatgcctacttttttctctctctcgactactgtcacattaattcaaaagaaaaagactgatgattcctaacttcctggcttcagtaattggcaacgatgacatcactactaaggcttcacttctcacctctgcttccatatgagtgtaatgttattttctcctatgacagataagtttatttttcaccattaaaaggtaagaaactcacgcataaccaaagttggaggagacagttattttttttccccagcttgcctgttaaaaccataaggaatgattaatctgccatggtgcttgatgtggcccagggatgtgctcagactcagtcatgtaggggcaggtggtattaacattagttcaaacatggaaccatggcatgtgttagaaataatggcttatattagaaaccggacataaaattgtcgtgagcaagaaagttacctcaatttgagtctactagaagtttcagagtgccatttcacatggccacaaagttcaaaagttccaaaagaagcaaaagtttgaccaagaaatcagtgattttttaaaaaagagaaattgagctcaatcatgttttttatatcttctactgtactaaaagtttttttctcaataattgactaaaagttcat

SEQ ID NO: 693060 - DNA, 2421 bp, Homo sapiens
atttttagattatatattatcccttgtttatttctgtagctggggaaaatatttttattgaaatagattgttttttgaagtttgctatattaggtaaaaataaataccaaacttctctgtcttcagtttaatagaaaaaaaaaatcccttgttactctgtttctgccttactgttagtagaaagatttatgattaagtaattttagtaggacattaagaacaaaaacatgaaccaaaatactttttaaaataaatatacacatttttactatatatagacacatatataaaagtatatatacatatatgtatatatgtgacttcaataacaggaaaatagattttccagatkaacaatctaaacatctcatccataacaaaaggttaggctctataccaatgcttgaatgaaaactgtaatatcatccatttaaaaaaatgccaacacatgcataattttaggctgtaaaaatgaaaatatttcagaattgattaacaaatggtggaagttaaagttgtctcttcccgacctgcactttgttttctgtctcttgccttttctcacattttatttttccttcctatctcaacaatataccccacctgcagtgtgcccaatgtggacacatacctgcttttttcaggcactgttttggacaacatttccctactgagcattaaatcactttttcttaaatacgtactaaagatttccatggctgaaaagctagttccacatacattaataatccttgaagaattaaatcagatacaacctctacatcagcacaatatttcaaggtggtaagggagtgctactgctgggttcgtcttcacttaataactttattaatgatgtggatgagtgaacaaatatgaaaagaaaatttataggtattacatacgtagattctgcagaaacaaataggatggaaggtaatgactgtagaatgacctagagaggttaaaaaaagaaaatagtagtccaatattattccacttttaagtaaatgagaccattaagctctttaaaataaccagtaaataaaaactcaaagcaatgatagctacatcaaaaagtgagggaagaggggaaattatatgttgcaatgttacagagtacattaaagcattcagtatatttcctgaaaatttcataagcacagttcttaatgtttattcataaataaacaaaaccacaccaaaagccatagttcatttgtttctaactaagagtacaaattatttatgcggaaaagtacatataagctcacataaataacacgaataatgttttcattgtgaagatattcataacgttcaaatgacaaggtcttaggaactctgcaccttcattaattttaatcaatatttaacaatcaagattgttttcaataaatcatgatctaataatgaaagggggaaactatttgttttaactttcatttcagttttaccctttactcacaagttgaaattcattctcactctttgcaaactattttgaaacacttccaggtaaaattcatataaatattttatttttcctaatttttggaaaaattttagactattacaatctgagttaatagcctagttcctttgttgatccagtgtaaataaatatttctcttttcttgctgtattaaaaaacccacagtctctatagccaagtctatatctatatcgatatctatctgtatctgtatctatctatgtgtatctctatcgatgtatgcatacacaaataatatctgtggaagaattttttttcatgtagtgtaatatccacagctcttctactttaaccataactcaagttaataacattttattgtcttttgttagttttacctggaaaagaaagcacatcatatacaatattataaaatagaaataaaactaaatatagtgttttagaaggtaacaaagttttatgtttaaggatattaaataaaatctatttcttccagtatattttttcacaatctgtcttaaatggaatcttcagatatcttaacaagttgactactagattttgtagtgtattccaatcagatatctatctgaggccactcttttttttaataatctaggcttctgtagacaatgtggaaacatttttaaaatgatgacgccctccttttccttcgtagctaaattagtacacaaaattctaaatatttccttagttttaataataataaagcaatataagattcaccctctgtattcaattctttgttaccaattctgctataattagaatttttgaaattcttagttataacctttatttttgataattgcatttaaaatgcaatgataaagcaaataattaaaatgctaggaataaaattgtcctttattagtttatcataaagttccataaatttcagctctccttgatttctcactatt

SEQ ID NO: 693061 - DNA, 3625 bp, Homo sapiens
gcagaaagtttgtatgcagggccatgtagagcttttatcctacagtaaatcctagtagtttgctggtgctgtgtgattttttttgtttgtttagggtttgtgtgtgtgtgtgtgtgtgtgtgtgtgtgtgtgtgtgtgtgtgtgaagcttatttattccatttcaagaaaaagaaaaatagacaaattagaataccaaaaataatttgcagccagtatcaaccaatttatattcaagctgaaaaattaaaatagctttcagagaatggtagaagcatattatttaaaaaacaaactatgaagacatggacagaagcatgtagacatagataacagaaatttaaagtaaaaagtagaaaatgaaattattcccttttatacctgaaagcaaatgatttccatgattctaagcctctgtaaaaagcagcaacaatttcatcattttcctattcactcttcatattatctaaatcaggattctgcaaaattattttccttgaattacttttaaaacataccagaaatgaattcactactctaattatcacagcaattcagggaattattaaaaatcaaatcaaatcaaatgaaacttcgtaagttgtttacaaaaaaacttcaggttcatttgcttttaatgcaagacatggcaatgtatctcggcctgtggatgtcctctccatgttaatagtaagtgcaagtttatgaaaagactagacaccgacaccacctggggaaatcaaagcttacttacctaaaatgcacaggagccaagaagcatgtttaagttcatgggagggtaatgaatgctgttctctagaacatgtttcaaggagctggacacgtttccttaccaggggagactcacactgcagatcataatttctgagcaagtgagaagtgagagttccattgcacctgtgggaagctctatcctccaaagtgtagctttacacacccagcttgagtcattcttctttcaggtgtatctggacatactccagggactagcttatctgtgcctggtgcacttcatttatcacgattaaacaatatacaatttgactgaagggcacagtataggtcagtgcatttatgcataacagcaggacttattaatcatcctcagctcctgcaggctaagaaatcctgcttaaaatttatttgcatgcttagaactagaacagagcttcgaaactagaataagggtcacttactctgatgtctctggaagctcatgaggtcagccctgaacgctaagttgcacttcttgaaacagttttaatgcccacggctatctcccaattcattctgagtttgagaagggaaaaaaatgaaatgatatttagtagactcctataacagtttgggtaacaccagctgttttaacaaacaatcctcaaagttaaagtggctgaaagtttaaaatgtgtttctcattaataacattcaaataaaggcatttcttgtctgggtggcttttaccagggagtaattcaggaaactggcctccagtattgtagctccaacttcctagagggcttcagagttctcctttttcaaatgacacatgttgaaagaactggaagaaacatttatatgtaccaccctctaaaagtggtacacattaaccgggacacagttgcatggaaatatagccaagctatgtatccagaaagaagaaaaaacaagtgtggtaaagagctatcagtctatgcctcagcttttcaaaatccagtcttacggcgcacagatctagagagaatatgtagaccttatattatgtaaaggcattcacagaactatttttgttgttgttaacatacttgagcttccctacggcaatgttcttgtaggtttcccagactaatagccttcaaaatggaggtgaatatatacatataagaaaaaaataagtaacttaagtcttctaataagatatgttttataaaaatatgaagaagatatagtaacagctccttatagcagtgtaagacctttctttcatccatctcctcacctatggttactatcctcacaatcccatttccctctatgtacattttactttataacatatgttctcatacacaaaaaatacaataaaaaattttccattatccaacagaatttataaagcctacaaaatttctaaatatatcattttatatgtaatgaatatgcttgttatttcccattaaaaaaaaatgcagcggccgggtgtggtggcttatgcctgtaatctcaacactttgggaggccgaagtgggtggattgcttgagctcaggagtttgggacccacctggccaatgtggcaaaaatctgtctctactaaaaacccaaaaattagccaggagtggtggtgggcacctgtagtcccagctactcatgaggctgaggtgggaggattgcttgagctcagaaagcggagtttgcagtgagccatggttttatcactgcagtccagcttggcgaccacttgttcttttttgcttgtttctttgtcttttgctttactttgcatcatagagatacgggtgaaaatttctttaaccctttaagtgtttctactttgtctcatatgctatacctcatttgttacttggagtatactcttggccatgctattagaaatggatgatgtaaaaatggcgccccctgaagtcaagcaatgtgaaacatttgtaaatttctacaacaaatgccctaaattgtagtcgcttaattaaaataattattttctatttactgtaatagtcaacaggtaagaaatgcagtcttgcatggatgtcccactaaaaaatatatgccatcttttagtccgttgatacttagcatattgccctcatcttcatggacaaaaattggcaatttttctgtaaaatctctctttcatattactgatgacaaaattctgcactttatctgaggaagaaaatgacaagactgacatgtgggactcacttctcactgtataataccatccttggctcctgccccaggataattttgatatttttaattatcaaaccaaaaccaataagttatataaaatataggcaaagttacattcactgggagaattttagcactctcaaartaacatatcagttcctattatccagtaaattcctaccacgtcccatgctcccggaagtgtgtccggattcatgtttttctgataggtgaatgcaaagtcactagccattgccatttgccagggattcagagagacagaagtgtggaaattaacatttagatgtatgagaaatatatgcaagaaactgagactgagcaggcaatttgtagattgtatacagtgtagcctaaacatgtttgcttcagtgaatttgtcatttcttgcatggggtaagtctaaaattatttattgtttaatttttttcattagaaataaaccctcttggaagtaattaaaatgcatatttcacaaaaaattagtgcgatgatgatgacaatcatgtaacttgcaaaacttgagtgttgttttatcacaaaccttatgaaaacagatgcatccttgccttaaaaaggagaaggaaaaaggaaatgctctgggcacagcatgaagcccagaaaaagaatatttccaacagccccatggaca

SEQ ID NO: 693062 - DNA, 3625 bp, Homo sapiens
gcagaaagtttgtatgcagggccatgtagagcttttatcctacagtaaatcctagtagtttgctggtgctgtgtgattttttttgtttgtttagggtttgtgtgtgtgtgtgtgtgtgtgtgtgtgtgtgtgtgtgtgtgtgtgaagcttatttattccatttcaagaaaaagaaaaatagacaaattagaataccaaaaataatttgcagccagtatcaaccaatttatattcaagctgaaaaattaaaatagctttcagagaatggtagaagcatattatttaaaaaacaaactatgaagacatggacagaagcatgtagacatagataacagaaatttaaagtaaaaagtagaaaatgaaattattcccttttatacctgaaagcaaatgatttccatgattctaagcctctgtaaaaagcagcaacaatttcatcattttcctattcactcttcatattatctaaatcaggattctgcaaaattattttccttgaattacttttaaaacataccagaaatgaattcactactctaattatcacagcaattcagggaattattaaaaatcaaatcaaatcaaatgaaacttcgtaagttgtttacaaaaaaacttcaggttcatttgcttttaatgcaagacatggcaatgtatctcggcctgtggatgtcctctccatgttaatagtaagtgcaagtttatgaaaagactagacaccgacaccacctggggaaatcaaagcttacttacctaaaatgcacaggagccaagaagcatgtttaagttcatgggagggtaatgaatgctgttctctagaacatgtttcaaggagctggacacgtttccttaccaggggagactcacactgcagatcataatttctgagcaagtgagaagtgagagttccattgcacctgtgggaagctctatcctccaaagtgtagctttacacacccagcttgagtcattcttctttcaggtgtatctggacatactccagggactagcttatctgtgcctggtgcacttcatttatcacgattaaacaatatacaatttgactgaagggcacagtataggtcagtgcatttatgcataacagcaggacttattaatcatcctcagctcctgcaggctaagaaatcctgcttaaaatttatttgcatgcttagaactagaacagagcttcgaaactagaataagggtcacttactctgatgtctctggaagctcatgaggtcagccctgaacgctaagttgcacttcttgaaacagttttaatgcccacggctatctcccaattcattctgagtttgagaagggaaaaaaatgaaatgatatttagtagactcctataacagtttgggtaacaccagctgttttaacaaacaatcctcaaagttaaagtggctgaaagtttaaaatgtgtttctcattaataacattcaaataaaggcatttcttgtctgggtggcttttaccagggagtaattcaggaaactggcctccagtattgtagctccaacttcctagagggcttcagagttctcctttttcaaatgacacatgttgaaagaactggaagaaacatttatatgtaccaccctctaaaagtggtacacattaaccgggacacagttgcatggaaatatagccaagctatgtatccagaaagaagaaaaaacaagtgtggtaaagagctatcagtctatgcctcagcttttcaaaatccagtcttacggcgcacagatctagagagaatatgtagaccttatattatgtaaaggcattcacagaactatttttgttgttgttaacatacttgagcttccctacggcaatgttcttgtaggtttcccagactaatagccttcaaaatggaggtgaatatatacatataagaaaaaaataagtaacttaagtcttctaataagatatgttttataaaaatatgaagaagatatagtaacagctccttatagcagtgtaagacctttctttcatccatctcctcacctatggttactatcctcacaatcccatttccctctatgtacattttactttataacatatgttctcatacacaaaaaatacaataaaaaattttccattatccaacagaatttataaagcctacaaaatttctaaatatatcattttatatgtaatgaatatgcttgttatttcccattaaaaaaaaatgcagcggccgggtgtggtggcttatgcctgtaatctcaacactttgggaggccgaagtgggtggattgcttgagctcaggagtttgggacccacctggccaatgtggcaaaaatctgtctctactaaaaacccaaaaattagccaggagtggtggtgggcacctgtagtcccagctactcatgaggctgaggtgggaggattgcttgagctcagaaagcggagtttgcagtgagccatggttttatcactgcagtccagcttggcgaccacttgttcttttttgcttgtttctttgtcttttgctttactttgcatcatagagatacgggtgaaaatttctttaaccctttaagtgtttctactttgtctcatatgctatacctcatttgttacttggagtatactcttggccatgctattagaaatggatgatgtaaaaatggcgccccctgaagtcaagcaatgtgaaacatttgtaaatttctacaacaaatgccctaaattgtagtcgcttaattaaaataattattttctatttactgtaatagtcaacaggtaagaaatgcagtcttgcatggatgtcccactaaaaaatatatgccatcttttagtccgttgatacttagcatattgccctcatcttcatggacaaaaattggcaatttttctgtaaaatctctctttcatattactgatgacaaaattctgcactttatctgaggaagaaaatgacaagactgacatgtgggactcacttctcactgtataataccatccttggctcctgccccaggataattttgatatttttaattatcaaaccaaaaccaataagttatataaaatataggcaaagttacattcactgggagaattttagcactctcaaagtaacatatcagttcctattatccagtaaattcctaccacgtcccatgctcccggaagtgtgtccggattcatgtttttctgataggtgaatgcaaagtcactagccattgccatttgccagggattcagagagacagaagtgtggaaattaacatttagatgtatgagaaatatatgcaagaaactgagactgagcaggcaatttgtagattgtatacagtgtagcctaaacatgtttgcttcagtgaatttgtmatttcttgcatggggtaagtctaaaattatttattgtttaatttttttcattagaaataaaccctcttggaagtaattaaaatgcatatttcacaaaaaattagtgcgatgatgatgacaatcatgtaacttgcaaaacttgagtgttgttttatcacaaaccttatgaaaacagatgcatccttgccttaaaaaggagaaggaaaaaggaaatgctctgggcacagcatgaagcccagaaaaagaatatttccaacagccccatggaca

SEQ ID NO: 693063 - DNA, 3625 bp, Homo sapiens
gcagaaagtttgtatgcagggccatgtagagcttttatcctacagtaaatcctagtagtttgctggtgctgtgtgattttttttgtttgtttagggtttgtgtgtgtgtgtgtgtgtgtgtgtgtgtgtgtgtgtgtgtgtgtgaagcttatttattccatttcaagaaaaagaaaaatagacaaattagaataccaaaaataatttgcagccagtatcaaccaatttatattcaagctgaaaaattaaaatagctttcagagaatggtagaagcatattatttaaaaaacaaactatgaagacatggacagaagcatgtagacatagataacagaaatttaaagtaaaaagtagaaaatgaaattattcccttttatacctgaaagcaaatgatttccatgattctaagcctctgtaaaaagcagcaacaatttcatcattttcctattcactcttcatattatctaaatcaggattctgcaaaattattttccttgaattacttttaaaacataccagaaatgaattcactactctaattatcacagcaattcagggaattattaaaaatcaaatcaaatcaaatgaaacttcgtaagttgtttacaaaaaaacttcaggttcatttgcttttaatgcaagacatggcaatgtatctcggcctgtggatgtcctctccatgttaatagtaagtgcaagtttatgaaaagactagacaccgacaccacctggggaaatcaaagcttacttacctaaaatgcacaggagccaagaagcatgtttaagttcatgggagggtaatgaatgctgttctctagaacatgtttcaaggagctggacacgtttccttaccaggggagactcacactgcagatcataatttctgagcaagtgagaagtgagagttccattgcacctgtgggaagctctatcctccaaagtgtagctttacacacccagcttgagtcattcttctttcaggtgtatctggacatactccagggactagcttatctgtgcctggtgcacttcatttatcacgattaaacaatatacaatttgactgaagggcacagtataggtcagtgcatttatgcataacagcaggacttattaatcatcctcagctcctgcaggctaagaaatcctgcttaaaatttatttgcatgcttagaactagaacagagcttcgaaactagaataagggtcacttactctgatgtctctggaagctcatgaggtcagccctgaacgctaagttgcacttcttgaaacagttttaatgcccacggctatctcccaattcattctgagtttgagaagggaaaaaaatgaaatgatatttagtagactcctataacagtttgggtaacaccagctgttttaacaaacaatcctcaaagttaaagtggctgaaagtttaaaatgtgtttctcattaataacattcaaataaaggcatttcttgtctgggtggcttttaccagggagtaattcaggaaactggcctccagtattgtagctccaacttcctagagggcttcagagttctcctttttcaaatgacacatgttgaaagaactggaagaaacatttatatgtaccaccctctaaaagtggtacacattaaccgggacacagttgcatggaaatatagccaagctatgtatccagaaagaagaaaaaacaagtgtggtaaagagctatcagtctatgcctcagcttttcaaaatccagtcttacggcgcacagatctagagagaatatgtagaccttatattatgtaaaggcattcacagaactatttttgttgttgttaacatacttgagcttccctacggcaatgttcttgtaggtttcccagactaatagccttcaaaatggaggtgaatatatacatataagaaaaaaataagtaacttaagtcttctaataagatatgttttataaaaatatgaagaagatatagtaacagctccttatagcagtgtaagacctttctttcatccatctcctcacctatggttactatcctcacaatcccatttccctctatgtacattttactttataacatatgttctcatacacaaaaaatacaataaaaaattttccattatccaacagaatttataaagcctacaaaatttctaaatatatcattttatatgtaatgaatatgcttgttatttcccattaaaaaaaaatgcagcggccgggtgtggtggcttatgcctgtaatctcaacactttgggaggccgaagtgggtggattgcttgagctcaggagtttgggacccacctggccaatgtggcaaaaatctgtctctactaaaaacccaaaaattagccaggagtggtggtgggcacctgtagtcccagctactcatgaggctgaggtgggaggattgcttgagctcagaaagcggagtttgcagtgagccatggttttatcactgcagtccagcttggcgaccacttgttcttttttgcttgtttctttgtcttttgctttactttgcatcatagagatacgggtgaaaatttctttaaccctttaagtgtttctactttgtctcatatgctatacctcatttgttacttggagtatactcttggccatgctattagaaatggatgatgtaaaaatggcgccccctgaagtcaagcaatgtgaaacatttgtaaatttctacaacaaatgccctaaattgtagtcgcttaattaaaataattattttctatttactgtaatagtcaacaggtaagaaatgcagtcttgcatggatgtcccactaaaaaatatatgccatcttttagtccgttgatacttagcatattgccctcatcttcatggacaaaaattggcaatttttctgtaaaatctctctttcatattactgatgacaaaattctgcactttatctgaggaagaaaatgacaagactgacatgtgggactcacttctcactgtataataccatccttggctcctgccccaggataattttgatatttttaattatcaaaccaaaaccaataagttatataaaatataggcaaagttacattcactgggagaattttagcactctcaaagtaacatatcagttcctattatccagtaaattcctaccacgtcccatgctcccggaagtgtgtccggattcatgtttttctgataggtgaatgcaaagtcactagccattgccatttgccagggattcagagagacagaagtgtggaaattaacatttagatgtatgagaaatatatgcaagaaactgagactgagcaggcaatttgtagattgtatacagtgtagcctaaacatgtttgcttcagtgaatttgtcatttcttgcatggggtaagtctaaaattatttattgtttaatttttttcattagaaataaaccctcttggaagtaattaaaatgcatatttcacaaaaaattagtgcratgatgatgacaatcatgtaacttgcaaaacttgagtgttgttttatcacaaaccttatgaaaacagatgcatccttgccttaaaaaggagaaggaaaaaggaaatgctctgggcacagcatgaagcccagaaaaagaatatttccaacagccccatggaca

SEQ ID NO: 693064 - DNA, 634 bp, Homo sapiens
gtatttatgcatatatatatatatatacatatgcatatatatatacatatacatacacacacacacacacacacacacacacacacacacacataaatatataccacagtttattcactcattgattcacgggcatttaggctggttccacatttttgcaattgctaattgtgctgttataaacgtgcatgtgcaagtatcttttttgtgtaatgacttcttttcctctgggtagataaccagtaagattgctggatcaaatggtagttctacttttatgaattgtccttgtttttctttaaaagttaatacttttgatcactatagtttgttagtgttggattgtttccactttgaaatttctaaactttttcccttcataatgttaaaacaagttatgttagatgccctttcaacatgaaaggtctgtagttaagatattacatatattttattgtttataataaaaatctagacataagaagtgccaagtgttaattataatattttgcacagtatcttttttcccatgatgtgttaatatctacaatttcattaaatgttgatgttattctctaytgagattcagaagcctagggagctatgtgttcattttggttatttttgttgttat

SEQ ID NO: 693065 - DNA, 733 bp, Homo sapiens
tttcctgccagtcagtgtggcaattcctctgggatctagaactagaaatgccatttgacccagcaatcccattactgggtatatacccaaaggattataaatcatgctgctataaagacacatgcacatgtatgtttattgtggcactattcacaataacaaagacttggaaccaactcaaatgtccaacaatgatagactggattaagaaaatgtggcacatatacaccatggaatactatgcagccataaaaaaggatgagttcatgtcctttgtagggacatggatgaagctggaaaccatcattctcagcaaagtatcacaaggacaaaaaatcaaacaccgcatgttctcactcataggtgggaattgaacaatgagaacacttggacacaggaaggggaacatcacacactggggcctgttttggggtggggggaggggggagggatagctttaggagatatacctaatrttaaataacgagttaatgggtgcagcacaccaacatggcacatgtatgcatatgtaactaacctgcaggttgtgcacatgtaccctaaaacttaaagtataataaaaaaaagaaaaaaaaaagaaaaccttaaaagctgcatttaatgaaataggagagggagtttgtgggccttgctctaatttttgaagttttggtatgttgtctagggaagcctgacttataaaacgcagggccagaatgaattggccatcagg

SEQ ID NO: 693066 - DNA, 1060 bp, Homo sapiens
tggcatcttagcccagttcagcagcgttttaggcagctttcctggatgctcagacacttagtaataatatgcttgaaaaaaaaaagccctttttttccctactagctggaatggattccgttgtctgtcactgaaccctgatgatacatcttctacacactgtgtgggacaaggccccatggaagtcccaagtcagtaacctgaactccccaccctctctgccaagaaagagcttttttctctcagtatccatttatcggtcccaggggagctctctgattggctgtgcttgggccagtcattatctcctggaccaatcacagtggccagagagatgagatgccaagatcaattggtcaggtccagatcatttcctgcttttgtgaccaggcgggaaagggcctatctccagaagtgggatgagaaagcttgggcattcctaccacagcctgtctgacaacacctttaccccacaaggaggaactattagtgaatgccacacgggacactgctgtaatgaaacactgaggacaggagattatgacaagagtcccacagttcctgctcatgggtgatcatgcctgttcaccactaatagcctgggaaggacgcacaactgtccccatctttaccccgacaatgctttgggtgggagggggaaactgaggcacagaggaatgaggaggcagggcgcggtggctcacgcctgtaatcccagcactttggaaggtcgaggtgggtggatcacttgaggtcaggagttcaagaccagcctggccaacgtggcaaaaccccatctctactaaaatacaaaaattagctgggtatggtggcaggtgcctgtagtcccagttactcaggaggctgaggcaggagaattgcttgaacccgggaggtggaggttgcagtgagctgggatagcaccactacactccagcctgggcgacagagcaagactccatctcaaacaaacaaaaaggaatgaggaggaggctgggaggcagggagagagatgggagtttgaatccaggcctcccaatttgctgtgcattgstggacc

SEQ ID NO: 693067 - DNA, 584 bp, Homo sapiens
catattttaaatttctagcatttatttgattctttttcacagtgtccatctctgtgttgaaatttctcatgtgttcatgcatgttgtccatgtttttgcactggaatctttgctgtgttgataatatttgttttatatttccagttgtttcattgtctggatgatattttagtctggttctcttgattgtctgtggaatgaagtcaattmttacaagaatttcatggatgcagaaactgaggctcaaggaggttagatgagtactcaaaatcacggagccaagaactgatgaaatgaagtcaaacaaatttcaggctttatcttctgcccactaaactgtgctgctctataatatggacacaataaatagctactgaacaggtgattacatgacctggaattctcaagcataaaaatctgtccaatgttgcccaatagaaatgcctctggggacccaaatcttgggacacagctgagtgggaagccactaggagcttatacctatgttctgatggtgtagaactatttcaaaaccccatgagaatgtatgcatttggtaggtaagtgtcactgtggccaagtga

SEQ ID NO: 693068 - DNA, 584 bp, Homo sapiens
catattttaaatttctagcatttatttgattctttttcacagtgtccatctctgtgttgaaatttctcatgtgttcatgcatgttgtccatgtttttgcactggaatctttgctgtgttgataatatttgttttatatttccagttgtttcattgtctggatgatattttagtctggttctcttgattgtctgtggaatgaagtcaattattacaagaatttcatggatgcagaaactgaggctcaaggaggttagatgagtactcaaaatcacrgagccaagaactgatgaaatgaagtcaaacaaatttcaggctttatcttctgcccactaaactgtgctgctctataatatggacacaataaatagctactgaacaggtgattacatgacctggaattctcaagcataaaaatctgtccaatgttgcccaatagaaatgcctctggggacccaaatcttgggacacagctgagtgggaagccactaggagcttatacctatgttctgatggtgtagaactatttcaaaaccccatgagaatgtatgcatttggtaggtaagtgtcactgtggccaagtga

SEQ ID NO: 693069 - DNA, 1447 bp, Homo sapiens
tttttaaacaattttttaaagtgaagaaaatgactgccctttagccctatgaataaataaaacaataacaagattttataatctaatcttttaaatttaacaacatacaaagaatatttttcccatgtcaccaaataattttctacattatyttgacacttgcaaattatcccatcttataaatgagccattttttaaccaatctaatattcctatgtatttacttttttttataagtttaaacaattaaaattccaggtaataaatatttaggaacatccataattgttttcttacactgtattttttagaagtagtgttgacaataataaaacatgctgatcatatttacatctcatttataacaatcttataaggtaagtggtgtaattataccccttttataggtgagaaacttgaaggtcacagtggttaagtaacttgaccacaagtacctagacaatgactactaaggcaggtatttaagcccagggagtccaaacaggtagacttcattttaacccttcgatttccaggaattcattcattcagagacacaatgagaaaatcaggagattctaattatctccataatatagatgaaaaaaacaggtaagaaaggaaaaaaggacttgtccaatattcaatgaaccaggagaagagttagaaaaggaatgactcagccaggcacggtggctcacgcctgtaatcctaacactttgggaggccaaggcaggtagatcacttgagatcaggagttcaaagccagcctggccaacatggtaaaaccccgtctctactaaaaatacaaaaaaaaattagcctggcgtcgtggcaggcacctgtaatcccagctactcaggaggttgagggaggagaatagcttgaacccaggaggcttgcagtgagccgagatcatgccgctgcgctccattctgggtgccagagcgagactccatctcaaaaaaaaaaaatgaatgactccccccgccaattaatctccatctgagcacagagtaccaaggtgtacaagtcatgtcacttttagggaaccagcaagaaagactttctcatgagtggtctcaattctcttgtcaggctgggttaatagaaaactagcaggtggagctcctccatcccactgtatttcccttaaccataaaaattcttttttacctgttatatattggcctgccatggaaggttttgttatgaagaaaaaataagtgagaaagtgttttcatattttttaaattagatataaaagtttttaaaaatgtttccaaatctctggactaaataatgtctaaggtatttcccaactctaacaatctagcgtttcctctgatatgtattgatggtgtaaggaaaatggctgtgcttcagtcaggagtaggctgaggtagacatccagtacagcatgacacactgggtttggagtgcaggg

SEQ ID NO: 693070 - DNA, 1447 bp, Homo sapiens
tttttaaacaattttttaaagtgaagaaaatgactgccctttagccctatgaataaataaaacaataacaagattttataatctaatcttttaaatttaacaacatacaaagaatatttttcccatgtcaccaaataattttctacattatcttgacacttgcaaattatcccatcttataaatgagccattttttaaccaatctaatattcytatgtatttacttttttttataagtttaaacaattaaaattccaggtaataaatatttaggaacatccataattgttttcttacactgtattttttagaagtagtgttgacaataataaaacatgctgatcatatttacatctcatttataacaatcttataaggtaagtggtgtaattataccccttttataggtgagaaacttgaaggtcacagtggttaagtaacttgaccacaagtacctagacaatgactactaaggcaggtatttaagcccagggagtccaaacaggtagacttcattttaacccttcgatttccaggaattcattcattcagagacacaatgagaaaatcaggagattctaattatctccataatatagatgaaaaaaacaggtaagaaaggaaaaaaggacttgtccaatattcaatgaaccaggagaagagttagaaaaggaatgactcagccaggcacggtggctcacgcctgtaatcctaacactttgggaggccaaggcaggtagatcacttgagatcaggagttcaaagccagcctggccaacatggtaaaaccccgtctctactaaaaatacaaaaaaaaattagcctggcgtcgtggcaggcacctgtaatcccagctactcaggaggttgagggaggagaatagcttgaacccaggaggcttgcagtgagccgagatcatgccgctgcgctccattctgggtgccagagcgagactccatctcaaaaaaaaaaaatgaatgactccccccgccaattaatctccatctgagcacagagtaccaaggtgtacaagtcatgtcacttttagggaaccagcaagaaagactttctcatgagtggtctcaattctcttgtcaggctgggttaatagaaaactagcaggtggagctcctccatcccactgtatttcccttaaccataaaaattcttttttacctgttatatattggcctgccatggaaggttttgttatgaagaaaaaataagtgagaaagtgttttcatattttttaaattagatataaaagtttttaaaaatgtttccaaatctctggactaaataatgtctaaggtatttcccaactctaacaatctagcgtttcctctgatatgtattgatggtgtaaggaaaatggctgtgcttcagtcaggagtaggctgaggtagacatccagtacagcatgacacactgggtttggagtgcaggg

SEQ ID NO: 693071 - DNA, 1658 bp, Homo sapiens
cttccattcctgacatttgaaccagctcctgcacttgaaggacaaggcagccactgggcagctccgggaggcgggaggcgtgactccttcatatcaggccatctggaggagcaccagatttccctcttgtgaaacaaccccccacagtggggatttaatggtcaccacacaagccccaaaaaaccaggccctgcagagccatgacttcacaggggagaaaaccagcccaagaggctgccctcacccaacacttagctctaagtccagactcttaaaggttctgttaaagatctgcggccaggcgcagtggctcacatctgtaatcccagcactttgggaggccgaggtgggcggatcacgaggtcaggagagcgagaccatcctggctaacacagtgaagccctgtctctactaaaaatacaaaaaattagccaggtgtggtggcgggcacctgtagtaccagctacttgggaggctgaggcaggagaatggcgtgaacccaggaggcagagcttgcagtgagccgagatcacgccactgcactccaacctgggtgacagagcgagactccgtctcaaaaaaaaaaaaaaaaaaaaaagatttgcctagtgagcttggccaacccaagagccttcctgggctctcaggtttcttgaggcaaaacttctaaagatgcaaatagaatccttggtagctacaaagctcatctagccaaattataagtactatccaagcccaggattcattcttgaagatgagatgtaaaagcactgctgggcccttgcaaagggagagatcagagaaaataggagaacgaacaccagctcatgccaatctcagtctcatgagctacagagaaaaagagccaaaaaagtttatcctggctcagccaccttctggctttgtagctacaggcaagttatttaacttttctgaatgttggtttttccatctggaaaaaggagacaggaaaagctgccactggaggctaccttaagggtcaatgagtgaaatggggttgagtgcttaatgaactgttaaaacatgacacagatgggtgaggtgacatctgactgctcttcacagcagtccttgcatggtgagcagatgcaatcagtgtgctcgttcattcacttgttcatcaaacaccaacagtacccacttgtgccaggccttgtgctgggcaccgtaggggctatggaaggagtaagacacagtcatgctctcaaggaactcgctgtccagcagagtgataggacatgaatacatacttctagcaaaggctgagtagcattaggcaggtggccagatgaggtcagagctctggccctagtgccctgtagtaagttgcgagggagtaggaaatgaagacaaaacagcaagagcacaggtccagcacaagaaggtgaaggacatggaaagaggagcagagcatgataaagctacaaaagtagggggcaagtcatgaggtccgggtcactggggagccctggacaggctctgaatgggagatagactagactgacaaagcagctctttctggagacctcctgtggagggtcccctcttctacccttgggagacgaggtgtcattcacttyacgatacacatggggaaaggaagttggacaggggaaggcacttgtctaaggtcactc

SEQ ID NO: 693072 - DNA, 613 bp, Homo sapiens
aaaaggtttctttctgggtgtctgtgtagcacttcatactcctcagaacggtgttacctccctgcctccagggttcaattctgttcagcaaaagcttactgaataccttgccctgtgctgggaactggtgggacagagagaaatttaaacagatcatttcaacataacatgacaaatgctttgattgaataatatatggagtgttcagggaaggagagaaagggcacttatcatggtagaataagggaagggcacatgataaaggaaaacgtcctggataactgcatttctcaggggcagaaaaggggattgcctgaacaaaagcatagagtcaatgatgcatatggaagggcacatgctatttgacattgctagagcatgacrtatgaggcagagagagatgagccattactcttggagaagaaggagacaggacacaggaattttgtaagacatgctatggagcttagattataaattatagatcagttcttcccaaatatggctacatatgaaaatcatctgatggatccttagggaccctgattaagtaagactggccaagggacctggaatctgcattttagaaagctcttcagcccggggcaccaat

SEQ ID NO: 693073 - DNA, 614 bp, Homo sapiens
aattaactaaatttattgattaaattaatttattagataaataatttattaatttcaacaatacagtaatagcaattatactttgcaatcaaagcattaccacaagtcattggatcattttaggtgtggaagggactgaacagaatgctcttagataaraaaacaggctgagagaaatcaaggcactgcccagggtcacatgactggtcaagtcttctgaatatcgtgtgttgcttcttctactaccagtccaaacaaaccattgtaataactggctactcaaatcatgtagatgacagttgtatatctaaaacttgtgctttaatacttaggtttccatctatatgctctcatattctgggagaaggattttaattataactaataaaaagagttttattgttagacatccctgcactttgagctgctggctaatagagtaattgattattaaagagcatcagtttctctagatgttgagctatttcaagttttagcaacttaagtaacctggataaaatactaaaagccactacacattataaacaattcaattttatttaattatatttaattctgacaacctcttttgtgcatcaggaaactcagagagt

SEQ ID NO: 693074 - DNA, 614 bp, Homo sapiens
aattaactaaatttattgattaaattaatttattagataaataatttattaatttcaacaatacagtaatagcaattatactttgcaatcaaagcattaccacaagtcattggatcattttaggtgtggaagggactgaacagaatgctcttagataagaaaacaggctgagagaaatcaaggcactgcccagggtcacatgactggtcaagtcttctgaatatcgtgtrttgcttcttctactaccagtccaaacaaaccattgtaataactggctactcaaatcatgtagatgacagttgtatatctaaaacttgtgctttaatacttaggtttccatctatatgctctcatattctgggagaaggattttaattataactaataaaaagagttttattgttagacatccctgcactttgagctgctggctaatagagtaattgattattaaagagcatcagtttctctagatgttgagctatttcaagttttagcaacttaagtaacctggataaaatactaaaagccactacacattataaacaattcaattttatttaattatatttaattctgacaacctcttttgtgcatcaggaaactcagagagt

SEQ ID NO: 693075 - DNA, 1476 bp, Homo sapiens
tgaaatcagaaaaccccaaacttcatggccttgttttggctcagatgacttgaaataaccagagacatagccccaagcagtcaaggtatttgccatgttttcttagatttcagtaattgaggctatagaattagtggctgaaatgaatatttcttaatttttgtttgtttgcttgtttgagctctattgacttttctattgggaattgttttatttttttcctctctattcttttttttttaaattaaacccaatcaaacttacagcatccccctctattcttgaatgaataagaaaagttgtttccaagagtatcaggcattaatttgaactcatttctgtccttacatgtaaccccaatccagacagtttattagctaatgagatgtaacattattccatttgtcaagattagatttgtggggaaaattgcagaaataacctccttcttcactctttgcatcaacgtggtgattaactcatgcttggcaaggtgttctgcaaagccagaagccctctcaggctgggaaatggctctgaactcatatccatgggtgtgcactttgctgacaggatgaatgtaaaccaggatttgaaaaggtcttttcattatttaagtaggagagaatgattttcaccaattatatttgactgcctagaaagcatagtatattcttttttttataataaacactgtgagagcagtttccaaattttatttctcaaaatcaaggggttcccacaaagtgagatggggacagggagaggggagggtcagatgcatattctgacagcttacttcctaatttccagcctagttgctctgcttttagctctttttaaatagcaacatgttacatttgaaaacaacgctataaagtggacttgctgctttaaaaattaatttgctacctgaagaagaaaagttgtacggtataaggagcagcagggtgaggagagaatctgaatccagatgtggtagaatctgctaattgttctaaacttctttttagtaattaaccttgatcttccagctccccttcaattttagctggccacaggccatccagctagaagctgtatttcccagccttccttgaggtggtcctgagtcatataactaagtcctgatcagtaaagtgtgagcagaagtggcgaktgtatattctgtatcccttctcaaaaaaaggaagctacacctgccctccatatcccaattgctggcactgccaccttagtccctaagatggaagccgtaagttgaggatgtcagagctatctcaccagactgtaacagctccttttgaacaagcatgtgagtgaaaaataaaattccatgttgttgaacctttggattttgggtttttgcttttttttttcttttttaaacagcatctcagcttttatccaaagtaatgtaacaaaggccatgcaatgaagttgtgaagtctgtttcattggaaaggctgacttaat

SEQ ID NO: 693076 - DNA, 668 bp, Homo sapiens
tgagacctgctgtctttcctttattgtcccttcctctattgctctcagactgttgtgctttgcttgtgttgtgggtgttttgctctgccataatggytctcatgatgaactataagcttcattctaggtcctgggacaatctacagttcatgagattctcacctatgggttagggacccttggagatttgcagagttgcaaagtcaagcaccaatttattctttcttaatcaatggatactaaaagtgcaatcattagtacatagaaggcttgtaacaatttttgatggtttcagaagaagattgagtaagcattcaatagatagatgctactgagacactaatatgtagcttgacatggttaaatgccttatgtgaagcacttaacaagtgttaaaacatcacatttaaacttcacaacaatcttattgctggcattattattcttattgctttgaaataaaaaaaaataggctgggcatgaaggctcatgtttgtaaccccagcactttgggaggctgaggcaggaggattacttgaacctaggggttcaaggtcagtctgggaagcatggagagacctcatctctatgaaaagttacaaataaaaaaaaaatagctagatgtgatggtgtgtgcctgtagtcctagctactcgggaggctgtggt

SEQ ID NO: 693077 - DNA, 1476 bp, Homo sapiens
tgttgtatctgaaaatgcatttatgtatgtgtgcagttatgaggtcaggtagagagggagaaagagactactgtctgttgtattgtttcccagtttagtgtagatgtcaggcttgatgataaaaaatgagaagatggaaaggagataactatttattgaccttactggtgcacttaacctctcacactggaattttttttttggtttataaaaacctcttgatataaataaataaataaattaattaattaattaatttgtgacttaaatgaaaatatctcatattttatgaacaaatgtggcagtgaatatgtactatatattagttaatgttaacataccttagttttaagatccgtagaagactccatttgacctttacaatgtggatgtttttccttaccacaggtggaaattgatttttacttctctgcagctaagtatgtggcagtcttggccacatggtgactcagcagaggagcctatgtactggctgtcctgatgctcttcctgattcaactgattctctacacttgatcttagccaaaaggccgagaagcaatgattcaactgattctcaaaaggacaccgctgcaggaataaacccacttctaaatatggtacacttggaaagttgtccagctcgcaatgtcagagtcacagacttcatgcacactcatctcaagtcaatgttatctaacacatttccactaattattggatgacactagcaagaaactctgatatttttcacctaacctttgctaatttaaatgtggccagcccaccctcatactgcattgtgatggggatataaaagccaatgaaagatatcattaattgttaacaatagtcatcactgacaacttcctgttgaatgtcactgttactcctgctactgctactaccactaccatttatgaagctgccattattactaactcaaagctttcacagatacagaaacaggtgtattttttgttttgttttgttttttgtttttgtttgagagagagtcttactctgtcggccaggctggagtgcagtggcacaatctcggttcactgcaacgtccgcctcccgggttcaagcaattcttgtgcctcagcctcccgagtagctgggattacaggcatgtgccaccatgcctggctaatttttgtatttttagtagagacggggttttaccatgttggccaggctggtctcaaactcctgacttcaggtaatccacctgcctaggcctcccaaagtgctgggattacaggcatgagccaccgtgccyggccagaaacaggtgtatctttaaagcataacttcctctctgcatcttgcttcccctctttctgtcccttctcctctcccacccccacagttttggcttcactttgctcaggctgtgacaactgtctttaagggagctaacttttatctgactgtaaagccaagcaaactaatcttgcaaaactgttctgc

SEQ ID NO: 693078 - DNA, 602 bp, Homo sapiens
tggttaagtacagcataacccgcgaccaagaacccgggggggaggtttttatactgacatcttcctgctttctgttctactttgcagattgcagctgtttcagctgcaatggtttcctgagctcagtgggactttctcattctactgctctacagtcaggttattacacccagggccactgttcaccgcgtagagtttgcttatcagtttctcttctttcagggatcatagtcacgccttttgatggcagtgctccaatgcagttgctccataaattctttccactgtaatggttgatkacagcagaagagctagcatggaaccaactattctaccacagctaaaattggaggttgtaatattgtttaattttttaattagaaagtagaaatgaatataagaatttgtcatgagctaactagcacccatgttatacgctagtaatgcaaatattggttaattattttgaaagtccactttaaatccactttatgttatggaactacgattctatttaactatcagatccttgtacattgagaaaaagattaaatgtttacaagtaacattaaccttccaatgccttgggaatgtgtcagctg

SEQ ID NO: 693079 - DNA, 618 bp, Homo sapiens
gatctcatcaaaagtgatattcccattgtgtttaatgtttttctgtttctttctgtctcttggtggtttcttgagggctttgatgatcggggcagaggcagaaggcaccacctcaatctgggcctgtctgttctcaatggtcagtttcactgtaatcctcaggcccttccagtcacccgttgccttggcaatgtcatcaccaaccttttttggagacagacccagggggccgatcttgggggccagggcagaagtggcaccgacttcacctctggtgcacctcaggtatacgaccttgatctcgttggggtcgaacttcggtggcatggtggaggcagctggtgtcggatgaacccagattcaggatgaccgaagaaagttgcaccttggcctcctccgagccgaaagccgagagcttctctctcttttttttttgagatggagtctcgctctgtcgcccaggctggagtgcagtggcacaatctcggctcactgcaagctccgcctcccgggttcccgccattttcctgcctcagccttccgygtagctgggactacaggcgccctccaccacacttggctaattttgtttttttgtatttttaatagagacagggt

SEQ ID NO: 693080 - DNA, 379 bp, Homo sapiens
taaaattcaacccttaaaggcagtatttaaaataaagtcacattgggaatgaaatgtatctttcagatatgctctcagtaactgaaaaaattstaacagtaaattatccgttcttcttcagatttgttatacttgcaagaagtaatactttctgtcattcacaggatagaaaatgtctaatatataaacttattgtagcaagacacatacattgtcatgccattagctcaggctagtgcctggtgggatgaaagacactctcattcaaagtctatttttttattgttgattgaagatttttaaagcaaagcagttaattctcattacattaaaaatttgtttttattagacaacttataattatcttttatctctctga

SEQ ID NO: 693081 - DNA, 652 bp, Homo sapiens
tctgactaaattttgtatttttactagagacggggtttcactatgttggccaggctggcctccaactcctgatctcgtgatccgtccaccccgacctcycaaagtgctaggattataggcataagccaccacacccggcctcttttttttctttttctttttttatctggagactgagttatgcactcgttgcccaggctggagtgcaatggtgcgatctcagctcactgcagtctccacctcagcaggagagcaggaatcttcagtgatccacgggcagatctgcagccattgtgggcacctgttcctcccgcgacctttgtgcccgtgtctctctctcctgtacctattgcacgaccccccacgtccgcctcctgtcattgccagcaagtgccttgcatgggtacctggctgcacttattaatccattacggtcgctctgtcactggtgccattatgtgctcacgcgcccactccctcaggtttagaaggcgtgttgcccggcaacagaagaatctgctggcttagcctttggccgagttggcagctggacgaggacgctcagagcccagctctcgagagttcaagcatccgacggttccccactgctcccaggagcggttacccgggcactctgtgcccctcattcctg

SEQ ID NO: 693082 - DNA, 652 bp, Homo sapiens
tctgactaaattttgtatttttactagagacggggtttcactatgttggccaggctggcctccaactcctgatctcgtgatccgtccaccccgacctcccaaagtgctaggattataggcataagccaccacacccggcctcttttttttctttttctttttttatctggagactgagttatgcactcgttgcccaggctggagtgcaatggtgcgatctcagctcactgcagtctccacctcagcaggagagcaggaatcttcagtgatccacgggcagatctgcagccattgtgggcacctgttcctcccgcgacctttgtgcccgtgtctctctctcctgtacctattgcacgaccccccacgtccgcctcctgtcattgccagcaagtgccttgcaygggtacctggctgcacttattaatccattacggtcgctctgtcactggtgccattatgtgctcacgcgcccactccctcaggtttagaaggcgtgttgcccggcaacagaagaatctgctggcttagcctttggccgagttggcagctggacgaggacgctcagagcccagctctcgagagttcaagcatccgacggttccccactgctcccaggagcggttacccgggcactctgtgcccctcattcctg

SEQ ID NO: 693083 - DNA, 652 bp, Homo sapiens
tctgactaaattttgtatttttactagagacggggtttcactatgttggccaggctggcctccaactcctgatctcgtgatccgtccaccccgacctcccaaagtgctaggattataggcataagccaccacacccggcctcttttttttctttttctttttttatctggagactgagttatgcactcgttgcccaggctggagtgcaatggtgcgatctcagctcactgcagtctccacctcagcaggagagcaggaatcttcagtgatccacgggcagatctgcagccattgtgggcacctgttcctcccgcgacctttgtgcccgtgtctctctctcctgtacctattgcacgaccccccacgtccgcctcctgtcattgccagcaagtgccttgcatgggtacctggctgcrcttattaatccattacggtcgctctgtcactggtgccattatgtgctcacgcgcccactccctcaggtttagaaggcgtgttgcccggcaacagaagaatctgctggcttagcctttggccgagttggcagctggacgaggacgctcagagcccagctctcgagagttcaagcatccgacggttccccactgctcccaggagcggttacccgggcactctgtgcccctcattcctg

SEQ ID NO: 693084 - DNA, 1126 bp, Homo sapiens
atatattaaactcatgtgtttgaactatcatggttttgctggaaagtaaaatagatatttcctgttagaattaattatttgaattgttagatgaaatctaaatgcacaaagttcagaatcctcatagcaagaataaaataatgtcacaaagatgatcttcaacaatagaccctcttgccactgcaactctaatcataccaatacttttatataccctcccctgccgctgacaaaaagacatggatcatttaccttttacaaactctaccaaaactttaaaaatggaactattataagaacactgaggcaaagacatcaattttcaggactcctgaaaacttgtgttgtctgatttctaacaagaaataaaaagcattatagcatgtggttttctacttttgagtgtttgtctaggatcctctgaattttaatgtggcttatccttataatttgtgatatgatgtttgttaaataataccttcattcctttttttaattaggtgaggcattatgaagagccattgtttaacaaacataagtaatactaataagatctaatttttaaatgaggttagtattatattgattaatatacaactgaaagttcagagaaatgtttttttgaaaatttctcactgaagtttttaaatctgtaaatgttgtatttggaaattttatgagctagaaacagatcatgtatagattttcattggtcaaggaaagacaaggtaacaaaggattgttacaagaaatattttgcactaataatattcatgttgcatgtaaccttgatgagaaaatttttataagcagcaaccataatgttagggctcagtgattatgaaaaactacagtggctaagagaaaataaccttgacactataatataaaatccctgaagtgttatggatgactatgttgtataaatgtaacttagaaacatattcatgctgagatttaatayttgggggtcagtgcactggtaaagttggaaaaaaataaacatatcaactaaacaaacttcattattatgtccaccagggagtctcagtatgaaaccttttcatatcaagaataattttaacacgagtcaaaaatcctaaagcatgcaggagatcaactaagc

SEQ ID NO: 693085 - DNA, 1937 bp, Homo sapiens
gactaattttccaaacatttatattcttttttttaagacaggaataagtaatatttgaaagatgtaaatgaggagaaaagtgaatgcaacatttctgtttatatagaaaatttattctgaggtgcagtgttaatagtttgggcttccctttttaattttttctgatattgaaatttttattatttaatacatgctaagccttctagatatggactccattgctgtatggtaattaatcaaattcctacctcgaggaacttgaaatctaatggcattacatatatgtatataatatttaatattggaactcaaatatagaattaaaatataagtgaacagggatagctaatgtggaaatgcactaggttgaaactttaatcttcccttttcaacctttctttaaatggggagtcaagctactaagtaataatgaaaggaataattattgagagttatgagaggagataaattaggtgaatttctacaattggaatactattggatgatcatacagaaatagaaaagatgacatgcaccatataacaacctcctgaggtaggtaggcaggtattatctcagttttaaagatgagaacactgaagtcttcggagaaacataatggattcttcaaagatatacctctgccagccactcaagtggagctgatcatacctgctctggtgcccctaattgttcctttctcataaggctatgggatcacactgaacctgaaccaatagttcacatgattatcttccttactgcaacgtatatagatttgttacatggaaaatatatatgtttggagggataaaatttgacacgaagagatctttgtgagtttatgtatgtttaaacttttgagtggtataacaattgtgtggttttggcactgctgtggaactgtactgtatcttatccatcttttaatttctattattcagcataacatcatacatatagtaagtggccagtaattgtagaataaatgaattaagggatactctgaattttaagagaattggagctaagcatactaactttgaatgtaaaacagtattttttaaattatgactttattactttaagtggggtagaggcaaatatttgttttaaaaaaggcaagattcagagtcttctaacctcatatcttcaatgtttgaaagaataatgatgaatttattattttacacactttactttctttcatatctactgttccttttcttcccagtgtaactcaatctaacactctccaccacctccatcactgctccccttcttgaagctaccatgacttcacctgcactgctacaaatgatctccctgctgccactsttgccccctaccatctattctctactcagcagccagagcgatttttaaatgtgtcttaccacttccctagttaaacattttttgtgggttcccactctatttcataacctaacaggccacacaggtgtgctactgctgctaccgtgccttcttcttttaccaatttccccccactcacctgcttgtattggccttggcgttctttaagcactacttatgttgcacttgctctcccttccacttgaaatgtctcgcccattttatcccaaagttatttgaataatggtgtctctaatacagtagacatataaagctcccaatggactcctctgaaaagcaacacacgtttgggtagataagttgcgggtttgttaaagaaccagtcacagtgacttctagttacaaagcttttggaaataaagatggtttactctcattctgcaaggggatggcttgccatgtctcatggttgtcttgggaggttgacattactgtttgaaccatgaattacccggtatctatgttggtagaacaagcagctgttattccttctgtctccttcagtgtgttgtcacctctaccatcgatattttccagct

SEQ ID NO: 693086 - DNA, 1937 bp, Homo sapiens
gactaattttccaaacatttatattcttttttttaagacaggaataagtaatatttgaaagatgtaaatgaggagaaaagtgaatgcaacatttctgtttatatagaaaatttattctgaggtgcagtgttaatagtttgggcttccctttttaattttttctgatattgaaatttttattatttaatacatgctaagccttctagatatggactccattgctgtatggtaattaatcaaattcctacctcgaggaacttgaaatctaatggcattacatatatgtatataatatttaatattggaactcaaatatagaattaaaatataagtgaacagggatagctaatgtggaaatgcactaggttgaaactttaatcttcccttttcaacctttctttaaatggggagtcaagctactaagtaataatgaaaggaataattattgagagttatgagaggagataaattaggtgaatttctacaattggaatactattggatgatcatacagaaatagaaaagatgacatgcaccatataacaacctcctgaggtaggtaggcaggtattatctcagttttaaagatgagaacactgaagtcttcggagaaacataatggattcttcaaagatatacctctgccagccactcaagtggagctgatcatacctgctctggtgcccctaattgttcctttctcataaggctatgggatcacactgaacctgaaccaatagttcacatgattatcttccttactgcaacgtatatagatttgttacatggaaaatatatatgtttggagggataaaatttgacacgaagagatctttgtgagtttatgtatgtttaaacttttgagtggtataacaattgtgtggttttggcactgctgtggaactgtactgtatcttatccatcttttaatttctattattcagcataacatcatacatatagtaagtggccagtaattgtagaataaatgaattaagggatactctgaattttaagagaattggagctaagcatactaactttgaatgtaaaacagtattttttaaattatgactttattactttaagtggggtagaggcaaatatttgttttaaaaaaggcaagattcagagtcttctaacctcatatcttcaatgtttgaaagaataatgatgaatttattattttacacactttactttctttcatatctactgttccttttcttcccagtgtaactcaatctaacactctccaccacctccatcactgctccccttcttgaagctaccatgacttcacctgcactgctacaaatgatctccctgctgccactcttgccccctaccatctattctctactcagcagccagagcgatttttaaatgtgtcttaccacttccctagttaaacattttttgtgggttcccactctatttcataacctaacaggccacacaggtgtgctactgctgctaccgtgccttcttcttttaccaatttccccccactcacctgcttgtattggccttggcgttctttaagcactacttatgttgcacttgctctcccttccacttgaaatgtctcgcccattttatcccaaagttatttgaataatggtgtctctaatacagtagacatataaagctcccaatggactcctctgaaaagcaacacacgtttgggtagatwagttgcgggtttgttaaagaaccagtcacagtgacttctagttacaaagcttttggaaataaagatggtttactctcattctgcaaggggatggcttgccatgtctcatggttgtcttgggaggttgacattactgtttgaaccatgaattacccggtatctatgttggtagaacaagcagctgttattccttctgtctccttcagtgtgttgtcacctctaccatcgatattttccagct

SEQ ID NO: 693087 - DNA, 2097 bp, Homo sapiens
ggaaaattagccaagcatgatggtgtgtgcctgtagtcccagctacttgggaggctgaggtgggaggattgctggagactgggaggtcaaggctgcagtgagccttgattgcaccaagattgcactccagcctgggcgacagagtgagattctgtctaaaagaagaagacataccagcatgtggctgaaacagtgatggagacacccactccgcctacagaggctaaggcctgtctccaaacctttgctcttctctccgcctcagatgcctctcccctcccatctctgcccacagaactcctcatactcttcccagctcaagtttcacaatctccacgaagtttgccaaggtcacctcttcctgccgcatcctcctcctcctctatcatagccaacgcttatctgacattgccaagtgcagggctagaagcttcatatgtgttatctaatttaatgctcccaataccagtatgagaatggtgtcatcatccttttgtacacagaatccactgcagctcagaacaggtaagtggcttccccaaggtcatccagccggtgagatatagaggccatgttcaaatacaggtctctgagggcaaagcccgttcttaagcattaggagcccttgctacccatgagacagtggacatggcccccaacattgtcccttggtgctctctcttgatctttttcttttaaggtttgttttatatacttgtctccacccgggagaccaggagctgagtctcttgagagccaggaccttgacccagttgccgcatgctctcctctcttgttcccagccctcacccatgctgcccttccctcccttccctgcccacctggcaaatctgctgggctccaggcaaacacaagctcctccaagggccctccctgctccttgcaggccacctcttctcagggatctcacagttttccacggcactgaaatggctggtgaaagaatccgtctccctgagaccatgagctcctcaaggaagctgggactgacacctccatgtctccagggcccagcccaggacctggcacagctctgtgttcagtgttggctgaatgaatgaatccagtccaccatgaattgatcctgaagtggacctagagttggagggactagactattgattttgcaacttattaactatgggatctcagacaagtcccttcacccatttgggcctcagttttctcatctgtagaatggggatgatttgaggaaaacagaggttgaagcacttcataaaccgagttgctgcatagttgtgaggtgagatgatggaggttcccaagcccaggctccagggaaagactttggcacttgccccttgctaaacaaagcatgcaattttaaaggctcacagctatcgcagattttcctaaaacatgcgtcaatacaaaagttgttgagttcctttagagaaacactgtaacggagactccctgcactgacaatttagctgagcaagtttgctctggctgtgcacgccccagggattcctccatacctgcagctggaacccatgaagaaactttgggcctttaattagaaccatttgcccttccaatgaacggcaggtggctgggccaacttacaaagagatgctcattagagcagtatgtgccctttgatccatccgtctgactgctgggactctgtcctaaagaaataatcccaaatatggaaaggcttatgaacaaatacaccatctttggagtatttcttgtaacrgcagagaaactggaatcaaccggaatatccaatggggaataagttgctgatgtttcctcaactggatgggactttattactcactgagaagaaatggctgggaaggctttggagcaacataaagtatgtttatgatagaatgttaagtaaacaaatcaggttacaaaactatgtaccctgagatgaactatgcaaactatgcatataaatatcagaaataggctgggcgcggtggctcttgcctgtcatcccagcactttgcgaggccaaagcgggtggatcacgaggtcaggagtttgagaccagcctgactaacatggtgaagccccgtctctactaaaaatacaaaa

SEQ ID NO: 693088 - DNA, 2097 bp, Homo sapiens
ggaaaattagccaagcatgatggtgtgtgcctgtagtcccagctacttgggaggctgaggtgggaggattgctggagactgggaggtcaaggctgcagtgagccttgattgcaccaagattgcactccagcctgggcgacagagtgagattctgtctaaaagaagaagacataccagcatgtggctgaaacagtgatggagacacccactccgcctacagaggctaaggcctgtctccaaacctttgctcttctctccgcctcagatgcctctcccctcccatctctgcccacagaactcctcatactcttcccagctcaagtttcacaatctccacgaagtttgccaaggtcacctcttcctgccgcatcctcctcctcctctatcatagccaacgcttatctgacattgccaagtgcagggctagaagcttcatatgtgttatctaatttaatgctcccaataccagtatgagaatggtgtcatcatccttttgtacacagaatccactgcagctcagaacaggtaagtggcttccccaaggtcatccagccggtgagatatagaggccatgttcaaatacaggtctctgagggcaaagcccgttcttaagcattaggagcccttgctacccatgagacagtggacatggcccccaacattgtcccttggtgctctctcttgatctttttcttttaaggtttgttttatatacttgtctccacccgggagaccaggagctgagtctcttgagagccaggaccttgacccagttgccgcatgctctcctctcttgttcccagccctcacccatgctgcccttccctcccttccctgcccacctggcaaatctgctgggctccaggcaaacacaagctcctccaagggccctccctgctccttgcaggccacctcttctcagggatctcacagttttccacggcactgaaatggctggtgaaagaatccgtctccctgagaccatgagctcctcaaggaagctgggactgacacctccatgtctccagggcccagcccaggacctggcacagctctgtgttcagtgttggctgaatgaatgaatccagtccaccatgaattgatcctgaagtggacctagagttggagggactagactattgattttgcaacttattaactatgggatctcagacaagtcccttcacccatttgggcctcagttttctcatctgtagaatggggatgatttgaggaaaacagaggttgaagcacttcataaaccgagttgctgcatagttgtgaggtgagatgatggaggttcccaagcccaggctccagggaaagactttggcacttgccccttgctaaacaaagcatgcaattttaaaggctcacagctatcgcagattttcctaaaacatgcgtcaatacaaaagttgttgagttcctttagagaaacactgtaacggagactccctgcactgacaatttagctgagcaagtttgctctggctgtgcacgccccagggattcctccatacctgcagctggaacccatgaagaaactttgggcctttaattagaaccatttgcccttccaatgaacggcaggtggctgggccaacttacaaagagatgctcattagagcagtatgtgccctttgatccatccgtctgactgctgggactctgtcctaaagaaataatcccaaatatggaaaggcttatgaacaaatacaccatctttggagtatttcttgtaacggcagagaaactggaatcaaccggaatatccaatggggaataagttgstgatgtttcctcaactggatgggactttattactcactgagaagaaatggctgggaaggctttggagcaacataaagtatgtttatgatagaatgttaagtaaacaaatcaggttacaaaactatgtaccctgagatgaactatgcaaactatgcatataaatatcagaaataggctgggcgcggtggctcttgcctgtcatcccagcactttgcgaggccaaagcgggtggatcacgaggtcaggagtttgagaccagcctgactaacatggtgaagccccgtctctactaaaaatacaaaa

SEQ ID NO: 693089 - DNA, 614 bp, Homo sapiens
catcatgattatgccactgcactccagcctgagtgacagagcgagaccctctctctacaaaattaaaattaaaaataaataaatctagttctgtatacaggctgaaaaatttaaatccccacaatttacattgaggataatctcttaaaatatcagagaggtcatcttttaaatttttttctaattcaaagmagctgaaataatagaaacacaagatttcccctaagttgtccttttttacctgactggcttccagttcaatgtctcgctttttatgtaaaatttcttcctcaatctgcttttcaaaacttctccatgcagcatctaaatcagccagctctgtctccagggcttttatatcatcttcctgtttagaacattgtttttcgctgtcctttattgatttcttagccacatctaatttcttaaggtggtgagaagtgttttctttggctttaatgtactgaggcctcttctgatttaaaagggtttcaaccgatctgaaaagggaaaaatgtttgctttaaagaaaatttcatttctttaatatataaagggaagaagttgttttgatcaaaccactttaaaaaagaaatcctaaaaatcaactttca

SEQ ID NO: 693090 - DNA, 642 bp, Homo sapiens
agaatcgaactgaggctgagagcaccccagggacgaacttatcctgacctctccttggtgccaagccctatgctgtggacrtgtgtcaaggaggaacactcaagaaggtcccctggccttcttatccaacagagaggcagagccaggcaggcaatgaagtcacagtgtggtcagtgatgagacagagagccacagaaggctgaggaggcttcctggaggccatgatactctaagagaggccaaggagtgaccagaggttaactaggataagatagtaggaagaggattccaggcagagggaacagcatatacaaaggcctggtgggaagagagagagctccacttgttctgtttagctgggaaaaagcaggagctgccatgaaggacagcccatatcccagggcaggaaggagccatggccgggtctcaagcaggaacaacaggatcccatcagtgctcttctgggtatagactggaggcctctgggtgataagcaggtgggagggggtgctgtgctttgaatatttgtgttctatgtaaaatgtttatctagaaacagagtgctcattccccagtgctgcaaagaaacagcactcaaacataaatttaattatctcagcaaggccatttttactttctgca

SEQ ID NO: 693091 - DNA, 642 bp, Homo sapiens
agaatcgaactgaggctgagagcaccccagggacgaacttatcctgacctctccttggtgccaagccctatgctgtggacgtgtgtcaaggaggaacactcaagaaggtcccctggccttcttatccaacagagaggcagagccaggcaggcaatgaagtcacagtgtggtcartgatgagacagagagccacagaaggctgaggaggcttcctggaggccatgatactctaagagaggccaaggagtgaccagaggttaactaggataagatagtaggaagaggattccaggcagagggaacagcatatacaaaggcctggtgggaagagagagagctccacttgttctgtttagctgggaaaaagcaggagctgccatgaaggacagcccatatcccagggcaggaaggagccatggccgggtctcaagcaggaacaacaggatcccatcagtgctcttctgggtatagactggaggcctctgggtgataagcaggtgggagggggtgctgtgctttgaatatttgtgttctatgtaaaatgtttatctagaaacagagtgctcattccccagtgctgcaaagaaacagcactcaaacataaatttaattatctcagcaaggccatttttactttctgca

SEQ ID NO: 693092 - DNA, 642 bp, Homo sapiens
agaatcgaactgaggctgagagcaccccagggacgaacttatcctgacctctccttggtgccaagccctatgctgtggacgtgtgtcaaggaggaacactcaagaaggtcccctggccttcttatccaacagagaggcagagccaggcaggcaatgaagtcacagtgtggtcagtgatgagacagagagccacagaaggctgaggaggcttcctggaggccatgatactctaagagaggccaaggagtgaccagaggttaactaggataagatagtaggaagaggattccaggcagagggaacagcatatrcaaaggcctggtgggaagagagagagctccacttgttctgtttagctgggaaaaagcaggagctgccatgaaggacagcccatatcccagggcaggaaggagccatggccgggtctcaagcaggaacaacaggatcccatcagtgctcttctgggtatagactggaggcctctgggtgataagcaggtgggagggggtgctgtgctttgaatatttgtgttctatgtaaaatgtttatctagaaacagagtgctcattccccagtgctgcaaagaaacagcactcaaacataaatttaattatctcagcaaggccatttttactttctgca

SEQ ID NO: 693093 - DNA, 642 bp, Homo sapiens
agaatcgaactgaggctgagagcaccccagggacgaacttatcctgacctctccttggtgccaagccctatgctgtggacgtgtgtcaaggaggaacactcaagaaggtcccctggccttcttatccaacagagaggcagagccaggcaggcaatgaagtcacagtgtggtcagtgatgagacagagagccacagaaggctgaggaggcttcctggaggccatgatactctaagagaggccaaggagtgaccagaggttaactaggataagatagtaggaagaggattccaggcagagggaacagcatatacaaaggcctggtgggaagagagagagctccacttgttctgtttagctgggaaaaagcaggagctgccatgaaggacagcccatatcccagggcaggaaggagccatggccgggtctcaagcaggaacaacaggatcccatcagtgctcttctgggtatagactggaggcctcygggtgataagcaggtgggagggggtgctgtgctttgaatatttgtgttctatgtaaaatgtttatctagaaacagagtgctcattccccagtgctgcaaagaaacagcactcaaacataaatttaattatctcagcaaggccatttttactttctgca

SEQ ID NO: 693094 - DNA, 1203 bp, Homo sapiens
gaaatcatcccaactggagtttcaaagacagttgaatgacccaaactccaacattgtaggtctcctggcttcttggccaatcctgctgccctcggaggaagaaaggggccttacttgcacagtgcaaacagacaaacggacaccaacatctttctggaggcccaggagctgcattcagtgtcctcactctttccatgaaataaagctgctaaacaccccaggcatgtaaagcactgaaatgagtatcccgggttgctctctgccagaagccaggaccacaaaagaccttgagctgttaagtgccatgacctagacgtgctgggctgtatttttagcctcttgtgcactgtttccatcacctgtgctgggctttcagctggaaaagagaaggtgggggtggagaaggttagagggatgtttttcactgcagccagtgccaggaggagcttgcacacaaatttctgagtcctgttgtacaataggaccattttcatgggcgtgcaacctgtatatcaacataggcccccttgcttggaagggccccacacatgctttatcttttcatcttctgctgtcactgtcttgaaattcttttttttttttttttttttgagatggagtcttgctctgtcactcaggctggagtgcagtggcacgatcttggctcactgcaacctccacctcccaggttcaagcaattctcctgtctcagcctcctgagtagctgggattacaggcacctaccgccaagcccggataattttttgtgtttttagtagagatgaggtgtcaccatgttggccaggctggtctcaaactcctgaactcaggtgatccacctgccttggcctccctaaatgytgggattacaggcgtgagccacagcgcctggcctgtcttgaaattcttaataagtttggacaaaggacatacattttcatttctcactgtgtcatgccaattatatggctggtcctaagcagtgtacatgacagagagagccaattggaggaggggctgctgccagcccaggaggggtgccttcccgcagcaggcaggacagaccaaagctactatcacaaggcatggctgcccagacttggccaaataaactttgtttccaacctcctgggtgcccttcctattttctcctctgaaacctgaatgagatgcagaaagaaccttgtgaactggagagacctg

SEQ ID NO: 693095 - DNA, 1077 bp, Homo sapiens
gcccaggctggtcttgaactcctgggctcaagtgatcctcttgtcttagcctcccaaagttctgggattacaggcatgagccataccctctaaatattaaaaaargcatttatacctaaaccttagatttctataatctatctacctaccaagtttcatagacttttttaaagaacgaaggatattctcattggaatatgttctctgctgtcttgctttaagatgctgtaattgaatttaatgtgaattgattcatgttgatttcaagccaggctaaaaccagacagattcttccaacataagatcagtagaagtgctaagcggtcccacagagaacagagacttaactttggtggattaaaaaaaaacaatgactctcataagcatcatatgtagagatctaactagtaattctaccagaaaaccaagaatatagagaaaaatgttgtatttctcaatagtgtgtttttggacaaattaagaattacctagttatagagttttatagagagcatattcttcagctttattaaatcttaccaaagattaggatgtcttttagattaactactgttttcctaccactatcttatacatgtcaagtttttttttttttgacggaattttactctttgttgcccaggccagagtgcaatggtgcgatcttggctcactgcaacctccgcctcccgggtttaagtgattctcctgcctcaacctcccaagtagctgggattacaggaatgcaccaacatgctcggctaattttgtatttttagtagagatggggtttctccatattgatcaggctggtctcaaactcccgacctcaggtgatccgcacaccttggcctcccaaagtgctgggattacaggcatgagccaccacgcccagccaagttttaattattttaaaagaataccttgttatagtttaaacatgaactttaaaactgcagagcaggtattatacaacctggcagaatttttcctgggactctattaacttgtgttttcctcacttatgattagtataaatattgaattatgtggttttagtagcataaataaatgaag

SEQ ID NO: 693096 - DNA, 1077 bp, Homo sapiens
gcccaggctggtcttgaactcctgggctcaagtgatcctcttgtcttagcctcccaaagttctgggattacaggcatgagccataccctctaaatattaaaaaaagcatttatacctaaaccttagatttctataatctatctacctaccaagtttcatagacttttttaaagaacgaaggatattctcattggaatatgttctctgctgtcttgctttaagatgctgtaattgaatttaatgtgaattgattcatgttgatttcaagccaggctaaaaccagacagattcttccaacataagatcagtagaagtgctaagcggtcccacagagaacagagacttaactttggtggattaaaaaaaaacaatgactctcataagcatcatatgtagagatctaactagtaattctaccagaaaaccaagaatatagagaaaaatgttgtatttctcaatagtgtgtttttggacaaattaagaattacctagttatagagttttatagagagcatattcttcagctttattaaatcttaccaaagattaggatgtcttttagattaactactgttttcctaccactatcttatacatgtcaagtttttttttttttgacggaattttrctctttgttgcccaggccagagtgcaatggtgcgatcttggctcactgcaacctccgcctcccgggtttaagtgattctcctgcctcaacctcccaagtagctgggattacaggaatgcaccaacatgctcggctaattttgtatttttagtagagatggggtttctccatattgatcaggctggtctcaaactcccgacctcaggtgatccgcacaccttggcctcccaaagtgctgggattacaggcatgagccaccacgcccagccaagttttaattattttaaaagaataccttgttatagtttaaacatgaactttaaaactgcagagcaggtattatacaacctggcagaatttttcctgggactctattaacttgtgttttcctcacttatgattagtataaatattgaattatgtggttttagtagcataaataaatgaag

SEQ ID NO: 693097 - DNA, 1077 bp, Homo sapiens
gcccaggctggtcttgaactcctgggctcaagtgatcctcttgtcttagcctcccaaagttctgggattacaggcatgagccataccctctaaatattaaaaaaagcatttatacctaaaccttagatttctataatctatctacctaccaagtttcatagacttttttaaagaacgaaggatattctcattggaatatgttctctgctgtcttgctttaagatgctgtaattgaatttaatgtgaattgattcatgttgatttcaagccaggctaaaaccagacagattcttccaacataagatcagtagaagtgctaagcggtcccacagagaacagagacttaactttggtggattaaaaaaaaacaatgactctcataagcatcatatgtagagatctaactagtaattctaccagaaaaccaagaatatagagaaaaatgttgtatttctcaatagtgtgtttttggacaaattaagaattacctagttatagagttttatagagagcatattcttcagctttattaaatcttaccaaagattaggatgtcttttagattaactactgttttcctaccactatcttatacatgtcaagtttttttttttttgacggaattttactctttgttgcccaggccagagtgcaatggtgcgatcttggctcactgcaacctccgcctcccgggtttaagtgattctcctgcctcaacctcccaagtagctgggattacaggaatgcaccaacatgctcrgctaattttgtatttttagtagagatggggtttctccatattgatcaggctggtctcaaactcccgacctcaggtgatccgcacaccttggcctcccaaagtgctgggattacaggcatgagccaccacgcccagccaagttttaattattttaaaagaataccttgttatagtttaaacatgaactttaaaactgcagagcaggtattatacaacctggcagaatttttcctgggactctattaacttgtgttttcctcacttatgattagtataaatattgaattatgtggttttagtagcataaataaatgaag

SEQ ID NO: 693098 - DNA, 1077 bp, Homo sapiens
gcccaggctggtcttgaactcctgggctcaagtgatcctcttgtcttagcctcccaaagttctgggattacaggcatgagccataccctctaaatattaaaaaaagcatttatacctaaaccttagatttctataatctatctacctaccaagtttcatagacttttttaaagaacgaaggatattctcattggaatatgttctctgctgtcttgctttaagatgctgtaattgaatttaatgtgaattgattcatgttgatttcaagccaggctaaaaccagacagattcttccaacataagatcagtagaagtgctaagcggtcccacagagaacagagacttaactttggtggattaaaaaaaaacaatgactctcataagcatcatatgtagagatctaactagtaattctaccagaaaaccaagaatatagagaaaaatgttgtatttctcaatagtgtgtttttggacaaattaagaattacctagttatagagttttatagagagcatattcttcagctttattaaatcttaccaaagattaggatgtcttttagattaactactgttttcctaccactatcttatacatgtcaagtttttttttttttgacggaattttactctttgttgcccaggccagagtgcaatggtgcgatcttggctcactgcaacctccgcctcccgggtttaagtgattctcctgcctcaacctcccaagtagctgggattacaggaatgcaccaacatgctcggctaattttgtatttttagtagagatggggtttctccatattgatcaggctggtctcaaactccygacctcaggtgatccgcacaccttggcctcccaaagtgctgggattacaggcatgagccaccacgcccagccaagttttaattattttaaaagaataccttgttatagtttaaacatgaactttaaaactgcagagcaggtattatacaacctggcagaatttttcctgggactctattaacttgtgttttcctcacttatgattagtataaatattgaattatgtggttttagtagcataaataaatgaag

SEQ ID NO: 693099 - DNA, 1077 bp, Homo sapiens
gcccaggctggtcttgaactcctgggctcaagtgatcctcttgtcttagcctcccaaagttctgggattacaggcatgagccataccctctaaatattaaaaaaagcatttatacctaaaccttagatttctataatctatctacctaccaagtttcatagacttttttaaagaacgaaggatattctcattggaatatgttctctgctgtcttgctttaagatgctgtaattgaatttaatgtgaattgattcatgttgatttcaagccaggctaaaaccagacagattcttccaacataagatcagtagaagtgctaagcggtcccacagagaacagagacttaactttggtggattaaaaaaaaacaatgactctcataagcatcatatgtagagatctaactagtaattctaccagaaaaccaagaatatagagaaaaatgttgtatttctcaatagtgtgtttttggacaaattaagaattacctagttatagagttttatagagagcatattcttcagctttattaaatcttaccaaagattaggatgtcttttagattaactactgttttcctaccactatcttatacatgtcaagtttttttttttttgacggaattttactctttgttgcccaggccagagtgcaatggtgcgatcttggctcactgcaacctccgcctcccgggtttaagtgattctcctgcctcaacctcccaagtagctgggattacaggaatgcaccaacatgctcggctaattttgtatttttagtagagatggggtttctccatattgatcaggctggtctcaaactcccgacctcaggtgatccgcacaccttggcctcccaaagtgctgggattacaggcatgagccaccacgcccagccaagttttaattattttaaaakaataccttgttatagtttaaacatgaactttaaaactgcagagcaggtattatacaacctggcagaatttttcctgggactctattaacttgtgttttcctcacttatgattagtataaatattgaattatgtggttttagtagcataaataaatgaag

SEQ ID NO: 693100 - DNA, 1077 bp, Homo sapiens
gcccaggctggtcttgaactcctgggctcaagtgatcctcttgtcttagcctcccaaagttctgggattacaggcatgagccataccctctaaatattaaaaaaagcatttatacctaaaccttagatttctataatctatctacctaccaagtttcatagacttttttaaagaacgaaggatattctcattggaatatgttctctgctgtcttgctttaagatgctgtaattgaatttaatgtgaattgattcatgttgatttcaagccaggctaaaaccagacagattcttccaacataagatcagtagaagtgctaagcggtcccacagagaacagagacttaactttggtggattaaaaaaaaacaatgactctcataagcatcatatgtagagatctaactagtaattctaccagaaaaccaagaatatagagaaaaatgttgtatttctcaatagtgtgtttttggacaaattaagaattacctagttatagagttttatagagagcatattcttcagctttattaaatcttaccaaagattaggatgtcttttagattaactactgttttcctaccactatcttatacatgtcaagtttttttttttttgacggaattttactctttgttgcccaggccagagtgcaatggtgcgatcttggctcactgcaacctccgcctcccgggtttaagtgattctcctgcctcaacctcccaagtagctgggattacaggaatgcaccaacatgctcggctaattttgtatttttagtagagatggggtttctccatattgatcaggctggtctcaaactcccgacctcaggtgatccgcacaccttggcctcccaaagtgctgggattacaggcatgagccaccacgcccagccaagttttaattattttaaaagaataccttgttatagtttaaacatgaactttaaaactgcagagcagstattatacaacctggcagaatttttcctgggactctattaacttgtgttttcctcacttatgattagtataaatattgaattatgtggttttagtagcataaataaatgaag

SEQ ID NO: 693101 - DNA, 621 bp, Homo sapiens
tcagacccagtagggataaaagccttctggtgcggtttagaaacactcttactagaagttttttttttttgagacggagtctcactctgtcacccaggctggagtgcaatggtgtgatcttggctcactgcaaactccgcctcccgggttcaagtgatcctcctgcctcagcctcctgagtagctgggattacaggcacatgccaccatgcttggctagtttttttttgtatttttagttgagacggggtttcaccgtgttagccaggattgtctccatctcctgacctcgtgatccacctgtcttagcctcccaaagtgctgggattacaggcatgaaccatcgcgcccggcytttttttttttttttttttttaaagatggggtcttgttctgtcacctaggctggagtgcagtggcacaatcataactcactgcagcctcaaactcccgggctcaagcaatcttctcacctcagcctcccaagtagctgggactacaggggtgtgccactgatacagtttggatctgtgtccccacccaatctcatgtcgaattgtaatccccagtgttggaggtggagcctggtgggaggtgattggatcatagaagtggatttccc

SEQ ID NO: 693102 - DNA, 621 bp, Homo sapiens
tcagacccagtagggataaaagccttctggtgcggtttagaaacactcttactagaagttttttttttttgagacggagtctcactctgtcacccaggctggagtgcaatggtgtgatcttggctcactgcaaactccgcctcccgggttcaagtgatcctcctgcctcagcctcctgagtagctgggattacaggcacatgccaccatgcttggctagtttttttttgtatttttagttgagacggggtttcaccgtgttagccaggattgtctccatctcctgacctcgtgatccacctgtcttagcctcccaaagtgctgggattacaggcatgaaccatcgcgcccggcttttttttttttttttttttttaaagatggggtcttgttctgtcacctaggctggagtgcagtggcacaatcataactcactgcagcctcaaactcccrggctcaagcaatcttctcacctcagcctcccaagtagctgggactacaggggtgtgccactgatacagtttggatctgtgtccccacccaatctcatgtcgaattgtaatccccagtgttggaggtggagcctggtgggaggtgattggatcatagaagtggatttccc

SEQ ID NO: 693103 - DNA, 2768 bp, Homo sapiens
cttgaacttgggagttcaagaccagtctggcccatatggtgaaaccctgcctttactaaaaacacaagaaaaattagccaggagtggtggcatacacctataatcccagctattcaggttgctgaggcaaaagaatcccttggacctgggaagaggggttgtagtgagctgagattgcaccactgcactccagccagggtgatgaagtgaggctctgtcgaaaaaagaaagagaaagaaagaaagaaagaaagaaagaaagaaagaaagaaagaaagaaagagagagggagagagagagagagaaagaaagaaagaaagaaagaaagaaagaaagaaagaaagaaagaaagaaagaaagaaagaaagaaagaatttatttttgaaaggaatatcttaaacagctctatgcacacaaagttgataatcttcatgaaatggacaaagttcttgaaagacacaatctgccatgtctcacaccaaaaaaattacataatctgaataggcttatatatattaaaggaattgagtaagttattaatgatattaatatttaacaataatagatacaatataagttttagggataagaaatacgatttaaccagaaataaaaaaaattgtttaaattataaagacaattgtgcaaaactcttaacccactctaacaatcagtgtccaaagaaaaagtaaatggcatactcaaagggtttaactgaaaaaagtttaatgaaaagattatttagaaacataaaagcagggtgatatattttatacatataccacattttgttttttccaataatcaactgatggaaatttgtgttgtttccacttgtgggatactatgtataatgctgccatgaaaatttttgtacaagttttgttgtggatatatgtttttatttcccttaggtagatactaggaatggaattgctgggtcatatggtagctttatgtttaacttttccaggaactgctagcctgtttctgaaaaggctgcaccttcccgttcatttttcaactctagcataactctgatagtcaagactgaaaaaatatgttgaagtttcttaaggcttgattctgggtctttccccatctcagcattggacccatcttacaaattctgaatttgaataaattgaggtcaatcttgcactttctgctaaaaaaataaaaataaaataaaaactaaataaaaaaactaaataaaaataaaaaacagcctcactactttcttattttgttcagtggttacttattcaacaagaaaaacactacttgatcagcaaaattgaataaatgattggaatgaaaaatacacagaagaaaaatcagacaaataaataataatccaataattgacgagatacaaattacagtagaaagtttttcacctgtcaattgataaatagcaagatacaatgccagtgaagatatagtaataatagctactatgttttgagtgtttaatataggccatgtgctttacatgcattatttcattatcttgggatactatataatatgggatactatgtacaatgtatcctattatcatattaggcagatacttttattaattccattttatagtacagaaaaatgtgccaaagtcatgaagctagtaattcatggtactgggatttgggtccagataatctgactcactcccctgggtgtctataattttctacctttaaaaatgagtgtttcatgttccattcgtgtatatctttccttcctgtctgtgcacatatatgagaartggtctaacaaaataatacagaaaagcaacaatatgataggaaataaataagatcaatagaagaggtgggttgtcttctacatgcttttcttcagagaacatagaagaaccaaatcttatctaaaagaggactatgaagagccttcttgccctacagaattccagaccttgacattgcaggggaatgttaaaatacagccaggaccctgtggtggaggaaagaatggagtggaaaatagagacaaattaaactattggagctatgtgggaatctgtgtcaccattagaggctttttaaaatagtctttaaaaagatgcaacccactggagaaaatgaaaatctattttgtactacccagaggatttctactaaattcattagtatagaaaatttcaaatatatacaaagatagaaagatatgattagcctttatatgtatagccaccacccaatttttatcaatatatggccagtgctgattcatcaattgcccttcttcattttttatcctatccgcaaatacttaaatatataccttgaaataatacatattatttttgaaaacatagtattattatacacctaaaattatatttttaatttatcttttattttttagggaccaggtaagttaatactcatgtggtacatgagatattttgatacaggcatacaatgtgtaataatcaaatcaggataaatgaggtattaatcacctcaaccatttattttttatgttacaaacaatccaattttactcttttagttatttttaaaatgtacaaataaattattttttactaagtcaccctgttgtcctgacaaatactatcttatttattctttctatgtttttataccaaataccgatccccacttcctccctcatctcccactacacttcccagcatctggtaaccatccttctactctctatctgcatgagttcaattgttttgatttttagctctcaaaaataagtgagggtattactgag

SEQ ID NO: 693104 - DNA, 3035 bp, Homo sapiens
attcacaattcaccttctactaaagttttatttgagtgacagaccctggaagatgaaaagattccagattttaaagcattaatttgtgaggaatctggacgacagaaagaccagctccatcccagaccttatggcaggcacaattttcattctttttatatctcatcattgaggacctatttgaaatcttattcaaaactgttttccagcatctctctctaacacctgtccagatgctaacaaagcagtagaaccaggtcaaatcgatggtttttttctctgcccttcacacaataaatgcctcaggtatctgtctagtgtttgatattaaaaatccctgaccccatcatatccattgatatatactaccaatattttgagctgctagcatatttgcctgttacgtcaaggcatctgaaagtttaaagcttggcaaagcaatgtttttctttttcttcttctataatcctagggtaaacattaagcagacagcatttctgctttgagcattaaaggaaaaaaaaagactgaatttgaaaagccttctagtacactttggggatttcggaaagtgtcgtttggctgggagctgagtggagaagctgccattctgtagatgggataggaggaaagccgcatggcctcattcataacttcacagctactgcaaatatcagctgatgaatatttatgttttccctggcttaggcccgaaaggcaaacaagggaaaaaaaaacgaaagttaggaaaaggtcgtctgaactctgtgggattttttaccagcactttccatgcgcgagccgtagccctgaatgaagtcattctgtacaggggcccggcacaggaaaacacagtctgttcattagctccccgcactttgtttgaaccttgtacattcatggggtcctgaaagggaaactcctttttaaaaaaatcaaacacacaggatatagagctaccttattattattttggtaaattattgcaaattgctcctcatcatatagtgacctcagtggttcattgaaagagcaagtcagtgaaggagagtttaaaaaaaattatatattttttaaagagggccattccagttcaggttaatattttacagagttacagtttctaaacatattttaaagtctatataaataatatcaatacattactacatatcgtagtagagcaaattattttttaaaaatgtactctagattttagtcttatttcaggaaaaatagcctttaagccccactgtagaagaaataatcacgtcttgatcacttgggtttattatttaaattctgttttcctccttttactttttcttggcccatcagtactgctttcaccctctgctgccatcactgccacagctaggttgacctgaggctatggaaacaacacaaaaacaattaacaagatgagggatttttctacttgccaatatttccattatcagttttgtttcaggagaggaggctcaaaaatttggctgaagtgaaatttgtgactgccttatggatttcagtggtagatacatcatgcaattttctaacattcatagagaggcaggtgtcctcagtggggatccccagaaatgttcccctgtgatgagaatgggtgcctaagactcatgaaggaagtacttccagcagacatggggaggtgagagggaggaaaccagacacagaatggaagatgacaagcaaaggaaatgcccagcctcagctgggtcctgcaaggagctctgcggtatagttttacccaaaagttcgttcccatttgagggtaagggctgtccatttttggagtttggtgtggggggtgcactgggtgaccagctgtcctggtttgcctggcaccatcctgctttcacactaaattatcttgagatatcttttagtcttaagcaaactggaattgttggtcatccttgaagcctgtaaattcccaggtacttctgactccctgggcagcaaagtggctccagttgcccaagatcagtcttctgaatggagtcacaggtgcaagccatgtgaaacaaagtccactaaagcttgtggatgggcatacagacatgacaagagcctctgaatggagctcagccatcttccctgtagcaggtactatcctctacccagttttctaagaaacaacatggggtcgatggagactattgtagatgtgggattgagggcaggagttgcagatgaggaatgcatttcattctgtacgtcaagttcttagtcctagtgggacttaaggactatgatatgtaggttcaggactagtcaagatttccaagcagatttatagagggcattagcactgaattaagttggctacgaatctgtaagtgtgaaattcacagagtggacttgaacaaaatctctgtagttatcaagtgggtaggaggtaatgaagcaattgcccatcagtgagtctctctcaacatgctgcttctctggccactatgaggttcagttytggaagtgcatgacatatatgtaatgaaaattgaggacatggcgaatgtagcttcaaagaggatataatgaaaatgagagtgaacattccctagccctgcccaagacaggtggaatcccacatttcttttgatttaacttctaagagttaacaataactacccaaaataaatagcgaatattagtcaaaatttacctttttcttgtcctctgttcttgccttctaaacataagggtgagatttttttttgttgtgtttctctcttggcttataaatataaaatacagtgagtgagaagttggtccattgactagcttgggcagacatacttggtaatagttgcatgtatttaactttgtgtgttggcagtgataacaacctcaagtttcatgcttgcttcttgcattgttttgcccagtttttcaagttccttatggagcagctcacgtagaggatttattgtaggagtgctttcttctgcccaaagcaatacattatccacatgaaaggatatctcacacagccccatgctgcattactgcagagg

SEQ ID NO: 693105 - DNA, 1106 bp, Homo sapiens
tgcaaccttgccaacatctgttattttttgactttttgataatagccattctgattgttttgaggtggtatcccatagtggttttgattttcatccttccgatgattagtgatggtgaacatttttttcatgtttcttgaccacttgcatgtcttcttttgagaagtgtctattcgtggcattaactcactttttaatgggattcttttttcttgttgatgtgccttttccccattgtttatttttgtcgaatttgttgaagaccagatcattgtaggtgtgaagaatctatttctgaattacttattataaatattttggaagggcaaatactgatggttgaagacatacaaattcactaaaattgagaacgataaaattatgactaggctattaaagttatagagaggtgaatttatggcatggtaaaagaataatatttattgaaacaccatcttaaaaatggcacagatcaaaaatatggctagctttgcaacattttrgttctcatttcattacagcttttgaggtctgagggagagcttacctaagcaattaagctactggttaagaaattttgtgtacatcttaagactttatatgactgatgagagttattactcaagtacataatacgaatgaggattttgaattgcagcacattgtaggcagtaaataaagacttgctgaatgaatggatattttttctaccaatgatgaacttcgatgcaaagaaatggcatgactaaatgttcaagatatttctgttgcaggaaattcataaaaagtaagagtaactatctatttctaaaacaacatctatcagaaatcagtctggtcagattctaccttcaaatgtacaatgtcagaactagaaaggttatgaagactaacacactttactttttaccctactgacgacattctctgaaaattcagttttcttgaatgtcactctaataccaaagtattttccccaattaaagaccaagtaattatgtcatttagggatagcattttctctagataaagtttggcctctctgttttcacttaacaccaaatggattacttcaaatggatagctacagatcaattaaatcaagc

SEQ ID NO: 693106 - DNA, 857 bp, Homo sapiens
tacgcaaaatgatctgatataaacagacagactaagagatggattattgtatgtgatgcaataatcctgagtgtgaaacctgatagaaattgtagataaatcgaaagaaagaaagaaaaaaaaaaacaaaagtagcaccatgctggcaacagtgtgccatagacagcttaggcaggtgggggtgatgaataatatggagaaaagcagtttcaactgtttggctaagtatgtaagtttcattttgtaaaaaatgtattaatcaagaaattcttaatttatattaatggtgtcatgcctcagaaagtagaggaagcaataaagggaactattatgctcaacttgatcttgaccagtaaagaaaaactgttttgtaacagaagtcttaagaaaaaaatgaagatattatcttggaagctcttaacagtgaaagaaaatgttctaaatgcacagacaggtacctaagactttaggaaaacagaatcaagagaaatgtctcaggtaagatgctttttattccaaataacagcaaccaacagaaccaaaaacagcaacagttacagaaaccaactgtgtgcttggcacatagtaaatgctcagtatgtgctacaaaagttatgattacaaggaacagaggctcagtaaagttaatcctaatgataaaattgtgagaaatccacaaaataaagaaaawacaaaggcttttaatgaaactactttggctgatttaattctgagaaacttagaatatatatataaaaaaatccactgtaaaaaagacttgaagtacaaaaaattgaagaaaagtatggaccaaacctacattattcacatgactaatatgaataatgttaagactt

SEQ ID NO: 693107 - DNA, 857 bp, Homo sapiens
tacgcaaaatgatctgatataaacagacagactaagagatggattattgtatgtgatgcaataatcctgagtgtgaaacctgatagaaattgtagataaatcgaaagaaagaaagaaaaaaaaaaacaaaagtagcaccatgctggcaacagtgtgccatagacagcttaggcaggtgggggtgatgaataatatggagaaaagcagtttcaactgtttggctaagtatgtaagtttcattttgtaaaaaatgtattaatcaagaaattcttaatttatattaatggtgtcatgcctcagaaagtagaggaagcaataaagggaactattatgctcaacttgatcttgaccagtaaagaaaaactgttttgtaacagaagtcttaagaaaaaaatgaagatattatcttggaagctcttaacagtgaaagaaaatgttctaaatgcacagacaggtacctaagactttaggaaaacagaatcaagagaaatgtctcaggtaagatgctttttattccaaataacagcaaccaacagaaccaaaaacagcaacagttacagaaaccaactgtgtgcttggcacatagtaaatgctcagtatgtgctacaaaagttatgattacaaggaacagaggctcagtaaagttaatcctaatgataaaattgtgagaaatccacaaaataaagaaaatacaaaggcttttaatgmaactactttggctgatttaattctgagaaacttagaatatatatataaaaaaatccactgtaaaaaagacttgaagtacaaaaaattgaagaaaagtatggaccaaacctacattattcacatgactaatatgaataatgttaagactt

SEQ ID NO: 693108 - DNA, 611 bp, Homo sapiens
gacggggtttcaccatgttggccaggatggtcttgaactcctgatctcatgatccacccacctcagcctcctaaagtgctgggattacaggcgtgagccaccacacctggctgacttttgtttttttgagacaggktcttgttctctcacccaggctgaagtgcagtggagtaatcatagctcacagcagcctcgacttcccggctccagcaatcctctcacctcagtctcctgagtagctgggactacaggtgtgtgccaccaggcctgattaacttttgtattatgcgtagggatggggtttcaccatgtttcctaggccagtctcaaactcctgggctcaagtgatcctcctgcctcggcctcccaagatgctggaattataggtatgagccaccgcatccagcctataagtattttttaaatcattttctcctcagcttgagagatgaccggcaaataaatggcaaataaaaactgtatatattggcagggtgcaggggctcgtgcctgtaatcccagcactttgggaggccgaggcgggcggatcatgaggtcaggagatcgagaacatcctggctaacgcagtgaaaccccgtctctactaaaaa

SEQ ID NO: 693109 - DNA, 611 bp, Homo sapiens
gacggggtttcaccatgttggccaggatggtcttgaactcctgatctcatgatccacccacctcagcctcctaaagtgctgggattacaggcgtgagccaccacacctggctgacttttgtttttttgagacaggttcttgttctctcacccaggctgaagtgcagtggagtaatcatagctcacagcagcctcgacttcccggctcsagcaatcctctcacctcagtctcctgagtagctgggactacaggtgtgtgccaccaggcctgattaacttttgtattatgcgtagggatggggtttcaccatgtttcctaggccagtctcaaactcctgggctcaagtgatcctcctgcctcggcctcccaagatgctggaattataggtatgagccaccgcatccagcctataagtattttttaaatcattttctcctcagcttgagagatgaccggcaaataaatggcaaataaaaactgtatatattggcagggtgcaggggctcgtgcctgtaatcccagcactttgggaggccgaggcgggcggatcatgaggtcaggagatcgagaacatcctggctaacgcagtgaaaccccgtctctactaaaaa

SEQ ID NO: 693110 - DNA, 622 bp, Homo sapiens
cgcagcagatgagcaacggcaagcgccgaggctcaaaattcttcaggccaatgtctttcctctggttaagttgtactgtcctgtagtgtataactttrggatctttattagtcgatttcctctaaactacagctaagcgaaatccagaagtttaaagtataatctagttatcttttgttttggaaatgcttttcagcagcttatgaaaacaccttgagtctgggtcaggttcggtgcattggcttggagtttacaccctcagctgggaggggaaaaagataacgccagcagctgagaaagaaaaacctgtttgagtaaataccatagctgaacatttatgtttcagaatgaatctggatatacaccaaataacttttttggtcagaaaggagcatcccaaagaatgaagcatggcagcttatcatttattctgacaaacacttgtgggtgcatctattgtggccagacatatactacaaaatgatcaaatcacagcccttatggatcgccaaaactccccagtctagccgcatttgatgatcaagacctctttaatcatgcttttatacgccgtgtctcttgttcatagtggtaagtgagctttaagtgatttcagtttcca

SEQ ID NO: 693111 - DNA, 663 bp, Homo sapiens
acacaggaagggggacatcacataccagggcctgttgtgggatggggggaggggggagggatagcattaggagatatacctaatgcaaatgacgagttaatgggtgcagcacaccaacatggcacatggatacatatgtaacaaacatgcacgttgtgctcatgtaccccagaaattaaaaaaaaaaaaagtccaagactaccctgacaaaaaaccaagcaaaatgatacacaaatagttaccccccaaacttctgttaataacataatggtgccactcacacctgactcaggtgccagcaggaggagggcgccctccagattctgcaggagatgcggggaagactcctccttcccctggctgcacctccacygctgtcacagaggcccacagcttcctacccaccccaggccaggcagggctgccccccaacgctccgacctgccttcccggcccccaaacttgctgctgctgctgccacaactagcaccgatgctaatacaactactactgctgtcaccctcaacgcacaggcccaccctacaaggctcctaacacctgaccactgcactgcctgtgccctggcggcagccagccgccatcctaccgctctggtgctcttcagttttcattgccgccctcctaccactccagcgctgagtc

SEQ ID NO: 693112 - DNA, 681 bp, Homo sapiens
agatatctggaaatagaatgtttaaagccaatcacatcttcttccttttctatagaagaacttaaattctgtaatatttttcccaccaattaccacttggttgccactctcatcatgatctccaagtgtgaatgcattatgtgcaatgataaaataacagacttggatatatctgccctttacacaaatttcttacatatattcctgctaacatacgacactaaaattaaaagacttttatgagaatataaaggtcaggacaacagaaagaccataaatcaggatgaatggtttttgtcattgaaaaatggcttcttggccctcttggcccccaaaagtgctgaggaaaggatggcagacctgatgattactagccccgcggcctgtgtgggcatcagtcactctaaaatgtttgcgttaatggtaagggaggaacagctggacaaatggccttacggggcaacaggcagttggtctgcaaggctctcgtgctttatcactggcaagaatcaaggcaagagcacagaactgcaggttacactcagaaaaggatggcgttaactcgtaaagaacacacgaataaaatgtttctgcrgttttgggtttcataaaaccctaaatccggccgggcacggtggctcacacctgtaatctcaacactttgggaagccgaggcaggcg

SEQ ID NO: 693113 - DNA, 660 bp, Homo sapiens
tgtctagttctgctcaccaaccccgtttgggcctcaattccctgaactacagaccagctggctgcttcctcttatccgccctccaggacttgctgaagtattttgaataaagtatataagtgctttgcgttcttcagagaaaggagttrcgcaaatataagaagaatgatcttttcgaaagctcttgctgcaatggcaaagatccacatgtgaaaaatataatttttagagaaagctgacaaagctggccttctacttttacctgtctccaagcgcctcccagaaccagacgcccctatcttgccaattacccatgctaataaaggcacctcatccaaacacaagagggaatcctgatgtgtattattagattattagatgtgtatgaaacaggagtccttacttggcatccagcaaaagttataagatatcctggaattatgcagtgtatgacctgaaataatacagttcagaaggcctaacctccttgaaagagaaaaatccagacaaggaccattacagaaagtcagccgaaacatctgctagcaaggcaacaaaggaaaagaagaccctgaagatgggaccgaactaacccccaaattaaaataccttcttcctgtccacaccccaaaacaaacgaaaggggcaaaaaaaagaatc

SEQ ID NO: 693114 - DNA, 660 bp, Homo sapiens
tgtctagttctgctcaccaaccccgtttgggcctcaattccctgaactacagaccagctggctgcttcctcttatccgccctccaggacttgctgaagtattttgaataaagtatataagtgctttgcgttcttcagagaaaggagttgcgcaaatataagaagaatgatcttttcgaaagctcttgctgcaatggcaaagatccacatgtgaaaaatataatttttagagaaagctgacaaagctggccttctacttttacctgtctccaagcgcctcccagaaccagacgcccctatcttgccaattacccatgctaataaaggcacctcatccaaacacaagasggaatcctgatgtgtattattagattattagatgtgtatgaaacaggagtccttacttggcatccagcaaaagttataagatatcctggaattatgcagtgtatgacctgaaataatacagttcagaaggcctaacctccttgaaagagaaaaatccagacaaggaccattacagaaagtcagccgaaacatctgctagcaaggcaacaaaggaaaagaagaccctgaagatgggaccgaactaacccccaaattaaaataccttcttcctgtccacaccccaaaacaaacgaaaggggcaaaaaaaagaatc

SEQ ID NO: 693115 - DNA, 614 bp, Homo sapiens
taaatatttcctcactgaacgtattaaattaataaatagacgggtctaatgttttacttaatattcataaaatataacaaatttggttccccaagtacttatagttcctgtaccaaaatagaatgcaatcaaatmcatcacacatcacactcacacacacacaccaggtttaatgagttttcacacaagtctttaaaaaatataaccagacatgtcacactgtgatttgtaacttacaagctaggcctaattattaaaatgaagatgacgtctatgtggctaaaccaagtgccatccccacgtgaatgtgagttatcaggaaacctagttgctccacatatttcagagcacacctcagggcccgaatcaatgctcatttggctgggtgcggtggctcatgcctgaaatcccagtactttgggaggccgaggcaggcagatcacctgaggtcaggatgtcgagaccagcctggccaatatggtgaaacctcgtctctactaaaaagacaaagattagctgggcatagtggcaggcgcctgtaatcctagctacttgggaggctgaggcaggagaatcgcttgagcccaggatgtaggggttgcagtaagctgaga

SEQ ID NO: 693116 - DNA, 528 bp, Homo sapiens
ttattgagctgtcagattttttaaatctgcagccaacatttcaggttgctgatgagagtccacatatatttagtgtaaaaggctttgcaataggagtcagaaaatctgactctggctctgccactgattaaattctccaatttccagtctgtggtgtcttccagaactaatatcctacaattattcataaatcaagctgcatattgtgatgaagsatgctggcaaaagacaggcccatatgggcgcgtataatccccctaaagtcaattattaatgaagtcttcagctggcagatgctgtaggcaaggactggtctggtgccaacaatgtgatcttctgttcccatttacaaatcaaggctattgtaatcaataaagccttgttaaacattactaagggagtgggcaaatggtgcagagttaataacctcttacacatgctattgtgtttttttcttgatccaaaatgtcctcttctctctctgctgaatcttttttctgctgcaatagatgcttgcactaaacatac

SEQ ID NO: 693117 - DNA, 2008 bp, Homo sapiens
aggaaggcccatccatattgcatccagcaactcatagggtagcctgattaaaggtaattcattagctagtcaattacttgcattgctctagaactctgagtagagaatatggccatgctcaaagaaggaaacagagaagatgaacagtaagaagcactgttgctatcactggggccctatgagtcatgaaaggaggtaaaagaattagcgtgtactacttctctacaaccctgcaatgatttcccacagcttcttagaaaactcaagcgtctttcctctgacaaaaggctgcaatacacttgacatttgtctgtctcccacatctcactctgtctattctctccattgctccttacactccaatcatactgttttctgattttgttgttgttattgtctttcttgtcttgaataactgtgtttgttataacttctacctggaatatatctccttgcatggttggctgcttttcattattcagaagttagcttatatggcacttgttctcttactatccaatctacattagaatcttcctagtcattccctaacccattggcctgtgcttcccttctgctaaattagattttttccttttttattgtctatctcctcctaccagaaaaaagtacatgagagacgaagggcccttaattgtattattttttgttgcatcttcattgactagaacagagaatggcattagtattcatgaattactaatagaataaatacatgagcgaaaagataataagataatgagaccctaatactgccctgtatctgatggatttctgatttcagttccaggctacatgtattcttacaatagattcacatttttttaagtgatttccatttctgctccttgcaaccaaaagtcatcatatacttgagactctgtgtgactttgagcaacaggtcatcaaccaccacacccccaaactggagccttctcccacactgggcacattcccaaaacagccctgtggattctccacatgtttctataaccggtcatacgggatttctaattaatttgcacagacttygatttcatacaatttttggaggacagaaaatatgctttttataatcacattttatttttgcagttggctgagtttatatcctgacattcttggttttctaatttcattaatttgtattctaccacagctggtagtctactgggaagtttgttttttaacttcatgaactttgttaaggtagagagattttaaatatggcaaaaaaaattacttttcaaactaaacgtattcattagtaacttaaagtacatagtattacaaataatgagtttcaatatccaattgtaactccctgtgacaatgaaagttgtgactaattgaagatatacaatgaggtgttgattatcttgaagatgcccttgtggaaggagtaagggctagaggcatcttttttatttctaagccctcataactatcctcaactatttttaggttttaatactgtgatcccaaagcattccattcccatctagatgtgctcagcatctttaactacactgccctccacctgtatagagttgaggcgcccaatacctagaaaagttcccttctctccatgtactaataatttccaggaatttctccagaatctggttactctatcctcaactactctagttttttaggatctggttcttgctggtttttgacttttggcctgccccttcagacttaattggttccatagcttgtgttcacccaaatttttatttttagtttattctacaccttgcagctaagagtcatccctgtccacttccatacaaaacccaacttcctgaagcccagcagggacccaatgcaaggcccaccaattacttgggagaagagttcagataaattttcctgtatcccattacaaatcattatcaggtataattgcttcaaagtaatagaacaactgtgtaatactaaaaaatttacagtgaaacacactactctcaccgagtttcca

SEQ ID NO: 693118 - DNA, 658 bp, Homo sapiens
gtttctgtgcccatcttcacactgtgtgtgtaatttgccaaccaaaaaaagaaacggaattaagacagatgttcggcatgaatagagcttatttttagaaggagaactgatgagcttggaaattttaactttttctaccaggataaaacaggagttctttctctctgtcattagtttaaattaattttacaggagaaggtgtctgttaaattttacaaatgattacatgctctcctacctttgtgtcaaatacgatactgatcctttcggcaastcaagggaaatggcctgcctagtgggagtgttctgcaagcctgtgagctcatgccactgcccgcgtagttactgcctcaaagccatctgctcaggttgctgagtgtcccgggagacggtgtctccactgatggagagagacaagaaagacagggaaggtagagaaacgcaaagaccagaaaggtgtatcgagagcggtgaagtctcctgttgccgccttcggccagcaggaggaaaggtgttatcaagagcagcgaagtctcctgttgtcgccttcggccagcaggaatggcagtgtttgtttggcacatggctgcatgtgtccgtgctcaggaagatcatggtggtgtgccatccatgttgaacccagaattgcttcgtggat

SEQ ID NO: 693119 - DNA, 658 bp, Homo sapiens
gtttctgtgcccatcttcacactgtgtgtgtaatttgccaaccaaaaaaagaaacggaattaagacagatgttcggcatgaatagagcttatttttagaaggagaactgatgagcttggaaattttaactttttctaccaggataaaacaggagttctttctctctgtcattagtttaaattaattttacaggagaaggtgtctgttaaattttacaaatgattacatgctctcctacctttgtgtcaaatacgatactgatcctttcggcaactcaagggaaatggcctgcctagtgggagtgttctgcaagcctgtgagctcatgccactgcccgcgtagttactgcctcaaagccatctgctcaggttgctgagtgtcccgggagacggtgtctccactgatggagagagacaagaaagacagggaaggtagagaaacgcaaagaccagaaaggtgtatcgagagcggtgaagtctcctgttgccgccttyggccagcaggaggaaaggtgttatcaagagcagcgaagtctcctgttgtcgccttcggccagcaggaatggcagtgtttgtttggcacatggctgcatgtgtccgtgctcaggaagatcatggtggtgtgccatccatgttgaacccagaattgcttcgtggat

SEQ ID NO: 693120 - DNA, 1849 bp, Homo sapiens
ggttagtggcaaaactgagatttgaacccaggctgtccacactcatagccagcataccacgcctcacccccttgacaacaggagaaaccaagctgatgacaagttaacacagctgggaaagctgggggaaacagaacgttgcacagagaagaagtcatcttagtttactgtggagctcagtagtgacctgaacaggtaacagtgtgaaaggggatctgacaggagtctccgcatgcccacatcaggaagatccgggaggggcacaggcatgggcaggagatgtgaggcatgaaggagctaagtgcttctcttcggtgatacagaggcaatgcctaaaacaaataacaaaccagaagtagcaagaaaaatagcttgtttaaagctacagagagacccaccaaaggaaccaactagaagagttgaaaacaggtctcctgtaggtcgtctgggcagactgtggcaggataggggatgggggctgctgtctttcaggaaaagtcctgagaattatttgacccttcgaatctgtgcaagtagaactttgataaaaataaaagcgaaactttagaagggaataaatacctggtagtactgtcatgaaataaatctgttttatcttcctaggaactcggtaaatgttagtttttctctttcctttttctttcaaaggacaagttcccatcccaggcagaaatgaaggcccagtgcggcgcagccgctgatggctcacctctctcagaatggcccgactgcccttcaggccttcatttctcgcttgccaacttccagggaaggacagaaaagcaggggattctgttgacagagacctttgatgagcgcttgttaccgtccgtggccttgtggggtgcctggattgaggcccagcaaatggccagatgtggggcatagctaatgtgggtagagcacctcccgcggctgtgggaagggacagtgacagtgtctgactgctcccgaggcgctagcaaaggtgccctcctggctgcaggtaatgggggagctgccccagacagtctgtaaggcagtgatcgtgtccasgatcctaagagtttccttttagccacctccaactagggcaagaggccagtatcttgaaaggcagagtttggggcttgtgtgtatgcaggagagagagacaaagtgtgtgtatttataaagcatgccatacgccgtttgttcagtgcaatatgccactttatttttatctcttcttacgtcaaagatagggaaagcctattaatcagtaaatctaatcataaatatatgcatatatatctacattaatatcaagtgtttatatattgataaattgatttaagaacgcttttcatttctggcagaaccttagacattaatgaacctgaattctcttactgaagtatcctcttattattttatagcagttcttcctactacagggtaattatgaacctgattttaacaaaaaagtacactgatctactgtaatctgctcagtaatacaagtgagcttttctatgcaaaccctattgctccaaaaagaattgaagaaaaaatgttttaccaattcagacccacaagtatttattgtgcacctactacatggaaggcgttggaccagctgcagtgggtataatgacgagtaaagcaggctcagcccttagctttttgcattttattttgaaaaggaaaatcctaagaactaagtgaccacaatacaagtctgacgagactggtgtatgagaggaacaagcaggcccctcctgggggatcggaggggaagacatctcatttcagggatcaggaagagatagacatgagttgagggatttgcactattggaattataaaa

SEQ ID NO: 693121 - DNA, 1289 bp, Homo sapiens
tgtcttgaaaggttgtcctgctcatagttccgagcaaatgtgagaaacaacagaggcttccaacaaatacctgctaaagaatgaggaaatggacacaggcaaataggcaaatggagtctccttaacggaatcgtaaggctgtctggaggtaatacgagtggaaagaactcctgtgtgaaaatctgcatgcatctttgcccccgtggaaccgtctacacaagtgctaatggaacagttagttacatacctatttttttaaactctgactttaccattacagaggttatatatctataggattttttgcctgaatttttagattttcacctggagatctggtatggaataattaaatgctgcatattgtttctcttattcttaaggatcttggagaaattatttaacagtctgagatctccttctctccttccctaccctccccacccctgacctataacagctagggagagaaaataaatacaaataatatctgctggccaggcacagtggctcacgcctgtaatcccagcactttgggaagctgaggcaggcagatcatgaggtcaggagatcaagaccatcctgtgtaacatggtgaaacctcgtctctactaaaaatacaaaaattagccaggcgtggtggcaggtgcctgtagtcccagctactcgggaggctgaggcaggagaatggcgtgaacccgggaggtgggggttgaggtgagccaagatcgcgccactrcattccagcctgggcgaaatagcgagactccatctcaaaaataaataaataaaataaaataaaatatctgccatttggctgcaaagtatggtgctgatttaacctgaatattaccacataaaatcaaataacaataataatagaaaataggtttatagcagtaccagaattatattacttaatttagctgccttttcccaaaatataatcacacttcctagattttacaggtcagatataaaagagtacagtggaagaattcaatcacatgtgccttcattgttcactttttcatctcaagctcttcttttcatgctagctgttccagctcttcaaaaaatgtttgttcttgtgagtcagaaatattgtatccattttattaacagcctgtttgaagccaataagatgaatgcgtttgctgagcataggttagtttatggcaaagtctggactcaaatcaatggcaggagaggagaggcaagctagttagatacctccaaaggacttggacataaggaagatttcagagttaaattagcaaaatgcatac

SEQ ID NO: 693122 - DNA, 1289 bp, Homo sapiens
tgtcttgaaaggttgtcctgctcatagttccgagcaaatgtgagaaacaacagaggcttccaacaaatacctgctaaagaatgaggaaatggacacaggcaaataggcaaatggagtctccttaacggaatcgtaaggctgtctggaggtaatacgagtggaaagaactcctgtgtgaaaatctgcatgcatctttgcccccgtggaaccgtctacacaagtgctaatggaacagttagttacatacctatttttttaaactctgactttaccattacagaggttatatatctataggattttttgcctgaatttttagattttcacctggagatctggtatggaataattaaatgctgcatattgtttctcttattcttaaggatcttggagaaattatttaacagtctgagatctccttctctccttccctaccctccccacccctgacctataacagctagggagagaaaataaatacaaataatatctgctggccaggcacagtggctcacgcctgtaatcccagcactttgggaagctgaggcaggcagatcatgaggtcaggagatcaagaccatcctgtgtaacatggtgaaacctcgtctctactaaaaatacaaaaattagccaggcgtggtggcaggtgcctgtagtcccagctactcgggaggctgaggcaggagaatggcgtgaacccgggaggtgggggttgaggtgagccaagatcgcgccactgcattccagcctgggcgaaatagcgagactccatctcaaaaataaataaataaaataaaataaaatatctgccatttggctgcaaagtatggtgctgatttaacctgaatattaccacataaaatcaaataacaataataatagaaaataggtttatagcagtaccagaattatattacttaatttagctgccttttcccaaaatataatcacacttcctagattttacaggtcagatataaaagagtacartggaagaattcaatcacatgtgccttcattgttcactttttcatctcaagctcttcttttcatgctagctgttccagctcttcaaaaaatgtttgttcttgtgagtcagaaatattgtatccattttattaacagcctgtttgaagccaataagatgaatgcgtttgctgagcataggttagtttatggcaaagtctggactcaaatcaatggcaggagaggagaggcaagctagttagatacctccaaaggacttggacataaggaagatttcagagttaaattagcaaaatgcatac

SEQ ID NO: 693123 - DNA, 1289 bp, Homo sapiens
tgtcttgaaaggttgtcctgctcatagttccgagcaaatgtgagaaacaacagaggcttccaacaaatacctgctaaagaatgaggaaatggacacaggcaaataggcaaatggagtctccttaacggaatcgtaaggctgtctggaggtaatacgagtggaaagaactcctgtgtgaaaatctgcatgcatctttgcccccgtggaaccgtctacacaagtgctaatggaacagttagttacatacctatttttttaaactctgactttaccattacagaggttatatatctataggattttttgcctgaatttttagattttcacctggagatctggtatggaataattaaatgctgcatattgtttctcttattcttaaggatcttggagaaattatttaacagtctgagatctccttctctccttccctaccctccccacccctgacctataacagctagggagagaaaataaatacaaataatatctgctggccaggcacagtggctcacgcctgtaatcccagcactttgggaagctgaggcaggcagatcatgaggtcaggagatcaagaccatcctgtgtaacatggtgaaacctcgtctctactaaaaatacaaaaattagccaggcgtggtggcaggtgcctgtagtcccagctactcgggaggctgaggcaggagaatggcgtgaacccgggaggtgggggttgaggtgagccaagatcgcgccactgcattccagcctgggcgaaatagcgagactccatctcaaaaataaataaataaaataaaataaaatatctgccatttggctgcaaagtatggtgctgatttaacctgaatattaccacataaaatcaaataacaataataatagaaaataggtttatagcagtaccagaattatattacttaatttagctgccttttcccaaaatataatcacacttcctagattttacaggtcagatataaaagagtacagtggaagaattcaatcacatgtgccttcattgttcactttttcatctcaagctcttcttttcatgctagctgttccagctcttcaaaaaatgtttgttcttgtgagtcagaaatattgtatccattttattaacagcctgtttgaagccaataagatgaatgcrtttgctgagcataggttagtttatggcaaagtctggactcaaatcaatggcaggagaggagaggcaagctagttagatacctccaaaggacttggacataaggaagatttcagagttaaattagcaaaatgcatac

SEQ ID NO: 693124 - DNA, 2382 bp, Homo sapiens
ggaaagaaaatggtaactacttgagatgatggttatgttaagtagcttgattgtggtgaattttcacagtgtatatgtgtagtacatcagcrgtttgttcaccttaaatatatataattacaaattgtcagctaaacttaaataaagctgggaataataaaataaaattagctatttgagaaaacagagaaagtgttgcaactagaatgacacttagaaaaaaatggaggtaacttcccctgtttttctttgtgatatgtgagtgacttgaattggaataaggatccagagagtagagagagtataggaaacactgtggtgtaccctcaggtaccaaaagtgttggctgctgaaactcaaaactgagtctttcttcataatttgtggttggctgaagggagtttacttgccaagaatacattcattttgggggcagcccatattccatgatcgtttaataagggggagaaatttagccccttacctcaattgagacaactttgaagggccacctcaactctagagtatctacaaaataagctgaagctttgtggccactgcattgccactctttaaccctgcttgcttcacttttcatacatattaatctcagagaaggactttaaaaacttcctaaatacattttccagagtttcaaagtcttttcctgggaaactcaaaatatgacagacagacatacaaacacacacacacacacacacacacacacacgagaaaaataacaattggcaaaatactacaagattagaagcacagacagaataattagctaatcggaaggatatatacttcttttgcaacttaagtaaaaagacatgagaatgtgaggataaataaataatgcaatagaaaattgaagatgtttttgcctgagacgcttaatttatttttcctatgcagttaacagtcagttcttttgctaagatagacgaggatatatttgaagtttgaggaaagctataattttttaatatggtaggtattcagaatggaaaatgaagttgtcccggacaggtagaatgattgcttagattaatgctgagggaaagaccgaagttggaaagaacatagtattaaaaagagcaaagatgtcaaatattggcctagttatttcacatgaattaattaatctgagtttcagtctcaccagaacattttgaatagtaataccatgcccttgttacttcatagaattgttttgatgattaatcaaatattgtatgttaaagtaaatttcaataaattataaaagctgaatgtatattaacagttattttagttaatgtaaagaaataacaactagatttggcaaagaaattgaacatgcagagaatttgaaagtgtaaaaccttaaccacattaatataaaaacttcaaagacctgtgctctgaagtgtaactcattgcccattacataaaacctctacccagtcattcgaattttaagttgtaagcaagctttggaaggatgatttataactggctacctttgaaaagggtacccaaaggtagatcaatgcactctaatagaaccacttataactgtactaagtgccatgattatccttgttatttgattctattcttcctcagatctcaggattcaagtcatctttgattggtctgtcttgtcttggcctgaggcacagctatgtaagtcaatggagtctgaatatttttctctacttgtcttggtcattttatgatcattgatcccattatccctccattccatttgctctctgaaaaccccccatgctgcacagttctgagctgcagggatacagtcagcatactggctccctttgttactgacctgggagtttttctcaatacagtggaaaattttaaaaatctcctatttgaaaaaggtgaaataagttgtaaaaaggcttgtagcttggcttacagctatagactaattatatttccaaatgcagagaaaggaagcataattaatagtgcactgcaaatctgcattgggccaagtttttttaaaaaaccattgctttttaaaaccaaaacagcatggtactggtaccaaaacagagatatagatcaatggaacagaacagagccctcagaaataacgccacatatctacaaccatctgatctttgacaaacctgagaaaaacaagcaatggggaaaggattccctatttaataaatgctgctgggaaaactggctagccatatgtagaaagctgaaactggatcccttccttacaccttatacaaaaatcaattcaagatggattaaagatttaaacgttagacctaaaaccataaaaaccctagaagaaaacctaggcattaccattcaggacataggtatgggcaaggacttcatgtccaaaac

SEQ ID NO: 693125 - DNA, 649 bp, Homo sapiens
ggacccmggccctgtgcttttctagggaaatgggtagaccttaccaaagacaacttaagagttacaatggccacagtgaagaatttttaacctagttaaaattgttcgcttgtgaggtgcattagaaaataaaggacccaaaattcttcagaaacaatgggaggtatttttttattggcatatggaggctccaaaaagacaaaatgaatcaaaaattgcccctccaaaaaaatccttacaaaaggccaatgaaaagcttaagcaactaattgatgaaacagaaaaaataatatctcactactcttattttctttttatccttctctcctactctgaatctacaaattttttcacttagatatcttcctaccccatacatgaaaataaaagtagataaatgccttataaaattaggcccccagggaaaccagatttgcttctttaacttctttggtcaaagacttgagttcagatcaatagtaaatggtttccccctttcaaaggaaaaacctcagaaaattgtttaggaatttaaaattctcactgaagtatataatctaagacccttgatctttaccaatttagtcacatgatacttgcacctggcaaagcccataaattaataactggagccaaatggcaggtactt

SEQ ID NO: 693126 - DNA, 1276 bp, Homo sapiens
aaagcactattatacatattcagcctatgagaaaaaaggaaatgaaatgtacagcttaacttggagactgcctaataaagggatttcaacatagtgttaataaaactgcattgtaatttcaaatgagggaaaggcattccacatttgagttcctaggcaatgctcaagttgttgtaaaatctttactcctttctccccacagaattactgcccaagttctgtttactaaaccacattggattcttcactaacttttccagcttctgcactcccagcaattcccaggaattgtctttcagcatctatagccataacgcttataattttgatctctttctggagggagcaggggctgctacatgtaaacaagtcctgtggcactctgcctattccttggagttattatgaagggaggtaagctgaggttcaggtttttttaatataaaattaatacttacaaataaaggttaattacaaatatacttggaagaaatgactgacattgatttatattacaatccaaataaacaggttggggacaaacaccaggagggttgagacctattaccaaagagtaaaatgaagtttgagtggagactgttgtgcctatgataaaggtgacctgttccacagtatcggttagggtcagtccatcatcctttcttttagtaatgtgtatcatgttcctatatctcagacttcatgtgagactcttggacacaggagtgaataggaaggctgtgctcactgctatcatggagtttacagtttcatagagacaaaaagaggtagaagttattagtactggaatatttgactgagcaagaactctggtttcagaaagactgggttaaaaccccaactctgaatgaacttgctcarctcactaaatgcctctgagtctcaatttcttcacctctgatggaaataataatacctaatcagcaggttgaagctttatgtggaattatttttattttatgcagatgtatctagataaaacctctggggaacttgatttaaagttgccagtttcacccaataggaaaacaaaacaactagttgactagggaagtggggactagataaggaaagaatggagagaacatctcattccccatatttcttaactgtaccgtctttggactcttatcttggatattcttgggacaagaacaacaacttgaataaactttagctatcagctaaaacgtcaaaagaaaacataacaacatgtacaactaaaagtacagcaaagatctgttagaatgaatat

SEQ ID NO: 693127 - DNA, 622 bp, Homo sapiens
agccttgttttttggcccttcaaggttaagcgtctgttgcagtggagaggctgaggtgctcctctagtcttttsgcaattatattctgactgaggctgccagcaaaaacactctggtggggcagcagttggcctccaggcatgtgaataccagtgagggtccccatacacgtgcatggtggttgggcagcagtggatccacactcacatggaaaccggtgaggcagctaggggtgtctgtgggagagtgcacactcccaggggaaggctgttggtcagtgcatgctggtgggggaaggctacaggtaggtgtgtgacaccagtggggggatctgtggattggtgtgtgttggtgaggagaggctgcagatggctgcatgcttgcaggggtccatctgcaggagtgatttgaaggttaggtggggtattccagtgaatatgctgtgataagtgtcctcttgagattatgatgcaagtgagtgtggacaggcagggaatctgggtgaaactggcagacctggcagtgctcagattacattggcctcattccagggcaaggcaaccctgctctgtcaaggcctggtagccaacaatggctggagccatttagaggattatggcaa

SEQ ID NO: 693128 - DNA, 622 bp, Homo sapiens
agccttgttttttggcccttcaaggttaagcgtctgttgcagtggagaggctgaggtgctcctctagtcttttcgcaattatattctgactgaggctgccagcaaaaacactctggtggggcagcagttggcctccaggcatgtgaataccagtgagggtccccatacacgtgcatggtggttgggcagcagtggatccacactcacatggaaaccggtgaggcagctaggggtgtctgtgggagagtgcacactcccaggggaaggctgttggtcagtgcatgctggtgggggaaggctacaggtaggtgtgtgacaccagtggggggatctgtggattggtgtgtgttggtgaggagaggctgcagatggctgcatgcttgcaggggtccatctgcaggagtgatttgaaggttaggtggggtattccagtgaatatgctrtgataagtgtcctcttgagattatgatgcaagtgagtgtggacaggcagggaatctgggtgaaactggcagacctggcagtgctcagattacattggcctcattccagggcaaggcaaccctgctctgtcaaggcctggtagccaacaatggctggagccatttagaggattatggcaa

SEQ ID NO: 693129 - DNA, 640 bp, Homo sapiens
tttttttttttttttgagacagagtcttgctctgtcacccaggcttggagtgcagtggcatgatcttggctcactgcatcctccgcctcccaggttcaagcgattcttgtgcctcagcctccygagtagctgggagtacaggcacgtaccaccacacttggctaatttttgtatttttagtagagacgaggtttcgccatgttggccaggctggtctcgaacccttgacctcaggtgatccgcccgccttggccacccaaagtgctgggattacaggcatgaaccaccatgcccagccataactgtacatttcaaaaaaggctcttctgaggaaatactataacatgtctaaagctcttttttcttttttgatgtctgtagtttaaaaaatatcttcttatatgtaagcttctaattttcttgtttgtttgtttatcctggcagtctgggcagaattaattattttggggttacatatagttagatcactgattcgtttaattaaccttgaatgcatctgcttttcatttctaaaaatcattattttggtcccttcattaccaagaggccaaagtcactttaaaatacttagtagcatagtatgaatttactgtctgaagaacagtgattttataaaaaa

SEQ ID NO: 693130 - DNA, 1215 bp, Homo sapiens
cactaacagatcctctgagtagagtgtcagaggttacttcataaaaatgatactgcctgtgcacatgtaccctagaacttaaagtataataaaaaataataaaataaaataaaataaattaaaaaaaataaaacatatgtatgtggccaggcgcggtggctcacgcctgtgatcccagcactttgggaagccgaggcaggcraatcacgaggtcaggagttcgagaccagcctggccaacatgatgaaactccgtctttactaaaaatacaaaaattagccaggcgtggtggcgggcgcctgtaatcccagctactcaggcggctgaggcaggggaatcgcttgaaaccagaaggtggaggttgcagtgatgagccgagatcacgccactgcactccagcctgggcaacaagagcaaaactccgtctcaaaaaaacaaaaaacaaaacaaaacaaagtatgtatgtgactctcttaacaactaaacctcctctattaggaatcttactactgtgttacttcatctcaaatcttttaatagtctcctggtgactttgagaagtatcatgcagaaaacctctgcattttcactccactttgaaactggtcatgtcttgggaactgactcattctactaatcatatagcaaagagaaaaaacatagttcttagtttaaaacatgagcaattcattgtgtcacatatctttgtgttttggtaaattcatcattagagagagagaaaaaacatcaatggagtttaaaccctttgtctcgttaagtcgcaaaaaaaattattggactaaataaaccacgcagtgtcaagttcaaaaaagaatgatactgccttcacaaaaattgtaagagtgagaaaattatgacattgaaagagatctgatctaaccaacccctatcttgcctttaacctccaaattacccttaatcattcctcggcctggcccaagaaaactttgagagacatttgttttatagtttaaaagataatagaccacaggtgtccaatcttttggctttcctgggccatattggaagaattgtcttgggccacatataaaatacaccaacactaaagatagccgatgagctaaaaaataaaaatcacaaaaaaagtcacaataagtctcataatgttttaagaaagtttacaaatttgtattgggccgcattcaaagccatcctgggccgcatgtggctcat

SEQ ID NO: 693131 - DNA, 989 bp, Homo sapiens
ccgtgagctccctataaacagtgacagccctccattcttggatttattgcttgctaaaagcattttatttcctcctggaaacaagcaactcacaattcttgaaataaggccttttaagacctttgcagtttatttgctcactatataaagtatgattcttctcttggcgccacagaacttcctccgagacctctttcttcaccacaaaaaggccatttctgaggctaaactggaagaatacactggcaccatggtaagtaatgagtaatgtaatctccatgagggcagctcccccactccctccccagaccccagaaacagtgtctgctagagagttcgtccttgagaaattgaagactaaatgaatgcaagaggaaacctcaactctgaaaaatactggctaaaactgaactgttttagcctctctcttgtgaccaggttgcatctatttgagagagaaagctgttcaccagtctgtggggaaacctgaaaagttcagtcaacattaggtttctaagcatcaggccaataacctcaatgttaattgaagtcacatggaaacaagtaaacatggacttagacaatcaggaccaaacagatggaagctgcctctcaccacagtggatgattctcctcatttagcatgttgatttagtgcagttggagagtcagatagatgaaggatgcatgtcctacctctgccacttactagctatgatgtaagaaaactgtcaagcctctcaactttatttacttctcctataaaatggggaygaataacacctaattcctgtgagggaaaatgtgttaatgcatatgaagcacttgcatactgtccagaatataatgagttagctcttattgcagtagttgtcattatttcctgttcccctcatgtcatccttgttccaagtgaccttgagactatttttgtgtcaagctccatggagagtagtaaagtagggagctgcctttggcgaactcatcct

SEQ ID NO: 693132 - DNA, 788 bp, Homo sapiens
gttgtaaagtcacaaaattcactcacatttcaactcagatctgcaaagaaatctctctcttctattttgcccaaaccaatctggtctttctaatttgtggttagtgcagaaacttttaacttttagtcctatcttgtttaaagtttagtctcatctaataatgtaaacaacttctttggacaatgctaagtctctctatgaaaggaaagactcagtgtcaacaccttttgccttcacggaaacatgaggtttctcctataccctatgagagtaccctatgatatgagccctccaagccctccttggtggttgatatgctaaatgagggctagaataaaatagtttcagaaaaccttgactcaaaccaagtacccatatttcaagcttgtaatctttataaaaatcctgttttgcctgtcagagactgtggtagtcgttgctgctatcctccaaataattagttttcctcttaagcacatggcaggattgtattattctrtccctttgaaggtagctgtggccagggatctgctttggacaataaaattttaatcagtaaattatttattattctttctttctgccatggcaatcaggaatgtgccagatggtcactactttgtcactccatgtcgccagagtatagacaacatgaagtagagctgccagctaaccctgtgaaaaataaacctgtgttgtgttaagccactgagatttaggagatttggttactacgactcatcctaacagagaggctgacatgcaattccttctgtgacaaatactaa

SEQ ID NO: 693133 - DNA, 648 bp, Homo sapiens
ggagggctgggcagaggcctggcctggaggtatcaattgggaaaattattaacatatggatggattttaaagccgggagactagaagaaataattagggaaatgaatgtggatccagggtcagcaaactatggctcttgggttgaatccaaccagctgcctgtttttgtaaataaaattatattggaacactgccgcacccatttgtttatccattgtccctggctgttttcctgctacaatggtggcatcgagtagctgctacagaccctctcatggataaagmctatactttaagacctggccaacctctggtatggatacgaatgggaaagagtcccaagaactgggccaataaggttgggatgtgatatggtttggctgtgaccccacccaaaatctcatcttgaattgtaatccccataatctctacatgtcaagggagacaccaggtggaggtaattaattcatgggggccatttctcctatgccattttcatgatagtgagtgagttctcaggagatctgatgttattataagtgtttggtagtttctccaacgttcattctcctttttgccgccttgtgaagaaagtgccttgcttccccttcaccttctgccacgattgtaaattttctgaggcctccc

SEQ ID NO: 693134 - DNA, 877 bp, Homo sapiens
caacagtagctagaagacacattatctgactgcttgcctcactcacttgcgaagtacctgctggccttgttgagcacctctcagaaaagatgaggggttaaaatgcacatggtctgtttcctgactgacccctctaataggggctgacacttggccatgacattgtgagacacaaycctagcacaggcttttacataagccaccaaatgatacttcttcatatcagaatctcaaaaatgatagctacttttcctccttgactttcatttttgacttagccttctaaggatggcctctacaaaatatagagctctccttaaatgtcatcagtctcgatgccttttccactttccatcttcctccatctgcaaatagtcttgctcagatacttgatgttttcacattttctatctcttgcacattaaaacttatttatgaactgtgtgacattgaaaaaataattttacccttcctggccccagatttatatttatacatacctcctacatttcttgtagggtttaaataaaattatatgcatgcattgttagtgggatgttgtcaccatagtgctgtataacaaatcacccccaaagccacgggtttacagcaacagacatttattctcaagctcatacatctgcttgtataatctcctggtgtggatcagccaggcatggctccaggctatgagttgtgcccaggtctgcctgatgtatgcttattctacaaaccaggttgaaggagcggtagcccctcagagtaagttctttccatgatgaatgcaccagagccgagccaagccaacccatgtaggagctcttaaggcctccctcatgtcaagcttgctaataccatattgagagagcaagtcaca

SEQ ID NO: 693135 - DNA, 647 bp, Homo sapiens
accatcactctccacgagagtagagactttattttttgtttgagacagagtcttgctctgtcacccaggttggagtgcagtggcgcaatcttggctcacygcaacctccgcctcccaggttcaagcggttctcttgcctcatcctcccgaggagccaccatgcccggctaatttttgtatttttagtatagacggagttttgccttgttggccaggctggtcttaaactcctaacctcaggtgatcagcccgcctccgcttcccaaagtgctaggattacaggtatgagccactgtgcccggccaagactttgtttactgtctacagaatgcctagcactactcaaccaatacttgatggatgaatatcagtagatattgacaagggttttaagaaattcaatctctatctatgataaaaggcttggtaaaatggaaacaaacagctactttttaaaatgacaaaagagaaaagtatctcatatccaaattttgctttctgtttaatgttgaaataatccaagcatttctattagattcagaacaaaacaaggatgtcctctattccagatataagtgccaaagcaattaaacaagagactgaaataaaaggtatgcctgtttttaaaaaggaggtaaaaacagtta

SEQ ID NO: 693136 - DNA, 2052 bp, Homo sapiens
aaccatcaaaaacatttttagtgcaatatttaacatgagctatacaacccttcctaaatgccaaaggcacacacagacacacacacagacacacacacacacactcacactcacgaagaatacaaatgactagaaccaagcaatgtaaatacattctgctacgtatggtaaacatagcctacaatgtggaagagattagaaaataaacatggaaatgaaatgtttttattaattcgcatcagtacccaccaaaaccaatcagcataatcaaatattataacactgaatgtaaaaaacaatccaaaagtccagagtgatagcaaaaggttttaattgtatagattaaaattaactttggacaaaaattaaaactcaggcagagaatgttttcttctttttgcaacagcagacactagtaaaaacaaaggcacagtaaaaattgagacccaaaatttgcagtgtagagatatgaatataataatagacacaggcagggaggattaataaatgataaaatgtttagaggatgatcattagaatacaggatatttatactcttgaaaaccgctttcccaagtacttcattataagtaaggtgtctctaaaagggacagatctcctagacccctccttaaccaagtaaccagtcctgatatcataatggtgatggacaaactagaccttctctgcccgcagatgggctgaggttggaaactcacagcattgtctctgcagtgttcccggcaaaacgtttaggctgaatttaatcatgaagacattttcagacaacttcagaatgtagatcattgagccagacagctgacctgtcctctataaacaagtccatgtcaccaccatccatgacaacaacaaaaagatgaggaaatatttggggttcaaaataactaaagaaatgcagctacattatctttttactttttttsaaccgaaaatatctcttctcctttttgttgtgtgatttgtggtgatatggactatgtgaaggagacaggtcagttgtcctgctcagtgttctacattctgcagttgtctggtgattacctcctatgaaactcaggttaagcgttttctgcaagaacatggcattgctcatattctgcaccggcagagtcctgggtgacatgctgtctcctgccagcggctcctgactcctgttctctacaggatggaattgagaggagcagggctaaggcctcccaatgctgtttgtccatctagctgtggtcttcctaagtactgacaccaattggaggctgaaggactgtggcttctctaaccaaaggagcctagcgggttaacaattgtcaagagcagttggtggttctgaaatacaatcctcagccaaggatccctcctgtgttacagatggatcagctaaaacaagccaacactgaagacacaaagaatgaggttaggttcattgaaaccagggtaacacctttggatgagctaaacacaaagatgacaatgaccttgagcaggtatagaagctcagagacatgcctgcaaaatgacatccctgaggaattttgtagctacccagagatacgtggttcaaattaaaatgtctgactgatcactcccggcatgtgctgcacagttatgtgaacgtgtcacacctaacgtgggtccattgtcttcagactgagcacaggttgccactggcatggtttgagaataggaatagagccatgcccactgacccatcctatgtctgggcttccaaatggaactgtactttcattcaaatcttcacgtgcctataggtcctgcctgcaggaatgacacctctcggcttagtaagggctgcttattgtgggaatatgactcccatctggaacaccaggtggagacttgtcaccgtcaaagtaaaaaacctattgtccacgtaaagggcgaagctgatatgctcttcctcaaatgagtaaaacacacttctgtagtgctggaatgagtcaggtagttcaaagtacattgacggagtcgaataacatatatccagtgagtcctgcaagacttcaggctcttcca

SEQ ID NO: 693137 - DNA, 2052 bp, Homo sapiens
aaccatcaaaaacatttttagtgcaatatttaacatgagctatacaacccttcctaaatgccaaaggcacacacagacacacacacagacacacacacacacactcacactcacgaagaatacaaatgactagaaccaagcaatgtaaatacattctgctacgtatggtaaacatagcctacaatgtggaagagattagaaaataaacatggaaatgaaatgtttttattaattcgcatcagtacccaccaaaaccaatcagcataatcaaatattataacactgaatgtaaaaaacaatccaaaagtccagagtgatagcaaaaggttttaattgtatagattaaaattaactttggacaaaaattaaaactcaggcagagaatgttttcttctttttgcaacagcagacactagtaaaaacaaaggcacagtaaaaattgagacccaaaatttgcagtgtagagatatgaatataataatagacacaggcagggaggattaataaatgataaaatgtttagaggatgatcattagaatacaggatatttatactcttgaaaaccgctttcccaagtacttcattataagtaaggtgtctctaaaagggacagatctcctagacccctccttaaccaagtaaccagtcctgatatcataatggtgatggacaaactagaccttctctgcccgcagatgggctgaggttggaaactcacagcattgtctctgcagtgttcccggcaaaacgtttaggctgaatttaatcatgaagacattttcagacaacttcagaatgtagatcattgagccagacagctgacctgtcctctataaacaagtccatgtcaccaccatccatgacaacaacaaaaagatgaggaaatatttggggttcaaaataactaaagaaatgcagctacattatctttttactttttttcaaccsaaaatatctcttctcctttttgttgtgtgatttgtggtgatatggactatgtgaaggagacaggtcagttgtcctgctcagtgttctacattctgcagttgtctggtgattacctcctatgaaactcaggttaagcgttttctgcaagaacatggcattgctcatattctgcaccggcagagtcctgggtgacatgctgtctcctgccagcggctcctgactcctgttctctacaggatggaattgagaggagcagggctaaggcctcccaatgctgtttgtccatctagctgtggtcttcctaagtactgacaccaattggaggctgaaggactgtggcttctctaaccaaaggagcctagcgggttaacaattgtcaagagcagttggtggttctgaaatacaatcctcagccaaggatccctcctgtgttacagatggatcagctaaaacaagccaacactgaagacacaaagaatgaggttaggttcattgaaaccagggtaacacctttggatgagctaaacacaaagatgacaatgaccttgagcaggtatagaagctcagagacatgcctgcaaaatgacatccctgaggaattttgtagctacccagagatacgtggttcaaattaaaatgtctgactgatcactcccggcatgtgctgcacagttatgtgaacgtgtcacacctaacgtgggtccattgtcttcagactgagcacaggttgccactggcatggtttgagaataggaatagagccatgcccactgacccatcctatgtctgggcttccaaatggaactgtactttcattcaaatcttcacgtgcctataggtcctgcctgcaggaatgacacctctcggcttagtaagggctgcttattgtgggaatatgactcccatctggaacaccaggtggagacttgtcaccgtcaaagtaaaaaacctattgtccacgtaaagggcgaagctgatatgctcttcctcaaatgagtaaaacacacttctgtagtgctggaatgagtcaggtagttcaaagtacattgacggagtcgaataacatatatccagtgagtcctgcaagacttcaggctcttcca

SEQ ID NO: 693138 - DNA, 2052 bp, Homo sapiens
aaccatcaaaaacatttttagtgcaatatttaacatgagctatacaacccttcctaaatgccaaaggcacacacagacacacacacagacacacacacacacactcacactcacgaagaatacaaatgactagaaccaagcaatgtaaatacattctgctacgtatggtaaacatagcctacaatgtggaagagattagaaaataaacatggaaatgaaatgtttttattaattcgcatcagtacccaccaaaaccaatcagcataatcaaatattataacactgaatgtaaaaaacaatccaaaagtccagagtgatagcaaaaggttttaattgtatagattaaaattaactttggacaaaaattaaaactcaggcagagaatgttttcttctttttgcaacagcagacactagtaaaaacaaaggcacagtaaaaattgagacccaaaatttgcagtgtagagatatgaatataataatagacacaggcagggaggattaataaatgataaaatgtttagaggatgatcattagaatacaggatatttatactcttgaaaaccgctttcccaagtacttcattataagtaaggtgtctctaaaagggacagatctcctagacccctccttaaccaagtaaccagtcctgatatcataatggtgatggacaaactagaccttctctgcccgcagatgggctgaggttggaaactcacagcattgtctctgcagtgttcccggcaaaacgtttaggctgaatttaatcatgaagacattttcagacaacttcagaatgtagatcattgagccagacagctgacctgtcctctataaacaagtccatgtcaccaccatccatgacaacaacaaaaagatgaggaaatatttggggttcaaaataactaaagaaatgcagctacattatctttttactttttttcaaccgaaaatatctcttctcctttttgttgtgtgatttgtggtgatatggactatgtgaaggagacaggtcagttgtcctgctcagtgttctacattctgcagttgtctggtgattacctcctatgaaactcaggytaagcgttttctgcaagaacatggcattgctcatattctgcaccggcagagtcctgggtgacatgctgtctcctgccagcggctcctgactcctgttctctacaggatggaattgagaggagcagggctaaggcctcccaatgctgtttgtccatctagctgtggtcttcctaagtactgacaccaattggaggctgaaggactgtggcttctctaaccaaaggagcctagcgggttaacaattgtcaagagcagttggtggttctgaaatacaatcctcagccaaggatccctcctgtgttacagatggatcagctaaaacaagccaacactgaagacacaaagaatgaggttaggttcattgaaaccagggtaacacctttggatgagctaaacacaaagatgacaatgaccttgagcaggtatagaagctcagagacatgcctgcaaaatgacatccctgaggaattttgtagctacccagagatacgtggttcaaattaaaatgtctgactgatcactcccggcatgtgctgcacagttatgtgaacgtgtcacacctaacgtgggtccattgtcttcagactgagcacaggttgccactggcatggtttgagaataggaatagagccatgcccactgacccatcctatgtctgggcttccaaatggaactgtactttcattcaaatcttcacgtgcctataggtcctgcctgcaggaatgacacctctcggcttagtaagggctgcttattgtgggaatatgactcccatctggaacaccaggtggagacttgtcaccgtcaaagtaaaaaacctattgtccacgtaaagggcgaagctgatatgctcttcctcaaatgagtaaaacacacttctgtagtgctggaatgagtcaggtagttcaaagtacattgacggagtcgaataacatatatccagtgagtcctgcaagacttcaggctcttcca

SEQ ID NO: 693139 - DNA, 2052 bp, Homo sapiens
aaccatcaaaaacatttttagtgcaatatttaacatgagctatacaacccttcctaaatgccaaaggcacacacagacacacacacagacacacacacacacactcacactcacgaagaatacaaatgactagaaccaagcaatgtaaatacattctgctacgtatggtaaacatagcctacaatgtggaagagattagaaaataaacatggaaatgaaatgtttttattaattcgcatcagtacccaccaaaaccaatcagcataatcaaatattataacactgaatgtaaaaaacaatccaaaagtccagagtgatagcaaaaggttttaattgtatagattaaaattaactttggacaaaaattaaaactcaggcagagaatgttttcttctttttgcaacagcagacactagtaaaaacaaaggcacagtaaaaattgagacccaaaatttgcagtgtagagatatgaatataataatagacacaggcagggaggattaataaatgataaaatgtttagaggatgatcattagaatacaggatatttatactcttgaaaaccgctttcccaagtacttcattataagtaaggtgtctctaaaagggacagatctcctagacccctccttaaccaagtaaccagtcctgatatcataatggtgatggacaaactagaccttctctgcccgcagatgggctgaggttggaaactcacagcattgtctctgcagtgttcccggcaaaacgtttaggctgaatttaatcatgaagacattttcagacaacttcagaatgtagatcattgagccagacagctgacctgtcctctataaacaagtccatgtcaccaccatccatgacaacaacaaaaagatgaggaaatatttggggttcaaaataactaaagaaatgcagctacattatctttttactttttttcaaccgaaaatatctcttctcctttttgttgtgtgatttgtggtgatatggactatgtgaaggagacaggtcagttgtcctgctcagtgttctacattctgcagttgtctggtgattacctcctatgaaactcaggttaagcgttttctgcaagaacatggcattgytcatattctgcaccggcagagtcctgggtgacatgctgtctcctgccagcggctcctgactcctgttctctacaggatggaattgagaggagcagggctaaggcctcccaatgctgtttgtccatctagctgtggtcttcctaagtactgacaccaattggaggctgaaggactgtggcttctctaaccaaaggagcctagcgggttaacaattgtcaagagcagttggtggttctgaaatacaatcctcagccaaggatccctcctgtgttacagatggatcagctaaaacaagccaacactgaagacacaaagaatgaggttaggttcattgaaaccagggtaacacctttggatgagctaaacacaaagatgacaatgaccttgagcaggtatagaagctcagagacatgcctgcaaaatgacatccctgaggaattttgtagctacccagagatacgtggttcaaattaaaatgtctgactgatcactcccggcatgtgctgcacagttatgtgaacgtgtcacacctaacgtgggtccattgtcttcagactgagcacaggttgccactggcatggtttgagaataggaatagagccatgcccactgacccatcctatgtctgggcttccaaatggaactgtactttcattcaaatcttcacgtgcctataggtcctgcctgcaggaatgacacctctcggcttagtaagggctgcttattgtgggaatatgactcccatctggaacaccaggtggagacttgtcaccgtcaaagtaaaaaacctattgtccacgtaaagggcgaagctgatatgctcttcctcaaatgagtaaaacacacttctgtagtgctggaatgagtcaggtagttcaaagtacattgacggagtcgaataacatatatccagtgagtcctgcaagacttcaggctcttcca

SEQ ID NO: 693140 - DNA, 1395 bp, Homo sapiens
tgagggaggccggcccgagtgggttctgggactctggctggcaggcctggtggtggatggctcccatggttgtcctccccaccttggcctccgggtcatcataatttgctgctctttatcaagcacttmctatgtgctgggcccagggccaaccaaccactttctatgcattctcccagagatgtctctaacttgctgagaggcaagcactattatcatccctgtttggcactttgagggtacccagagttgggggtccacagctgggaagtggcagggctgggattgtgtccagcctataggaccctcagagagcagcctccctcggtcacccagacctgttccttctctcccgtgggctcccagcagggcctgttccctgaggcttggagccctgagacagccatcacttagcctcttggcctccaggcttccccttcaaggccctccttctgccactgtcctgggccctgtctctggaacgcctgctcaatgtcacctgggcggcctgcgtaaagtacctgtttgccagaccctagccagccctgctgagtgagcatctcacaacgggagggctggaagcccacagtttaaaaaatactgacttggactcccaaagtaatcctagtactttgggaggctgaggcaggaggattcattgagtccaggagtccgagaccagcctgggcaacatagtgggaccctgtctctacaaaaaattaaaaaaaaaattaggcaggtatggtggcaaacgcctatagcctcatctacttggaaggttgagggggaagatcacttgagcccaggaggtcaaggctgcagtgagctgagatcgcaccaccactctccagcctgagcgacagagcaagaccatatctcaaaaattaaaaaaaaataaaaaatgctgccctgaggatacagaggcctgtgcattccaagagccagttcacagctccctggcatctgtagtggctactagatttcccaatccccaacccttgtaacccagatcctgtgaccgagcccccgcctgtgttcgtagcctgggccccaccagctcttcatacaccgcgctcacccctgccccaccgcccccgccatgctgtcatcctagcacttgctgcctctgcctcttcctggaagcaagtcccaggcagggcatgatgcccagagcttgcctaatgcactgggcaaatctctcgtggtgagtcctcatcttgctacctggggcctggcacatggttgtggcaaattgtggtgggtgagtgatggtggctgccacaggagaggggcacagggagagctgcaggtgactggggatgggttgggcccccgggctggcaccgggcatgcactagggcctggctctgtgcctggcacgtagaaggcatttga

SEQ ID NO: 693141 - DNA, 2115 bp, Homo sapiens
tcagctctctgaggcactctgggtaagtttcccagggccccagacgttaaggttccctctgcaaaaatgggtgggttcagctggccacgtggcctctctgggctgataccctgggctcagctacaccccttggaaggttttcccttgggatatgggcacaagtgaaaaacagagccataccctccaactcactgtgggcattcagtgaaaccatgtgtgtaagacgctttgttaattgtagaacgctgcacaaactcatcaggtccctcacccgtcaggcaggctctactgcagacactagacacgatcgaaccacttcccctgcttagcactcaatttccatatagtgaaatgaggtttattttggcaccgtggcccatggttcctgagatatgaaaatgaaatcatgcaaaaaaactccagcactttgggaggccgaggggggtggatcaccagaggtcaggtgttcaagaccagcctggttaacatggtgaagccccgtctctactaaaaatacaaaaattagccgggcatggtggcgggtgcctgtaatctcagctactcgggaggctgaggcaggagagtcacttgaacctgggcggcagaagttgcagtgagctgagattgtgccactgcactccaacctgggtgacagagtgagactccgtcttaaaaaaaaaaaaaaaaagaaaagaaaaaagcctgatagagcaaaatgcgcactgcccgaaggtgacagaaacccatgttgatgttggttccagcaaaaggtgcatggggaagagaaaggcctgcgaggaaggcccagtcagaagccagccaggcccaggggtggcaggatggtggggacactgccctgcttctttctctgtgctttcctgatgttctagaatggatgagaaacctttaaaccagaaaaatgcagttgtattctaacagcgggaagaaaaggagccccggagacagccggctcctgcttggtctgattctggggccaccgcttgcgggcagtgaccggctgtggggtctcaccgtggggcttgcctagcaccaggcacttctaccagagcaagtgratctgcggcaggaggcctgtgttgctctaattcctggaaattgggtcatgggagcccaggcctggagctcctggaatgcagtgctctgagaattttgtccaaacacctctgacctccttcctccggggctggtccagcctctttcttcccccgcgtcccccatgctccagcctcttgggcaattgtcatactccgtatgtgagcctcaccttcctacttcccggcctttgctgatactggtcccctgccctcctgaagagcctgccccttccagcccagctgctgccagagccccctctccttaggaagcccctcctgcccctcccagacagaggtgcccgcagggcaggagccagggctgcttgtttcacctccatgctgaagcccagcgggcgtggtcatccctgttggctgatgttgttactgaccccggcctctaagtgcttttcccactatcctcctacacacgggtcaagttctgcctagtggtagcgttatttgtcattgcatctgagccttgatcctgggtggggtcagtttctgtttctctcccagcttctgactctgtacccagtacactttgtgcccggtacagagcactcatctgtccatccgttctttcagcaattactccctaagtgcctattgtgcgccggtgactgagctaggtggcaggggcacagctctgctgacatcagggtgggcggcttgcagtttgcttgcatgtgttttgtgcatgctacatgtgtatgcacacagcatgaacatctccatcacatataaactagcgtctcttaggctgcgcagtcctctaggcaccttgtgcattcctggttaattcagcgagtgttgacagagtgcccaccaagcaggtgccaggccctgacatgaagtctttgcccttgtgaagcacctgtcttgtggagccattgcagtgagagctggtgcagagggtgaagggcagggggttggggcagcatcctggagagatgggaaaggggtggggaagggaatttctgcctggctggggtgtgctttg

SEQ ID NO: 693142 - DNA, 2115 bp, Homo sapiens
tcagctctctgaggcactctgggtaagtttcccagggccccagacgttaaggttccctctgcaaaaatgggtgggttcagctggccacgtggcctctctgggctgataccctgggctcagctacaccccttggaaggttttcccttgggatatgggcacaagtgaaaaacagagccataccctccaactcactgtgggcattcagtgaaaccatgtgtgtaagacgctttgttaattgtagaacgctgcacaaactcatcaggtccctcacccgtcaggcaggctctactgcagacactagacacgatcgaaccacttcccctgcttagcactcaatttccatatagtgaaatgaggtttattttggcaccgtggcccatggttcctgagatatgaaaatgaaatcatgcaaaaaaactccagcactttgggaggccgaggggggtggatcaccagaggtcaggtgttcaagaccagcctggttaacatggtgaagccccgtctctactaaaaatacaaaaattagccgggcatggtggcgggtgcctgtaatctcagctactcgggaggctgaggcaggagagtcacttgaacctgggcggcagaagttgcagtgagctgagattgtgccactgcactccaacctgggtgacagagtgagactccgtcttaaaaaaaaaaaaaaaaagaaaagaaaaaagcctgatagagcaaaatgcgcactgcccgaaggtgacagaaacccatgttgatgttggttccagcaaaaggtgcatggggaagagaaaggcctgcgaggaaggcccagtcagaagccagccaggcccaggggtggcaggatggtggggacactgccctgcttctttctctgtgctttcctgatgttctagaatggatgagaaacctttaaaccagaaaaatgcagttgtattctaacagcgggaagaaaaggagccccggagacagccggctcctgcttggtctgattctggggccaccgcttgcgggcagtgaccggctgtggggtctcaccgtggggcttgcctagcaccaggcacttctaccagagcaagtggayctgcggcaggaggcctgtgttgctctaattcctggaaattgggtcatgggagcccaggcctggagctcctggaatgcagtgctctgagaattttgtccaaacacctctgacctccttcctccggggctggtccagcctctttcttcccccgcgtcccccatgctccagcctcttgggcaattgtcatactccgtatgtgagcctcaccttcctacttcccggcctttgctgatactggtcccctgccctcctgaagagcctgccccttccagcccagctgctgccagagccccctctccttaggaagcccctcctgcccctcccagacagaggtgcccgcagggcaggagccagggctgcttgtttcacctccatgctgaagcccagcgggcgtggtcatccctgttggctgatgttgttactgaccccggcctctaagtgcttttcccactatcctcctacacacgggtcaagttctgcctagtggtagcgttatttgtcattgcatctgagccttgatcctgggtggggtcagtttctgtttctctcccagcttctgactctgtacccagtacactttgtgcccggtacagagcactcatctgtccatccgttctttcagcaattactccctaagtgcctattgtgcgccggtgactgagctaggtggcaggggcacagctctgctgacatcagggtgggcggcttgcagtttgcttgcatgtgttttgtgcatgctacatgtgtatgcacacagcatgaacatctccatcacatataaactagcgtctcttaggctgcgcagtcctctaggcaccttgtgcattcctggttaattcagcgagtgttgacagagtgcccaccaagcaggtgccaggccctgacatgaagtctttgcccttgtgaagcacctgtcttgtggagccattgcagtgagagctggtgcagagggtgaagggcagggggttggggcagcatcctggagagatgggaaaggggtggggaagggaatttctgcctggctggggtgtgctttg

SEQ ID NO: 693143 - DNA, 1902 bp, Homo sapiens
gctgtgttgcctaggctggagtgcagtggcaagatcttggctcactgcaacctccatctcccggttcaaatgattctcctgcctcagcctcccgagtagctgggattacaggtgcccgccaccatgcctggcaaattgttgtatttttagtagagatgaggtttcaccatgttggtcaggctggtcttgaactcctgacctcaggtgatccacctgacttggccttcgaaagtgctgggattacaggcatgagccactgcgcccgaagccatctcttggtaaaatactgctgagcattcagacagaacagaattaggagaaagagaaggaaccagcattgatttcttcaacacactgtgctaggtacctcakgcatttcgattattctaggctgtgagtgaagagttgttgccagaatctaaagtgtgttctgagaacttggccaaatgtagggtgaccatatgacttaccattcaaatttgggacactttgggggtgacgaagggattactatcaataattatgccctgggattgtctcacttaaactgggaggtatggtcaccctaggcagaagggaagtaaaatggtcctctgttactgattatctgttgctgtgtaaccaatcacaccaaaatttagtggtttaaaacaacaacagtctttttattatatctcttagtttctgtgggtcaggaattgggagagggcttggctgggtggttctgacctggggtctctcatgcattatagtttggtgtgggtggagcttctgtttttctctctctccatttagcctcagggtcattctgtagtgagtccatgtggggagttcagagcaagtattctggcgaacaagctggaagccatgctgccttctgtgatctagcctccgaagttatacagcatctctcccatccccgtaacttgttggttccaagtgagtcacaagcctgcctagagtcaagggcgagggaggacagagactgaatttcttgctgggtaaggcacaaagttatggaacaagtatgtggagtgggaggtattgtcgtggccatcttaggggtatgaactctgccatggatgcagactggccttttctaagagtcatcagtttggttatctgcaaacatgactgaagagtgtggggtacatcaatgccaggcaaagtttctgaaggagtctggctcagagggggaggcctggaatacgatcctagtttaccaaggggaacctggtcagttaccttgcaactttggagaaagagtgaatggaagtgtccctcagtaggggacatttaggaaggggatggtcacagagccagggctggcattgtccagggcacaggttcttggttgcgctggctcaagcatcatccccattccccgggtaagactgtcctcccaaaacagaggtggcttcaagctgctctgtgataaacacttttttttttttttttttttgagatggagtctggctgtgtcacccaggctggagtgcagtggtgcaatcttggctcactgcaacctctgcctcccaggttcaagtgattcttatgcctcagcctccctagtagctgggattacaggtgcctgccaccatgcctggctaatttttgtatttttagtagagatggggtttcaccacgttggtcaggctggtctcgaattcctgacctcatgatccgcccgcctcggcctcccaaagtgctgggattacaggcgtgagccaccgtgcctggccgataaatgcttcttaatgctgttgtttattctgactccctgccaccaagcagtgctgtgacaccgtggatcctcatggaacttgtgctgtagggaagcacgtgctggttaggctgatggaagtgctccattctgctggtggggtatttactgtgctctcc

SEQ ID NO: 693144 - DNA, 1902 bp, Homo sapiens
gctgtgttgcctaggctggagtgcagtggcaagatcttggctcactgcaacctccatctcccggttcaaatgattctcctgcctcagcctcccgagtagctgggattacaggtgcccgccaccatgcctggcaaattgttgtatttttagtagagatgaggtttcaccatgttggtcaggctggtcttgaactcctgacctcaggtgatccacctgacttggccttcgaaagtgctgggattacaggcatgagccactgcgcccgaagccatctcttggtaaaatactgctgagcattcagacagaacagaattaggagaaagagaaggaaccagcattgatttcttcaacacactgtgctaggtacctcaggcatttcgattattctaggctgtgagtgaagagttgttgccagaatctaaagtgtgttctgagaacttggccaaatgtagggtgaccatatgacttaccattcaaatttgggacactttgggggtgacgaagggattactatcaataattatgccctgggattgtctcacttaaactgggaggtatggtcaccctaggcagaagggaagtaaaatggtcctctgttactgattatctgttgctgtgtaaccaatcacaccaaaatttagtggtttaaaacaacaacagtctttttattatatctcttagtttctgtgggtcaggaattgggagagggcttggctgggtggttctgacctggggtctctcatgcattatagtttggtgtgggtggagcttctgtttttctctctctccatttagcctcagggtcattctgtagtgagtccatgtggggagttcagagcaagtattctggcgaacaagctggaagccatgctgccttctgtgatctagcctccgaagttatacagcatctctcccatccccgtaacttgttggttccaagtgagtcacaagcctgcctagagtcaagggcgagggaggacagagactgaatttcttgctgggtaaggcacaaagttatggaacaagtatgtggagtgggaggtattgtcgtggccatcttaggggtatgaactctgccatggatgcagactggccttttctaagagtcatcagtttggttatctgcaaacatgactgaagagtgtrgggtacatcaatgccaggcaaagtttctgaaggagtctggctcagagggggaggcctggaatacgatcctagtttaccaaggggaacctggtcagttaccttgcaactttggagaaagagtgaatggaagtgtccctcagtaggggacatttaggaaggggatggtcacagagccagggctggcattgtccagggcacaggttcttggttgcgctggctcaagcatcatccccattccccgggtaagactgtcctcccaaaacagaggtggcttcaagctgctctgtgataaacacttttttttttttttttttttgagatggagtctggctgtgtcacccaggctggagtgcagtggtgcaatcttggctcactgcaacctctgcctcccaggttcaagtgattcttatgcctcagcctccctagtagctgggattacaggtgcctgccaccatgcctggctaatttttgtatttttagtagagatggggtttcaccacgttggtcaggctggtctcgaattcctgacctcatgatccgcccgcctcggcctcccaaagtgctgggattacaggcgtgagccaccgtgcctggccgataaatgcttcttaatgctgttgtttattctgactccctgccaccaagcagtgctgtgacaccgtggatcctcatggaacttgtgctgtagggaagcacgtgctggttaggctgatggaagtgctccattctgctggtggggtatttactgtgctctcc

SEQ ID NO: 693145 - DNA, 656 bp, Homo sapiens
gtgcagggatcatgacctcattgcacagatgagacaactggagctcagagaaggcaaccgtctactcaaggtcacacagcttgagtatggcagagtggcagagccaagttcacttcttgttctttttttttaagatggagtccggctctgttgcccaggctagagtgtagtggcatggtcttggctcactgcaacctccgcctcccgggttcaagcgatttcctgctaatttttgtatttttagtagagaaggggtttcaccatgttggctaggctggtcttgaacccctcacctcaagtgatccacccgcctcggcctctcaaagtgctaggattacaggcgtgagccaccacacctgatctcaagtcttctgagatgaagattaaacagcaccttccacagggtcagaccggacgagacaagaccaggctttgaccacgtggttgggttgttccctgggtgcttcatatctcccaaaaactccttgatagaaataatccacaatgctgtttcaaaccctttttgcctctgtttatrctctgagcctgtaccacctctaggggcgaagaaacttctcctttctccgtggcgtcaaacggacttttccttgtatttgtcctaaagggacctcagcagcccctccccgttgggtccg

SEQ ID NO: 693146 - DNA, 597 bp, Homo sapiens
ccaggacccagcctctgcttagatctgcagtcccatgtcctgtcctgctcacactcatgccctgtgcccttgcaaccttcaagagcttggcccctgcttgtccctgccagggatgtttttcagtcacctcctacacctggtgaactcctactcaacctttagaacccagcttggacataccctttcctgcatrcccgacctggctgtccttcccaacctggactcccatgcccccttgttgctctctgtccgcctgttgctttctagctgtctggacgtcggtccccacctcacactgagatagctcaggattgttcctgtctcatgtctgtggcccagggcctgggccacctgccctcagcattcattaagctccataaacatgaaagaagtgaccgggctcaggcccttggctgagaagccgagaagactcaaggctgcctcgatctctgctccctgaaagcgccggcctccctgggctcctcttcgggccctggcctagcaaaggcagctcatgaggaaacagccgggggcccctctgccctggcagctgtgaggctgaataacgtatcagccttttcctgggcacgtgggtaa

SEQ ID NO: 693147 - DNA, 597 bp, Homo sapiens
ccaggacccagcctctgcttagatctgcagtcccatgtcctgtcctgctcacactcatgccctgtgcccttgcaaccttcaagagcttggcccctgcttgtccctgccagggatgtttttcagtcacctcctacacctggtgaactcctactcaacctttagaacccagcttggacataccctttcctgcatgcccgacctggctgtccttcccaacctggrctcccatgcccccttgttgctctctgtccgcctgttgctttctagctgtctggacgtcggtccccacctcacactgagatagctcaggattgttcctgtctcatgtctgtggcccagggcctgggccacctgccctcagcattcattaagctccataaacatgaaagaagtgaccgggctcaggcccttggctgagaagccgagaagactcaaggctgcctcgatctctgctccctgaaagcgccggcctccctgggctcctcttcgggccctggcctagcaaaggcagctcatgaggaaacagccgggggcccctctgccctggcagctgtgaggctgaataacgtatcagccttttcctgggcacgtgggtaa

SEQ ID NO: 693148 - DNA, 597 bp, Homo sapiens
ccaggacccagcctctgcttagatctgcagtcccatgtcctgtcctgctcacactcatgccctgtgcccttgcaaccttcaagagcttggcccctgcttgtccctgccagggatgtttttcagtcacctcctacacctggtgaactcctactcaacctttagaacccagcttggacataccctttcctgcatgcccgacctggctgtccttcccaacctggactcccatgcccccttgttgctctctgtccgcctgttgctttctagctgtctggacgtcggtccccacctcacactgagatagctcaggattgttcctgtctcatgtctgtggcccagggcctgggccacctgccstcagcattcattaagctccataaacatgaaagaagtgaccgggctcaggcccttggctgagaagccgagaagactcaaggctgcctcgatctctgctccctgaaagcgccggcctccctgggctcctcttcgggccctggcctagcaaaggcagctcatgaggaaacagccgggggcccctctgccctggcagctgtgaggctgaataacgtatcagccttttcctgggcacgtgggtaa

SEQ ID NO: 693149 - DNA, 597 bp, Homo sapiens
ccaggacccagcctctgcttagatctgcagtcccatgtcctgtcctgctcacactcatgccctgtgcccttgcaaccttcaagagcttggcccctgcttgtccctgccagggatgtttttcagtcacctcctacacctggtgaactcctactcaacctttagaacccagcttggacataccctttcctgcatgcccgacctggctgtccttcccaacctggactcccatgcccccttgttgctctctgtccgcctgttgctttctagctgtctggacgtcggtccccacctcacactgagatagctcaggattgttcctgtctcatgtctgtggcccagggcctgggccacctgccctcagcattcattaagctccataaacatgaaagaagtgaccgggctcaggcccttggctgagaagccgagaagactcaagsctgcctcgatctctgctccctgaaagcgccggcctccctgggctcctcttcgggccctggcctagcaaaggcagctcatgaggaaacagccgggggcccctctgccctggcagctgtgaggctgaataacgtatcagccttttcctgggcacgtgggtaa

SEQ ID NO: 693150 - DNA, 597 bp, Homo sapiens
ccaggacccagcctctgcttagatctgcagtcccatgtcctgtcctgctcacactcatgccctgtgcccttgcaaccttcaagagcttggcccctgcttgtccctgccagggatgtttttcagtcacctcctacacctggtgaactcctactcaacctttagaacccagcttggacataccctttcctgcatgcccgacctggctgtccttcccaacctggactcccatgcccccttgttgctctctgtccgcctgttgctttctagctgtctggacgtcggtccccacctcacactgagatagctcaggattgttcctgtctcatgtctgtggcccagggcctgggccacctgccctcagcattcattaagctccataaacatgaaagaagtgaccgggctcaggcccttggctgagaagccgagaagactcaaggctgcctcgrtctctgctccctgaaagcgccggcctccctgggctcctcttcgggccctggcctagcaaaggcagctcatgaggaaacagccgggggcccctctgccctggcagctgtgaggctgaataacgtatcagccttttcctgggcacgtgggtaa

SEQ ID NO: 693151 - DNA, 663 bp, Homo sapiens
tcagccctcctctggcaggaccaaagcactggccatctgcaaagggaggacatttgggtgtcctcggacttgggcaaaggtgcaccctaggctttagagagcccaaaccaattttcctccaaatgtcctctatacctggtttttctaggttagggttcaggacccaatctgcttacatccacaaatctcttttaatttagaacagccyctattttcataccgtgaattgaaggaattaagctactgtccgatagaatattctgccttctagatttcactgattggtttcttactgtgagtttggatagttctgtcttgtctaacatacctcactgagtaattcagaaggagaaagcagaaaaaaacaaaagtcagtgagcatagaaaagatgagagatgagaattatggaattacaaattttacttaatgggaatttccagaacatttcaccaagtaactgcagacattacattactttcaagcacgtctggaatatttatgaaaattgaccatttatcttgccaaaaagcaatcttttgttaatgccaaaaggatggattgaacaaacaatattttctgaccaccatgtacttcaataagaaataaataacaaaaaagcatagaaataggaaaaacctttaaataattcatgggtaaaaaaa

SEQ ID NO: 693152 - DNA, 1329 bp, Homo sapiens
ggtggatcgcttgagctcaggagttggagaccagcctggtcaacatggcaaaataccatctctactaaaaacacaaaaattagttgggtgtggtggcatgtgcctgtagtcccagctactcaggaggctgaggtgggaggagtgctcaagcacgggaggtcgaggctacagtgagccatgaacgcactgctgcactatagcctaggtgacagagtgagatccggtctcaaaaaaaaaaaaaaaaaaaaaaragagagagagagagacaatagcttagtaagtggcataatccacctttctggcttctcagcatttgtatacacaaatctgactttcaaataagaggataggctgggcgcggtggctaacgcctgtaatcccagcactttaggaagttgacacgggcagatcacttgaggccaggagtctgagaccagcctgaccaacatggcaaaaccctgtctctaccaaaatacaaaaattatctgggcatgatggcacacacctgtaatcctagctactggggtggctgagtcaggagaatcgcttgaacccaggaggcagaggttgcagtgagccgagattgtgccactgcactttagcctgggcaacagacagagactccgtctccagaaaaaaaaaagacaactctatgtttacacttaacaggttgcaactatccttcatgcaaatgaagacattctcagtctttccccaaaatggggagatgcaaagattccaacagcattgtatccatctccggacaatgttaataacccctcaaatccagtcacagtgccggctgaatattccgttatctaaatactgaattggaaagttaacttccaagaaaacttatcaaaaaataaataataggaagggagagaaagaaggaaaaaaagtggttaacatatacaaacacatacacacacacaaacacagcaaacgaagaaagaaaggtacacaactgctacagtccttgtttctgtaataggccatgtggctgaagttgacattccaattctgtcttccactcttccttgtacatatcttttgctctcaactggctaggcctctttgcctgatggagtgacctaaatcttcatcctgaggtgtctggatccttagtggtcctgccttttttgactgtcatgttttttcacttatttttatggttggacatggaagtcctaaggggcatcctagagcatccttgggggttcagatgtggtcctccctacctccactgtgtggcagcaacccaatttctccttgtaatagggatcagtcgccccaggcagtagagtaacccctttcttctctcggttc

SEQ ID NO: 693153 - DNA, 1586 bp, Homo sapiens
ccaaggcctggaggcagtgacaaggccatcctgctatgctgcatggcctctcccttcctgatcctcctgacagtgacccctcccctttccctcttttacccaccctcgcctgtggacagacaaggggatgtggccttgcccccatactaccagccggaggaggatgatgagatgcccttcatctgctccctgtcgggcgacaatgggataatgggctgccatgagatccccccgctcaaggagcagggccgtgagtgctgcctgtccaaggacgacgtctacgactttggggcggggcgccaggacctcaatgccagcggcctctgtgtcaactggaaccgttactacaatgtgtgccgcacgggcagcgccaacccccacaagggtgccatcaactttgacaacatcggttatgcttggattgtcatcttccaggtgaggccattcaggcctggggccagcctggtcctagagtgggcagctctgcctggtgggcagggctctgtgctaggcatttgccagccctcatctcactgaaacctgcccagcttgctggcagaataggcattatcatgcccattttatagacagagaacccaaggttcaaagaaaggaagcaagctaattgaccacagatgatgtgactattaaatggcaaaaataggctcttaacccagctctgggtgtccccaaagcctgagctctttgcagagcctcaggctgccttgggccctatggatcccagcagggagggctgttcagagaggagaggcaggattcaagctctgttggagggattggctgaccaaggccaggatcatggggtaggaggacattcctggtggggacagcctgagcaaaattctggtacagggagtgccaagtagctcatctggagtcagaaagaaatgtgtctcgccttgtcacccagtgcacataatgcacacaggttcacaaagcagcactagcctcatggcgtgcaaagggcttgttgcgtggccccactgcactgactgtcagcctatactctgcagaggatgggctgggatatgtgtagggaaagaactagggcagtggaccttggccagtattgcttggcctctctgtgcctcagttttcccatctttaaaatggggtaataacagcccccctcaccttgggtcattgttaagaataaagcagatggcacgctcagggcagccagccctgtgtacagagtgctgggtagaggttacctttctgctgtcctcagaaagaaggggcaggagcagacagagggggagctgagaagtccctgagggggcagcgggagggctgaactctgctgcctccgctgccctgcgctgcctctgctgccctgkgctgccctctgctgccctgggcactttgccctggggagcatcagggtcatttgttcagagatgcagggtgtgaggtgacggcaacagctgtgttttggaaccctctgcccaggagggtgggtggccgctcagggggtcccactctgtgcatttgccagaagccaacaaggacccagggtttgtctttctcaaggctgctccatcccccagtctgggaaggagttg

SEQ ID NO: 693154 - DNA, 653 bp, Homo sapiens
gcccctcttgcctgcacccccatatggtcttcccagagtgagctcatccacctcgtcatgcctgactgcagcttcagcacagcacagtccccaaaatgtcaaggtgattcaytcccaggagtcgctgctgaatccctgctgctgcgaggttgggttctctggcttcctggtggtgggagagggcacgcttggccctccagggcagtgccccatcctgggctggcaggaccttgacctggggccccagaacagaccagcaggtgacctgagacacctgctgttgtctaagctccagtgctttcttggggaggctggggccttggacctatagaagatgccccaggtaaaaggagaggggccagattttattcagcattgccatccatggccttgcatattcactcaccagaacattcaggaaacccacactgcaccaggccctgagccaagtgctaggaacagagcagtgagtaaggcccagcccctgtcctcgaggagctcacaggctcgtggggaagatgggctgacagcagtctgaccatacagcaccttaggtgccatgatagaagggagcccagagaaggctcccgatccagcctggaggagggatggggaggtgggaggcttcctggaggaggtgatgccagaattga

SEQ ID NO: 693155 - DNA, 624 bp, Homo sapiens
atggggcggtctggctgtgcggggatgtgtggcgggagacgcgagccaagctgcgcggcatcgtggacagcaagtacttcaaccggggcatcatgatggccatcctggtcaacaccgtcagcatgggcatcgagcaccacgagcaggccagtgcagcgcagccgggccgggcctgcgggagaggtgtgagggccccaggaccctgcccaggcctgggcagccccatccatctgcctgggtttgtgtgtctgtccacctagaagtgccgggctgagctgggtccagttcatccrtgtgaccttactgcccagccagggccgagctcagaggaaggaagggcttgggtgtctgccgaatgaatgatgagtgaacgagtgaagctggctaggactgggcctctccggggctcttttcctcctaagctgctcagcctggataccaaggcaaccacagcgcatcccctgccagtccctgcaaatctgacttctattcacctctccacctgagcccttctgttttcttctttaaaaaaaaaaaaaaaatttaaaaaacagatagagtcagagttttgctctgctgcccaggctggagtgcagtggcacgatcaagcgatcctccctcttc

SEQ ID NO: 693156 - DNA, 621 bp, Homo sapiens
cattttcacatgtgtttctctaatactttctctcagtatccatacattcaaatttatatacccatccatgtgcatctatatcaaatagaaaataggatttttttttttttttgagccctgtcacctgggctggagtatagtggtgagatcttggctcactgcagcctctgcctcctgggttcaagcagttttcctgcctcagcctcctgagtagctgggattacaggcgygcgccaccacacgcagctaattttttgtatctttagtagagatggggtttcaccatgttggccaggctggtctcggacttctgaccttgtgatccgcctgcctcagcctcccaaagtgctgggaatacaggcgtgagccactgtgcccggccattttttttttttttttgagacagggttttactctgttgttcaaggtgttgtgcagtggttttatcgtagctcactgcagccttgaactcctgggctccagtgagcctccgacctgagcctcctgagtagctgggtctacaggtacacaccaccacgcctggctaatttttgtattttttgtagagatgggatctcattatgttgcccaagctgatcctgaactcctggcctcaagtga

SEQ ID NO: 693157 - DNA, 621 bp, Homo sapiens
cattttcacatgtgtttctctaatactttctctcagtatccatacattcaaatttatatacccatccatgtgcatctatatcaaatagaaaataggatttttttttttttttgagccctgtcacctgggctggagtatagtggtgagatcttggctcactgcagcctctgcctcctgggttcaagcagttttcctgcctcagcctcctgagtagctgggattacaggcgcgcgccaccacacgcagctaattttttgtatctttagtagagatggggtttcaccatgttggccaggctggtctcggacttctgaccttgtgatccgcctgcctcagcctcccaaagtgctgggaatacaggcgtgagccactgtgcccggccawtttttttttttttttgagacagggttttactctgttgttcaaggtgttgtgcagtggttttatcgtagctcactgcagccttgaactcctgggctccagtgagcctccgacctgagcctcctgagtagctgggtctacaggtacacaccaccacgcctggctaatttttgtattttttgtagagatgggatctcattatgttgcccaagctgatcctgaactcctggcctcaagtga

SEQ ID NO: 693158 - DNA, 621 bp, Homo sapiens
cattttcacatgtgtttctctaatactttctctcagtatccatacattcaaatttatatacccatccatgtgcatctatatcaaatagaaaataggatttttttttttttttgagccctgtcacctgggctggagtatagtggtgagatcttggctcactgcagcctctgcctcctgggttcaagcagttttcctgcctcagcctcctgagtagctgggattacaggcgcgcgccaccacacgcagctaattttttgtatctttagtagagatggggtttcaccatgttggccaggctggtctcggacttctgaccttgtgatccgcctgcctcagcctcccaaagtgctgggaatacaggcgtgagccactgtgcccggccattttttttttttttttgagacagggttttactctgttgttcaaggtgttgtgcagtggttttatcgtagctcactgcagccttgaactcctgggctccagtgagcctccgacstgagcctcctgagtagctgggtctacaggtacacaccaccacgcctggctaatttttgtattttttgtagagatgggatctcattatgttgcccaagctgatcctgaactcctggcctcaagtga

SEQ ID NO: 693159 - DNA, 2222 bp, Homo sapiens
cactgtcgcttaggctggagtgcaatggcgcgatctcggctcactgcaacttctgcctcctgggttcaagcgattctcctgcctcagactcccgagtagctgagattacaggtgcccgccaccacgcccagctaattttttgtatttttagtagagatgggggtttcgctatgttggccaggctggtctcgaactcctgaccttgtgatctgcccgcctcagcctcccaaagtgctgggattacaggcatcacccaccgcgcctggcctctatttgcacatttattgtgcatttgtagagacctactatgtgcggagtctgctggtaggtgttttacatgcactatctcttttaatcctcagatttgaagtaagtatcattgaccttactcgtaaagaaactgatctttgagaggtgaagtggctccgttaaaggaaccacagccactgtgtgcacttagaagacatttgtccactgaatccatttgtgccaagctccgtgttcattaagaatatttttgcctgcatggaatagaaacccaaaccaacaatggcttaaatgggtatattttattatttttcacataaaaaatcaagaggagagtagttcagagttagggcagtggcttaactatatatcaagttattttccatgtcactatccttaaattggcttgtggtttcttggtcccaatacggttgccatgactgcagacatcatattcttgatccaggtaggaaggagaggcagcaccacaagctgcatctgcctggattttttttgagacagtgtttcactctgttgcccagactggagtgcagtggcgtgatcttggcccactgcagccttcacctcctgggttcaagtgattctcatgcctcagcctcctgagtagttaggattataggcacctgccaccatgccttgctaatctttttttttttttttgagacgaagtctcactctgtcgcctagactgggagtgcagtggcacgatctcggctcactgagacgtccgcctccttcctgagttcaagtgattcttctgcctcaacctcccaagtagctgggattacaggcaagcaccaccacgcccacctgatttttgtgtttttttgtagagatggggtttcactatgttggccaggctggtttcgaactcctgaccacaggtgatccatccaccttggcctcccaaagtgctgggattacaggcatgtgagccaccgtgcctggcctaatctttgtatttttagcagagatggggtttcaccacgttgaccaggttggtctggaaaccctgacttcaggtgatccgcccacctcagcctcccaaattgctgggattataggcatgagccactgagcctggcctgcctggtttgttgttgttatttctttttctttctttcttttcttttcttttytttttttttttttttggagttggagttttgctctgtcgcccaggctggagtgcagtggtgcgatcttggatcactgcgacctccgcctcctgggttcaagcaattctcctgcctcagcctcctgagtagctgggattacaggtgtctgccaccatgcctggctaattttgtatttttagtagagacagggtttcaccatgttggccaggctgttcttgaactgctgacttcaagtgatctgaccaccttggcctcccaaagtgctgggattacaggcgtgggccactgcacctggctcacgtctaactgttttattagcaaagtaaaagcctccctagaagtctttcccatttccccttaagttcttaaatattttttaaatcagaattgggtcacatggccacttttagctgcaaaggaagctgagaaagcaagtctctggcttactagttttaaggagggaagctgccagagagcttgcatctgcactgttgacgccaatatcatgttctttccactttactggtgattttccctgttcagattaaacacataaaaacccgaagagttattactgtatccacgtaacccttgtactgttgttttatttttaaattttcccttttcttttcttcttcttttttttttttctggagacggagtctctctgtcacccaggctggagtgctatggcatgatcttggctcactgcaacctctgcctccccagttcaagtgattctcctgcttcaccctcccgagtagctgagactacaggcatgcgtcaccacgccca

SEQ ID NO: 693160 - DNA, 2524 bp, Homo sapiens
tcagattcccaatactcaaaaggcaaagggtgtggttctgtcaggagctgaaagcttgctggaacattctagaaaaatcactccaccctcgtctcctcattctttaacatccactttggtttctcttggtcatgaagaggcattggagatggcaggcagtaaaaactggatgaagggacgagagcatgaaaatgcaagcattttaaaaactctgaagccaacagaccgtccatcatctcttggggcctggagtctggaccctttcaatggaagaatcattgatgtggatgccttatggagtcatcggggatcagaagatggccctcgtcctcaaagcaattggaaggaaagtgcgaacaagatgtcccccagcggcggagctccccaaaccaccccgactctgaggagtcgtccaaaagatcttcctgtgagaaggaagactgatgtgatcagtgacacgttcccaggtaaaatcagagatggctacagatccagcgttcttgacattgacgccctgatggcagagtaccaggagctgtcgctgaaagtccctggggaggctcaggagaggaggagtcccaccgtggagcccagtacgttgcctcgggagaggcctgttcagctgggcggggtggagcagagaaggaggagcctgaaggagatgcccgataccgggggtctctggaaaccggccagttctgccgaaataaatcacagtttcactcctggcttaggcaagcagctggcagagaccttggagacagccatgggcaccaaatctagccctcccttctgggctctgccaccctcggctccttctgaaaggtatccagggggctctcctatacctgcggatcccaggaaaaaaacggggtttgctgaggatgacagaaaggcctttgccagtaaacatcatgttgcaaagtgtcagaattacctggctgagtcaaagccctctggtcgggaggatccaggcagtggggtcagggtgtcacccaaatcgccccccactgaccagaagaaagggaccccaaggaaatccaccgggcggggagaggaggacagtgtggcccagtggggtgaccacccacgtgactgtggacgggtgccgctggatatcaagagggcctactcagagaaggggccccctgccaacatccgagagggcctgtccatcatgcatgaagccagagagaggaggcgagagcagcccaaagggaggcccagccttactggagagaatttggaggccaaaatgggaccctgttggtgggagtcagggactggagacagtcacaaggtaagtaccgagacactttttaattttgtcaaacatggtttaaacatctagtctagggggccgaaactcagattttgtgtggcccactttgggtacataaatgagtggagtcaggctgggtatgaggctccagggaggggtrtggattgtggcaaatggagagctcatgccctatctgaactggacaactgctgcttggtcccacctggttctttgtttgtttatttgtttgtttgaaacaaagagtcttgcttagttgcccaggctggagtgcagtggcatgatcatggctcactgcagccataatctcctgggctcaagccatcctcccgcctcagcctcccaaatagctgggatgacaggcatgcgccaccatgcttggctaattttttattttttgtagagacagggttttgccatgttgcccaggctggtctcaaactcctgggctcaagtgatcctcctgcctcggcctcccaaagtgctgggatgacaggcgtgtgccaccatgcctggcccagctggttcttcacaggcaggaatgctggccttgagatggcaaacctcatttatcaagagaatctgaaaatctagatttttatgtgtaatcctcccattaggaaatgaggaggacttatttttaaaaatgctgttcagcccaaacaagacttgtctgctagccccatgcagcgcgccggccacctgttttacacttctgtcctacaatgacgataatgatagatatcaatggtagctttattgtgctcctgctgtataatagcctgttgtatcctgttcattattatgtccccagaatccagcatcatgcttgacatactgtgaatgttcaagaagtatttgttgaatgagtgaacaagtgatcttacgtgagcctcaaaagagggatcaccatggttttgggttccagcagtcccttgtttttttttttttttttttttgagacggagtctcacactgtcacctgggctggaatacaatggtgtgatcttggctcactgcaaccttcgcctcctgggtttaagcgattctcctgcctcagcctcccaagtagctgggattacaggagcccgccatcatacccggctaattttttgtattttttttttttagtagagacggggtttcactattttggccaggccggtcttgaactcctgacctcgtgatccgcccaccttgacctcccaaagtgctgggattaca

SEQ ID NO: 693161 - DNA, 640 bp, Homo sapiens
catccatttctctggtccttcagaagagttgtcaccgtctccagggtttcttctgcggtctcccacacgcactccccacgggctctctcgcccctcctcgccatcttctcaggctcattcctgaccttcacattgccaatctcatggccaactgtcattgatggatctctcagcagcgtctggcagccgtgaggggtttatgcatcctcccttgaatccaaacggctgcagaatgtggacgccctcaccccgctcgccgcagaatgtggacaccctcaccccgctcgtcctctctttaatatacatgctgagcacsggccggatgaggtgcctggtctgtagggagggctgacagtctagtggagggaaatgtggtggaaaccagttaaaatatggaggtgagcacagacccctagagagggacaggcaggtgacaccagcgttgagtcagcgttgagagggcaggagccagccaggcagagaagggggaaggaggaacagcgagggcaaatgctgaaaggcctggcagagcagagacgaggctgtcgcccctgctggggtgtacgcttggagggcgagaactgcatctgtcatagccccaggactagattgcttccaggcatctccttagggccccaac

SEQ ID NO: 693162 - DNA, 640 bp, Homo sapiens
catccatttctctggtccttcagaagagttgtcaccgtctccagggtttcttctgcggtctcccacacgcactccccacgggctctctcgcccctcctcgccatcttctcaggctcattcctgaccttcacattgccaatctcatggccaactgtcattgatggatctctcagcagcgtctggcagccgtgaggggtttatgcatcctcccttgaatccaaacggctgcagaatgtggacgccctcaccccgctcgccgcagaatgtggacaccctcaccccgctcgtcctctctttaatatacatgctgagcacgggccggatgaggtgcctggtctgtagggagggctgacagtctagtggagggaaatgtggtggaaaccagttaaaatatggaggtgagcacagacccctagagagggacaggcaggtgacaccagcgttgagtcagcgttgagagggcaggagccagccaggcagagaagggggaaggaggaacagcgagggcaaatgctgaaasgcctggcagagcagagacgaggctgtcgcccctgctggggtgtacgcttggagggcgagaactgcatctgtcatagccccaggactagattgcttccaggcatctccttagggccccaac

SEQ ID NO: 693163 - DNA, 614 bp, Homo sapiens
ctgcaaggcacttggagaaggagtctggatgggagaaagatgtcaaggcttcagaaggtgttttgcatccctggactcacagtgattgactgagccgctcatatgygctatctttgagtgctggtcactacttctatttcagatgactttgtcagatacttaagagcgtctgtgtaggaagatgcatccatgttgcaaatctgtggagctgccatcatgatcttcacctagatttaagatgtctgttaaggaaatcaattgatgtgacagtggcctcgatcttaagcttgtcaccgttgattgtctccccgtggagttgtcagacatgagggagagcctgggcagtggcctagggagaactgagtgctgctggcgctattgagtttgttccaggaggggaaaaaggaaagtttataaatattttggcaactactggcttaggtttgaaatgcacatttaatataacatgccatcttttgggtattttattttattttatttgagacggcgtctcgctctattgcccaggctggagtgcagtagtgtgatcttggctcactgcaagctctgcctcacaggttcacaccattctcctgcctcagcctcccgagtag

SEQ ID NO: 693164 - DNA, 618 bp, Homo sapiens
tttacattaatgaggatcatatttactcttttagtcttacctgcaattattgggtgaactcaggtctctttagttcattaccccattagtgcctgtcaataacggagaatgtgcctgaaatgctcaagtggctgggagctttggaaatctcatctcttctaacgkagggcagctctggcttgtgcagtggggagcttggatcctggtcctgtgggtcactgcaactcgggtctctccctgagccttaatttccccaactgtaaaagatagctattaggctaaagcagtatttctttcaatttgccctgtgggccatctgcttcaaaatcactcacacacgatttaaaatgcagatccccagagcacactctagacctattgaatcacaatctggggtggggcccaggaaccttcatgcttaacaagtctcacaggtggttcttatggattattacaggctgagcatcacagttttgtggttaaatattctgtgtggttgaactccaaactcctttctattctttgtcaggcagaaagcgattggcctgggctggttagcctggttctcatctccatgctcaaaagctatgtcaggctcctgggaagggatgctattga

SEQ ID NO: 693165 - DNA, 618 bp, Homo sapiens
tttacattaatgaggatcatatttactcttttagtcttacctgcaattattgggtgaactcaggtctctttagttcattaccccattagtgcctgtcaataacggagaatgtgcctgaaatgctcaagtggctgggagctttggaaatctcatctcttctaacggagggcagctctggcttgtgcagtggggagcttggatcctggtcctgtgggtcactgcaactcgggtctctccctgagccttaatttccccaactgtaaaagatagctattaggctaaagcagtatttctttcaatttgccctgtgggccatctgcttcaaaatcactcacacacgatttaaaatgcagatccccagagcacactctagacctattgaatcacaatctggggtggggcccaggaaccttcatgcttaacaagtctcacaggtggttcttatggattattacaggctgagcatcacagttttgtggttaaatattctgtgtggttgaactccaaactcctttctattctttgtcaggcagaaagcgattgrcctgggctggttagcctggttctcatctccatgctcaaaagctatgtcaggctcctgggaagggatgctattga

SEQ ID NO: 693166 - DNA, 621 bp, Homo sapiens
atcacacagcattagcctttagtccatcagttcatgggatcttctctataaccctaggaaataagtgccataatatcccctcatccacgaggatattattatccatttatgtcaatcactccatgtgataagtgttatttttatccctacttctcagaagaggaaaataaagctcagagaggttaagtaacttgcccttgtcatcctataaggaagaggcaaggctaggatataaccctttgtcaccactgtactaattttaacygcataagagctgatgctctgtttatcacatggcaaaatataaggtgaatagaattgtaggcacacatcatctaatcagcagagaagctaaaattatctccccaggtggcattgggtaggaggaagctcaccctgacaccagaatctaggcaggatgtgccctattagacagaccacaacatcactgccatggaaacagtaaaaggtaaaaggtaaaccaagtgtgtgatatcgagcaagttactttgcctccctggccctcagtttcctcatctgtaaaatggctatcaaaattgtgattgcagattttcatctgcaaactgttctagtccctttcagaattctatttctattatg

SEQ ID NO: 693167 - DNA, 603 bp, Homo sapiens
cacgctgacttaaaatcaggctgcctgagttcaaatcccatctctgccacttatctcaggcaaattatttcatctctctgtgtctcagttttctcatctttaacaggaatttataatagtaccaatttcacagggttgtggaggagattaagtctatagttggccttggttcatgtgctcatctttgaacaagtcgctgaggctggaaccatgtaggaccctgattggccagccctgacctcccccaacacatggactgaaagagagaggtggggacttgccaaaggaatgtcaggagatgttcgccaagagaaaagtcacagagaagtccagcatgttaaggaactaagagttttctttttatttttttcctkccatgtctcaatcaatatctgaaagactcataaaggaactgagtgtgtgctaataataaaatgacccaattgtgaattaagcagatatgtttctctccagcagggttaacaaagtggcttgcatccagacccaacactgccatttactaccttaccttctgcaggagaaagcatggaaagtgtgcagaaaaagatacggggtgtggcaagacagaggcatgtcagttta

SEQ ID NO: 693168 - DNA, 668 bp, Homo sapiens
ttacaattgatatatttcaggagaaaacagtaatgatttaaaatatctttggatcattttaaagctgtgtttgcaacaggactgctgctytagtcgaaaagactgcctacaaatccccttcttgccattcagggacagagaaataaagtaaggagtggagataaaacgattacacaaatcctgtgtttcagatctttgttcttcaggcttcctatcaaatattagcaactcgcctcaaggtgaaaagagggaaaatgagatctcagatagaaacagcaggagtcaccaagcagcatgttctttcagctcctggattctgttcagcccaccccagtgaggaccatccatgggactttctgctcctgactcgagcagaactgggctcaaatcccagctttgtcacttaatggctacgtaaccttgaatactaattttaatcctctgagctttgggttcctcttctgttactcatgggtttattaaaatagtagtgatagcctgttctcagggatagtgtcaggcactgttagtgatgatgactatagcagccagtgggtcctaagcacccttgaacgggattctcaatgcatcctcagtacagtcctacaagggctgatgtgatgattatacccattgcacaggtgcagacactgaggaccagagaggct

SEQ ID NO: 693169 - DNA, 1963 bp, Homo sapiens
aaaaaaaagtagcttatctgacctaaaattttaacatgtgaaaatttgtggttgaaaaatctctgggctgggtggggtggctcatgcctgtaatcccagcattttgggaggctgaggcaggaggatcatttgaggcatggggtatgagaccagcttgggcaacatagcaagactccgtctccactaaataaaaaaagaaattacccaggcgtggtggcgggtgactatagtcccagctactcaggaggatgaggtgggaggatcacttgggcccaggattgaggctgcagtgagtaatgtacatgtcactgcactccagcctggacgacagagtgagaccctgtctcaaaaaaataataataatctcttgacttgtaaaaatattatattttatattgaattataggctgaagactttaagtgacaagtcaagagaagcaaaagtgaaaagcaaacccaggtaagcttgtgctaagattttaacttaactgtgacttaaatttcatacaacttttggtgtattcacaattgtgtagttatattaatgaaccttagatttgttgagtgcatctgactacaaaataatttatcgattctttctaaattttgtaacaggaaaattttctaataaaatcgtgaaatggttgaaaaaatggtgaagtataattgttttactctgacagtcaatgagtattatttgatcacaattagtcatttttaatttgtataagagcaaaagtaaaagtcctgaattattgaaaagcaaattaatgatgaaatactacttggcaaatgagcctcttcagctatgttacctgttttgtatgaaaacaccaggattgtgctgtttgtccatttttttaataaagtaaagcatgtgaccagatttcattttcaacctagaaatgaactgtgatcttacatatttgttcttatccaacattatattaaataatttattgtatgctgaagagaatctctggggcaaaatgatggttgatagtgtgttacatacagtacattaactctgaaataaaacacatttctctaaaagtttaataattgtcattagtgattttaaaatatattacaattgacaatgtcaaaattcttgtatgtacctttttttttttttcagttggctaaatcaagaacagttttaataagtgtttcttttgggcaggactgttccatttttgccaaagtactctgctggattagaattacttagcaggtaagtgtttcatttgtagaggaaggttatacttctgacttttttactgaccaaaaatatcttttaattttgtaggttaaaagccttaaaacagctaaattttatcttaatgcagtgattggaaattatttatgtattattttccttgagggctttcacttttcactcattagtacaaagtccattcaaactttgagcagacagatcactattgtatttacaagtcaatactttatgataatatgtacggcttctttattacaagaaaattgattctggatttgagtccccaataattttgtttttttgctttgattcttatgtcatttcttttccaatccattcttttattgacatggagtttaatattaaaatgtatggtctttttagatataacatcaaaagcacaaayaacaagataaaaattagacacaatggacttggtcaaaatcaaatacttttgtgtgtcagagaacaccatcaagatagtggagtgacaaaacatagaatgtgagaaaatatttgcagatcatatatatgaggaacaacatgtatccagaatatataaagaacttttaaaacttaacaataaaaagacaaccccatgaagaaataggcaaaagagttgaatagacatttctcaaaagaagatatgcaaacgaccgataagcacatgaaaagatgctcaacgttgtcagtcttcagggaaacgcaaatcaaaaccacaat

SEQ ID NO: 693170 - DNA, 667 bp, Homo sapiens
tgcatgattaataaggttttgggtttttttcccctggtgtggttagaggaaagtttatagaacctattgttgcctatattattttaagcaaggatttgtttactaaaaacagtaaaattaagagaaaaatctctgaataccttcaatcacaacattttatttgtgttctacttggtagcttttaaagtaattctctggttaaaaaaagaaaaaaaatgagattttgtgtgttttcrccccaattttgtgatttatttttaactttatttgaaaacaaaaaagaattgtgtgtatagatatttcttttataatgtcaattaatactgattctgaaaatttccttttattattaggatgaaaaacattgctaatagaaacacaattttttttttcaaagcagagagtgaccaaagttgagagaaacagccctgaaattattttgattgaagtatcatacatatttattttgtttgatctaaaaatttacatctattgtatcctattttggtgttgcacaattagctactgatctctgcatgttaaaaatcagtggataataagagataaaacaaactgggaatgtgtttttagttacctttgaagtgataggcataaaacagaagactcaataacaataatagtaattcaaagaatgacagctaacact

SEQ ID NO: 693171 - DNA, 667 bp, Homo sapiens
tgcatgattaataaggttttgggtttttttcccctggtgtggttagaggaaagtttatagaacctattgttgcctatattattttaagcaaggatttgtttactaaaaacagtaaaattaagagaaaaatctctgaataccttcaatcacaacattttatttgtgttctacttggtagcttttaaagtaattctctggttaaaaaaagaaaaaaaatgagattttgtgtgttttcaccccaattttgtgatttatttttaactttatttgaaaacaaaaaagaattgtgtgtatagatatttcttttataatgtcaattaatactgattctgaaaatttccttttattattaggatgaaaarcattgctaatagaaacacaattttttttttcaaagcagagagtgaccaaagttgagagaaacagccctgaaattattttgattgaagtatcatacatatttattttgtttgatctaaaaatttacatctattgtatcctattttggtgttgcacaattagctactgatctctgcatgttaaaaatcagtggataataagagataaaacaaactgggaatgtgtttttagttacctttgaagtgataggcataaaacagaagactcaataacaataatagtaattcaaagaatgacagctaacact

SEQ ID NO: 693172 - DNA, 1067 bp, Homo sapiens
ttttgttaccttctagattttatgcttctgctctcattcattttgctaatacatatgttagaagttctacaaaatactgtggttttttttttttttgctttagtctgttatattttgaagaaattaaagagcaaggaataggtctttttctcatatttaacttctcgtgctcttcagttttctatcattttcctgtagcccaaggaacttcctttaacattcctcttctgcaatttagaaactgctgttatattcacctggggaatattttactgcagatcttgtattttttcagctctagaatttcttttggttcttttttatgtctttcatttttcttcttattttgttagatgtttatctttaaatccttgatcatatttataatagtcgtataggccttctttgcctattttatcatttcttatttttggatcagtttctgtactgttttatatttggaatctgtagagtcatgaatcttgggttacacaggtttrtaaaatacctcttcaaacaacttctttttggcctcctcttttctctttttatttatattattttttgttgttcctcactggttcacattcatcttatattttttctgtttttaagactctagttacacatgttagaccacttgaactacgtaatcacccaggctcatcagtcttattgttgctgcataagtgcttgttacattaagaaaagtatgtaaaaacatacatgtatataataatataatacaaagtaatttaaacatattaaaatgtatttgtagttttttatttatcccttttgaaatacattatattgaactgactgaaaaagggagaaaaacatgtttcagtggttgaagaacatggtagatgaagtagttcattttgaatggctttagttccttaacaaaaaagtcagtggtgaagttgcatattttagtataatatttaggagctgcagttggggaatttgaaatggcttttgtgaattatttattaaaatcctatcctacaagaggaatcctggtaatggcagtctgaaaatgttgcaaggacctagttcaagtg

SEQ ID NO: 693173 - DNA, 631 bp, Homo sapiens
ataacaggaaagaatttgtcaattttgaaacaaaatacatttattcagggtgggtattataggggcatgatctaggagaaaatgtattagtgaactaagatgaatgtttgttcagttggtctatctttccagtggagatggattaattactctcctagctggaagacaggagccatgaaaatcatccagctcattcccttgctgtatattactgggtttatttgatcactttctgattataatgtggctttccatgtaaactttcctatagagaagagaatgtatgtatgtaagagaatcaatgcatctatgtattccagcccttgtgacaattgtactctaagagtaacttagtaaatcggtattctgtttcatatctcagtatttttgtgaatttggtgggcaaraactattcccaaaaacttttattattttagaggcagtatcaagactcagtttctagccctaaaaagctacatcaatttagcaaacccatctctctctgtcctctctgctcccaaagctgttttcagtcaaagaggataattttcccagagatgagtgccatcaaaggtatcaaatggctgtgtttctatactattgtgtatgacataaacctgatgccctgagt

SEQ ID NO: 693174 - DNA, 951 bp, Homo sapiens
atcacatctgctaacgtcctattggtcaaagtaagacatatagttgagcccaaagttgaagggtgaaatatattctgcctctagcggaactgcaaagtcgcatggcaaaggatgaggatacagggaaggtgaataatttggaacaatgcactacagaaattccaggcagagagatcaaacggatgatcaaaggcatagtcagagatatggaagcacatggattgtttagaggaaggtaacaaggctaagaatttaatttaagccttgaacaccatgctaaagatatgggcattagtctgctgctccagagagccactaaggtttacatggttgtatctgggttttagaaatattaaaagcaaggagacaatttaggaggccagtgtaacagtccaaaaattgatggaagtggagtggatataagatatgtttgggaggacttagcatatgtccacaaattatatgatattccttttaagaggtagagcctaattctcctctgagtgtaggctgtactcaataactcatttctattgaatagaatgtggtaraagtgatgatgtgtaacttctgagactgggtcataagaggcatgcagcttcctccttgctgcctcttggatcacccactctggggaaagctaggtgccatgtcatgaagtcactcaagcaaccccatggagaggtccatgtagtgaggaattaagacatcttacctatagctgatgaggaactaaaggccctgctaatggctaagtgggcaattttgaatgatgatcctgcaggtccaatcaagccttcagatgactgaatccttagctgacattttgatggccacctcatgaaacattctaagtcagaaccacctagctaatctgttcttaaattcctcacgcacagaaactgagtgagataataaatgcttattgttttcagatgctatattttgaga

SEQ ID NO: 693175 - DNA, 595 bp, Homo sapiens
ttcagggtatgtccatatcagacatactagttggttgtcctacaacttcgtttgttgacactataaaatacttaaaatttcacagaaaacaggaaaagcatttacataattttccatattccttttttataaggagtttggaatcaatttatgttatagcgctttttgtgggaagtcttttcctaaaggattaaacttgaacaatttctcctcagttgggttctatgaattctatgataccatctccggtcaggttcccttctatacacagaggctaagaaaggcatctggaagcatatgatttatatgttcttcatggtggaacctgtaagggaataagagaaggatagggaaagaggagtcatcacaaggacgtggtttcatgtagagtcaagccttggccccatgcagggcagaggagtgtggagasggggaggagcctctggattgtaaatttcactgcaaagttgttctgccttgagggaggaacttgggctcttgtatccttttataaatcactcactggctactccctaggagggtagtataaccatctccaggcatgttggcactacggaaaaccaaaggcaatgct

SEQ ID NO: 693176 - DNA, 1274 bp, Homo sapiens
gcacttctcataatgtatcccccttggtaagtgatgcatgactgtggcaatattatattgctatacattataatagtaattttataaaaatatagttatattcaatttatagtattatatccttatactattgccattatatttataacaaatattattaatattaataattatttatgtgggcctgatagtgtattatcccagtgaaatgttttcaccttaagtttcgatatgtacttaaaaataagtctattgtttgttaaaactatctaataattcatggttttatcaattacaacaggtccctgttgtagtttctttctgtccaaatggtctctcaacttgacaaatctttaggagcatgaatttccatatttcaaaaaatgaaaagataaagaaatctcactggaaactgtggttgggcagatacaatatggagacaagttagattcactatgctttacttcctatgaatgcaatgacaccatatacgtgtgtcctagtatatgtgacatttatatgtaatattaagctcaaatttaaagtatccattgttcttttggaatctttcagtaatggaagtttattctttcacaggtatcacggttacatttatacataccgagtgtcccagacagaaacaggttcttggagtgctgaggtatagttgtatttatttttgcttctgggggtgtcaaggaggtatttgaaatttaggctggttttataaaagagcaaattatacattattaagtattcataaggtttaaatctctaaagctccaatccaaaattgttcatggatcattaagaaagctttagagaattttggtcccagtcctgtttagccatcattttgcagagttgtatgactttgggagaaagataaaaaagttgaagaattatgtcaaacttttagtgactatgtgaaatcttagcatatcaaaagtaggtaaaataattaaatgaacaattatktaccaaatgataccaatatgagtattggtatcgtgggagattaaaaaacatgatgcttattttctaagagactacaatatacttgggaagttataacttgaaattaaacagttatgagtggaagaaactaggctttgtcaacaggtgaatctgggttccaggtctggtctcccctcctctctgataggtctatgatcttgggcaggttacttgacttttctgtgagccagtttcttcatttgtaaacggagcctaagaatcctcccttatgcacaaggctcaatttgaaaagtaaa

SEQ ID NO: 693177 - DNA, 1274 bp, Homo sapiens
gcacttctcataatgtatcccccttggtaagtgatgcatgactgtggcaatattatattgctatacattataatagtaattttataaaaatatagttatattcaatttatagtattatatccttatactattgccattatatttataacaaatattattaatattaataattatttatgtgggcctgatagtgtattatcccagtgaaatgttttcaccttaagtttcgatatgtacttaaaaataagtctattgtttgttaaaactatctaataattcatggttttatcaattacaacaggtccctgttgtagtttctttctgtccaaatggtctctcaacttgacaaatctttaggagcatgaatttccatatttcaaaaaatgaaaagataaagaaatctcactggaaactgtggttgggcagatacaatatggagacaagttagattcactatgctttacttcctatgaatgcaatgacaccatatacgtgtgtcctagtatatgtgacatttatatgtaatattaagctcaaatttaaagtatccattgttcttttggaatctttcagtaatggaagtttattctttcacaggtatcacggttacatttatacataccgagtgtcccagacagaaacaggttcttggagtgctgaggtatagttgtatttatttttgcttctgggggtgtcaaggaggtatttgaaatttaggctggttttataaaagagcaaattatacattattaagtattcataaggtttaaatctctaaagctccaatccaaaattgttcatggatcattaagaaagctttagagaattttggtcccagtcctgtttagccatcattttgcagagttgtatgactttgggagaaagataaaaaagttgaagaattatgtcaaacttttagtgactatgtgaaatcttagcatatcaaaagtaggtaaaataattaaatgaacaattatttaccaaatgataccaatatgagtattggtatcgtgggagattaaaaaacatgatgcttattttctaagagactacaatatacttgggaagttataacttgaaattaaacagttatgagtggaagaaactaggctttgtcaacaggtgaatctgggttccaggtctggtctcccctcctctctgataggtctatgatcttgggcaggttacttgacttttctgtgagccagtttcttcatttgtaaacggagcctaagaatcctcccttatgcacaaggctcawtttgaaaagtaaa

SEQ ID NO: 693178 - DNA, 678 bp, Homo sapiens
tctttaaaaattatttcatatttaacaagaatcattgtatgacatttatgcaggattttctttttttctttttttttattttttggtgtatatgtgctttattattttaaaatcaactttatttggatagtttacacacagtaggagtcaccaattttaagcgtacaatttaatgagttttgacagtcattgaatcaggtaaccactaccacaatcgtgatagcatttccatcacccccaaaacttctcatttccctttaygtcaatttaacatccccaccaactgttttgtcccccatgcaggattttcaatcatttgtttacatagtgatagatttctagaaaagtttacatgacatcataataacctttgacacaaaactgcttgagttagaaggaacccttctgttcactcttatccgactacccactgtaatttacaatcacatacaactagttgtttctaattcttttgaagaatttgattcaataatataatgttttttactcccaagacactccctttactttgccagcatatagaaccttatcaacagaggggatcttaggaaatgggcttttgagccagactgcctgaattcaaatcctgtgatcactgcttactagctgtgtgacctctctgtgcctcagtttcttcatctgtaaaatgggaatgat

SEQ ID NO: 693179 - DNA, 601 bp, Homo sapiens
ccacacaggcagcacaatcctgaaaacctacactgtttttactagataattacttctctaaaaacaaaacaataaaagcactcaataaatagtagttattattaccctttttaakgaagcaatcctaattgttgaactcttaaaaggactaagggatggctcacacctgtaaatccagtgtgtccggaattggtaggttcttggtctcactaacttcaagaataaagccgcggaccctcgccgtgagtgtcacaggtcttaaaggctgcgtgtctagagtctgttccttctgaagttcggatgcgtttggactttcttccttctggtgggttcctggtctcactggcttcaagagtgaagctgcagaccttcgcggtgttacagctcacaaaagcagcatgcacccaaagaagtgaagaacaaagattccacaccaggacagagtacgaggagatgccactgctggctccagcagcctgcttttattctcttatctggccccacccacatcctgctgattggtccattttacagagagccgattggtctgttttacaaagagctgattggtccgttttgacagggtgttgattggtgcgtt

SEQ ID NO: 693180 - DNA, 601 bp, Homo sapiens
ccacacaggcagcacaatcctgaaaacctacactgtttttactagataattacttctctaaaaacaaaacaataaaagcactcaataaatagtagttattattaccctttttaatgaagcaatcctaattrttgaactcttaaaaggactaagggatggctcacacctgtaaatccagtgtgtccggaattggtaggttcttggtctcactaacttcaagaataaagccgcggaccctcgccgtgagtgtcacaggtcttaaaggctgcgtgtctagagtctgttccttctgaagttcggatgcgtttggactttcttccttctggtgggttcctggtctcactggcttcaagagtgaagctgcagaccttcgcggtgttacagctcacaaaagcagcatgcacccaaagaagtgaagaacaaagattccacaccaggacagagtacgaggagatgccactgctggctccagcagcctgcttttattctcttatctggccccacccacatcctgctgattggtccattttacagagagccgattggtctgttttacaaagagctgattggtccgttttgacagggtgttgattggtgcgtt

SEQ ID NO: 693181 - DNA, 601 bp, Homo sapiens
ccacacaggcagcacaatcctgaaaacctacactgtttttactagataattacttctctaaaaacaaaacaataaaagcactcaataaatagtagttattattaccctttttaatgaagcaatcctaattgttgaactcttaaaaggactaagggatggctcacacctgtaaatccagtgtgtccggaattggtaggttcttggtctcactaacttcaagaataaagccgcggaccctcgccgtgagtgtcacaggtcttaaaggctgcgtgtctagagtctgttccttctgaagttcggatgcgttyggactttcttccttctggtgggttcctggtctcactggcttcaagagtgaagctgcagaccttcgcggtgttacagctcacaaaagcagcatgcacccaaagaagtgaagaacaaagattccacaccaggacagagtacgaggagatgccactgctggctccagcagcctgcttttattctcttatctggccccacccacatcctgctgattggtccattttacagagagccgattggtctgttttacaaagagctgattggtccgttttgacagggtgttgattggtgcgtt

SEQ ID NO: 693182 - DNA, 1087 bp, Homo sapiens
tgagttcccatagctagtaagtggtagagtcaggaatttaaccctggacagtctgatcctgtgcactgcctttggttccaagtcactccatactcaacatccttaatcaagtttgctgagtcccaaacagagttcatataaggaaaagatctcaggtgataaacaaatatacattttattgattattttattttttcaacatgttaggtctagtatctattttaaaccacaacaccaggtaatttcctttatgaaaacttcctgagtaaactaccttatactccactagataattgtatttatcaccrcttcttttctcagtgtaatttttttcaacttttaagttctatgtattttagttgattatatgtggaatgtcttcttaaaggaaataatacatttttctttaaataagtttgttctgtgcctttagacagaagctctaagatagaaagcaggtgccataagttccagaactccagacaggttggagttcaagtagaagcaggcaaacagaaaggatggtaggccagaaccagtagttagtcttctatgcatttgatccaaaaagaaaaatagtgagtaaagtggtgggagtgacagaggcaagcaaggtaagatataaaatgaccaagtaaacacatttcttagaatctaggctagaaaaagatgtaatgagggaaaagttatatgtaggaaaatattcacaatagaaaaactttaaaaacattgaaaatgttccaaattgggaaaatgagtaactaaacaatgactcataatatgaaatattatacaattactaaagtgataatatactataaagtgaataaattgtagcaaatgtctttacactattattactctaggtgaaaggtatatgcaaatggacaaagactggaaaagaatgtatagaacctttcaaagctgctctaacagggatattggttagaaatcctttttcacaattgttcaatatttccatagtattgctataaagctttaattatacaatacaatatatacaatatagtaaacaataatatatttactatgcatatgcaggtctgtgaagaccaaatactttctt

SEQ ID NO: 693183 - DNA, 1087 bp, Homo sapiens
tgagttcccatagctagtaagtggtagagtcaggaatttaaccctggacagtctgatcctgtgcactgcctttggttccaagtcactccatactcaacatccttaatcaagtttgctgagtcccaaacagagttcatataaggaaaagatctcaggtgataaacaaatatacattttattgattattttattttttcaacatgttaggtctagtatctattttaaaccacaacaccaggtaatttcctttatgaaaacttcctgagtaaactaccttatactccactagataattgtatttatcaccacttcttttctcagtgtaatttttttcaacttttaagttctatgtattttagttgattatatgtggaatgtcttcttaaaggaaataatacatttttctttaaataagtttgttctgtgcctttagacagaagctctaagatagaaagcaggtgccataagttccagaactccagacaggttggagttcaagtagaagcaggcaaacagaaaggatggtaggccagaaccagtagttagtcttctatgcatttgatccaaaaagaaaaatagtgagtaaagtggtgggagtgacagaggcaagcaaggtaagatataaaatgaccaagtaaacacatttcttagaatctaggctagaaaaagrtgtaatgagggaaaagttatatgtaggaaaatattcacaatagaaaaactttaaaaacattgaaaatgttccaaattgggaaaatgagtaactaaacaatgactcataatatgaaatattatacaattactaaagtgataatatactataaagtgaataaattgtagcaaatgtctttacactattattactctaggtgaaaggtatatgcaaatggacaaagactggaaaagaatgtatagaacctttcaaagctgctctaacagggatattggttagaaatcctttttcacaattgttcaatatttccatagtattgctataaagctttaattatacaatacaatatatacaatatagtaaacaataatatatttactatgcatatgcaggtctgtgaagaccaaatactttctt

SEQ ID NO: 693184 - DNA, 587 bp, Homo sapiens
tgattaagtaaaaaataaaaaaggtggaaaggtcaagatcaaggaataaaaaggggaagaggaaaagtagtaaataatacgtaaaaatgtaaatatatcactagttaagttaaacaaaattaaaccaaatgctcaaagtgaaatactagggttgtcaaactaaattaaaaagcrcatacagacagaaaaagtctttgctgcttataaaagacatgcctaaaatataagtggatcaaaagttttaaagaaaacggatgacagaatttatactgaaaatattactagagataaacaggaataggaacagtgcaaatatggaatggtcaattcaataacatataacaatcccaaataggaatatatctaataacatagcctcaaaatattgaaacaaacactgagagaccaacaaggaactatagacaatccaaaaacaataattggaggtttcagcacacctctctcagtggatggagccagcaaattcaaataagaaatgatactgtagttttggccaatacagcttaaaagcttaacttaattgacatacataggtacagggtatctacaaaaaaacccccacagct

SEQ ID NO: 693185 - DNA, 1853 bp, Homo sapiens
tcaggtcccttagggcttcaagaaagcaggtgagcaggttgaaccttcatagaacaggcttcatagagcagaatcagtctttgttccaggtttctttttttttatttttttatttaaaatttattgagggctttcctgtatttactggaaagcctgctagacaaattctaaaagagctgtaacacccccaggttttaagagagataccctgccctggccgggcgcggtggctcaaacctgtaatcccagcactttgggagactgaggcaggtggatcacgaggtcaggagatcgagaccatcctggctaacatggtgaaaccccatctctactaaaaatacaaaaaattagccgggcgcctgtagtcccagctacttgggaggctgaggcaggagaatggcttgaacctgggaggcagagcttgcagtgagccgagatcgcaccactgcactccagcctgggcgacagagtgagactccatctcaaaaaaaaaaaaaaaaaaaagagagagataccccgccctctaccactatcccttgactctctcttgacactaagcagatcggacagtctcagccaattcagcaggggaactccagagccaaaattgcctatttgaagtgtttcactggccaggcgtggtggctcacgcctgtaatcccagcactttgggaggccgaggcgggcggatcacaaggtcaggagatcgagaccatcctggctaacacggtgaaaccccgtctctactaaaaatacaaaaaattagccgggtgtggtggcgggtgcctgcagtcccagctacttgggaggctgaggcaggagaatggcatgaacccgggaggcggagcttgcagtgagccgagatcacgccaccgcactccagcctgggcgacagagcgagactccgtctcaaaaaaaaaaaaaaaaaaagaatgagaccctgtcacaaaaaaattaattatttaattaaattaaaattaaaattaattttaaaaataaaataaagtgtcccacattgggcagaaatggtcagatgctagcatcactgccatatgcagtcataggctggacgctgctcaaatctgctctccatacccactagaaaatcctaaaagaaatatagccttaaatacagtttttaggctccatcaccttacctatcctggctgttgtgttactctccagcaggattcaggaggaagagtgtgtcaggaacatttattcaagcttttatcttcccagaacttgaggatactatttctttttttaaccttccatactgtagaagcattgcagccatgctaatttcaaagagaagaatgaaagaaagtaggaatagcattgctactggttttccaagacctaaaagttatgtcgtatttctctagtttggtcttgagatctttctctgcagagggagtgtaaactctagccctgccctgatcaggttccaggggattgtttgtcgatatttacactgtgcctttcacaggatacttctttatcctagcagatggcctaatgcctaggtatctgacccatggtcaggtgtccctctcataggaaacttgtttataccgtcaactgcccttgaggctcttttctgacttgtgttcagtttattcctaccaagatagccactctttaggagagctttcactggaagtaaaattaggtctgtgtgtgtcagtcaggtgaggtacagagaagacaacataacaaaaacacatgaaaaaaacaaaagcagtttattactcatagatcccagagagaagaagggtgccaacaagcwgattgtcaaaccagtgagaggggagtgagaaacagagaagacctatgcagtgagtcattca

SEQ ID NO: 693186 - DNA, 647 bp, Homo sapiens
tttttyccacatttaaccttacaatgtaggcttttccttgtattaagaaatctttataaaaatcatttctaccttctgtacataatgctctattgagatcatgtagcataatttctgaaaccatccagtgttggtgaatcttttcttttagtttttctttcctttaggcatggtgtaatttttaagaaaagcctgtacttttcaaacagcgactgtcatattacttttaagtatgttaaatttgaagattttgaattaaggagcattgttccatcaccttgaattccacagtttaagcagacaattgtattttagcttaaacatttttagcagagcaagaaacaaagaagtatttgcccccctccccatctttgatgcctccgtgctatttaaatgtagaaacagtcttgactgagtcctttggactgatagctcggagtggctggatgtcttgactgagtactttggacggataactcggagtgactggatgttggttgtgctgcaggcgagcaataggaccacattttggaaaaggtgaagagtgttttacaatggattctcaccatcagtatgtttaatatctaattgacttgattttctatgtcattttctcttaaattactcttgaaagcaaatgtgcaatg

SEQ ID NO: 693187 - DNA, 647 bp, Homo sapiens
tttttcccacatttaaccttacaatgtaggcttttccttgtattaagaaatctttataaaaatcatttctaccttctgtacataatgctctattgagatcatgtagcataatttctgaaaccatccagtgttggtgaatcttttcttttagtttttctttcctttaggcatggtgtaatttttaagaaaagcctgtacttttcaaacagcgactgtcatattacttttaagtatgttaaatttgaagattttgaattaaggagcattgttccatcaccttgaattccacagtttaagcagamaattgtattttagcttaaacatttttagcagagcaagaaacaaagaagtatttgcccccctccccatctttgatgcctccgtgctatttaaatgtagaaacagtcttgactgagtcctttggactgatagctcggagtggctggatgtcttgactgagtactttggacggataactcggagtgactggatgttggttgtgctgcaggcgagcaataggaccacattttggaaaaggtgaagagtgttttacaatggattctcaccatcagtatgtttaatatctaattgacttgattttctatgtcattttctcttaaattactcttgaaagcaaatgtgcaatg

SEQ ID NO: 693188 - DNA, 681 bp, Homo sapiens
aaaatccaagggggtcatttgctcaagggtatgcaagctagttattgggcatattactcctatgagctacttcctatttcataacaggtcagcctcccgtccttagcatagctttttccttcactcatatctgttttctctgttgccctatgaccaacaaactcgccataagaaaactccagtcacatttgctgaatagaagtaacactgtctaatgctttcattaaggacaaaacacatctgcttcttcactctatgtgaaaattgtacctagttctaagaagatatgatgtcacaatatgtgaaaagcataacagttcatggtaaaggaacatcaacattccctagtgcttttaatgcaaaattgtgtgctgctgtgttccatttctgtgattatacatatgcaagcttaatgtaactgattttcttatttgtaaacactagaaaatgtaaacaaaacttgacatgttagtcacaatattgaggtggttggaatgaatgccttaatttttctatcatatttttaaattaataatattttatagcaacctatattgctctttagacttaatatgaaatagcccttagagttgaaacagagtaaaarcctgaatatggtggaaagctatattaagatattttaaaaattatttctaataaagttttatagactttagggca

SEQ ID NO: 693189 - DNA, 861 bp, Homo sapiens
ggtctgcagagaaagctcaccaccctccctcacctgagcagctggtccaggtggccttcgaggaaagaaacagagttcatataaagcttttggaggcagtgcagcttgaggaactgagtggtgaactgggtaacaatctccttcttctgctctggggaaacgtagcgagagacatccatgtgggagagaacgagcttctgaagattcctcatgtggcccaggtatggggtaaactgtgtcaggatgggcagtacccacttgcaattcacttccacctcctggatacagtctaggttcaccattttcaggatgcttctgatattgcggaagggcattcccaaaattttcagcttcttacagcacaggtgtagtaaatctttcctctgcttgacccatagaaggaggcaggtgaggtgttcatccagagtcctgttcttgagccaaagttctacgaacacagtcaagggctgccgtcctctcatccttggacagtcctgcactggttttttgttcctcttggcattgaggaagcacccacgggccatagcttcagaccaaaccatccagaagttctcacagacatcctgtaaatccagcacttgaagtttccacctcctgtgggaaaatagaggtgagactgagaatttcagaactcatttctgaacttaaactccacatcctggatagcagctcctcccctccctgcttcttgtccctgtctctgacatttctccaccctgttttccccttggatcctgcccactttcacagwtttttttttttttttttttttttttgagaccaagtctccttctgtcacccaggctggagtgcagtggtgtgatgtcacctcactgcaac

SEQ ID NO: 693190 - DNA, 861 bp, Homo sapiens
ggtctgcagagaaagctcaccaccctccctcacctgagcagctggtccaggtggccttcgaggaaagaaacagagttcatataaagcttttggaggcagtgcagcttgaggaactgagtggtgaactgggtaacaatctccttcttctgctctggggaaacgtagcgagagacatccatgtgggagagaacgagcttctgaagattcctcatgtggcccaggtatggggtaaactgtgtcaggatgggcagtacccacttgcaattcacttccacctcctggatacagtctaggttcaccattttcaggatgcttctgatattgcggaagggcattcccaaaattttcagcttcttacagcacaggtgtagtaaatctttcctctgcttgacccatagaaggaggcaggtgaggtgttcatccagagtcctgttcttgagccaaagttctacgaacacagtcaagggctgccgtcctctcatccttggacagtcctgcactggttttttgttcctcttggcattgaggaagcacccacgggccatagcttcagaccaaaccatccagaagttctcacagacatcctgtaaatccagcacttgaagtttccacctcctgtgggaaaatagaggtgagactgagaatttcagaactcatttctgaacttaaactccacatcctggatagcagctcctcccctccctgcttcttgtccctgtctctgacatttctccaccctgttttccccttggatcctgcccactttcacagtyttttttttttttttttttttttttgagaccaagtctccttctgtcacccaggctggagtgcagtggtgtgatgtcacctcactgcaac

SEQ ID NO: 693191 - DNA, 861 bp, Homo sapiens
ggtctgcagagaaagctcaccaccctccctcacctgagcagctggtccaggtggccttcgaggaaagaaacagagttcatataaagcttttggaggcagtgcagcttgaggaactgagtggtgaactgggtaacaatctccttcttctgctctggggaaacgtagcgagagacatccatgtgggagagaacgagcttctgaagattcctcatgtggcccaggtatggggtaaactgtgtcaggatgggcagtacccacttgcaattcacttccacctcctggatacagtctaggttcaccattttcaggatgcttctgatattgcggaagggcattcccaaaattttcagcttcttacagcacaggtgtagtaaatctttcctctgcttgacccatagaaggaggcaggtgaggtgttcatccagagtcctgttcttgagccaaagttctacgaacacagtcaagggctgccgtcctctcatccttggacagtcctgcactggttttttgttcctcttggcattgaggaagcacccacgggccatagcttcagaccaaaccatccagaagttctcacagacatcctgtaaatccagcacttgaagtttccacctcctgtgggaaaatagaggtgagactgagaatttcagaactcatttctgaacttaaactccacatcctggatagcagctcctcccctccctgcttcttgtccctgtctctgacatttctccaccctgttttccccttggatcctgcccactttcacagttwtttttttttttttttttttttttgagaccaagtctccttctgtcacccaggctggagtgcagtggtgtgatgtcacctcactgcaac

SEQ ID NO: 693192 - DNA, 661 bp, Homo sapiens
gtctcgaccttcatactggcaccacgcagttttgcttactrttgccttactgtataaattgaagtcaggtaatgtgatgtctccatatttgttcattttgcttcggattgctttggctcttcaggctcttcttcatctccatatgaatcttaggattctttttttaatcttgtgaaaatggtgtttgtattttggtgtatgaaatttttagactgacgtttttagattgatgtttgatgtttgcagtttttagatttctttgggcagtgtggtcattttcacaatattgtgtctgtcaatccgtgagcatgggctgtttttctacttttttgttgtctatgatttttttcagcagtgtcttgtagttcatctcatagagatcctttacctaatggttaagtgtattcctaggttgtttttgttattgtcactgtttttgttgttgttttgcaactattgtgaagggatggaattcttgaattgattctcagcttgcttgttgttggtatcaaacagtggtacttatttgtacatattgattttgtacctgagatttaagtgaattcacttatcgcatctatgagtcttggtggaatctttccagttttctaagcacatatgatcacatcattggcaaacacaggtagtttcacttccttct

SEQ ID NO: 693193 - DNA, 661 bp, Homo sapiens
gtctcgaccttcatactggcaccacgcagttttgcttactattgccttactgtataaattgaagtcaggtaatgtgatgtctccatatttgttcattttgcttcggattgctttggctcttcaggctcttcttcatctccatatgaatcttaggattctttttttaatcttgtgaaaatggtgtttgtattttggtgtatgaaatttttagactgacgtttttagattgatgtttgatgtttgcagtttttagattkctttgggcagtgtggtcattttcacaatattgtgtctgtcaatccgtgagcatgggctgtttttctacttttttgttgtctatgatttttttcagcagtgtcttgtagttcatctcatagagatcctttacctaatggttaagtgtattcctaggttgtttttgttattgtcactgtttttgttgttgttttgcaactattgtgaagggatggaattcttgaattgattctcagcttgcttgttgttggtatcaaacagtggtacttatttgtacatattgattttgtacctgagatttaagtgaattcacttatcgcatctatgagtcttggtggaatctttccagttttctaagcacatatgatcacatcattggcaaacacaggtagtttcacttccttct

SEQ ID NO: 693194 - DNA, 661 bp, Homo sapiens
gtctcgaccttcatactggcaccacgcagttttgcttactattgccttactgtataaattgaagtcaggtaatgtgatgtctccatatttgttcattttgcttcggattgctttggctcttcaggctcttcttcatctccatatgaatcttaggattctttttttaatcttgtgaaaatggtgtttgtattttggtgtatgaaatttttagactgacgtttttagattgatgtttgatgtttgcagtttttagatttctttgggcagtgtggtcattttcacaatattgtgtctgtcaatccgtgagcatgggctgtttttctacttttttgttgtctatgatttttttcagcagtgtcttgtagttcatctsatagagatcctttacctaatggttaagtgtattcctaggttgtttttgttattgtcactgtttttgttgttgttttgcaactattgtgaagggatggaattcttgaattgattctcagcttgcttgttgttggtatcaaacagtggtacttatttgtacatattgattttgtacctgagatttaagtgaattcacttatcgcatctatgagtcttggtggaatctttccagttttctaagcacatatgatcacatcattggcaaacacaggtagtttcacttccttct

SEQ ID NO: 693195 - DNA, 661 bp, Homo sapiens
gtctcgaccttcatactggcaccacgcagttttgcttactattgccttactgtataaattgaagtcaggtaatgtgatgtctccatatttgttcattttgcttcggattgctttggctcttcaggctcttcttcatctccatatgaatcttaggattctttttttaatcttgtgaaaatggtgtttgtattttggtgtatgaaatttttagactgacgtttttagattgatgtttgatgtttgcagtttttagatttctttgggcagtgtggtcattttcacaatattgtgtctgtcaatccgtgagcatgggctgtttttctacttttttgttgtctatgatttttttcagcagtgtcttgtagttcatctcatagagatcctttacctaatggttaagtgtattcctaggttgtttttgttattgtcactgtttttgttgttgttttgcaactattgtgaagggatggarttcttgaattgattctcagcttgcttgttgttggtatcaaacagtggtacttatttgtacatattgattttgtacctgagatttaagtgaattcacttatcgcatctatgagtcttggtggaatctttccagttttctaagcacatatgatcacatcattggcaaacacaggtagtttcacttccttct

SEQ ID NO: 693196 - DNA, 661 bp, Homo sapiens
gtctcgaccttcatactggcaccacgcagttttgcttactattgccttactgtataaattgaagtcaggtaatgtgatgtctccatatttgttcattttgcttcggattgctttggctcttcaggctcttcttcatctccatatgaatcttaggattctttttttaatcttgtgaaaatggtgtttgtattttggtgtatgaaatttttagactgacgtttttagattgatgtttgatgtttgcagtttttagatttctttgggcagtgtggtcattttcacaatattgtgtctgtcaatccgtgagcatgggctgtttttctacttttttgttgtctatgatttttttcagcagtgtcttgtagttcatctcatagagatcctttacctaatggttaagtgtattcctaggttgtttttgttattgtcactgtttttgttgttgttttgcaactattgtgaagggatggaattcttgaattgattctcagcttrcttgttgttggtatcaaacagtggtacttatttgtacatattgattttgtacctgagatttaagtgaattcacttatcgcatctatgagtcttggtggaatctttccagttttctaagcacatatgatcacatcattggcaaacacaggtagtttcacttccttct

SEQ ID NO: 693197 - DNA, 1741 bp, Homo sapiens
tgagcgacctttaatctgcacaagaccgcctttcttcactgtacattttctcctcttgccctgccgtaacctgtggtccccatcaccccccagaactccaagctcctggttgttttttttttcatagctcagtatggtgtataagttttaatcatctgacccttcttgaagtctaatgttttgtgagattcctgtgtgtataaacacaattaaatataattctcctcctgctaatctgtcttatgccaatttaatttgtagcccagccaaggaacctagaagggtaaagtcattttttgctccactacacatattatatttcatgacttaaaaatttaagcaatgtcagcaaaataggggtggtcattgaaagcgttaaacacacagggccaccagtgcacagtggcatggggagcacattgcacaatgccagtggcatcacttccatggacatcaatgattcmaaaggcaggcagccaaccagggaagtgcagagcccataagagaccctgaaaagcagctcccagagaatgacctttcctctctgtggtccttggccaggtcccatagctctcccaagcacacctcctggatttcccatgggaatgcccagatgcagctggaatcaaagctacaggtagtcattgctccagggcccctcccagggagagagcaaaggatttataatggacatgagaggctttgtcctaaaaaagacactaaaatgaagatgtaaccacaggagggtcttctgtactggccctctccttctgcggatgtgaaaactggaggcgcagagacacatgtggcctcttcttggtcaagagagagttaatgtccaggcttgaaggaagcccttcaaggttcttctcacattgaagtcaggctgttcccctaggatccctgtcctcttcatttcttattctaaatttgtagattaactcatgttaatgattcctgatgggtggaaatgttattctattaacatatttgcataatgataggaacttcagtgccttaatgggggaaactgaagtcccagggagggccagtggagcaggaattggcggctcttggggacttttgtactttttgcttatttgagaaaagtcatggattccctccccagagaaggtaacgtgagcccaaactgtgggctatttgaggggattcacagaccccctccaccctaccaacccatctaaggcccagactaataccatgagggaagccagactcttcccctctggctttagccctgatgactgcgtgcagtggtgacaaggcaccccatcatttgatggtgtttggggagacagaaagagaaagagagattgagagaaagattatcttctgtaattcattaataataatgttaccgaaggtagttggtcagacatacgcagggcaggagagagcgcccctggcccctacaaccccaaccagaaatatcaggcaacaatcactgatggtcaagcagtggttaaactgtttctctaaaataataattggttgcagccagtgccagggaaaagcagtatccccaatagatagaaacatctgaaactcatgatcagcagcttccgataacatctcaggagctgggcaagtgggttcaagcatgcacactaagaggcaaaatggtggagtttaactggtctatgactcctcctagggacatctggtaagagaagaatgcctcaagtgagtatgtacacaactctagtaaacacacagcaca

SEQ ID NO: 693198 - DNA, 598 bp, Homo sapiens
catcagctctacctgcttgcttgcccttcaggatggctactgcagcaaacagaggaggcaggagtctttgagggggcattttccagtgctctggtctctgggaataatttcattaccagtcctggaaggggtgggagagaggagcctggggaaaaggctgcgggagcttcagcagttattgaatgacagcattctcatgttctccttgtccctggtctgtcctctgaggctgtgggctcctgccctctgcttttattcctgagaatgaagttcactgggccacctcactcattttgactctgccccttcagagactcccatgaaggtccgttttccctcttcaaaatggcctattttgtcattcttgaatggatkgttgaaagttgctttacacttgatgtggacataagcagactgtaaatccattaaaaatagaaacaaaaggaatggtggccaggcatggtgacacgcacctgtggtctcagctactcagaaggctgaggctggagaatcacttgagcccgggaggctgaggttgcagtgaaccgagaacatgccactgcactccaccctgggcaacagaataagaccctgtttc

SEQ ID NO: 693199 - DNA, 672 bp, Homo sapiens
ggacagcctacagaggctgaagtgaagtttcaaagttacactcctatgcaaatgtctaacaaccaatcataggtactttcaatttcccatcggccacgcagaaaagctgggagcttgcaaagggagtagcctctggtccttttgttacttaggcatggaaagttagggttctcctttcaatttagttctaggaactcagcgtgaaacggccttaggttccctgcctccagaatgtattctcctgcctcagagagaggatgatccctcttcagtgaccccacaaagcttgggacatactttttatggctatgacacttgtcaaaagtggactgttggtacctgtctgggggctttccctcatatctaattgcaaattcctccagggcagggagcataccttcttcaatccagcacctagcacagtgcctggcaacataataggctcttgatacaagctgttcaatgaacgaatgaatcagtgaatgaatctcttcccctttggggactctttagtgggagccttcattgaagagtgktttcaccacagagtgacctataagcaaaaaattttaagagctgggacagcctgggttggggggtgttatttggtcagggaaatattttaaccccgaagattatgtccctgaggtatttcagcctatccaggacttg

SEQ ID NO: 693200 - DNA, 1398 bp, Homo sapiens
tttacgtttctttctaataaatctgtacgaaaaagacattttagggcatgaaaagcactatgagaagaaaataatctcacccagataattctatgtgtttgtaatagaaaaagtcacacaatcaacacagacttagaagtaaattttgagttactcaaagcagtgtgtcttgcatctagggcatttaaatctgatgactgttgctgtagtctaaatgtttgtgaactcctccaaatttatatgttgaaaccacaaccccccaaggtgatcgtattgggagatgggacatttaggggttgattagatgatgagggcagaggcttcatggatgggattggtgctcttataaaagaggcccaagggaccttttttccccttctaccatgtgaggacacaattagaagacaccatctatgaatcagaaaataggtcctcaccagacattgaatctgttggcaccttgattttggatttcccagactccaggactgtaagaaacaaatttctgttgtttacaagctattcaacctctggtattttattacagcagcctgagcagactaagacaactgtgttccaagataccgatttatccaaaattctcgaattaggcataatttgagaactacactaaaactacactctcagctgtactaattctggcattagctaaacccttaattagaagttgtcattcacagtgggaagcagagtggagtctgggggcagggtcccataggagaaagatcatgaagaattgggtagtactggagaagagaaagtagtaaaaatatttacatgggctcaggcaatccataggtttaaagttcatcctttattcctttgattaaaatgcaagttaacagtcacttatcactcaatcactggaagatgaaatgtaatgaatgggtctttaacatgtaagtcatgcattttagttatttctcctaagtccagtatgaagtctttatggaatacaagagaaatccctctatattatggaagaaattgaatgaatgtgctacctttcctggagtcttccacattaccacctctaagctttgtgcctcactttgctttccagaccatgctgtccatcaatcactttttctttgactcattggccagttccatgcaagttatcttttcctgtcttcttccatcctcattttacttctttggcttgtagtcctctcagacatctttcagagaaatcccctctgtgctaacttgcctcttctcatataccttttactcttacagcctttatctagccctacagataggatctggaarattgccttagtttctagaagtgtggcatctgggcttcagtcacctcactgtcaatatataatacttttattaataaatatcagatgttgtgatcacagtgca

SEQ ID NO: 693201 - DNA, 648 bp, Homo sapiens
attctaaaattcacctactgtggtttgaaacttcccaaacatcacagtcaygtggaaagggaatattttttataacatgctgctcttttcattgtttcttcctcttcctcttgggcggtttcagtggtggttcttgttgcagaaaggagctgaaatgacaataggatattcaagctaaacataaatttagagactgtcttgtccattattacatgtgatgggcgaggacactgaggctccttattaatgtcacttatacaaatttcagtagtgggtcagcgacagagtgaagtccagaaccccagagtcttctgaccgctacccagtcctctttcgactcttggggatcacgttcctcacctctgctagtgatgtagggtgacattgcaggtaatcaattcggaataaagttgggtgccatggatgatttcagctgctcttaagtagaagtgaccgtatcactgccagttagggctgctgttcatttttctggcttcaagttccttaaaatttttttttctctcttaatcttgatgagtgatttttccttttgtgctgttatcctctctagtttctctaaaaggattttttttctcctcccctcacccccagttctcttacatcagaaacagaacgatctccctctta

SEQ ID NO: 693202 - DNA, 648 bp, Homo sapiens
attctaaaattcacctactgtggtttgaaacttcccaaacatcacagtcacgtggaaagggaatattttttataacatgctgctcttttcattgtttcttcctcttcctcttgggcggtttcagtggtggttcttgttgcagaaaggagctgaaatgacaataggatattcaagctaaacataaatttagagactgtcttgtccattattacatgtgatgggcgaggacactgaggctccttattaatgtcacttatacaaatttcagtagtgggtcagcgacagagtgaagtccagaaccccagagtcttctgaccgctacccagtcctctttcgactcttggggatcacgttcctcacctctgctagtgatgtagggtgacattgcaggtaatcaattcggaataaagttgggtgccatggatgayttcagctgctcttaagtagaagtgaccgtatcactgccagttagggctgctgttcatttttctggcttcaagttccttaaaatttttttttctctcttaatcttgatgagtgatttttccttttgtgctgttatcctctctagtttctctaaaaggattttttttctcctcccctcacccccagttctcttacatcagaaacagaacgatctccctctta

SEQ ID NO: 693203 - DNA, 1324 bp, Homo sapiens
tctcctgcctcagcttctcgagtagctgggactacaggcgcccgccaccacgcccagctaatgtttttgtatttttagtagagacggggtttcaccgtgttagccaggatggtctcgatctcctgacctcgtgatctgcccaccttggcctcccaaagtgctgggattacaggcgtgagccaccgtgcctggcctcatttgtttatttttgagacagagtctcgctctggtgccaggctggagcgcagtggcgccatctcagctcactgcaacctccacctcctgggttcaagcaattctcctgcctcagcctcccgagtagctggaactacaggtgcgtgccaccatgcyccgctaatttttgcatatttagtaaagacggggtttcatcatgttggccacgatggtcttgatatcttgaccttgagatccgctcaccttggcctcccaaagtgctgggattctaggcgttagccaccatgcccggccgagggtctacatttctaccaggcagatgctgctatcctatggtgcaccatgctgtgggcagtcaccttcttggctttcctcatctaaaaaaaaagggataataatagtacctacagaattacattaataaaggccaaacacttagaatagatctggcatatatattttcaataaacaatctttgattttctgatcaataattatttcatttattgaataggccttatttaattcctgcaacagataaggcaatgaccatgcaactagcagttcatagactaagtaacaagatcatacataatcctgtcatggaggaggattgaaaatactcctttactctataggtataagtgcaaaacaaagtataagattgttttaccaactcagaggagaaaaacctttggggggaagcacaagaaaatgggcgtggaagagattctcaaaggataggtaaggagtgtttaggtgaaaaggaggaaagtaaaaacacaaaggtatataaaatcaaatcacttactctctaattcaacatatacagcatacgttctaagcagtagggtacaaaactagcaaacagacaaagtctctgccctctggaacttatattctaatgagagacagataattaaacatacaaccatgtaatacctgaacttgtggtgagctttatgtataaaaaagaaatcacagtatggggatgatgattgatagaactttgtacaataacattgtacttgtacaatgatcaggaaacatcttttaagaaggtgacatttgagcaaagaactaaataagtaagggagggaaacacacaggtatatggggaagaatattc

SEQ ID NO: 693204 - DNA, 1324 bp, Homo sapiens
tctcctgcctcagcttctcgagtagctgggactacaggcgcccgccaccacgcccagctaatgtttttgtatttttagtagagacggggtttcaccgtgttagccaggatggtctcgatctcctgacctcgtgatctgcccaccttggcctcccaaagtgctgggattacaggcgtgagccaccgtgcctggcctcatttgtttatttttgagacagagtctcgctctggtgccaggctggagcgcagtggcgccatctcagctcactgcaacctccacctcctgggttcaagcaattctcctgcctcagcctcccgagtagctggaactacaggtgcgtgccaccatgctccgctaatttttgcatatttagtaaagacggggtttcatcatgttggccacgatggtcttgatatcttgaccttgagatccgctcaccttggcctcccaaagtgcygggattctaggcgttagccaccatgcccggccgagggtctacatttctaccaggcagatgctgctatcctatggtgcaccatgctgtgggcagtcaccttcttggctttcctcatctaaaaaaaaagggataataatagtacctacagaattacattaataaaggccaaacacttagaatagatctggcatatatattttcaataaacaatctttgattttctgatcaataattatttcatttattgaataggccttatttaattcctgcaacagataaggcaatgaccatgcaactagcagttcatagactaagtaacaagatcatacataatcctgtcatggaggaggattgaaaatactcctttactctataggtataagtgcaaaacaaagtataagattgttttaccaactcagaggagaaaaacctttggggggaagcacaagaaaatgggcgtggaagagattctcaaaggataggtaaggagtgtttaggtgaaaaggaggaaagtaaaaacacaaaggtatataaaatcaaatcacttactctctaattcaacatatacagcatacgttctaagcagtagggtacaaaactagcaaacagacaaagtctctgccctctggaacttatattctaatgagagacagataattaaacatacaaccatgtaatacctgaacttgtggtgagctttatgtataaaaaagaaatcacagtatggggatgatgattgatagaactttgtacaataacattgtacttgtacaatgatcaggaaacatcttttaagaaggtgacatttgagcaaagaactaaataagtaagggagggaaacacacaggtatatggggaagaatattc

SEQ ID NO: 693205 - DNA, 1324 bp, Homo sapiens
tctcctgcctcagcttctcgagtagctgggactacaggcgcccgccaccacgcccagctaatgtttttgtatttttagtagagacggggtttcaccgtgttagccaggatggtctcgatctcctgacctcgtgatctgcccaccttggcctcccaaagtgctgggattacaggcgtgagccaccgtgcctggcctcatttgtttatttttgagacagagtctcgctctggtgccaggctggagcgcagtggcgccatctcagctcactgcaacctccacctcctgggttcaagcaattctcctgcctcagcctcccgagtagctggaactacaggtgcgtgccaccatgctccgctaatttttgcatatttagtaaagacggggtttcatcatgttggccacgatggtcttgatatcttgaccttgagatccgctcaccttggcctcccaaagtgctgggattctaggcgttagccaccatgccyggccgagggtctacatttctaccaggcagatgctgctatcctatggtgcaccatgctgtgggcagtcaccttcttggctttcctcatctaaaaaaaaagggataataatagtacctacagaattacattaataaaggccaaacacttagaatagatctggcatatatattttcaataaacaatctttgattttctgatcaataattatttcatttattgaataggccttatttaattcctgcaacagataaggcaatgaccatgcaactagcagttcatagactaagtaacaagatcatacataatcctgtcatggaggaggattgaaaatactcctttactctataggtataagtgcaaaacaaagtataagattgttttaccaactcagaggagaaaaacctttggggggaagcacaagaaaatgggcgtggaagagattctcaaaggataggtaaggagtgtttaggtgaaaaggaggaaagtaaaaacacaaaggtatataaaatcaaatcacttactctctaattcaacatatacagcatacgttctaagcagtagggtacaaaactagcaaacagacaaagtctctgccctctggaacttatattctaatgagagacagataattaaacatacaaccatgtaatacctgaacttgtggtgagctttatgtataaaaaagaaatcacagtatggggatgatgattgatagaactttgtacaataacattgtacttgtacaatgatcaggaaacatcttttaagaaggtgacatttgagcaaagaactaaataagtaagggagggaaacacacaggtatatggggaagaatattc

SEQ ID NO: 693206 - DNA, 1750 bp, Homo sapiens
gtgtgtcctgtgtcaggtactattgcaggcttgggagaaacaatggtgaatgaaagctgagatggcttctttcatgatgttttcaatctaattcagagagatgtgacaaacaaacacaacacaaacaaagggaacagtgtcagatagcgatgtgtgcagccggaacagtgaaacagggcagtgtgatggaggtgcagggagtaggtgctgcctgacacggccactcacgttgaatatgccaggaccyccattccagcatcacatatggtctaagtgtgggggaacattgacctgtcctgtgtgtaatcagctagaatgaaaggaaagagccccagctttatatgacaagttactaaaggagaacccgagcccaggacaaatgtctgtgatgaacaccttcttcctctcttagtctattcaggctaaagtaccataggctgggcaacttagaaatacagactttttttcctacccattctggaagctgggtgccggcagatttgttgtttggtgggggcctgcttcctggttcctagacggtgtcttctaatggtatacaaatgtggtggaaggagtgagggttctctcttgagcctcttttataagggcactcatcctattcatgggagctccacccttatgacctaatcacctcctaaagaccctgctccctaatatcatcaccctgggggttaggatttcaacatgtgaaactgcaggggacataaacatgcaggccatagccgttctccatgctgataggtaatgggcagtcactgaatgagtctctgtgaggcaatggagggggagctgggtggcaaggcccaggcccaggctgagtctacaaagagcagcatcaggatctgccgggagacagaagctctttggggtgaaggtgatgcctcttcgttgttgtgtttccagcagcgacacagcatttggcacatggcaagtcctctgtaaatactggttgatgaattaaggaatcccttggctgaaggtggaggggaccggctactgcgggaccagggagcctttgcattttggatgatttcttcatacttgggagaagtattttcctccttccataagacaagtcccagagccttccaggtgggaaggactgtctggccaaatgactctgactttgtcttttttatttcaacacttgctgttccctgggggactacgattcactttaatgctcccaccaaagtgaggccagctagtccttcccgtctgggaggctttccttaggtttgccaccttagcacagctgagatggcccgggaatttaggaagccttctttagctgcgaagggagtggaaaagacgactaagccaagagcatgcatgaggaataaaagcggtcaggtttctgctgtctggtattcctcatctttctataattttctggctttggtgctccatgctatgcagaaagaacaccaaaagatgagtacagtttttcagacaacctgactcagccctaggcccatcttcacaaatagggaacaaatcttacttcccttccacactgaaacgggtatttgccattaagaaaagatcaccggattcaacaaatcaaagtatagggcactcagttaaatttgaatttcatgtaaataacacagaattctttgatataaatatgtcccaaatattgcaagttccaaatgtggcacgaggcatatgtatcttaaaaatgatgtactgtttatctgaaatttaaatttgactgggagtcttg

SEQ ID NO: 693207 - DNA, 1750 bp, Homo sapiens
gtgtgtcctgtgtcaggtactattgcaggcttgggagaaacaatggtgaatgaaagctgagatggcttctttcatgatgttttcaatctaattcagagagatgtgacaaacaaacacaacacaaacaaagggaacagtgtcagatagcgatgtgtgcagccggaacagtgaaacagggcagtgtgatggaggtgcagggagtaggtgctgcctgacacggccactcacgttgaatatgccaggacctccattccagcatcacatatggtctaagtgtgggggaacattgacctgtcctgtgtgtaatcagctagaatgaaaggaaagagccccagctttatatgacaagttactaaaggagaacccgagcccaggacaaatgtctgtgatgaacascttcttcctctcttagtctattcaggctaaagtaccataggctgggcaacttagaaatacagactttttttcctacccattctggaagctgggtgccggcagatttgttgtttggtgggggcctgcttcctggttcctagacggtgtcttctaatggtatacaaatgtggtggaaggagtgagggttctctcttgagcctcttttataagggcactcatcctattcatgggagctccacccttatgacctaatcacctcctaaagaccctgctccctaatatcatcaccctgggggttaggatttcaacatgtgaaactgcaggggacataaacatgcaggccatagccgttctccatgctgataggtaatgggcagtcactgaatgagtctctgtgaggcaatggagggggagctgggtggcaaggcccaggcccaggctgagtctacaaagagcagcatcaggatctgccgggagacagaagctctttggggtgaaggtgatgcctcttcgttgttgtgtttccagcagcgacacagcatttggcacatggcaagtcctctgtaaatactggttgatgaattaaggaatcccttggctgaaggtggaggggaccggctactgcgggaccagggagcctttgcattttggatgatttcttcatacttgggagaagtattttcctccttccataagacaagtcccagagccttccaggtgggaaggactgtctggccaaatgactctgactttgtcttttttatttcaacacttgctgttccctgggggactacgattcactttaatgctcccaccaaagtgaggccagctagtccttcccgtctgggaggctttccttaggtttgccaccttagcacagctgagatggcccgggaatttaggaagccttctttagctgcgaagggagtggaaaagacgactaagccaagagcatgcatgaggaataaaagcggtcaggtttctgctgtctggtattcctcatctttctataattttctggctttggtgctccatgctatgcagaaagaacaccaaaagatgagtacagtttttcagacaacctgactcagccctaggcccatcttcacaaatagggaacaaatcttacttcccttccacactgaaacgggtatttgccattaagaaaagatcaccggattcaacaaatcaaagtatagggcactcagttaaatttgaatttcatgtaaataacacagaattctttgatataaatatgtcccaaatattgcaagttccaaatgtggcacgaggcatatgtatcttaaaaatgatgtactgtttatctgaaatttaaatttgactgggagtcttg

SEQ ID NO: 693208 - DNA, 652 bp, Homo sapiens
tgacctcaagtgatccacctgcctctgccacccaaaatgctgggataacaggtgtgagccaccacgctcggtcaaggaagcattctcttgatcagattcatttgaatgtgagtctagtgagtctacagtaacttcttcatctgtgaygaaccacccagtaaactggcagaggtttagaattcattttgtgtaatctggagctacataacaatgtcttgcatggttatctggtagaatcttcctcaaataaccatattttattcattcttttctatctacacatactcgctcaatacacttggatgtatccaattcaaattaaattggccgggcatggtggctcacacctataatcccagcattttgggaggttgaggcaggcagattgcttgagcccagagttcgagaccaacctaggcaacacggagaaaccccatctctacaaaaaatcaaaaaattagccgggcatggtggcatgtgcctatagtcccagctactcagaaggtgaggtgcgaggattgcttaagcccaggaggtggaggttgcagtgagccaagatcgcaccattgcactccagcctgggcaacaaagtgagaccctgtctcaaaaaaaaattgatttaatatggaaaacaagaagagaaatgtgtact

SEQ ID NO: 693209 - DNA, 652 bp, Homo sapiens
tgacctcaagtgatccacctgcctctgccacccaaaatgctgggataacaggtgtgagccaccacgctcggtcaaggaagcattctcttgatcagattcatttgaatgtgagtctagtgagtctacagtaacttcttcatctgtgacgaaccacccagtaaactggcagaggtttagaattcattttgtgtaatctggagctacataacaatgtcttgcatggttatctggtagaatcttcctcaaataaccrtattttattcattcttttctatctacacatactcgctcaatacacttggatgtatccaattcaaattaaattggccgggcatggtggctcacacctataatcccagcattttgggaggttgaggcaggcagattgcttgagcccagagttcgagaccaacctaggcaacacggagaaaccccatctctacaaaaaatcaaaaaattagccgggcatggtggcatgtgcctatagtcccagctactcagaaggtgaggtgcgaggattgcttaagcccaggaggtggaggttgcagtgagccaagatcgcaccattgcactccagcctgggcaacaaagtgagaccctgtctcaaaaaaaaattgatttaatatggaaaacaagaagagaaatgtgtact

SEQ ID NO: 693210 - DNA, 952 bp, Homo sapiens
acaaataacaggatcatttcccttaatctcaccctagtgtgcttttttattggatttagagaaatgaaaacaagccaacttactattcttggaataaaaaattcacattttggtttgttttgcatatgtgacaagccaaatttaagagggcacttataatcagatttgaagtctgaaatagatttagaggaagaattattttgcctacaccaatcatccttctcccccaaacagactaacacaataaaaactgcaaataattggttgaagtactttccagatttcaaagatgtaagcagagtttattatcatctttagaaagtgttcttaaaattaaatctaattttgtccaacttccttcttaggttatggattccagagctatggaaaggagggttttgtaccttgtaagcagtaggtcgtgaatatgctagtgttggtgaagtgggtttttagcaatactctttcctgtccttcagcctcctagcctctttataaccacttgataccctgctgctggaattacaaagaggaattgcagtggtcagcaagataagggaatgcaattttggccagccccatactgttaaccaagttgaaaacggatagaaatgggaggagagaagataagaaaagaattgcttcttcaaggccattatatacaggaatttatctaagttatgggctatatccacctgtttccttggaaaaataaaacctaatctctttgcattgtgcttaggcctgcaaacttcaagagaaagaactgcatcttccaamcagaaaagagccatgaaggcaggtgcttctcttcaccaaataggaaaggtccaaagtaagccctagtctcttggctgtgccatgtttgctgacatcatggtctgtttgtaccagagcaaggcagcattctggtggaggtgacacaacatgagatctctgagctgggccttca

SEQ ID NO: 693211 - DNA, 587 bp, Homo sapiens
tctatgcacaaaatgtctaatatttaatggtggcaggaggcagaktcccttgggattccatcagacactaatgctgccttgctctggttagaaggctgggatatctgtgcctgtgttcactttttggagaaaagaggacaaagcaatggtcatgagtctggtctattgacttgttggctcattgcaccctcagctcctcagctgcaactgagagaacttcaagcctatgtacccagcagcagactcagcatggtcccaagcctggacaccaggaccgtcttcctttaaggagcctcaaagcccttttagttcaatgttcatgagactcagtcagcatccagcctttctcaggcccaatgctgaactgtgtataagtctctgccttgctcccacaaccaattctcttccctgaaccggatattcccgtgttgccatctctgcattggaactctgcccagtgtccaattccactaggacaaagacatgtccttgctttttgtttccaccctcaccttgggcttggagtattgccttgatggctcttgccctgaattctcccaccaaacctcctcatgctacctgccagc

SEQ ID NO: 693212 - DNA, 674 bp, Homo sapiens
attcatcacacagcatggtggttataataatgctcagaatttccttaatggtaacatataaaatttatcatttactatttggaaaaagaaaatgtttgtatctattggttaataatagaaaagtcatccactaacattttctttaatcatttgattacactccccccatgtacttgaagaacagcttctatgaagtcctatgaaatatatgtggtatagaaaagcactgaagcagaacttgttagcttgcaraaagaaaatacatgttttgaaagcactagagtagaagtcaaaagacctgagtttaagaatcttagtactacctcttcctagctacatgaccttgagtaaggaatttagcctctctgagcctcttcatctctaatatggggataatacttgccttgtctatatcactggatcaccacataggttaaataataaaatgtatggaaaggcacaccgaacacttaattctaaagtgctataagacatatagtatcattattatcaatattatcattactattggtatcttattaataagggaagatgtgagagaggattgtactgcctacattaatattctgcatgtctaataccaacatggaacaaatggattgcagggaaggatgccagatggtttatcttatgctagatattcagataattgt

SEQ ID NO: 693213 - DNA, 1837 bp, Homo sapiens
ccgcccgtctgccctcccacacagccgtggtcactgcttttggaagtgctaatgaaaacctgctgcgcacgagaagcagcagccgagtcacctggagcttggcaagcccatccctggaggccgaggctgatcaccataatccacagtcctatttacatcttgatttcattctgggagccgcgcatttgcataacttacggccagtggtgtgcgccctgccccggggaacgcacaccgtctcctccccatcaggcctgggacccgcctgattggcaatttgattaggagacagaataatgccgggcgatacagtatgtaatttatttaaatggaacaaaacgtgacacgctatcactggaacctggcaccacacctgtaggagcttatttgacacaaattgagatttcagggtttacagatattgcaaatgaaaactctccgtagggtatcaataagagttcaacggttccttttatttggtttgaattaatcacaatatagggaaaaagtaggttctattttttgaaggctttttgaataaaatcattctaagaagcatacatttcttccggagatataattaaatttccaaattgtagtttccggctcttaccctctgcagtcagtgctgggaaggaatgttgctaatattcaggcaccaggaaagttctcgctcagttcctagcccagcagagccactgcgccctctcgggagccacagaacacccgtgaggacagcacctgtgggcttgaaccagaagcccagccctgcacctcccctccacttccctttcttctcctttttcttcctttctccttcctggcaaactgcagaaataccttgctatgagctaggcctggactcctatctgtgcagccactcacagtggtcagttgcatccgtcagccactgctgcataacaagcaacccacggtaagtggcctgaagtgataaacaggtagtactgctcacacgtttgtggacagctgggcaggtgtggtctcagctgggtccactcatgtgtctgaggtccattgtgggtcccaaggcggttctgccacacttagctgggctctctcccgtgtctgggaatcggctgggtgtcagctggcctaggatgtccttgactggaacaaatgggcactcccctctcctctctcattctccagcaggccagcccccgggtccagcaggggtctgagagagcagagacttgcaaggccccttgaggccccagacgacagcacattcttctttcccccacagtctattggccaaagtaagcctcaggcccagcccagattcgaggagtgacgaaagagcctccatgtcttttggggggcaaagctgcaaggtgacaggacagagggtgtgsaacctgggagacctttctgtcccccacagccgagtggctgcagtgggccccagagctgcatcccctggcctcaaaagcagaacagccattgctgccccgctgcctatcctggtgtctcttctccggaccacacgtctgagtctggggccactggagaagatggcatcacgacccagccagcctggcacacgtgatgatgctcacagctggctgatcccgcaggaaccgcagggaagcagctgattaaaggcatctcaaggcaaatacttgtaagcagcaaaactgcctgggggagaacagacagtgagtccactctggtctgtctctaaatcctccacttgctcaaagccagggcctcatgcttttaacaagttgatctgctgaacacgcctccccatgaagacccatgaggtcaacagcagtctcagctctctccacggtgacgtcctccagagccttct

SEQ ID NO: 693214 - DNA, 1168 bp, Homo sapiens
gtcaaacaagttgataggcatctagttcacgcctggcgtaactttccaacaaaactccagggctctactgacacctgctggcatttcatctactttatgttaaaaaaamcccaacaagacaaagaatcattaatatttttcctgcagtcctttgcccttgttatgttacttgtactttacctgaacgataatagaaggggcctttaccatgtcgtgaggagagaagtgtgggcaagccattgggtgaaaataaaaatccccaacacgaagaatgtaccacagagctcttgttgcctgtctgccctgcaccagctgctctgtgaccttaggcaaggccattgacctcactttcatcattgcaagaagaaagaggcagcaaccttccctcccagttccctttagggcttctgaggatgctggtggcatttcctactaactaaagcatgggccctgtcactggagtgatggccttaaaggtcactctcactgacctttccatcacaataaacaagattccttgccagcgttgtatgttcaaaagatgaatgaaagttatttaagcctcttcaaagtgcaccatctctgtaatttatttcgacaaacaactaaattagaatgatcagaaaaagcccagtgaacagtctcagaaattgtccactttttttttttttgtctaggaaactatggactttgttttgtgttttagaacatgtagtaagcctgcaggttgagaaaatgcatcccagttaatgccaacccaattatttgtgctttttctgtctattcttgggaaactctgtgtgggcctgtggtttgttaggtcaataacaggatatttgatagtctgcagggagttatagtccatatttagcctgacagaggaagtgagttctgctgatgaaaaataattgaggcatttctttaattctactatttcatttcttcatcttccttcagaatcctgaccccactatgatgcttgctgaggctttcgatgctatttacagctctgcttttgctagtcacaaaagaaaatttacctcttataacccctaagtcttccctcagaaaactgttaggtgtgaccaggatcagcaaaaactgttagattcacatccattagtttggctactacttaaaaaaagaaacaaacaaacaaaaaaaccca

SEQ ID NO: 693215 - DNA, 1168 bp, Homo sapiens
gtcaaacaagttgataggcatctagttcacgcctggcgtaactttccaacaaaactccagggctctactgacacctgctggcatttcatctactttatgttaaaaaaaccccaacaagacaaagaatcattaatatttttcctgcagtcctttgcccttgttatgttacttgtactttacctgaacgataatagaaggggcctttaccatgtcgtgaggagagaagtgtgggcaagccattgggtgaaaataaaaatccccaacacgaagaatgtaccacagagctcttgttgcctgtctgccctgcaccagctgctctgtgaccttaggcaaggccattgacctcactttcatcattgcaagaagaaagaggcagcaaccttccctcccagttccctttagggcttctgaggatgctggtggcatttcctactaactaaagcatgggccctgtcactggagtgatggccttaaaggtcactctcactgacctttccatcacaataaacaagattccttgccagcgttgtatgttcaaaagatgaatgaaagttatttaagcctcttcaaagtgcaccatctctgtaatttatttcgacaaacaactaaattagaatgatcagaaaaagcccagtgaacagtctcagaaattgtccactttttttttttttgtctaggaarctatggactttgttttgtgttttagaacatgtagtaagcctgcaggttgagaaaatgcatcccagttaatgccaacccaattatttgtgctttttctgtctattcttgggaaactctgtgtgggcctgtggtttgttaggtcaataacaggatatttgatagtctgcagggagttatagtccatatttagcctgacagaggaagtgagttctgctgatgaaaaataattgaggcatttctttaattctactatttcatttcttcatcttccttcagaatcctgaccccactatgatgcttgctgaggctttcgatgctatttacagctctgcttttgctagtcacaaaagaaaatttacctcttataacccctaagtcttccctcagaaaactgttaggtgtgaccaggatcagcaaaaactgttagattcacatccattagtttggctactacttaaaaaaagaaacaaacaaacaaaaaaaccca

SEQ ID NO: 693216 - DNA, 1168 bp, Homo sapiens
gtcaaacaagttgataggcatctagttcacgcctggcgtaactttccaacaaaactccagggctctactgacacctgctggcatttcatctactttatgttaaaaaaaccccaacaagacaaagaatcattaatatttttcctgcagtcctttgcccttgttatgttacttgtactttacctgaacgataatagaaggggcctttaccatgtcgtgaggagagaagtgtgggcaagccattgggtgaaaataaaaatccccaacacgaagaatgtaccacagagctcttgttgcctgtctgccctgcaccagctgctctgtgaccttaggcaaggccattgacctcactttcatcattgcaagaagaaagaggcagcaaccttccctcccagttccctttagggcttctgaggatgctggtggcatttcctactaactaaagcatgggccctgtcactggagtgatggccttaaaggtcactctcactgacctttccatcacaataaacaagattccttgccagcgttgtatgttcaaaagatgaatgaaagttatttaagcctcttcaaagtgcaccatctctgtaatttatttcgacaaacaactaaattagaatgatcagaaaaagcccagtgaacagtctcagaaattgtccactttttttttttttgtctaggaaactatggactttgttttgtgttttagaacatgtagtaagcctgcaggttgagaaaatgcatcccagttaatgccaacccaattatttgtgctttttctgtctattcttgggaaactctgtgtgggcctgtggtttgttaggtcaataacaggatatttgatagtctgcagggagttatagtccatatttagcctgacagaggaagtgagttctgctgatgaaaaataattgaggcatttctttaattctactatttcatttcttcatcttccttcagaatcctgaccccactatgatgcttgctgaggctttcgatgctatttacagctctgcttttgctagtcacaaaagaaaatttacctcttataacccctaagtcttccctcagaaaacygttaggtgtgaccaggatcagcaaaaactgttagattcacatccattagtttggctactacttaaaaaaagaaacaaacaaacaaaaaaaccca

SEQ ID NO: 693217 - DNA, 257 bp, Homo sapiens
gatctatttgtttattctttgacagagagactgactagagttagacagctttttaataccccttccagtcaaaaagtaacattgttatattagtatttagtagttttaaagtctgatgacataagaacagtaacaatttgttaatattcaaaagattgaaattgaaaaaaaggggtcctgcattctgctstcctagaatttttttttgtgttgaaatcttcttttccatattgtcattattgcttctttatcccatg

SEQ ID NO: 693218 - DNA, 596 bp, Homo sapiens
ggtgctgtgggcacagcagattctctttaagagttgggttaggggcaggttagtagtaactgacatatttagtaattgtagctatttatactgctaactaaattttccttctgatttgctgctctcctarccaagtatcctcttcattaataactaatttccagagctaactgacattttagtgtccttactcctgaaaaacccttccaacagataacactgtttgccttcgtcattactctggtagccccccaattctcacagaataactgctgctaattagacatgttctttattaagtgttgaggtgataaactttgtttaaatgcagtgcacatacactgaagcacatactgttgattatcagctcctgcccacggactgttgtttgtgttctctcccagtaaagtgtccaggaaatcttttgctttctcttgtgagttgtctgctagatttgtgccttcaaagtgatgatggagaaaccatgtgtgtttactccacacaagacagtgaataatctcacacaggtccctagcttgaagtgtcatctttattttgacctcatattgcctttctcatttagatgtctaataagc

SEQ ID NO: 693219 - DNA, 592 bp, Homo sapiens
ggagaatcacttgaacctgggaggcggaggttgcagtgagccgaggttgcgccactgcactccagcctgggtgatacagccaagaccccatctcaaaaaaaaaaaaaaaaaaaaaaaaaaagggagttagatttggcatgggaagcaggagaaggcagcacttctgtcactaggtggaatgcccagggatgcaaatctgattcttcatggaggcctttcctaggcgaagaacttgaggagtcccctgactgagttcagcttctcttccaatttgagmactctgtcagcggaatccaagcacggaatgggtggccgttttgggggctgttgtaaaaaggtccacaggactcccaaaggcccttcaaacgctaaaaagacataattcctaatgatgtaaggctaaactgttttgaaaaagaaatgtttagtaaacttttatttatttatttatttatttatttttgagacagagtcttactctgtcacccaggctggagtacagtggcatgatcttgactcactgcaacctcttttctccccggttcaaacaattcttatgcctcagcttcccaagtagctgggattacaggca

SEQ ID NO: 693220 - DNA, 3721 bp, Homo sapiens
gttttaaaagcatctttcaaagtcaattcaaactcatatacaatgccagggattagtactccatcaacctcttttcgaaactttttttctttgtcccattacattgaagtattgatgagtaaaatggcaaatgtttctctttgttgagattcagatctaagtgcataaaactggatcagataaagacttcctcccaggagaagtacccagaggctatcacatgaaattctatttggggacgcttccatttttccttcaaacaaaatttgtagttactactgtagtcaagaaatttaataaaatgaagatttcctgcctgtgtcccttaaggaaaatttggtgaagtttctaattacagaatcttccaaagagaagtgacaaggtttcctggagatttatttgaataattacatttacagagtatgtaaacgctatctatgtagtgcactatgggtacactactaggtcagaaaaatctgagaaatggttttaataggaaaaggaaactagactaaaagttatttatcttgtaaataaaaatattttgttcccattgaatacatgtcctcagattgaaaagcatttttttcccccaatatttccaaccttcccagagatcatagattttagcagaaaggcagacagtgtggtatggtgaagtaaagtgtggccgaggtgggcggatcacgaggtcaggagttcgagaacagtctgaccaacatggtgaaaccccgtctctactaaaaatacaaaaatgagccaggcgtggtggccccttcctgtaatcccagctactcaggaggctgaggcaggagaatcgctggaactcgggaggtggaggttgcagtgacccatgatcgtgccactgcactccagccagggtgacagcgagacttcgtctcaaaaaaaaaaaaaaaaaaaaaaaatggcatcatgggtttttcggagtcaggcagacctggtttgaattccagtgttgttatctgtaaactgtgtgaaactgggtaaatttcttttttaaaaaataacttttattttaggttcagtggtacatgtgtagtatgtccaggtaaatttcttaacctgtctgattctctatttcctcttctgtacaatgtgactaatactatttacatcatgcattgttgtgaacatcagagaaactgtgtaaaatatctagcacagtgtatggcacacagtaggcactgaacaagttatagttacagttattttaatacattagagctgaaagggagatcatcctgaccccttcagtttacaactgaagaatttcaggacccagtgtttaaatgcccaatgtcataaaattagtcaatggcaccactcagcctgtctatcttcgtgttcgggtaaatgaaaccacagtgaggtacagtgacttgcacggagtcattgaaagaaaacatgggcattacatgtattgaaaaagaaagtccgggctccctcctttggtatttaccaaaacttgctgccattgctaaaaacaaaaacagaaacaaaaccaaaacaaaaaattcccatggctcctgacctgttacctttcgctgactggtttttaactccattggataatttactctgaatttagaatgaatgatctcaaaagcaaattttatttcatcctatttttagaacagatttagagagtaaattagctgtcgtacagattaacatttatttgacttaccttgcataattaaggacatgttggagaaccttcctataattgcaatatgttgcttgttaaagtcttggagcgagcaagctcttttccctaacctagaaatggtgctccctagatgtacatttccattttctactgatctacagcttttctttattagcttctaggtggagggaaaaatcaaacctctccttaaagaaattcattaaacgtttgctatctactaagtggaaggaagaaggagctgatgtacagggtagttttaaagcaaaaaacaaacaaattgggctttcttgagaaacaaagaatctgtaagagaacctcaaagatgaaatgagcaattagcaatactctcctctcattttgtacactgtaataactttttgcatgttttttccttttatggaagtctatgaaatcgccctgcagcatttcatttaaagagaatctcacttctaattcactgacaaaggtgagtgctgactatattcagcatggagataggtgccatagctaggcacctaagtgttctgaccagcattttcagagcaactgatggctggacagaggttctgccagctgagttattataaagatcactgacagggtcttcaaacattgttagcatggttgaaggagatgtggtggctacctagtgtgaaccacacatcccactcctttaagcattctagttcactcactggatcaaagcagatgttgacaacaccagcttcaggaacgttatgtgtaagctgtcccagatggattagacatttagctgtctgaagtctgggccagatgttatcagggctctcttattgctttggaatgaatgaagtgtaccagattatggcaaaggaagctctcggatagaaggatgagtaaatcaagacaaaggaaaatgtagtagtggctatgacaagaagaaaaacttagtttaatattagctttgatacataaatttcagcactctcattactgacgcttcaagagttcatgtaaatcctgttcatcagtactttattactgctgctttccaagaaaaaaaaaagctgcagtgaaccaattatttgctttatttggaaaagctaaaatattcattctctgtgtggcaggttgaatgcagtagttgaggtgaatggttttcagactagcagcaactcaggaggatgtcaatttaaggcacaatacaagcttgattcctctctattttttatgcagaaatctttataataccctcaagaattttaaacctgtgtaaaaggtgagacccagcctaatgtattttcttgaaagatgagctgatcacatgttgcacccgagttatttattcaatcattaaatacttattgtggacccactatgtataaggaaagagctggcacagagaaataaagaaaaaatttaccataatacttggggcggggcttgtgttcccttagggaaaataaatcaccccctgtaaacaccattgaaattccttttaggaattcctggcatagataagagttacttaattgatcaattacacaataagtatgtgtagtgggtcccacactatgctagaagttggtggggaagtggggaagattccataatattagatgtgatttcccatctcaagcgacttatttcagtagaaaaaatctcccattcatgaaagcactggaagcaaaagaaggcaaaataaaatcaagtgctaattgtgtagtgtagacactgttaaatamattcagatttaatggtatggggttagccagaggggctttataaaagacaaaggccttgaagaaagtgaaatctttaaactgtgatactagtaggaattcaatcccaatatagcaaacgtcaaatggttaaagagtaacctcttaaaatttaaagtaataagtgaccatctaataaattaaacacattgacctcactacatttattggcatggaaagatgttcataatacattgtgtaaaacaggttacagaacagcgttgtataatatgattctactgttacagaa

SEQ ID NO: 693221 - DNA, 1167 bp, Homo sapiens
taagtgcctgctccactgcttctggcagttcccttgcttgtcaaaccaaggggagccccacacatctcctgccttaaacactggggcttcttaaatctcattgtgccaggaaatgcagcacatctctcataacattcagactgctttcttttatatatcaggagaaaggcaggtggatgtgtgtggctgaaggatatttgtttcattattattatattgatgagagcatgctttggtggacaagcactgaacttggaattaggagagctgacctggctctgctaccaaattgctgtgggacatgcgctatcctcaccctctgcttgcccaggacttggccctggcaggatggattctttcggttgaccttcaactgaggtcctgtctttcaatctctcatccactcactgctggaaggattatctgaaaacaaagtcttaacatcttaactcccctggctttcagctgtggtctccacacatcagtctgtggagtagtgtcaaatagtgatgaagttttctctggtccatggtgaaatgtggaacataaggataaagttgactttatttaggtttttttgtttgttttgttttttgaggcagagtctcagtctgttgcccaggctggagttgagtgatgtcagctcactgcaacctccacctcccagattcaagtgattcttgtgtctcagcctcacgartagctgggactacaagcatatgtcaccatgcccaggtgatttttttgtatttttagtagagatggggttttgccatgttggccaggctggtcttgaactcctggcctcaaacaatctacctgccttggactccaaagtgctaggattacaggtgtgagccaccgcacctggcctttattcaaattttaaactctgaagtcagtctttttctttcctttttttttgttttgggacagcgtcttgttctgttgcccaggctggagtgcagtggcgtgatctcggctcattgcaacctccacctcccgggttcaagcaattctcctgcgtcagcttcctgagtagctaggactacaggcacttgccaccacgcttgtctaatttttgtatttttaatagagacagggttttgccatgttggccaggctggtctcgaactcctgacctcaggtgatccacctgccttggtt

SEQ ID NO: 693222 - DNA, 1167 bp, Homo sapiens
taagtgcctgctccactgcttctggcagttcccttgcttgtcaaaccaaggggagccccacacatctcctgccttaaacactggggcttcttaaatctcattgtgccaggaaatgcagcacatctctcataacattcagactgctttcttttatatatcaggagaaaggcaggtggatgtgtgtggctgaaggatatttgtttcattattattatattgatgagagcatgctttggtggacaagcactgaacttggaattaggagagctgacctggctctgctaccaaattgctgtgggacatgcgctatcctcaccctctgcttgcccaggacttggccctggcaggatggattctttcggttgaccttcaactgaggtcctgtctttcaatctctcatccactcactgctggaaggattatctgaaaacaaagtcttaacatcttaactcccctggctttcagctgtggtctccacacatcagtctgtggagtagtgtcaaatagtgatgaagttttctctggtccatggtgaaatgtggaacataaggataaagttgactttatttaggtttttttgtttgttttgttttttgaggcagagtctcagtctgttgcccaggctggagttgagtgatgtcagctcactgcaacctccacctcccagattcaagtgattcttgtgtctcagcctcacgaatagctgggactacaagcatatgtcaccatgcccaggtgatttttttgtatttttagtagagatggggttttgccatgttggccaggctggtcttgaactcctggcctcaaacaatctacctgccttggactccaaagtgctaggattacaggtgtgagccacygcacctggcctttattcaaattttaaactctgaagtcagtctttttctttcctttttttttgttttgggacagcgtcttgttctgttgcccaggctggagtgcagtggcgtgatctcggctcattgcaacctccacctcccgggttcaagcaattctcctgcgtcagcttcctgagtagctaggactacaggcacttgccaccacgcttgtctaatttttgtatttttaatagagacagggttttgccatgttggccaggctggtctcgaactcctgacctcaggtgatccacctgccttggtt

SEQ ID NO: 693223 - DNA, 572 bp, Homo sapiens
tcactttcttagtggtatcttttaagcacaaatgtttttaattttgatgacctctaatttatccatttttttcttttgtcatttatgcttttggtgttatatctgttaaatacaccactgtttaatgataaatacaagaagagaggggtggagcagctgccagagcagggccttctgaaccccagcagtagcacccttctctttaacactgctggtccagctggcagatagctcacctcccaagtgtgaatgaggagtatttggcccctaactgagccttgcacaaggcacagaacaatgtgatgtatatatatggcagtgctttgtaagtatgtatagcacactgtttgtctaagatgtcattaggctgtgggcatrttggggcaggacagtgggctgaggaaggatgcggccaggcagaatagaagagcccagtggcctgccaactctgcctttctcactcaggcttttcttggttgacaggtttgtctcagaggcagagttatttgaggctgtgcaaagcttcctcctgtcgctgcaggaccagggcgagcgccccccactggtggtct

SEQ ID NO: 693224 - DNA, 572 bp, Homo sapiens
tcactttcttagtggtatcttttaagcacaaatgtttttaattttgatgacctctaatttatccatttttttcttttgtcatttatgcttttggtgttatatctgttaaatacaccactgtttaatgataaatacaagaagagaggggtggagcagctgccagagcagggccttctgaaccccagcagtagcacccttctctttaacactgctggtccagctggcagatagctcacctcccaagtgtgaatgaggagtatttggcccctaactgagccttgcacaaggcacagaacaatgtgatgtatatatatggcagtgctttgtaagtatgtatagcacactgtttgtctaagatgtcattaggctgtgggcataytggggcaggacagtgggctgaggaaggatgcggccaggcagaatagaagagcccagtggcctgccaactctgcctttctcactcaggcttttcttggttgacaggtttgtctcagaggcagagttatttgaggctgtgcaaagcttcctcctgtcgctgcaggaccagggcgagcgccccccactggtggtct

SEQ ID NO: 693225 - DNA, 572 bp, Homo sapiens
tcactttcttagtggtatcttttaagcacaaatgtttttaattttgatgacctctaatttatccatttttttcttttgtcatttatgcttttggtgttatatctgttaaatacaccactgtttaatgataaatacaagaagagaggggtggagcagctgccagagcagggccttctgaaccccagcagtagcacccttctctttaacactgctggtccagctggcagatagctcacctcccaagtgtgaatgaggagtatttggcccctaactgagccttgcacaaggcacagaacaatgtgatgtatatatatggcagtgctttgtaagtatgtatagcacactgtttgtctaagatgtcattaggctgtgggcatattggggcaggacagtgggctgaggaaggatgcggccaggcagaatagaagagcccagtggcctgccaactctgcctttctcactcaggcttttcttggttgacaggtttgtctcagaggcagagttatttgaggctgtgcaaagcttcctcctgtckctgcaggaccagggcgagcgccccccactggtggtct

SEQ ID NO: 693226 - DNA, 591 bp, Homo sapiens
tgccggccgggcacggtggctcaagcttgtaatcccagcactttgggaggccgaggcggggggatcatgaggtcaggagatcgagaccatcctggggaacacggggaaaccccrtttctactaaaaatacaaaaaattagccgggcgcagtggcgggcgcctgtagtcccagctactcgggaggccgaggcaggagaatggcgtggacccaggaggcggagcttgcagtgagccgagatggagccactgcactccagcctgggcgacggagcaagactcgtctcaaaaaaaaagaaagcacttgccactctcaggctgacctgcagtttgttttgttgtgataacacaaactgtccaaagagcagagaatccctaattttggcatatcctagggccctggggcatttcatggcctggcacttaccactttattgacaaatcctaaactgactgatgtcactgatagtgataggcacttatcattttcaacattccacaactgtgctaacctcagtggtctcctgcccctggctgttggtagagagcttctggttctttgagttctttgaaaaacactgtctcctcattcct

SEQ ID NO: 693227 - DNA, 674 bp, Homo sapiens
cagacctttcactgtgttcaacatcttgaaagggatatagactgtgttttaggggtaatttgaggggtttttcaaaagtaaattggctctggaatttctgtctcatatagaatctaaatgagaactagagagagagagagagagaragagactctgttgaacattatatgacacagccaagaatatgaaaaatgatgacagtcgccccagcaaacagcttgactgcaatctcgtgagacaccctgagccaaaactatgcagctaagctgcttctgagaaactctgagaaaataaatgtgtgttgttttaagctgatgaatttcagagtaatttgttatgcggcaatagatcactaatactgtgtcatagatttgaagaagaaaatgtagagtctttgcctttctatattttgaaatcaagatgaaagaaatatgtgcaaaaaaaaaaaaaaccctataaaacaatgtgagaaatgccataataggagcaagtcattaataagccaaatagtatttaggaggaaaaaaatggttactccatttctgatcactagaggactacattatactccactaaacaaagaataatctgctttcagcaaaaagtttcctagttttgggaagtccaaaaggactattgccaagggaaatccaggttatagtagtaagaaatgg

SEQ ID NO: 693228 - DNA, 674 bp, Homo sapiens
cagacctttcactgtgttcaacatcttgaaagggatatagactgtgttttaggggtaatttgaggggtttttcaaaagtaaattggctctggaatttctgtctcatatagaatctaaatgagaactagagagagagagagagagagagagactctgttgaacattatatgacacagccaagaatatgaaaaatgatgacagtcgccccagcaaacagcttgactgcaatctcgtgagacaccctgagccaaaactrtgcagctaagctgcttctgagaaactctgagaaaataaatgtgtgttgttttaagctgatgaatttcagagtaatttgttatgcggcaatagatcactaatactgtgtcatagatttgaagaagaaaatgtagagtctttgcctttctatattttgaaatcaagatgaaagaaatatgtgcaaaaaaaaaaaaaaccctataaaacaatgtgagaaatgccataataggagcaagtcattaataagccaaatagtatttaggaggaaaaaaatggttactccatttctgatcactagaggactacattatactccactaaacaaagaataatctgctttcagcaaaaagtttcctagttttgggaagtccaaaaggactattgccaagggaaatccaggttatagtagtaagaaatgg

SEQ ID NO: 693229 - DNA, 1065 bp, Homo sapiens
tgtttaatttatgcaattttatcccatgtgtagacctgtgtgaccaccatcacagtcaagatgcagaaatggttacatcacaaggacctctcatgcaatggaacactagcgytgagtttcttctttctacactaagacctggttactagattctgggagactgcagcaataatgaaaagaattgtctctcagtgaaatgccaaactccgctagggatcgacaaactgggatcccatctttcctgatgctcctttaatccaggcttccacaggaccacaatatgtggctggtcatacatgctgtgcactgttcaattttagagggtgtcattcctttgacggccttgctcttgtgatctacaagggccatcaatcttgacttgttccagtgactagcggttattattttcattttgagtaaatcaagtggaaagtttcacccatctggtctagagaggaagcaataagcaaagcatcagtctatggacttagttccctaagagctgaggcagagttaggaaaggagacctctgttcagagattcttctatgtgtctggagtgaactgggccacaataaagggttttgtgcatgtcatgtgtgtggggagtgtgtgtatcctggcaagcatgtgagttttcccttacctcttctccaaccagatataaatggctttttatctgttttagaaaataaacatctaggtataattttgttcaaaaaagggtttcactattttttaaaaaactttcaaaataatttttttctttttgtcaaaattctatcaaaatcagtgaggaaagaggcagcaaaaatgctgataccagtgttccacagcataggttgtataaacaatacatttggaaaaaaaatgaaaggtcgttgagtttgccagagcaacagatgtttagtagtgatagggattctctgtggctggccttaaccacttagtgatcaaactaggaagtgagggaataaagctgaggggcgtgcatggaatcctggaagtattttgttgcaccacaaagaagaagggatataattatggactttttaagtcttttaac

SEQ ID NO: 693230 - DNA, 589 bp, Homo sapiens
taagcaagtcagtggaccttcctggattctcacagcctgcgtggaagaacatacttcctaggatgcagtgtgaacagtcatcactggtagtcatgaagggtatgactgacatctytgtggacgtcccatttccagggagcaggtgggagctgcgtcacttccatctgttagccaggggacctgccaaaggtgcatcctccaggatgtggcatgtggtgggtctgagccgaggtccagctgctgagggcagccactgaaatagccagcatagaccttgagcaggctacatcagtaaatagatggatcccaattcagtggatttgtattgcagctggatagcctcctcacccctctctccccaccccacactttgcatataagctcatcaacacccccatgagaaatgggagaaataacccgtgatgctggaacataaaggttaagttttgtaccttttaaacctgtgacaggagttcttataaaaaaaagataatgtacacctatccctcacctaatggcttttatttgtacctgaaagctctgtcattaagtgcaaagccagtaaacaaaagacaaatataatttgttt

SEQ ID NO: 693231 - DNA, 634 bp, Homo sapiens
tgtcccaatttattcaaacttcctttcttctgaatctatttrtaacatagataagcggatgcagtaagcccaggaaaagctaaaaataaagaagtaattttaaaaaataagcaggtttgtgatgttctgatttgggagggatagccagagctcagtgagatgagaaaatcttggtaaagagaaatagccctacgtaagaaactatgaagtgctgatgaggacattggaacagaattgtagtgggaaatgcctggtcttccagagatgcagggtcactggtattaggagtatctctcagcaaatttataaacatttattaaaataaaaataaatccataaaaatgcatctacttcagatgaaaatattggaaaaagggggtgtgggagaaaaaaatgattgattggcttcttacatcaaagtttatgagccttaagggaaccagtgttgggagaattgcaagagggtggcctagatcaaagggagatttgtttttatccgtcagtgacctggcgaagaaatactaattacgaccatgaagtaactccatggtatatcttgtggccctgtgactgtttttgagaagagaaaggagggcagggcagctggcaaggagattaaagtcagtagaaaata

SEQ ID NO: 693232 - DNA, 634 bp, Homo sapiens
tgtcccaatttattcaaacttcctttcttctgaatctatttataacatagataagyggatgcagtaagcccaggaaaagctaaaaataaagaagtaattttaaaaaataagcaggtttgtgatgttctgatttgggagggatagccagagctcagtgagatgagaaaatcttggtaaagagaaatagccctacgtaagaaactatgaagtgctgatgaggacattggaacagaattgtagtgggaaatgcctggtcttccagagatgcagggtcactggtattaggagtatctctcagcaaatttataaacatttattaaaataaaaataaatccataaaaatgcatctacttcagatgaaaatattggaaaaagggggtgtgggagaaaaaaatgattgattggcttcttacatcaaagtttatgagccttaagggaaccagtgttgggagaattgcaagagggtggcctagatcaaagggagatttgtttttatccgtcagtgacctggcgaagaaatactaattacgaccatgaagtaactccatggtatatcttgtggccctgtgactgtttttgagaagagaaaggagggcagggcagctggcaaggagattaaagtcagtagaaaata

SEQ ID NO: 693233 - DNA, 634 bp, Homo sapiens
tgtcccaatttattcaaacttcctttcttctgaatctatttataacatagataagcggatgcagtaagcccaggaaaagctaaaaataaakaagtaattttaaaaaataagcaggtttgtgatgttctgatttgggagggatagccagagctcagtgagatgagaaaatcttggtaaagagaaatagccctacgtaagaaactatgaagtgctgatgaggacattggaacagaattgtagtgggaaatgcctggtcttccagagatgcagggtcactggtattaggagtatctctcagcaaatttataaacatttattaaaataaaaataaatccataaaaatgcatctacttcagatgaaaatattggaaaaagggggtgtgggagaaaaaaatgattgattggcttcttacatcaaagtttatgagccttaagggaaccagtgttgggagaattgcaagagggtggcctagatcaaagggagatttgtttttatccgtcagtgacctggcgaagaaatactaattacgaccatgaagtaactccatggtatatcttgtggccctgtgactgtttttgagaagagaaaggagggcagggcagctggcaaggagattaaagtcagtagaaaata

SEQ ID NO: 693234 - DNA, 634 bp, Homo sapiens
tgtcccaatttattcaaacttcctttcttctgaatctatttataacatagataagcggatgcagtaagcccaggaaaagctaaaaataaagaagtaattttaaaaaataagcaggtttgtgatgttctgatttgggagggatagccagagctcagtgagatgagaaaatcttggtaaagagaaatagccctacgtaagaaactatgaagtgytgatgaggacattggaacagaattgtagtgggaaatgcctggtcttccagagatgcagggtcactggtattaggagtatctctcagcaaatttataaacatttattaaaataaaaataaatccataaaaatgcatctacttcagatgaaaatattggaaaaagggggtgtgggagaaaaaaatgattgattggcttcttacatcaaagtttatgagccttaagggaaccagtgttgggagaattgcaagagggtggcctagatcaaagggagatttgtttttatccgtcagtgacctggcgaagaaatactaattacgaccatgaagtaactccatggtatatcttgtggccctgtgactgtttttgagaagagaaaggagggcagggcagctggcaaggagattaaagtcagtagaaaata

SEQ ID NO: 693235 - DNA, 1154 bp, Homo sapiens
aagatgagataggaggtcagcacaagataagrtcagaaagatcttactgataaaataggttgcaataaagaagcccgctaaaacccaccaaaaccaagatggcaatgacagtgacctctggttgttcttgctgctcattatatgctaattataatgcattagcatgtttaaagacagtcccaccagcacgatgaaagtttacaaatgacatggcaacgtcaggaagttaccctatgtggtctaaaaacgggaggcatgaataatccaccccttgtttagcatatcatcaagaaataaccataaaaatgggcaacctgcaaccctcagggctgctgtgcctatggagtagccattcttttattccttaactttcttaataaacttgctttcacttgattgtatggactcaccccaaatactttctttcgcaagatccaagaaccctctcttggagtctggatccagacccctttccagtaacatttgtttcctgcaaataataggatataccaaacaggtgtagagttcttttatggaagacaccttggttctgtttaatggagaatacttttagagaacaaaatctgggtgttaggagtgcataaaaatgttggtgggaaggtaagaggagtgccacaggggggtcactttcaatgacagagctgggaagatatttcctttatatatgatgagttcaccttaatttttttacaatttaataatctatgtctatattttacttttcttattattggtggtttcattgacccagggcacctatgtaaatctgagggatgctatttacattgtagatttgaatatttatcatgaaaaatgtctggtaggccacgtgaagtggctcacgcctgtaatcccagcactttgggaggctgaggtgggcggatcacctgaggtcacgagtttgagaccagcccagccaacatggtgaaaccctgtctttactaaaaatacaaaattagtcgagcatgatggtgcatgcctgtaatcccagcaactcgggaggctgaggcaagagaataaattgaaccccgggggtacaggttgcagtgagctgagattgagccattatactccagcttgggcaacaagagcaaaactctgtctcaaaaaaataaaaagtctggtagatggca

SEQ ID NO: 693236 - DNA, 1154 bp, Homo sapiens
aagatgagataggaggtcagcacaagataagatcagaaagatcttactgataaaataggttgcaataaagaagcccgctaaaacccaccaaaaccaagatggcaatgacagtgacctctggttgttcttgctgctcattatatgctaattataatgcattagcatgtttaaagacagtcccaccagcacgatgaaagtttacaaatgacatggcaacgtcaggaagttaccctatgtggtctaaaaacgggaggcatgaataatccaccccttgtttagcatatcatcaagaaataaccataaaaatgggcaacctgcaaccctcagggctgctgtgcctatggagtagccattcttttattccttaactttcttaataaacttgctttcacttgattgtatggactcaccccaaatactttctttcgcaagatccaagaaccctctcttggagtctggatccagacccctttccagtaacatttgtttcctgcaaataataggatataccaaacaggtgtagagttcttttatggamgacaccttggttctgtttaatggagaatacttttagagaacaaaatctgggtgttaggagtgcataaaaatgttggtgggaaggtaagaggagtgccacaggggggtcactttcaatgacagagctgggaagatatttcctttatatatgatgagttcaccttaatttttttacaatttaataatctatgtctatattttacttttcttattattggtggtttcattgacccagggcacctatgtaaatctgagggatgctatttacattgtagatttgaatatttatcatgaaaaatgtctggtaggccacgtgaagtggctcacgcctgtaatcccagcactttgggaggctgaggtgggcggatcacctgaggtcacgagtttgagaccagcccagccaacatggtgaaaccctgtctttactaaaaatacaaaattagtcgagcatgatggtgcatgcctgtaatcccagcaactcgggaggctgaggcaagagaataaattgaaccccgggggtacaggttgcagtgagctgagattgagccattatactccagcttgggcaacaagagcaaaactctgtctcaaaaaaataaaaagtctggtagatggca

SEQ ID NO: 693237 - DNA, 1154 bp, Homo sapiens
aagatgagataggaggtcagcacaagataagatcagaaagatcttactgataaaataggttgcaataaagaagcccgctaaaacccaccaaaaccaagatggcaatgacagtgacctctggttgttcttgctgctcattatatgctaattataatgcattagcatgtttaaagacagtcccaccagcacgatgaaagtttacaaatgacatggcaacgtcaggaagttaccctatgtggtctaaaaacgggaggcatgaataatccaccccttgtttagcatatcatcaagaaataaccataaaaatgggcaacctgcaaccctcagggctgctgtgcctatggagtagccattcttttattccttaactttcttaataaacttgctttcacttgattgtatggactcaccccaaatactttctttcgcaagatccaagaaccctctcttggagtctggatccagacccctttccagtaacatttgtttcctgcaaataataggatataccaaacaggtgtagagttcttttatggaagacaccttggttctgtttaatggagaatacttttagagaacaaaatctgggtgttaggagtgcataaaaatgttggtgggaaggtaagaggagtgccacaggggggtcactttcaatgacagagctgggaagatatttcctttatatatgatgagttcaccttaatttttttacaatttaataatctatgtctatattttacttttcttattattggtggtttcattgacccagggcacctatgtaaatctgagggatgctatttacattgtagatttgaatatttatcatgaaaaatgtctggtaggccacgtgaagtggctcacgcctgtaatcccagcactttgggaggctgaggtgggcggatcacctgaggtcacgagtttgagaccagcccagccaacatggtgaaaccctgtctttactaaaaatacaaaattagycgagcatgatggtgcatgcctgtaatcccagcaactcgggaggctgaggcaagagaataaattgaaccccgggggtacaggttgcagtgagctgagattgagccattatactccagcttgggcaacaagagcaaaactctgtctcaaaaaaataaaaagtctggtagatggca

SEQ ID NO: 693238 - DNA, 998 bp, Homo sapiens
tagcctcctcttccaccaaagttttcaccacagccaaaattacctccaccgcctccaaattttgctctgtgacaattacaactttatcaactgtattatgatcctaaaaagttatggcaaagccaggtgcagtggctcatgcctcccaagcactttaggggccaaggtgggaggatcgcttgatccagggagtttgagaccagcctgagccacataaggagaccccatctctacaaaaaatttaaaaatcagctgggtgtaatggcacatgtctttgctcccagctacttgggaggctgaggtgggatgattgcttgagcccatgaggttgagtgagctatgatcaggccactgcactccagcctgggtgataaagtgagatcctgtctcgaaataaaaaataaataaaagtaaattttaaaaaagcaaatcccctcttttttccactctgcctgccttccataacatctatggtttaaatagtgccatacttttctttcctctctctctctctttccttcttttctttttttgagacagggtctctctctgtcacccaggctggaatgtagtcgtgcaatcttggctcactgcaccctctacctcccaggctcaagtaatcctcccatctcagcctcccaagtagctgggaccacaggcacgtgccactatgcgcggctaatttttgcatttttttgtagagacggggtttcactatgttgcccagtctsgtctgtcccaaactcctgggctcaagcaatccacccacttcggcctcccaaagcatttggaattacaaacgtgagccactgcacctggccttgccatgctcttcaaattacattcttctctatcttccttgatatcacaaacaaagattttcttcatggttagatgggcaccaggccttatagaatcctctctagaaacagctctctttggttccagtacacacctgtcagccttgtgtgtccacctctttaacacgagagtaagtc

SEQ ID NO: 693239 - DNA, 598 bp, Homo sapiens
ttgccagggaagctttgtgggtgctgtttcaaagtctgctccaagcaccaacacttctctgaaagaggctttaaagcgtgagccgtcccaccctaccacgtgccccaaggccttgcaacgaaccactgaccggtcagcattgtgatgaggggaaggctgttatcttctgggctgccccaatagccagcctctccaagcatgttcctgtcgagcacctgatggtagagctcctcaatccaggcctgagagaagaccatcagcacgccgctggtctgcacctgcttcatgaagtccttctacagagagatcgcatgagaaggtgaccacataacaccctgctcactaacaggctcctaagtgcctctgctgcctcttcacgtcacagagccctgaactaaaccaaggcttgtgtattgggtaagggggcggcaagtggggagaagtagagatggaggattcccaaatgtgctgaggtttccttcastgatgacaccttttgacagataccttgcagaaggattagagagactgcactttacattcttactcttggatgtgtggaaaggtttgcaattgcacagatgtctttaatagcgta

SEQ ID NO: 693240 - DNA, 1346 bp, Homo sapiens
tcacattctaagatactaggggttaggactccaacattttttttttgagggtggatggggataccattcaacccataacacatggccaccccaaacmaatcactagcatggggaaattactgtgattggctcagaccaatcagattcatcccccgaggctgaaagtggggcacaactttcctgagcagtgaccgcctgaacaaaactggttttccatagatgaaggggaaggagtacggttagtgggtgccaattcaatccaaatggaggcccagagagatgaagcgacacatttaaagtcacataaccaacccatactccctcttggacaccatgctgagatacattgtgtcagtataggaattaccagtgcttgcttttcctggaaaataaaatctgtcttccttttccttctctcctgacttctgtacccagggagtgggggagaaaaagataccaattacgccttaaccaatttttctctttactcctgccccaaagcttttttgcttcacttcacccagttacccttgagatgctacttgcctataatcctaagttttgagcacggaaaaccaatataaccttagagtttctacctgaaacaaaaagattaaaatgatcatgtccttgatgtctcataactgagatgaggtaatacacaagagattaacaaggacaagtattgaccagactgtagtatcctgtggctgggatatcttgtggtgagaatcattaaaataagatcatgcaatagagctttgcaagatgttctcaaaaacaaaatctcatcatggtgctggacacgtgaaccaaaaaaaaaaaaaaaaaaagagtttaagcctgaaaaaaaacaaaaacaaaatcttcaaattcagctggaactgaatgcttctcttttactcggtacaggaagcacatacatatgcagttctccaggctcaagatggattctcaggaaaaccaaacaagataggagcagagggccagcatggtggctcatgcctgtaatcccagcactttgggaggctgaggcaggcagataacttgaggttgggagtttgagactagattggccaacatggtgaaaccctgtctctactaaaagcacaaaaattagctggctatggtggcacacacctgtaatcccagctacttgggaggctaaggcaggagaatcgcttgaacctgggaggtggaggttgcagtgatccaagattgtgccactgcactccaacctgggtgacagagtgagactatgtctcaaagaaaaagaaaaaaaaaaaaaaggaatgagcacagaactcatacacaatgtatttatctttacaagtaaagtataagta

SEQ ID NO: 693241 - DNA, 1346 bp, Homo sapiens
tcacattctaagatactaggggttaggactccaacattttttttttgagggtggatggggataccattcaacccataacacatggccaccccaaaccaatcactagcatggggaaattactgtgattggctcagaccaatcagattcatcccccgaggctraaagtggggcacaactttcctgagcagtgaccgcctgaacaaaactggttttccatagatgaaggggaaggagtacggttagtgggtgccaattcaatccaaatggaggcccagagagatgaagcgacacatttaaagtcacataaccaacccatactccctcttggacaccatgctgagatacattgtgtcagtataggaattaccagtgcttgcttttcctggaaaataaaatctgtcttccttttccttctctcctgacttctgtacccagggagtgggggagaaaaagataccaattacgccttaaccaatttttctctttactcctgccccaaagcttttttgcttcacttcacccagttacccttgagatgctacttgcctataatcctaagttttgagcacggaaaaccaatataaccttagagtttctacctgaaacaaaaagattaaaatgatcatgtccttgatgtctcataactgagatgaggtaatacacaagagattaacaaggacaagtattgaccagactgtagtatcctgtggctgggatatcttgtggtgagaatcattaaaataagatcatgcaatagagctttgcaagatgttctcaaaaacaaaatctcatcatggtgctggacacgtgaaccaaaaaaaaaaaaaaaaaaagagtttaagcctgaaaaaaaacaaaaacaaaatcttcaaattcagctggaactgaatgcttctcttttactcggtacaggaagcacatacatatgcagttctccaggctcaagatggattctcaggaaaaccaaacaagataggagcagagggccagcatggtggctcatgcctgtaatcccagcactttgggaggctgaggcaggcagataacttgaggttgggagtttgagactagattggccaacatggtgaaaccctgtctctactaaaagcacaaaaattagctggctatggtggcacacacctgtaatcccagctacttgggaggctaaggcaggagaatcgcttgaacctgggaggtggaggttgcagtgatccaagattgtgccactgcactccaacctgggtgacagagtgagactatgtctcaaagaaaaagaaaaaaaaaaaaaaggaatgagcacagaactcatacacaatgtatttatctttacaagtaaagtataagta

SEQ ID NO: 693242 - DNA, 1346 bp, Homo sapiens
tcacattctaagatactaggggttaggactccaacattttttttttgagggtggatggggataccattcaacccataacacatggccaccccaaaccaatcactagcatggggaaattactgtgattggctcagaccaatcagattcatcccccgaggctgaaagtggggcacaactttcctgagcagtgaccgcctgaacaaaactggttttccatagatgaaggggaaggagtacsgttagtgggtgccaattcaatccaaatggaggcccagagagatgaagcgacacatttaaagtcacataaccaacccatactccctcttggacaccatgctgagatacattgtgtcagtataggaattaccagtgcttgcttttcctggaaaataaaatctgtcttccttttccttctctcctgacttctgtacccagggagtgggggagaaaaagataccaattacgccttaaccaatttttctctttactcctgccccaaagcttttttgcttcacttcacccagttacccttgagatgctacttgcctataatcctaagttttgagcacggaaaaccaatataaccttagagtttctacctgaaacaaaaagattaaaatgatcatgtccttgatgtctcataactgagatgaggtaatacacaagagattaacaaggacaagtattgaccagactgtagtatcctgtggctgggatatcttgtggtgagaatcattaaaataagatcatgcaatagagctttgcaagatgttctcaaaaacaaaatctcatcatggtgctggacacgtgaaccaaaaaaaaaaaaaaaaaaagagtttaagcctgaaaaaaaacaaaaacaaaatcttcaaattcagctggaactgaatgcttctcttttactcggtacaggaagcacatacatatgcagttctccaggctcaagatggattctcaggaaaaccaaacaagataggagcagagggccagcatggtggctcatgcctgtaatcccagcactttgggaggctgaggcaggcagataacttgaggttgggagtttgagactagattggccaacatggtgaaaccctgtctctactaaaagcacaaaaattagctggctatggtggcacacacctgtaatcccagctacttgggaggctaaggcaggagaatcgcttgaacctgggaggtggaggttgcagtgatccaagattgtgccactgcactccaacctgggtgacagagtgagactatgtctcaaagaaaaagaaaaaaaaaaaaaaggaatgagcacagaactcatacacaatgtatttatctttacaagtaaagtataagta

SEQ ID NO: 693243 - DNA, 1346 bp, Homo sapiens
tcacattctaagatactaggggttaggactccaacattttttttttgagggtggatggggataccattcaacccataacacatggccaccccaaaccaatcactagcatggggaaattactgtgattggctcagaccaatcagattcatcccccgaggctgaaagtggggcacaactttcctgagcagtgaccgcctgaacaaaactggttttccatagatgaaggggaaggagtacggttagtgggtgccaattcaatccaaatggaggcccagagagatgaagcgacacatttaaagtcacataaccaacccatactccctcttggacaccatgctgagatacattgtgtcagtataggaattaccagtgcttgcttttcctggaaaataaaatctgtcttccttttccttctctcctgacttctgtacccagggagtgggggagaaaaagataccaattacgccttaaccaatttttctctttactcctgccccaaagcttttttgcttcacttcacccagttacccttgagatgctacttgcctataatcctaagttttgagcacggaaaaccaatataaccttagagtttctacctgaaacaaaaagattaaaatgatcatgtccttgatgtctcataactgagatgaggtaatacacaagagattaacaaggacaagtattgaccagactgtagtatcctgtggctgggatatcttgtggtgagaatcattaaaataagatcatgcaatagagctttgcaagatgttctcaaaaacaaaatctcatcatggtgctggacacgtgaaccaaaaaaaaaaaaaaaaaargagtttaagcctgaaaaaaaacaaaaacaaaatcttcaaattcagctggaactgaatgcttctcttttactcggtacaggaagcacatacatatgcagttctccaggctcaagatggattctcaggaaaaccaaacaagataggagcagagggccagcatggtggctcatgcctgtaatcccagcactttgggaggctgaggcaggcagataacttgaggttgggagtttgagactagattggccaacatggtgaaaccctgtctctactaaaagcacaaaaattagctggctatggtggcacacacctgtaatcccagctacttgggaggctaaggcaggagaatcgcttgaacctgggaggtggaggttgcagtgatccaagattgtgccactgcactccaacctgggtgacagagtgagactatgtctcaaagaaaaagaaaaaaaaaaaaaaggaatgagcacagaactcatacacaatgtatttatctttacaagtaaagtataagta

SEQ ID NO: 693244 - DNA, 1346 bp, Homo sapiens
tcacattctaagatactaggggttaggactccaacattttttttttgagggtggatggggataccattcaacccataacacatggccaccccaaaccaatcactagcatggggaaattactgtgattggctcagaccaatcagattcatcccccgaggctgaaagtggggcacaactttcctgagcagtgaccgcctgaacaaaactggttttccatagatgaaggggaaggagtacggttagtgggtgccaattcaatccaaatggaggcccagagagatgaagcgacacatttaaagtcacataaccaacccatactccctcttggacaccatgctgagatacattgtgtcagtataggaattaccagtgcttgcttttcctggaaaataaaatctgtcttccttttccttctctcctgacttctgtacccagggagtgggggagaaaaagataccaattacgccttaaccaatttttctctttactcctgccccaaagcttttttgcttcacttcacccagttacccttgagatgctacttgcctataatcctaagttttgagcacggaaaaccaatataaccttagagtttctacctgaaacaaaaagattaaaatgatcatgtccttgatgtctcataactgagatgaggtaatacacaagagattaacaaggacaagtattgaccagactgtagtatcctgtggctgggatatcttgtggtgagaatcattaaaataagatcatgcaatagagctttgcaagatgttctcaaaaacaaaatctcatcatggtgctggacacgtgaaccaaaaaaaaaaaaaaaaaaagagtttaagcctgaaaaaaaacaaaaacaaaatcttcaaattcagctggaactgaatgcttctcttttactcggtacaggaagcacatacatatgcagttctccaggctcaagatggattctcaggaaaaccaaacaagataggagcagagggccagcatggtggctcatgcctgtaatcccagcactttgggaggctgaggcaggcagatmacttgaggttgggagtttgagactagattggccaacatggtgaaaccctgtctctactaaaagcacaaaaattagctggctatggtggcacacacctgtaatcccagctacttgggaggctaaggcaggagaatcgcttgaacctgggaggtggaggttgcagtgatccaagattgtgccactgcactccaacctgggtgacagagtgagactatgtctcaaagaaaaagaaaaaaaaaaaaaaggaatgagcacagaactcatacacaatgtatttatctttacaagtaaagtataagta

SEQ ID NO: 693245 - DNA, 1346 bp, Homo sapiens
tcacattctaagatactaggggttaggactccaacattttttttttgagggtggatggggataccattcaacccataacacatggccaccccaaaccaatcactagcatggggaaattactgtgattggctcagaccaatcagattcatcccccgaggctgaaagtggggcacaactttcctgagcagtgaccgcctgaacaaaactggttttccatagatgaaggggaaggagtacggttagtgggtgccaattcaatccaaatggaggcccagagagatgaagcgacacatttaaagtcacataaccaacccatactccctcttggacaccatgctgagatacattgtgtcagtataggaattaccagtgcttgcttttcctggaaaataaaatctgtcttccttttccttctctcctgacttctgtacccagggagtgggggagaaaaagataccaattacgccttaaccaatttttctctttactcctgccccaaagcttttttgcttcacttcacccagttacccttgagatgctacttgcctataatcctaagttttgagcacggaaaaccaatataaccttagagtttctacctgaaacaaaaagattaaaatgatcatgtccttgatgtctcataactgagatgaggtaatacacaagagattaacaaggacaagtattgaccagactgtagtatcctgtggctgggatatcttgtggtgagaatcattaaaataagatcatgcaatagagctttgcaagatgttctcaaaaacaaaatctcatcatggtgctggacacgtgaaccaaaaaaaaaaaaaaaaaaagagtttaagcctgaaaaaaaacaaaaacaaaatcttcaaattcagctggaactgaatgcttctcttttactcggtacaggaagcacatacatatgcagttctccaggctcaagatggattctcaggaaaaccaaacaagataggagcagagggccagcatggtggctcatgcctgtaatcccagcactttgggaggctgaggcaggcagataacttraggttgggagtttgagactagattggccaacatggtgaaaccctgtctctactaaaagcacaaaaattagctggctatggtggcacacacctgtaatcccagctacttgggaggctaaggcaggagaatcgcttgaacctgggaggtggaggttgcagtgatccaagattgtgccactgcactccaacctgggtgacagagtgagactatgtctcaaagaaaaagaaaaaaaaaaaaaaggaatgagcacagaactcatacacaatgtatttatctttacaagtaaagtataagta

SEQ ID NO: 693246 - DNA, 1346 bp, Homo sapiens
tcacattctaagatactaggggttaggactccaacattttttttttgagggtggatggggataccattcaacccataacacatggccaccccaaaccaatcactagcatggggaaattactgtgattggctcagaccaatcagattcatcccccgaggctgaaagtggggcacaactttcctgagcagtgaccgcctgaacaaaactggttttccatagatgaaggggaaggagtacggttagtgggtgccaattcaatccaaatggaggcccagagagatgaagcgacacatttaaagtcacataaccaacccatactccctcttggacaccatgctgagatacattgtgtcagtataggaattaccagtgcttgcttttcctggaaaataaaatctgtcttccttttccttctctcctgacttctgtacccagggagtgggggagaaaaagataccaattacgccttaaccaatttttctctttactcctgccccaaagcttttttgcttcacttcacccagttacccttgagatgctacttgcctataatcctaagttttgagcacggaaaaccaatataaccttagagtttctacctgaaacaaaaagattaaaatgatcatgtccttgatgtctcataactgagatgaggtaatacacaagagattaacaaggacaagtattgaccagactgtagtatcctgtggctgggatatcttgtggtgagaatcattaaaataagatcatgcaatagagctttgcaagatgttctcaaaaacaaaatctcatcatggtgctggacacgtgaaccaaaaaaaaaaaaaaaaaaagagtttaagcctgaaaaaaaacaaaaacaaaatcttcaaattcagctggaactgaatgcttctcttttactcggtacaggaagcacatacatatgcagttctccaggctcaagatggattctcaggaaaaccaaacaagataggagcagagggccagcatggtggctcatgcctgtaatcccagcactttgggaggctgaggcaggcagataacttgaggttgggagtttgagactagattggccaacatggtgaaaccctgtctctactaaaagcacaaaaattagctggctatggtggcacacacctgtaatcccagctacttgggaggctaaggcaggagaatcgcttgaacctgggaggtggaggttgcagtgatccaagattgtgycactgcactccaacctgggtgacagagtgagactatgtctcaaagaaaaagaaaaaaaaaaaaaaggaatgagcacagaactcatacacaatgtatttatctttacaagtaaagtataagta

SEQ ID NO: 693247 - DNA, 1346 bp, Homo sapiens
tcacattctaagatactaggggttaggactccaacattttttttttgagggtggatggggataccattcaacccataacacatggccaccccaaaccaatcactagcatggggaaattactgtgattggctcagaccaatcagattcatcccccgaggctgaaagtggggcacaactttcctgagcagtgaccgcctgaacaaaactggttttccatagatgaaggggaaggagtacggttagtgggtgccaattcaatccaaatggaggcccagagagatgaagcgacacatttaaagtcacataaccaacccatactccctcttggacaccatgctgagatacattgtgtcagtataggaattaccagtgcttgcttttcctggaaaataaaatctgtcttccttttccttctctcctgacttctgtacccagggagtgggggagaaaaagataccaattacgccttaaccaatttttctctttactcctgccccaaagcttttttgcttcacttcacccagttacccttgagatgctacttgcctataatcctaagttttgagcacggaaaaccaatataaccttagagtttctacctgaaacaaaaagattaaaatgatcatgtccttgatgtctcataactgagatgaggtaatacacaagagattaacaaggacaagtattgaccagactgtagtatcctgtggctgggatatcttgtggtgagaatcattaaaataagatcatgcaatagagctttgcaagatgttctcaaaaacaaaatctcatcatggtgctggacacgtgaaccaaaaaaaaaaaaaaaaaaagagtttaagcctgaaaaaaaacaaaaacaaaatcttcaaattcagctggaactgaatgcttctcttttactcggtacaggaagcacatacatatgcagttctccaggctcaagatggattctcaggaaaaccaaacaagataggagcagagggccagcatggtggctcatgcctgtaatcccagcactttgggaggctgaggcaggcagataacttgaggttgggagtttgagactagattggccaacatggtgaaaccctgtctctactaaaagcacaaaaattagctggctatggtggcacacacctgtaatcccagctacttgggaggctaaggcaggagaatcgcttgaacctgggaggtggaggttgcagtgatccaagattgtgccactgcactccaacctgggtgacagagtgagactrtgtctcaaagaaaaagaaaaaaaaaaaaaaggaatgagcacagaactcatacacaatgtatttatctttacaagtaaagtataagta

SEQ ID NO: 693248 - DNA, 1537 bp, Homo sapiens
tgcttgtagtaccagctactcgggaggctgaggtaggaagatcacttgagcccaggaggttgaggctgcagtgggtggtgattgtgcctctgcactccagcctgggtgaatcctatctcaaaaaaaaaaaaaaaaaaaaaaaaaaaaaaaaaaaaaaaggagtcacttaatacttcctaaggtttttgcagaacttaaaaagaaagaaaacctgttcttttgctcctatataaggacaatggggaaagcagagcccattgcatttagggcggggggtggggtgactgttggcatagacacacatagccaggattcctggaaatgtatgagtcttcctaaaatataggcttgtttatttttcttaagaactgcctttattagtggcagccaaggaagcaaacatattggttgctgacacgcctatgaaatgtaaaagccaactcttctcccttgtctttctttctagatgcagcctccctcccagactctcccatcaccctgctcctaactccagccttggatgcaggaaaattgtgaaactagaggttatgttttgcttaccgggttggcacttttaaggcaatgagaagacagtattcctaaatcagtatcttacccattaggagattgtacctcctttctcagagaacctagtccttgaccaggacagacgttatgctttatgctgcctgcctgcggggtccatgttgcagacaggccactgcacagcattttctgggtttcctttacccctagccagtccttctcctcctacaatttctcctgtttcccagcaagcccagccgcttcacagcaaggttgcttccctgaggaaatcaggaagggaaggatgaggacagctgcccacagcccaggcacatggcaggcctggccaggaatgagaaagagaaaacgcagcccaaatctatcatcactcaacttctctgtgttccagagaggtgccaccatgctgaaaaatcagtggggatattaatattgggacccttctcctttcagcagctggtgtttcagtagaagggatattttcaggttaataagcaatgattggccccttaaaaaccaatttctaacagcaagtggagtagagatggaatggcagggctctctatttgttttcggggtgtcacagcaaaatattaaatcctttgaattagcacgagctctgtaatcctcttagagcgtgtttctgtagggaagagaccttggacagctacagtgcatcaagatgcctttgtgagcatttycaacaggcacaccggccacccgttcctaacgtgaagtctgacctagcgtcaacacggagcaagggaaacagacatgcaagcacattgatcaccaagtaaagaggatgagacgacatgaactctccctttgagattcacacatcaaatcaggcttgatgtgtttctagaagcagctgttaggacaataatatttaagattattttttaaagttcttttaaatatagttcttctaaaaatcactgagagaaaatttgaagattaggaaatataa

SEQ ID NO: 693249 - DNA, 1537 bp, Homo sapiens
tgcttgtagtaccagctactcgggaggctgaggtaggaagatcacttgagcccaggaggttgaggctgcagtgggtggtgattgtgcctctgcactccagcctgggtgaatcctatctcaaaaaaaaaaaaaaaaaaaaaaaaaaaaaaaaaaaaaaaggagtcacttaatacttcctaaggtttttgcagaacttaaaaagaaagaaaacctgttcttttgctcctatataaggacaatggggaaagcagagcccattgcatttagggcggggggtggggtgactgttggcatagacacacatagccaggattcctggaaatgtatgagtcttcctaaaatataggcttgtttatttttcttaagaactgcctttattagtggcagccaaggaagcaaacatattggttgctgacacgcctatgaaatgtaaaagccaactcttctcccttgtctttctttctagatgcagcctccctcccagactctcccatcaccctgctcctaactccagccttggatgcaggaaaattgtgaaactagaggttatgttttgcttaccgggttggcacttttaaggcaatgagaagacagtattcctaaatcagtatcttacccattaggagattgtacctcctttctcagagaacctagtccttgaccaggacagacgttatgctttatgctgcctgcctgcggggtccatgttgcagacaggccactgcacagcattttctgggtttcctttacccctagccagtccttctcctcctacaatttctcctgtttcccagcaagcccagccgcttcacagcaaggttgcttccctgaggaaatcaggaagggaaggatgaggacagctgcccacagcccaggcacatggcaggcctggccaggaatgagaaagagaaaacgcagcccaaatctatcatcactcaacttctctgtgttccagagaggtgccaccatgctgaaaaatcagtggggatattaatattgggacccttctcctttcagcagctggtgtttcagtagaagggatattttcaggttaataagcaatgattggccccttaaaaaccaatttctaacagcaagtggagtagagatggaatggcagggctctctatttgttttcggggtgtcacagcaaaatattaaatcctttgaattagcacgagctctgtaatcctcttagagcgtgtttctgtagggaagagaccttggacagctacagtgcatcaagatgcctttgtgagcattttcaacaggcacaccggccacccgttcctaacgtgaagtctgacctagcgtcaacacggagcaagggaaacagacatgcaagcacattgatcaccaagtaaagaggatgagacgacatgaactctccctttgagattcacacatcaaatcaggcttgatgtgtttctagaagcagctgtwaggacaataatatttaagattattttttaaagttcttttaaatatagttcttctaaaaatcactgagagaaaatttgaagattaggaaatataa

SEQ ID NO: 693250 - DNA, 805 bp, Homo sapiens
tcaaccagtggtgaccattgagatgagtatgcctttactccaggtcataatcactttccagctttacacataatggtcagcatcatacttgtgtatgatgctgtagtctttactgtgtagtctttacttgtgtagtctttactgactaacctcattccaaagattacagaaataaatctgccatttaacccttcttcctcttcccctaacagatatatctgcctgaaaaatcaccaaaaggaatagtggatggtcatcagaaaaggttatgtaactgacatgggaggagggtaagcacatgcatattaatacaatggaatgatgagcaggtaattgtaaacagtggtagagttgaaaaagagagaacagactagtctacaaggtttcacagaaaagttgtatgatacacagggaagggaaatggccctaatgaaagggagcagggtgcctcagtggcttgggcaatggtacgagggaatggcagagcagcagaagtaaatataacaattaagagaggggaaaaattatagacatgctaatgctgatttaataattttcctagcccaagccagctatttaattttytaaacaaacatttttgtactgcttattaagtgttaggtatgctatgtgcccaagtataatggtgaaggtgaaagtcacttctctcaaaagcgcacacacacacacacacacccctttgaaaagcttagtcagtgagaagaaatggtgagacatgaggttctttgtgtctccaggagctcatctcctattctcagctgagttgcaactactaaatgtcgca

SEQ ID NO: 693251 - DNA, 611 bp, Homo sapiens
tgggtattaatccttactaaaactattgttttatttattttagagttcaaagcttagtcagacttggatttataatgtaattagggaaggggcttggtgtttctgaaatgacccattttggcataaaagactgaaagatttaggggatttctgtgactttattgaaatagctaatgcaaaaagatgttgacagttagaaattaagaactgttagataatgcaagaatttagcactcaggaaatttgatactatataaaacagaatgaattttgggaaataaagtggattgctaaattatatmtatgtgaatgacagaggacgtagtgatagctctatacatttacaaatacaagagaccgttttaggtacttgttgctaactaaaactcagagctagaattccctttatggtcacccaaaattttagtatgtttggatttaaactggggtggtttgagttttggggatgggaagtgaaaaactatttgtgatgtattggcatcatattctcatgaatcagttcatattatcctgactcattgtctaatcagtcaatggtcttaagcaaaggaacactttttggagattagctaccaaaagagaattgaagt

SEQ ID NO: 693252 - DNA, 1477 bp, Homo sapiens
aaagcattcatttagagaaagttagtttccaacagactagacagacaattaaaatcaagctggtttcccccttggtcccttcactcaataaaccctgttagcctctggagccaatgctattagcctsgaatgcggtggggggcgctcttagctgctgtctcatgtgctgttttcaaagacttctccgtgaggaacatcaatggtttccttctgttgccctggctaactaagtggaacaccctcttagcaacaaaaaggggagatttgctagcaccttcactatatgcagcaaatatcatctcccagtaatagtcctaggtaattaaacttttatttttcccatgatttatcgtctgggaaatactaactctgttaaacttcggactttacatataaaatgtaaaatttttttcagtttggataaagttctgttataagtaactgaaaatcaagcagagacatacacaagttagaggtttatttctctctccagtaaacctgggaagttcatggtggcccagttcactaggacttggacttcttttattttgtaactccatcatcctcacctgtggcttctgccttttagtccaaaatggctgtttcagatctagtgatatcatcacattccagccagcaagaaagaaaagaaggcaagaaagtgatagccctcttcttttaaggacccttctggaagttgtatatacaacttgtacatattggccagtaggccacctgagaagactgagggcctcagttctttcctagctgttggctggaggttgcacacagtttctcattacatggctttttcaatatggcagattgctttatgaaaacaatattcagcaagacccaagcttcaaggggggatgagaaatgtaatatttgctctcagtttctgtggtagccatgaaattatgcctctcagatgtccgactaaggaaacgtaattgtctgaaggccccagctgctgtcctctggaaaggctgagggaggagggttgcttgacttaggaagtcaaggctgcagtgagttatgatcgcgccactgcactccatccaacctgcttgacagagcaagaccccatctctaaataaatttttaaaaatacaatccgccaggcacagtggctcactcctgtaatcccagcactttgggaggccgaggcaggcggatcatgaggtcaggagatagagaccatcctgaccaacatggtgaaaccctgtctctagtaaaaatacaaaaattagctgggtatggtggcacacgcttgtagtcccagctattcgggaggcagaggcaggagaatcacttgaacccgggaggaaaatattgcaaggagcagagatcgcgccactgcactccagcctggcgacagggcaagactctgtctcaaaaacaaacaaacgaaaaaccaatctactccaaaaatactatttaaataacagaaaaagcctgtttctatttctgtcaa

SEQ ID NO: 693253 - DNA, 1477 bp, Homo sapiens
aaagcattcatttagagaaagttagtttccaacagactagacagacaattaaaatcaagctggtttcccccttggtcccttcactcaataaaccctgttagcctctggagccaatgctattagcctggaatgcggtggggggcgctcttagctgctgtctcatgtgctgttttcaaagacttctcygtgaggaacatcaatggtttccttctgttgccctggctaactaagtggaacaccctcttagcaacaaaaaggggagatttgctagcaccttcactatatgcagcaaatatcatctcccagtaatagtcctaggtaattaaacttttatttttcccatgatttatcgtctgggaaatactaactctgttaaacttcggactttacatataaaatgtaaaatttttttcagtttggataaagttctgttataagtaactgaaaatcaagcagagacatacacaagttagaggtttatttctctctccagtaaacctgggaagttcatggtggcccagttcactaggacttggacttcttttattttgtaactccatcatcctcacctgtggcttctgccttttagtccaaaatggctgtttcagatctagtgatatcatcacattccagccagcaagaaagaaaagaaggcaagaaagtgatagccctcttcttttaaggacccttctggaagttgtatatacaacttgtacatattggccagtaggccacctgagaagactgagggcctcagttctttcctagctgttggctggaggttgcacacagtttctcattacatggctttttcaatatggcagattgctttatgaaaacaatattcagcaagacccaagcttcaaggggggatgagaaatgtaatatttgctctcagtttctgtggtagccatgaaattatgcctctcagatgtccgactaaggaaacgtaattgtctgaaggccccagctgctgtcctctggaaaggctgagggaggagggttgcttgacttaggaagtcaaggctgcagtgagttatgatcgcgccactgcactccatccaacctgcttgacagagcaagaccccatctctaaataaatttttaaaaatacaatccgccaggcacagtggctcactcctgtaatcccagcactttgggaggccgaggcaggcggatcatgaggtcaggagatagagaccatcctgaccaacatggtgaaaccctgtctctagtaaaaatacaaaaattagctgggtatggtggcacacgcttgtagtcccagctattcgggaggcagaggcaggagaatcacttgaacccgggaggaaaatattgcaaggagcagagatcgcgccactgcactccagcctggcgacagggcaagactctgtctcaaaaacaaacaaacgaaaaaccaatctactccaaaaatactatttaaataacagaaaaagcctgtttctatttctgtcaa

SEQ ID NO: 693254 - DNA, 1477 bp, Homo sapiens
aaagcattcatttagagaaagttagtttccaacagactagacagacaattaaaatcaagctggtttcccccttggtcccttcactcaataaaccctgttagcctctggagccaatgctattagcctggaatgcggtggggggcgctcttagctgctgtctcatgtgctgttttcaaagacttctccgtgaggaacatcaatggtttccttctgttgccctggctaactaagtggaacaccctcttagcaacaaaaaggggagatttgctagcaccttcactatatgcagcaaatatcatctcccagtaatagtcctaggtaattaaacttttatttttcccatgatttatcgtctgggaaatactaactctgttaaacttcggactttacatataaaatgtaaaatttttttcagtttggataaagttctgttataagtaactgaaaatcaagcagagacatacacaagttagaggtttatttctctctccagtaaacctgggaagttcatggtggcccagttcactaggacttggacttcttttattttgtaactccatcatcctcacctgtggcttctgccttttagtccaaaatggctgtttcagatctagtgatatcatcacattccagccagcaagaaagaaaagaaggcaagaaagtgatagccctcttcttttaaggacccttctggaagttgtatatacaacttgtacatattggccagtaggccacctgagaagactgagggcctcagttctttcctagctgttggctggaggttgcacacagtttctcattacatggctttttcaatatggcagattgctttatgaaaacaatattcagcaagacccaagcttcaaggggggatgagaaatgtaatatttgctctcagtttctgtggtagccatgaaattatgcctctcagatgtccgactaaggaaacgtaattgtctgaaggccccagctgctgtcctctggaaaggctgagggaggagggttgcttgacttaggaagtcaaggctgcagtgagttatgatcgcgccactgcactccatccaacctgcttgacagagcaagaccccatctctaaataaatttttaaaaatacaatccgccaggcacagtggctcactcctgtaatcccagcactttgggaggccgaggcaggcggatcatgaggtcaggagatagagaccatcctgaccaacatggtgaaaccctgtctctastaaaaatacaaaaattagctgggtatggtggcacacgcttgtagtcccagctattcgggaggcagaggcaggagaatcacttgaacccgggaggaaaatattgcaaggagcagagatcgcgccactgcactccagcctggcgacagggcaagactctgtctcaaaaacaaacaaacgaaaaaccaatctactccaaaaatactatttaaataacagaaaaagcctgtttctatttctgtcaa

SEQ ID NO: 693255 - DNA, 548 bp, Homo sapiens
taaaaatacaaaaattagctgggtgttgggggtaacacttgtagtcccagctactcgggaagctggggcaggagaactgcttgaactagggaggcagaggttgcagtgagcagagattgtgccactgtaactccagcctgggtgacagagagagaccctgtcttgaagraaaaaaaaaaagattatagttgggggaaagctcatgtaagccaaaactatccactaccaaaagataagcactgtcaacattctgatgcacatgcacaattttaaccatactgggatcatactgcacatattggtattttttctcacttaaatataggtctgataaacatctctcatgttattgagcattctttgcatcttttattactactgaggttaaatcttttcatgtgattagcggccattcatatttctttgtggaacagcttggcaatttagaaaataatgccaatattttcctgaatatacttattgtagatatatggaaaatacagaagagtataagactatagaggaaaaaattcacataattcaaatca

SEQ ID NO: 693256 - DNA, 1487 bp, Homo sapiens
tgcagttgtggaggccgagaagtcccaagatctgctgtctgcaagctggagccccaggatagctggtggtggtgttcccrcctgagtccaaaggcctgagaatgggggaagaattggggggtactggtttaagtcccagcccaagggcaggagaacactagtgtcccagctcaaagaggcagatagacaaataccagggtgaagtcccctcctctgcctttctgtcctgttcaggcaggattcgatggattgcatgatgcccacccatgctccctgcttcctccctttcatctcatgcctttgagtgacttccctgatctgaatacgtgcctgcagagataagctattggccttctagctctcctttcctggatgtgtggctggcctggcccctccacagtggcttctgtggtgtcgggactgagggtgagagcactgggctgtgagaaagggttggggacagggcgccggcccccaccacacactcaccgagtcctggaagctggcaccctctccatgacttcaggctcatgaacgcacttcgtgaaagatctggcactgcaggatgagcttcccacctctcgctgggaccgaggctggcacgttctgggaaccctgctttcgagtgtgtcacctggggcggatgtggcactcaccgatcttgtttcagggaactcacatcacttttgaaaagcgggagacagattccatgacttgtttttgttttgttttaatacattttaattgtgagaacgattatcccctttccaaaactaaagttttgagcctctcagagtaaatttctagatacgcttaaaaaaaagtaatgtttttcatcactgttactgctcagttgtcaaaataagacttgtgagtctttgggaagaagaggattatacttgtacttacaaaattattctaacaatgcctgtggctaagaggaccctcaaaatgagtaaggaactgtaacagctcacaagggaccacaggctctgcagagtggcttcggaatccaagactctgaagcacacctgggtgtcctgccaggaactgcagctgcgcgccacatgcgccctgtcagatgtgacttagggatgcgttgtcagcttcagtttgttggacatctgaggacagtggtatatttgccataagatatcagtgtagctgtttaactgcttaggatgggaacacaaattcaagaagctccatagttaaattatcctggctgagatggtagccaagcaagacttatttccagcaaaaaactagcaaggcagaagtatctcaaaccacagatgcaaaagacgaaagaaagctgtgatgtaactgatgggtccctgagtgtgaaagtgtgggctgcagagggagcctactgttcacacagggagttcaggaagaacaggaagcgtgcaggttaagtatggagaaagctgcttcacacgcggatacacagagatataatttattggaatggatagcagagtcac

SEQ ID NO: 693257 - DNA, 1487 bp, Homo sapiens
tgcagttgtggaggccgagaagtcccaagatctgctgtctgcaagctggagccccaggatagctggtggtggtgttcccgcctgagtccaaaggcctgagaatgggggaagaattggggggtactggtttaagtcccagcccaagggcaggagaacactagtgtcccagctcaaagaggcagatagacaaataccagggtgaagtcccctcctctgcctttctgtcctgttcaggcaggattcgatggattgcatgatgcccacccatgctccctgcttcctccctttcatctcatgcctttgagtgacttccctgatctgaatacgtgcctgcagagataagctattggccttctagctctcctttcctggatgtgtggctggcctggcccctccacagtggcttctgtggtgtygggactgagggtgagagcactgggctgtgagaaagggttggggacagggcgccggcccccaccacacactcaccgagtcctggaagctggcaccctctccatgacttcaggctcatgaacgcacttcgtgaaagatctggcactgcaggatgagcttcccacctctcgctgggaccgaggctggcacgttctgggaaccctgctttcgagtgtgtcacctggggcggatgtggcactcaccgatcttgtttcagggaactcacatcacttttgaaaagcgggagacagattccatgacttgtttttgttttgttttaatacattttaattgtgagaacgattatcccctttccaaaactaaagttttgagcctctcagagtaaatttctagatacgcttaaaaaaaagtaatgtttttcatcactgttactgctcagttgtcaaaataagacttgtgagtctttgggaagaagaggattatacttgtacttacaaaattattctaacaatgcctgtggctaagaggaccctcaaaatgagtaaggaactgtaacagctcacaagggaccacaggctctgcagagtggcttcggaatccaagactctgaagcacacctgggtgtcctgccaggaactgcagctgcgcgccacatgcgccctgtcagatgtgacttagggatgcgttgtcagcttcagtttgttggacatctgaggacagtggtatatttgccataagatatcagtgtagctgtttaactgcttaggatgggaacacaaattcaagaagctccatagttaaattatcctggctgagatggtagccaagcaagacttatttccagcaaaaaactagcaaggcagaagtatctcaaaccacagatgcaaaagacgaaagaaagctgtgatgtaactgatgggtccctgagtgtgaaagtgtgggctgcagagggagcctactgttcacacagggagttcaggaagaacaggaagcgtgcaggttaagtatggagaaagctgcttcacacgcggatacacagagatataatttattggaatggatagcagagtcac

SEQ ID NO: 693258 - DNA, 1487 bp, Homo sapiens
tgcagttgtggaggccgagaagtcccaagatctgctgtctgcaagctggagccccaggatagctggtggtggtgttcccgcctgagtccaaaggcctgagaatgggggaagaattggggggtactggtttaagtcccagcccaagggcaggagaacactagtgtcccagctcaaagaggcagatagacaaataccagggtgaagtcccctcctctgcctttctgtcctgttcaggcaggattcgatggattgcatgatgcccacccatgctccctgcttcctccctttcatctcatgcctttgagtgacttccctgatctgaatacgtgcctgcagagataagctattggccttctagctctcctttcctggatgtgtggctggcctggcccctccacagtggcttctgtggtgtcgggactgagggtgagagcactgggctgtgagaaagggttggggacagggcgccggcccccaccacacactcaccgagtcctggaagctggcaccctctccatgacttcaggctcatgaacgcacttcgtgaaagatctggcactgcaggatgagcttcccacctctcgctgggaccgaggctggcacgttctgggaaccctgctttcgagtgtgtcacctggggcggatgtggcactcaccgatcttgtttcagggaactcacatcacttttgaaaagcgggagacagattccatgacttgtttttgttttgttttaatacattttaattgtgagaacgattatcccctttccaaaactaaagttttgagcctctcagagtaaatttctagatacgcttaaaaaaaagtaatgtttttcatcactgttactgctcagttgtcaaaataagacttgtgagtctttgggaagaagaggattatacttgtacttacaaaattattctaacaatgcctgtggctaagaggaccctcaaaatgagtaaggaactgtaacagctcacaagggaccacaggctctgcagagtggcttcggaatccaagactctgaagcacacctgggtgtcctgccaggaactgcagctgcgcgccacatgcgccctgtcagatgtgacttagggatgcgttgtcagcttcagtttgttggacatctgaggacagtggtatatttgccataagatatcagtgtagctgtttaactgcttaggatgggaacacaaattcaagaagctccatagttaaattatcctggctgagatggtagccaagcaagacttatttccagcaaaaaactagcaaggcagaagtatctcaaaccacagatgcaaaagacgaaagaaagctgtgatgtaactgatgggtccctgagtgtgaaagtgtgggctgcagagggagcctactgttcacacagggagttcaggaagaacaggaagcgtgcaggttaagtatggagaaagctgcttcacacgcggatacacagagatataatttattggaatggatarcagagtcac

SEQ ID NO: 693259 - DNA, 1456 bp, Homo sapiens
aggtggattaggccatgagagctggccctcctgcaaggattaatgccattaccatgggagtggggtccttacaaagggtgagtttgtccctctcttgcctctaggccctttcaccttgtgctgtgtgattatgcagaagggaagccttgccagattctggctctttgaccttgggctttccagcctccaggactgtaagaatatacatttccattctttgtatattacgcagtttcaggtattgtgttatagcatcacaaaacagactaagacaacactgataatggatttacagcccaccctaaatccaagctgatctcaatacccttcagttaatttcttctgcagaaaatcctwtttccaaataagatcacattcttcatattcaggttcagcactagctatgatggaatagcgtgaaactaactagggtgcctatcagaactactacacaaaccctggtttaactaggttatgagatgcaaaggggcagctcacattctgtaggtactttttctctgaaggagtttgccatttctaaacaaaaaaaaaaagagacctatgtttcaggcaaaggccatacagagggatgcatctgtgtgtgtgtgtgtgtgtgtgtgtgtgtgtgtgtgtgtgtatgaatggtaagaggtgaagttgtgcataaaaattggcagaacttttttttgatattgcagggatgtagagataaaaacttgaaaactttagggccatggagggtcaagtgccatgcctgacactaccagtattcctgtcaacatattttattcaattctggagctaaggagggcaagaaacaggtaggctcagcagaagacctttagaagcagagtagggtttttaacaatatttcagggctgaggctatgaatattagaggtcagtacctgctagtagggtgggaattcccaatggacaccttagcttacccctggataaaccaggagttgatggaatctcacccaagctgcaatccagccttgagtctgctcaactctgtttatagtaaggaagtcttttcttgcttcatctgcccacctttctggagtacaataatgtaattttgagccttgggagttttttttgtaatatacatagcatttagctttcagtcaaaaattacaagtatgtcaagaggcaaaaaatcaagaaaaaaaaacataatagaaacaatactatgggtgacccaggtattggacttagcagacaaggttttaaaaataaccatgattaatatattcagggaaatagagtacaagtcagagaccacagatataaggatggagaattttactgcattgttggactttcctagaactgaaagatatatcattggaaattaagagtgtagagacagaagtgttgaaagtagcaggatgggaaatgaagctgatatgataatactttagtgtaaagtagactttgggtcttaatgc

SEQ ID NO: 693260 - DNA, 1456 bp, Homo sapiens
aggtggattaggccatgagagctggccctcctgcaaggattaatgccattaccatgggagtggggtccttacaaagggtgagtttgtccctctcttgcctctaggccctttcaccttgtgctgtgtgattatgcagaagggaagccttgccagattctggctctttgaccttgggctttccagcctccaggactgtaagaatatacatttccattctttgtatattacgcagtttcaggtattgtgttatagcatcacaaaacagactaagacaacactgataatggatttacagcccaccctaaatccaagctgatctcaatacccttcagttaatttcttctgcagaaaatcctttttccaaataagatcacattcttcatattcaggttcagcactagctatgatggaatagcgtgaaactractagggtgcctatcagaactactacacaaaccctggtttaactaggttatgagatgcaaaggggcagctcacattctgtaggtactttttctctgaaggagtttgccatttctaaacaaaaaaaaaaagagacctatgtttcaggcaaaggccatacagagggatgcatctgtgtgtgtgtgtgtgtgtgtgtgtgtgtgtgtgtgtgtgtatgaatggtaagaggtgaagttgtgcataaaaattggcagaacttttttttgatattgcagggatgtagagataaaaacttgaaaactttagggccatggagggtcaagtgccatgcctgacactaccagtattcctgtcaacatattttattcaattctggagctaaggagggcaagaaacaggtaggctcagcagaagacctttagaagcagagtagggtttttaacaatatttcagggctgaggctatgaatattagaggtcagtacctgctagtagggtgggaattcccaatggacaccttagcttacccctggataaaccaggagttgatggaatctcacccaagctgcaatccagccttgagtctgctcaactctgtttatagtaaggaagtcttttcttgcttcatctgcccacctttctggagtacaataatgtaattttgagccttgggagttttttttgtaatatacatagcatttagctttcagtcaaaaattacaagtatgtcaagaggcaaaaaatcaagaaaaaaaaacataatagaaacaatactatgggtgacccaggtattggacttagcagacaaggttttaaaaataaccatgattaatatattcagggaaatagagtacaagtcagagaccacagatataaggatggagaattttactgcattgttggactttcctagaactgaaagatatatcattggaaattaagagtgtagagacagaagtgttgaaagtagcaggatgggaaatgaagctgatatgataatactttagtgtaaagtagactttgggtcttaatgc

SEQ ID NO: 693261 - DNA, 495 bp, Homo sapiens
ttagctctttagatgaaaagtcattaggcaggaatggaggtaagggctggtctaaggtctcttkggtgtctggattcactgaatttcaatgatgatacagtaaaaaaaattgtaaaagagcaaaaacaattaaaaatagatgtgtagttatatttttcttcttacatagacctaacttatgaaacacaaaagggtatctactccaagttgtgttattttcaaattttcaatactagctcatttagtattgtcattgcactagcatcactgttggtattctccagcgtgtgagatattaattaaactcctgtttagaaaagttgaagataacagctactaactgaggattattaattttatggctttaataataattttagtaacttgtgtctgctgtgttttatttttattttattttattttattttttgagatggagtctcgctttgtttcccaggctggagtgcagtggcgcaatcttggctcactgcaacc

SEQ ID NO: 693262 - DNA, 644 bp, Homo sapiens
cacatattagaggtatttcttcctaaaaagctggccacagatcaagaatcagaatactctttctctggctagtacaggagaaatactagcaaagatatattttctaattcttctttctctagtttccatgcaaaccatcatattcctctgtatgaaatcatgtacccacagacatgttggagtttggtcatagcctagtttgcatttatgttttaaattgatatctccagcaagaatttcagatatattcttgccttactgaacttttgtctcagggaagttttctgggatgagtttccataaatggggtaatgtcaagtattttatgttgcttctttcccattcctgaaagtaagaattatattttcatttattcatccatcatacattgagtgctgtaatttgtcaagcattatgagtgatacaaagatacataaaacattgttcctgaatatatttaatctttgggttttatctagactatgtactattttaaaaattaaactagcttttataattctaaaagttacaacttgcactggtaaaacttcaacctctacacaaaatgygtaaaatgatcactaaatgtctaccctctccgtatgcacttacctgatgcctgttccactcctaggggtaacatc

SEQ ID NO: 693263 - DNA, 909 bp, Homo sapiens
gcaaaataaataatatgcagtcaggttgagattagtgttatggaataaaagaagagagagtaaacaatgggggaaggaacaacattaagtaggataatcaggagacttctctggagagatgacccttaccctcagacctaaatgatacactacaaaataaatgcctgtacaatcactaaaggattaacacaaactgaaggtaaaaaccattgtgtaagcgttttcctgaattcaagaattagattattattctgaagctattttaatattgggaaaatcttgttagcatttttttctracaaagttcaaataatgatttctgaaatttaattctacctaatactaggtgtactttagaaaaataaccaaaatgagctgcagaagtattttactttattataataaatattacagtatgcatcatgaaatgaaagaaaaataatcctttgcctatagttttattatctccaaatgagtagaaactgaatgatgcatttggcaaagcacataaaacttcacttaagagatgtctgttaatacttgctgagtggaaaataatagctagcatttgtttgaacgcttgatgtgtgccaggtgggacactagggattttacaaacactaatccatttaagactcatacacctctgcaaggtatgtagtactattcttcctcctaggtagcctgagtcagtgtcaaagaggattctgtcttgggtctatgtgatttcaagtactgtgctcctttaaccccactcttaattgtgaaaatctttatcacaggactctgaaacttcctgtgattcactttctccatggtgtccacagtcctttcatgctatatgtaccacaaatagcatgaaaggacttccttttaacctaaagcctttttacaattaacccttgcaat

SEQ ID NO: 693264 - DNA, 909 bp, Homo sapiens
gcaaaataaataatatgcagtcaggttgagattagtgttatggaataaaagaagagagagtaaacaatgggggaaggaacaacattaagtaggataatcaggagacttctctggagagatgacccttaccctcagacctaaatgatacactacaaaataaatgcctgtacaatcactaaaggattaacacaaactgaaggtaaaaaccattgtgtaagcgttttcctgaattcaagaattagattattattctgaagctattttaatattgggaaaatcttgttagcatttttttctgacaaagttcaaataatgatttctgaaatttaattctacctaatactagktgtactttagaaaaataaccaaaatgagctgcagaagtattttactttattataataaatattacagtatgcatcatgaaatgaaagaaaaataatcctttgcctatagttttattatctccaaatgagtagaaactgaatgatgcatttggcaaagcacataaaacttcacttaagagatgtctgttaatacttgctgagtggaaaataatagctagcatttgtttgaacgcttgatgtgtgccaggtgggacactagggattttacaaacactaatccatttaagactcatacacctctgcaaggtatgtagtactattcttcctcctaggtagcctgagtcagtgtcaaagaggattctgtcttgggtctatgtgatttcaagtactgtgctcctttaaccccactcttaattgtgaaaatctttatcacaggactctgaaacttcctgtgattcactttctccatggtgtccacagtcctttcatgctatatgtaccacaaatagcatgaaaggacttccttttaacctaaagcctttttacaattaacccttgcaat

SEQ ID NO: 693265 - DNA, 1509 bp, Homo sapiens
taccagattcttttattttaatccattgagcactacaaggaaaatgcctaagacctatgaacttcccaaggatctgccaaaggggtttgaagcctgacaaaagttattggcttcaaaatatgaagataactgcaaaattaaagtctataaatgtctaagtaaatgtcaaaaaatgtaactcatcatttttatagattatttcattttgtgttcagaacaattttgacacattggaaaaatggttggttagattgtatcagttggtaagaattctttagtatatataatctctgctaagaagcataactgataataaatttcaaaggcaaaattttaaaatcgtctcaaatttttagcaaaatatatacttatttgacatgggatatggggtgtgtacatgtcaaagtatatgtgataaaatgtagagtggagcttctaaaaacaagagtgccatgggattagcatggtctaaagaaatgccatgttttgagcacccaccgtgtgcgacacttaatgtacatcattctttttaatccccacaacagtgctgggaaatagttctgtttatcataatttctttcatttgaggaaacctagggctttagggaaattaagtaattaacctcaggtcacacagctagggaatatggtgatggggtttgaaggcaggtcagcttgactccaaatcctgtgcccttagtgagaacataggtatgtttccatgtcaaattaaaaaaataagtttacaaaattgtatacctggtttgagtataactttggaaaaatacaggattcaataaaagcaaaaatttttttctgttttttactgttctgaattttctaacatagttttacaacaatcaggcaacccgtattaatttctaaaaaaaattgatcttagaggagtttgataataatgttaaaatattgacatcttgcggccgcgtggtgtcattacaaccttggctttactttcagtgtgggagctgactactagagggcagcactgaggtttattcgggtcacgttttctgggctgaatgtggcagaaagctgggtcacttctccactcaaaactgaagaaaagcaaactcatttataatgccataaatacacacacatatatgtcaacaaaataacgtatactgtaaatatacagcgtaatacacttcaataacttctttgcatcctgaagcagtatagcaaagttattcagcgtcaggcccaggaactatgctacctgaatttgcatcatggctccaccatgtatcagctgtgtgactttggccagagcacataaacttcctgtactttattttttttttctstatctctaaagtgagaataagaattttccctacctcttagggatgctgtgagaaataaatgaagtaaggctaacagtgccagttgaaaggagatgctcaaaaattggaaattatcattttgcctgttgcccaaagctattctacttttatgaaacaatatatgccttgttgagtactataa

SEQ ID NO: 693266 - DNA, 642 bp, Homo sapiens
aaaaattctcctttttgatatgatcacatgtttaatttattttgtttaatgtttttataattgaattaataaagtacccagtaaaatgctataaatcaataagtattatccaaatgaaaataaattgaaattaagtaagactagtttcaaatgcagtctttcttgaaagagtgagtttggccatcctaaattacagttttcaagattgatctactttctttctgaggccaccatacttttggtactagaattaaagtgtctaaatcaaaaacacactacatggcttckctttgacttaaaaacaaaatgcacaaacaataaattataagtctgattaactgtatgggtattttgttcaattgatttaactgcattttttttccctaggatataaatcatgtgatacagcaaactcaaagatgtgggactcaaatgacacttgtgaaaaactgataccctgtttgcctttaaagttatattaattaccacactttagtaaagtgtttactatttagaactctttcttccttcctagttggccacctgtacactccattcctcagccataaaagtaaatactgtatatctaaaactggtgctggttttgataagccatagtgatgacatcagcctgagttccaa

SEQ ID NO: 693267 - DNA, 735 bp, Homo sapiens
ggcctgaagaagctgctgagcttccggatcccactgactgtcgttcgggcacttcctagagggtcaagcaccatggcgaaaggctgaggaggcaactcgtatctttcattctcctgcctcatcaagaatgaaccttgaaggcacccataggtcgcgcagtctttcagaagctgcaggagggctgtgactgtatggggttgcagactgaaaatcttattaacgtgaaagaggaatttgaaattaaaaaaaaaaaacccggccgggcgcggtggctcacgcttgtaatcccagcactttgggaggccgaggcgggtggatcacgaggtcaggagatcgagaccacggtgaaaccccgtctctactaaaaataaaaaaaaaaaattagccgggcgtggtggcgggcgcctgtagtcccagctactcggagaggctgaggcaggagaatggcgtgaacccgggaggcggagcttgcagtgagccgaggctgcgccactgtactccagcctgggtgacagagcgagactccgtctcaaaaaaaaaaaaaaaaaaaaamcccacaatatcaggctacagttatcatagcaattctgcttttaatgcactcaggacaaacttctagctctgcatatatgtcatttcaatgacacatcctgtctcctacccgactagaatgtgagcagccctgtgatctctatgtgctcataaacagtgcctaatgcgaatcctggctcttgg

SEQ ID NO: 693268 - DNA, 2857 bp, Homo sapiens
gccctggactatctacatccagaatttacataaataggaaagagatacccatctgtgttcttttaatcattgttttatttattttttgtttttttctgaagctgaccaaaacctaacatagtgataaagtcatcccatcagccagaataaattctgagcagttatcaagagaaaacttaaagtaatgtgaagagaagccacacttataaaggaaaccaagagctttcattatagctagcctaaaatgaagttaattacctaaattgttcagtcaccaaggctttgggagttaacatgaggaggctggttttattgtgtatcatgcccagaagttccatgataatttcaaattgtttgcatgtaattccccccccaaaacttgtacaatattttgacattcttaaagaggagaggtgacacagtatcatactactgtgtaataaaaatctgctctgccctcctaccgggtttacaatacagatagtggcacaggaaagcgctcagaacagaaatcagaatgcttgaagcttacttaactcactacagacctggaaagttgcttaaattttataaagcttggttataaggataatgataacagcagctccattttctacgcagggaagttgggataatcaaataaaataaatgtatgtcaaagtgttattgttgttactaaaatcattttggtgctcacttatgtttcactgggagaagcactctgttttcagttttctggaataattaccttttaaaagggactcttttttgcctgcattaacttaytttctctaccttctcactttcatggttctgcaggataattttatttttatgatgtctgagttttcatgagctacatgtatgcaaatatttttagctaaaacaatattattgagaatgtgtatttggctaactcataactgcttattttgaaactagctgagaagcacttggactgagactgaaaataaaaataaatttattaacaaattatagaaggctgtgcagttagaatatgtcacttgctgattgaaatccaagtgctatatgcagtaaaatttcttcaacccagaatcaagcatccagacatttcacatagcagcatttactttgatagtattggccagttatcaatggtagtaaaaatgcccctggacttacaaaatattgaagtgccttctgaattatcaaaaacatattaccagtcaatggaacctacacacacacacgcacacacacacatgcatatatattttcacatatatacatgtatttgtaaaaatatatatgtgaaaatatatacatacatgtatggatgtgtgtatatacacatcaagcttctgggcatgatatacaatacatgtatgtatgtgtacatatgtgaaaatatatatacacatacagctgggtgtggtggctcacggctgtaatgccagcactttgggaggccgagttgggcggatcacgaggtcaggagatcgagaccaacctggctaacacggtgaaaccccctctctactaaaaaatacaaaaaaaaattagccaggcgtggtggcgggcacctgtagtcccagctactcgggaggctgaggcaggagaatcacttgaacccgggagacggagcttgcagtgagctgagattgcgccactgcactccagcctgggcgacagaacgagactgtctcacacacacacacacacacacacacacacacacatatatatatatataaaatacatattatatctattatacatatgtatcaatgtataatatatatatacatatattatacatatatatacacatatatgcattttatatacatgtatgtatgtacacatataaatacatgtatgtacatgtatatatatttgagacagggtcttgttctgtttcccaggctggagggcagtggcataaccacagcctcccaagtacctggtactacaagtacacactactacacctggctaatttttatgtttgtagagatcgggtttcacagtgttgctcaggctgtgcttgaatttctgggctcaagcaattctcccacctcagcttcccaaagtgctgagattatacaggtatgagcaactgcacctggctggaactaaaatatttaactaactgatatgtaccactccacaatcatataatatggagattaatattaatggcaataaaaacactagattatctgtgtttacctggagcagaatgaaaaatgctacaattccgtttcacaaatagtgaaggtaacatttaatttcttgctcaaaagaaagcaggttatttgaatttattgttgagaactgccttctgaacgtcattcacttcataggcttccttccaatgtgcttctcattgaccttgggcttccatttgattaataataaaagtcacctaaccttaaacttcactcaattcttctctctcagacactcacacacataccattagaactcccactctccaatacaatctagaaaaacaagacactctgcaaggatatatactcagggcttggccctaccctcacacttttgacagtccaaggaaacatggagaaagaggagctggcctgtgcacattacactttggttttactgctcctttcttggaaaccctactcactctctgcccactatccccgaggctgactggtgagacatttcctctcttatcctctcctctccaaaccctcagtcttcccttatgagcctgctttctttctttaattttccactgctactttcattacactctctgagccagaatactagggtatagagaatatatgtggagtgagacagggagggaaggtttctagggagtgagcacaaggagacc

SEQ ID NO: 693269 - DNA, 618 bp, Homo sapiens
gacctttaagtgttcaagtgaaataatttctcttttagaaacatagtcctaataacatcactcagagcctccctgtcatctccaaggccaggtccaatgtcttggaatagggcttctctggtttytttccatcttccctggaccccttttaaaactgaattaaagggggttgcctttagtcagttccccgatcccatttttccctgagtctttttcccttacaccagccatctttctcttcctcaaaagtacttgctggttcccacccccggagcttcctatgcgttgtggaacagctttctgcaccccacccccaccactccaggtcttcagccctcccttcagaaatcattcttcagagatgtcttccttgaccaccccacaacacacacactagatcaggtccctgtcacgtagagtaccctgtgcctttcctgtgtagccctaaccacaatgtgattacgtagtcagttcaatgtatgttatgtgaggacaaggacagggcatggcacaaactaggcactgaaggaacaagtgactggagtgccattcctcccttctctgtacttcttgtgcccatctctaatagattatatatatatatttttgagatggagt

SEQ ID NO: 693270 - DNA, 876 bp, Homo sapiens
tctctctstctctctctctctctctctctctctctatatatatatatatatatctgtctctctctatatatatatatatgtgtgtgtgtgtgtgtatatatatatatatacatatatatatgtgtgtgtatacatatatatatgggattcacccacctcagcctctcaaagttcagggattacgggagtaagccacaccggccagccaataccctactatagttttgcaagatgttaccattggtagaaacgaggcaaagagaacaaaggatttttctgtattatttcttacaactacatgtgaatttacaattgtttcaaaattagaagtttaattaaaaaggaaaacccacctgagagccctttcaaaataccacttgcgttgggagactggggtggggcccagatacgtggttttttttttttaagtctccccaagagttgaaaaccacacaatgaaattatttctaaagctccttccactaaaaagttgacatttttatgtgaaaatatatcaaaattcgaacgtcttgtggattcaggctagaactgttccctcccaggcttcccggcagaaggagagagaaaggcccgagagacagaatcaggatgtgacaggggtggcgcgaggcggaggtgcagctctctccttcacggtccaaggacttccaaccgtaggactcttagtgaagcatagctaatagccacagtggccgagggtgggattagaacccactttctggctctgccttccgcagcttggtcagggctctgggcaggacccctacgaacactcccgctgtaagtgtcagaacaggtagaaatggttctaattataaccagttttcaagcatgtgggtggaaaggaatgcctat

SEQ ID NO: 693271 - DNA, 876 bp, Homo sapiens
tctctctgtstctctctctctctctctctctctctatatatatatatatatatctgtctctctctatatatatatatatgtgtgtgtgtgtgtgtatatatatatatatacatatatatatgtgtgtgtatacatatatatatgggattcacccacctcagcctctcaaagttcagggattacgggagtaagccacaccggccagccaataccctactatagttttgcaagatgttaccattggtagaaacgaggcaaagagaacaaaggatttttctgtattatttcttacaactacatgtgaatttacaattgtttcaaaattagaagtttaattaaaaaggaaaacccacctgagagccctttcaaaataccacttgcgttgggagactggggtggggcccagatacgtggttttttttttttaagtctccccaagagttgaaaaccacacaatgaaattatttctaaagctccttccactaaaaagttgacatttttatgtgaaaatatatcaaaattcgaacgtcttgtggattcaggctagaactgttccctcccaggcttcccggcagaaggagagagaaaggcccgagagacagaatcaggatgtgacaggggtggcgcgaggcggaggtgcagctctctccttcacggtccaaggacttccaaccgtaggactcttagtgaagcatagctaatagccacagtggccgagggtgggattagaacccactttctggctctgccttccgcagcttggtcagggctctgggcaggacccctacgaacactcccgctgtaagtgtcagaacaggtagaaatggttctaattataaccagttttcaagcatgtgggtggaaaggaatgcctat

SEQ ID NO: 693272 - DNA, 876 bp, Homo sapiens
tctctctgtctctctctctctctctctctctctctatatatatatatatatatctgtctctctctmtatatatatatatgtgtgtgtgtgtgtgtatatatatatatatacatatatatatgtgtgtgtatacatatatatatgggattcacccacctcagcctctcaaagttcagggattacgggagtaagccacaccggccagccaataccctactatagttttgcaagatgttaccattggtagaaacgaggcaaagagaacaaaggatttttctgtattatttcttacaactacatgtgaatttacaattgtttcaaaattagaagtttaattaaaaaggaaaacccacctgagagccctttcaaaataccacttgcgttgggagactggggtggggcccagatacgtggttttttttttttaagtctccccaagagttgaaaaccacacaatgaaattatttctaaagctccttccactaaaaagttgacatttttatgtgaaaatatatcaaaattcgaacgtcttgtggattcaggctagaactgttccctcccaggcttcccggcagaaggagagagaaaggcccgagagacagaatcaggatgtgacaggggtggcgcgaggcggaggtgcagctctctccttcacggtccaaggacttccaaccgtaggactcttagtgaagcatagctaatagccacagtggccgagggtgggattagaacccactttctggctctgccttccgcagcttggtcagggctctgggcaggacccctacgaacactcccgctgtaagtgtcagaacaggtagaaatggttctaattataaccagttttcaagcatgtgggtggaaaggaatgcctat

SEQ ID NO: 693273 - DNA, 951 bp, Homo sapiens
tataataaaaaaaatttctaattgactcctggaccaaaaacaaaatcagagtagaaattaaaagatatttagaatgaaaatatataaaaaacttgtaagatgcaggccaggcacagtggctcacaccagtaatcccagctcttagggagatagaggygagggcatagcttgagcccagaagttcgagtcctgcctgggcaatatagcgagacctggttctccacaaaaagggaaaaaaagaaaaaaacaaaaacaaaaaaacttgtaggatgagctatagcaacacttagaagaaaatgtatagccttacgtggttatatcacaaagaatgaaggatgaaaactgagttaaatatctacttaaataactccaaagaaagtggaatgaaggaaatgatagagtagaaattaatgaaatcgagaacatacattttagatgattaatatatctaaaaacgaattagttgaaaaaaaccaataaacctgaatctaaatcatgaagaagcaatcagacaaattcgaatttaaggatgcattaattttctattgctgctttaacaaattaccgcaaatttagtggatgaaaacaacatgaatgtattattttacagttctgtaggtcagtagtctgagatggatctcaccaggctaaagtcaaggtgtcagcagggctgtatgcctttctgtgggccctaggggaggatccgttttcttcctcattctggttattggcggaaatcagctccttgtggttgcaagactgaaatccccatttccttactggctgtcagcttagggccatttccagcttcaaggggccacctccatttcttggctcacatcccctcttccatcttcaaagccagcaacagcaggttgagtccctctcacgctttgaatctctcctccttccacctcatctctctgacccagcccataaaggttctctact

SEQ ID NO: 693274 - DNA, 959 bp, Homo sapiens
aataaaaagaaagcatggtgctggcatctgcttggctcctggtgaggcttcagggagcttttactcatggtagaaggtgaagcaggagcaggcatgtgaccagcaagaaagggagcaagagagagaggaggttccaagcccttttaattaacaaccagctcttacgtgaactaccagagggagaactcgttcattaccatggagacagcaccaaggcattcctgagggatccaccctcatgacccagctacctcccaccaggccccacctgcaacactgggatcgtctttcaacatgagatttggagrggacaaacatccaaactacatcatgggggttacaatggaccttttacaatcaccacctgctctcaggatgttcagcacatgaaatacctataaaatcctattgtcagtgggaactgattggaaattcaactacacatcgttttttgagtatcttccatgtgaatgacatttgctaggtgaggagggagagagaaaggcctagaaaacactgcctctgccttcaaggcgcttacaggctccaacccaggaaggagtgagggttccactccaggccttcctggaattatacaatgtgctcagtattctctctggctgacagccaccctcccacttctgcctgcatagctacactttatagcatcctcactctggaatctcacctttctccatcaccaacccacccccaactctgggtgtgaaatctacaggcaggaggcagcctacgtagtagtcacaagcactgaccctggcactctcataagtgtgtttgcctctgagctctgctattggctggctgtgagaataagttgctgaatgtgggcctcagtttcttcacctgtaaaatgggcatgataatctcaagaatctcataagcttgatataaggactacataagttaatatacagaaactgcttagttaatatacagag

SEQ ID NO: 693275 - DNA, 1812 bp, Homo sapiens
ggaatttgttagaaatgcacaatcttgggaccacacctagacatacagcatcaaaaattctggcagtaggactccacattctgtgctttaaaagccttctagatgattctaaaagcaagctaatgtgtgaaaaccattagtctagataaatgatgtgaccaagagaagatttttttttctccaaaatactgagacgttgctaagctacaatttcaaatacattaaattcatcatgttaagaaaaaatattgggtaatgaaagcagcattgtcaagggaataaggcagtcaggagtttaaatactggctctgccgttttctagctgtgcaacattgagcacactttgtaacatctctgagccatacctttctcatttgtaaaataaagtcattgtacgaattgatttaaaggtccctaccagccccaaaattctgtatttctttataggcaagtatttagtatgaatttactgaatgcctagcaaaattccaataaatctgaaggatggtaaacaacaaaagataacatctaatttgaagaagttcaaaatccaactaggaaaacatgtcacttatatatcaaggcaaaagattagagagtgacataaaaatgtgagcctgacggtggcaaggtcaactcagaatttagaaagcctgccctttcaatagggatgatttgagagacgtcccgaagatcagtctgactagaataccttcctccccctgagctatgtcactgtctccagatcaatttctccagccatayttgggtaacagaattaggtagaaatttaacagcttgggagttgcttgtatattccaggtatcgcacataatgcttttcatgcatatttttattttaaaagctcataaatacccaaaagtcaactagtaatatcctctctatttcacaaatgaggaagctgaggctcagagattttaaatagcttaccgaaattaacacattcaagacatggagctgaggttcagtgaaagttgtggactttgaaagtccgttttttctactatatacaagtgactctctagagagataaggtgatatggtttggctgactctccacccaaactgcatcttgaattgtatttctcataactcccacgtgtcatgggagggacccagtgggaggtaattgaatcattggggtgatctcccctatgccgttcttgtgatagtcagtgagttctcatgagatctaatggtttaatagcacgtggcattccccctgctggcacttattctctctcctgtcaatctgtgaataggtgacttccaccatgattgtaagtttcctgaggcttccccagccatgcagaactgtgagtcaattaaacatctttcctctacaaattacccagtctcaggtatgtccttatagccatgtgagaatggactaatacataagatttagatagataagacaaagccggttgttccatgagtagatgctgcgtatagacaaacaagccattattgcatgtgagagcaatacagtaggaataaaaataatgtcagtgaagtcctcagaattctaacagaactcacattcagaatggatgattactgacatctttttcatatgaaaactgagtggcagctagaggaattctttcatgtgaatctaagacgatgggagaaagaaatattttcattttgtatttatgatcttatttccacacaaaaaacactccattttataaaagttgagattaagcactaacgcttctatagcgttgagatgttctgcaaagcaaagaactattaaatagagcccacttggatcaaaagctcctg

SEQ ID NO: 693276 - DNA, 1005 bp, Homo sapiens
tccctcaaatagattcctggtcccaaccagaccccctcaattgactgggacatgttcctctgctgtgtgggctgattccagtgaccccctctgctaaaaaagctaagcaggttgtgacattttcacaccaacagtattacaaagcaatctgatttcctttttcttgtctgtcacaatgacacctgttgatggattctaagtatactatggaagatgggggtgccagagattagaaagtaagttgagaaaraggccaggtgcagtggctcacaactgtaatcctagcactttgggaggctgaggtgggtggatcatctgaggtcaggagttcgagaccagcttgatcaacatggtgaaaccccgtctctactaaaaatacaaaaaattagccgggcatggtggtgggcgcctgtaatcccagctactcaggaggctggggcaggagaatcgcctgaacccgggaggcagaagttgcagtgagctgagatcgcaccacttaactccagcctgggcgacaagagggagactccatctcaaagaaaaaaaaaaagaaagaaagaaaagaaaagaaaagaaaaaaattgcaaaaattagccaggcgtagctatgagctgtaagccccaaatttaaaggggataaaaaccttgccagacaaaatacaagcatgtaataaattaatcactgcagaattggctcaggaaaaccatgaagagatttcacaaggcaaatacacagcaaattgctgaacaaatgattcaaatagcaactgctcaggagctcagctcagaaaagggagcaagatatatgagctgagattgtctgctaaggctgccgggaagaggtgaattagagcggagcctgcaggcaagggatgaacaaggcagaaaacaggggcatcttccccaacctgagaagaagggccagagtgggtagggggttttgaggtcagagtgacagctgtgccatgcaaattgtttacaaagcactcacacctgtttctccttt

SEQ ID NO: 693277 - DNA, 618 bp, Homo sapiens
cgttagattttgcatgaatgagataacatattgctttctctctctctctctctctcttttttttttttttttttttttttttttgagatggagctgcgttcttgttcaccaggctgaagtgctatgtgcctcaccgcaacctctgccgcccgggttcaagtgattctcctgcctcagcctcctgagtagctggtactacaggcatgcaccaccatgcctggctaattttttattttagtagagatggggtttctccatgttggtcaggctggtctcaaactcatgacgtcaggtgatctgcccgcstcagcctcccaaactgctgggattacgtatttcttaatgtttagctactgggaataatttatgttagattattttaggttttctacctatacaatcatatcatctgtgaaaggtaatgtttgaaaatttcttcctttttgatccttacaccttttgtttcttgtctgcgtcttgctgtactgcctgggacttcgtagtcaatgttgggtagaagcgatgacagctgggaccatgggcttgcttcttacaggaaaggaaagctttccatatttcaggtattgagacaagtaagatgttttctgtagttttttg

SEQ ID NO: 693278 - DNA, 2544 bp, Homo sapiens
gagatacttcattaatccatgataaaacaaatatggatgacagaggacatgtgcttttcaaagaatctttatctaattcttgaattcatgagtggaaaaatggagttctattcccatggaagatttacctggtatgcaaaaaggatctggggcagtagcctggctttgttctcatattcttgggctgctgtaattcattcttctcatactcccatcttctgagaccctcccaataaaaagtagactgataggatggccacagatatgcctaccataccctactttagatatggtggtgttagaagataaagaacaatctgagaactattggaatagaggtacaagtggcataaaatggaatgtacgctatctggaaatttctcttggttttatcttcctcaggatgcagggtgctttaaaaagccttatcaaaggagtcattccgaaccctcacgtagagctttgtgagaccttactgttggtgtgtgtgtctaaacattgctaattgtaaagaaagagtaaccattagtaatcattaggtttaaccccagaatggtattatcattactggattatgtcatgtaatgatttagtatttttagctagctttccacagtttgcaaagtgctttcgtaaaacagttagcaattctatgaagttaattgggcaggcatttgggggaaaattttagtgatgagaatgtgatagcatagcatagccaactttcctcaactcataggacaagtgactacaagaggcaatgggtagtcccctgcattgcactgtctcagctttagaattgttatttctgctatcgtgttataagactctaaaacttagcgaattcacttttcaggaagcatattcccctttagcccaaggtgagcagagtgaagctacaacagatctttcctttaccagcacactttttttttttttcctgcctgaatcagggagatccaggatgctgttcaggccttatcccaaccaaattcccctcttcactttgcagggcccatcktagtcaaatgtgctaacttctaaaataataaatagcactaattcaaaatttttggactcttaaattagctacttgcaggttcttgttgaaaggtatataatattacattgtaaacaaatttaaaatatttatggatatttgtgaaaagctgcattatgttaaataatattacatgtaaagctatttaaaagaggttttttttgtattttgtttaacaaaaattgctcaggagcatgctaagcctgaggccaagttgtttcttagtatgactttttaaaaaaacatctgctgagtagctacagggccaaagacttggagagcttgtttctgttgcatttgcatatcttctcaggaaattaaagtgtgtcatacatatgtgtgtgtgtgtgtgtgtgtgtgtgtatatgtgtgtgtgtatatatatgtatacttataaaatcttggtgttcttgatctttgttgtgttataagcaatgtgtgctggagtgggctggtgctagcttataagcacatattattaaattttcaggaatgttgcactttagttattaactataggcattcttgaaattggctatggtgggagtatttataccatgtaaattggcaaacactacacattttccttttggacagctagttcaccagcacaccactgtgaaactctccttaatgactcctctctgcccccgcttcattcctgggataatcatagcagactaagggagaaaatgaaattgtaaaaatttggcatactggtgatttctcagggcaagcagaggttactacagctgcagctagagggatgactaccaacaggtgacctttacattttcctgatgttataattttagcttttgttttcaatgtatactgttttcctgtttctccacatagtagtctgcattttaaatctataataaaacatgctgataactgggttgcagctgatttatctgtgggtcatcagactagagttagtaatccagggaacacaaaggtacatcatagcaatctttgcccatatgaaacactgtttggcaagtgttaggcagaagtgagagctggatgcaactgacttttcatcatagctgttcccatttccgatgagttagtcaacagtttcactttctgacttttacctacctccttttctccaccctgcccacattcaccatcaaagccattgtcaacccttctcacactgtttttgccttccattttgccccatcaaacaagagcatgctatatgactatggattaagtttccgcttctgaagatggcagttaattgaaaagggatgtaatctagtcaacaaactccttagatgaagtgtatcggtacatcttgaaaatgaaattcctgcctttgtgttccaccccaattaggcaatttcctttgggaggacatatttttattagagagaaggagaagacaaaatctgattgactgaaaagttaacagtttagagatttccatcaggtagaagctacaaatgatgctttggcacacatttactctc

SEQ ID NO: 693279 - DNA, 772 bp, Homo sapiens
ctaatgtacatgtatatactaatctcgatgcaaaacagaggtgacactacaggtgaatagagaaaaggtagacatttaaacaatgatggtaggacagttatttactctaaaataattcacaaaattattcactattcacaaaaaaacccctaaaaattatttccaagtttatttagagaccgatgagtgaaagggaaaaactgtaatacctaaagaattacatgaaaataagaaatagaccaaaagtcaattgaaaaattggcaaaggacatgaacagatgattcagagcaggaaataataaagggtcaatgaatataaaagatacattgatcaaaaaacaaatgagatataatttcatactcatcaaattgataaaaattataaagtgtcaatatctagttgataagaatttgaaaaatgggggatgcatacactactgttggaggcataaattggtaccaccattctaaaatcaagtacggcaaaatgttatattaatattatttttagtcatcctccagttgtttgacatatttcataataataaaatatatacatgtatcaaaatagctcaatttaaattagaaaatgaatatacatgacctatctttaagaactagtytgtatgtttaccatttccatttgaacattttttattcatttctcttatagatcctatatatttaatgtgttcttgcttttgctgttaaaggcaagactggagacttctttaaattacagtgctttatcaacatgcatcattttagattc

SEQ ID NO: 693280 - DNA, 654 bp, Homo sapiens
gagagattcaagatgaaactctagctttctctttattaaatcagccttggcctccccttatttttatgtaggtattgatttccttgatttgaagcaaactttcctcttttgagaaaaataaatcacaactcattgctttaccatctctcccacttcttctaccctaaagatagctgacaaggctggcaataaaaaggtagaaaaagtaaagagtcttacaacgtagatgatttttgacccaggaagtacaagtttaatataattaaaagtgcaatgttgaaatcagcaagagtttgtatttttgaattattcaaccccattatgttctctatagaaaaccaaagaaaaataaataaccaaaagagaagctgcaaaagtgtttcattgagtacagygttcaatacctcgtcaaataggagttaaagatttagtgaaagttgaaagggtggttaacttgaaagaagatagttggaggcaatacaaatatgaattatgatgtttgcaggttttagaagaaagtcttggattttttcatcaaatgacagatgagagacgaagcattttttatttctgtaataaaaagtatgggtggctatactgtcacttaaatatttttaattgcgaagaaacatctcatcaagtaaaaagtagata

SEQ ID NO: 693281 - DNA, 654 bp, Homo sapiens
gagagattcaagatgaaactctagctttctctttattaaatcagccttggcctccccttatttttatgtaggtattgatttccttgatttgaagcaaactttcctcttttgagaaaaataaatcacaactcattgctttaccatctctcccacttcttctaccctaaagatagctgacaaggctggcaataaaaaggtagaaaaagtaaagagtcttacaacgtagatgatttttgacccaggaagtacaagtttaatataattaaaagtgcaatgttgaaatcagcaagagtttgtatttttgaattattcaaccccattatgttctctatagaaaaccaaagaaaaataaataaccaaaagagaagctgcaaaagtgtttcattgagtacagcgttcaatrcctcgtcaaataggagttaaagatttagtgaaagttgaaagggtggttaacttgaaagaagatagttggaggcaatacaaatatgaattatgatgtttgcaggttttagaagaaagtcttggattttttcatcaaatgacagatgagagacgaagcattttttatttctgtaataaaaagtatgggtggctatactgtcacttaaatatttttaattgcgaagaaacatctcatcaagtaaaaagtagata

SEQ ID NO: 693282 - DNA, 654 bp, Homo sapiens
gagagattcaagatgaaactctagctttctctttattaaatcagccttggcctccccttatttttatgtaggtattgatttccttgatttgaagcaaactttcctcttttgagaaaaataaatcacaactcattgctttaccatctctcccacttcttctaccctaaagatagctgacaaggctggcaataaaaaggtagaaaaagtaaagagtcttacaacgtagatgatttttgacccaggaagtacaagtttaatataattaaaagtgcaatgttgaaatcagcaagagtttgtatttttgaattattcaaccccattatgttctctatagaaaaccaaagaaaaataaataaccaaaagagaagctgcaaaagtgtttcattgagtacagcgttcaatayctcgtcaaataggagttaaagatttagtgaaagttgaaagggtggttaacttgaaagaagatagttggaggcaatacaaatatgaattatgatgtttgcaggttttagaagaaagtcttggattttttcatcaaatgacagatgagagacgaagcattttttatttctgtaataaaaagtatgggtggctatactgtcacttaaatatttttaattgcgaagaaacatctcatcaagtaaaaagtagata

SEQ ID NO: 693283 - DNA, 587 bp, Homo sapiens
ggaagaagacctagtttatttcaggaaggatgagagagggacctaccagggccccaggatgttaccacttggatttcctctaggttgaaatgacactgcctgcctctttaataattttcaaagactaaaaaagcagtaagctgaatgtatgaacttatctcagtagttctttctttctccctcccagcctcctccccgtttaccttcactttagtcctttcttctcagtctccctttgtttcctccttcttcttttctttaccttcttccctcccttcttatatttcatctttccctctctccccatcttctttcctttgccaaaagatgaaccttcatagggagaaagatttaaaaagtcactttggaaaaaactgtaattttgatgcaaacttcccaaggagaaagcagctaaagtatttaagacgttagttaatctagagagctacagatgggggaaagggcctttgcctttctgggcccstttcttcttgttctctcggatacttctagttgaagattctgctgctgtgagtccgagtttctgtgcatccagaaggcagagggggtgggtgcgtatgcacaga

SEQ ID NO: 693284 - DNA, 587 bp, Homo sapiens
ggaagaagacctagtttatttcaggaaggatgagagagggacctaccagggccccaggatgttaccacttggatttcctctaggttgaaatgacactgcctgcctctttaataattttcaaagactaaaaaagcagtaagctgaatgtatgaacttatctcagtagttctttctttctccctcccagcctcctccccgtttaccttcactttagtcctttcttctcagtctccctttgtttcctccttcttcttttctttaccttcttccctcccttcttatatttcatctttccctctctccccatcttctttcctttgccaaaagatgaaccttcatagggagaaagatttaaaaagtcactttggaaaaaactgtaattttgatgcaaacttcccaaggagaaagcagctaaagtatttaagacgttagttaatctagagagctacagatgggggaaagggcctttgcctttctgggcccgtttcttcttgttctctcrgatacttctagttgaagattctgctgctgtgagtccgagtttctgtgcatccagaaggcagagggggtgggtgcgtatgcacaga

SEQ ID NO: 693285 - DNA, 1633 bp, Homo sapiens
ataagaccaaataaggcagcatgttaggatctggcatcatatgtccctaatagtgtctagatttgttaatattggtaattcaagatagagttaagtaatgatatttatccagctaatggataaatcttcagcaggctccgattttgttgtatcatttaggtgacatctacataatccgatagcagatggctgatgagagcatctcagatagcttgcctgtgacaaacaagacaatatgtggattcagctaggtcaggattgtgtagaatcagccctagaagctgagaccaagacattgctgcataaacaggaggaaaaccactggtattctagcaggaggtctccaggggctgctggaccctccatagtcttaatgataaagcctgccttgtacacttaagcacatgactttttatggaagatgcatacccaagaatttaagtagtgaatttttttcccctcaattactgttggcaatygaatgtacagttgtcttgttctccctctgccctagtttcctagaactactgtaacaaataaccacagactgggtggtttaaaacagcagagatttatggaggctagaagcctgagactaagtggtgggcagggccatgccctctctgaaggctctcgggaagaatccttccttgcctctttctggcttctggtggcttcagacagtccttggcattccttggcttgaagatgcaccactccagtctctgcctctgttgtcacatggccttcttccctgtgactccatgttctctcccttcttatagcgacactagtgattggatttagggcccaccctgatctagtaggatctcatttcagtcctcttctaaaacctaagcaaagaccctgtttataaataacatcacgttctgaagttctaggtagacaggagttttggtggacactattcaacctactccaccctcttaattctgcttttaatttttattttttattctttatgagacagagtcttgctctgtcgcccaggctgcagtgcagtggcatgatctcagcttactgcaacctccacttgccaggttcaagcaattctcctgcctcagcctcccgagtagctgggattacaggtgtgcaccaccacacggggccaatttgtgtgtgtgtgtgtttgtgtgtgtgtgtgtgtgtgtgtgtgtgtgtgtatttttagtaaagataggatttcaccatgttgaccaggctgatcttaaattcttgacctcaaatgatccacccacctcagcctcccaaagtactgggattacaggcatgagccaccgtgaccggcctccgctttattttcttagtactccttccattcatcattcttcaataactattttaaagcttattaagaataaattttgttaggaatgcctatcaggcatatgagttatataaagtgctatattatttaactaaaccattaactttctgataaaatgacaaagaaatcattttttgcactaagatattcctaaattcatctttttatagaaaagttgaaagcccatctaagtatctaccagtggggaatagtttgatatagaaaatcaatgtgacatttcccatttactaaaaataattttcagaactatgccgatataatata

SEQ ID NO: 693286 - DNA, 665 bp, Homo sapiens
caccactgcagctggcaagcctggctttgcgcagtggctggaccccatgcttgctcactcacacacccctcactgctccatgcctggctcattcttggcaggtgtggaatcggggctggtagtatgagctgagttcagcctgccaggccaagttggtggaatgagcccagcaattccaaccaaaactcaggcaaaggtgmaaccagccacagaggtttctggctggagaagcaacaccccaaagatcttgtggcattgtcatcattttagagaagaggaaactatttcagagaatgtgatttggtcaagatcacactctaactctcaccttacctttaccctagtcttgacactgttcctaatataacctaagctcaaatcgtaacattaggtttaaatctcaccctcatctaatgccagatctcatccccaatttaacccagatcctagcttaactctaaacttaaccctaaacctagcctagctctggttctaaccctaaacgtagctctagtttcagttctaacctaactttaaccctaacagtaatcctatcctagttctaaacatacccttaacccttaattatagtcctaatcctagtcctggccttaacaccgctcatatgcctaacccctagccctaagcttaccctcaaagtcaca

SEQ ID NO: 693287 - DNA, 665 bp, Homo sapiens
caccactgcagctggcaagcctggctttgcgcagtggctggaccccatgcttgctcactcacacacccctcactgctccatgcctggctcattcttggcaggtgtggaatcggggctggtagtatgagctgagttcagcctgccaggccaagttggtggaatgagcccagcaattccaaccaaaactcaggcaaaggtgamaccagccacagaggtttctggctggagaagcaacaccccaaagatcttgtggcattgtcatcattttagagaagaggaaactatttcagagaatgtgatttggtcaagatcacactctaactctcaccttacctttaccctagtcttgacactgttcctaatataacctaagctcaaatcgtaacattaggtttaaatctcaccctcatctaatgccagatctcatccccaatttaacccagatcctagcttaactctaaacttaaccctaaacctagcctagctctggttctaaccctaaacgtagctctagtttcagttctaacctaactttaaccctaacagtaatcctatcctagttctaaacatacccttaacccttaattatagtcctaatcctagtcctggccttaacaccgctcatatgcctaacccctagccctaagcttaccctcaaagtcaca

SEQ ID NO: 693288 - DNA, 665 bp, Homo sapiens
caccactgcagctggcaagcctggctttgcgcagtggctggaccccatgcttgctcactcacacacccctcactgctccatgcctggctcattcttggcaggtgtggaatcggggctggtagtatgagctgagttcagcctgccaggccaagttggtggaatgagcccagcaattccaaccaaaactcaggcaaaggtgaaaccagccacagaggtttctggctggagaagcaacaccccaaagatcttgtgrcattgtcatcattttagagaagaggaaactatttcagagaatgtgatttggtcaagatcacactctaactctcaccttacctttaccctagtcttgacactgttcctaatataacctaagctcaaatcgtaacattaggtttaaatctcaccctcatctaatgccagatctcatccccaatttaacccagatcctagcttaactctaaacttaaccctaaacctagcctagctctggttctaaccctaaacgtagctctagtttcagttctaacctaactttaaccctaacagtaatcctatcctagttctaaacatacccttaacccttaattatagtcctaatcctagtcctggccttaacaccgctcatatgcctaacccctagccctaagcttaccctcaaagtcaca

SEQ ID NO: 693289 - DNA, 665 bp, Homo sapiens
caccactgcagctggcaagcctggctttgcgcagtggctggaccccatgcttgctcactcacacacccctcactgctccatgcctggctcattcttggcaggtgtggaatcggggctggtagtatgagctgagttcagcctgccaggccaagttggtggaatgagcccagcaattccaaccaaaactcaggcaaaggtgaaaccagccacagaggtttctggctggagaagcaacaccccaaagatcttgtggcattgtcatcattttagagaagaggaaactatttcagagaatgtgatttggtcaagatcacactctaactctcaccttacctttaccctagtcttgacactgttcctaatataacctaagctcaaatcgtaacattaggtttaaatctcaccctcayctaatgccagatctcatccccaatttaacccagatcctagcttaactctaaacttaaccctaaacctagcctagctctggttctaaccctaaacgtagctctagtttcagttctaacctaactttaaccctaacagtaatcctatcctagttctaaacatacccttaacccttaattatagtcctaatcctagtcctggccttaacaccgctcatatgcctaacccctagccctaagcttaccctcaaagtcaca

SEQ ID NO: 693290 - DNA, 653 bp, Homo sapiens
ctcaaattttagactgttctgataaataccctagattacatttaatgaaatgtagaacatgaataacttctaagaacttccacataaaagagtacgtgattctcgcttgtgaccaagggttttctgaatttatctttacagtggagccagctaggaatctcttcaaaattccaaagccctggttacactctagaccaaataaaccataatttgtggggctaggatggaggcatcaatatttttgaagctctccaggtgattctaatatgcaagtaactgtggaaacccactattctaacatataatatctttatctggcatttagtttccttatttgtaaaatagaagtaataacatctacagaagggtggacttcaggattaaatgagagatgtgaaaacaaatttctaagtatcacataacagttggctcaatgaaaaatagtttaattctacaaacttaattttctttcagtgaatactttaaataatttgaagtcatttagacaggcttgagttttatatctttcaatttaaaaataatttatatcctcttcttaaaatcttcaatgaatgaaaaatrttagtgcccataatcatattgaaaattccgatttttaaaagtttgctcgtatgtccttttgtctctaagaa

SEQ ID NO: 693291 - DNA, 628 bp, Homo sapiens
gctcacatttaagtcctgaaaaatgagaggacttaatccagtctctatcagatctaaatcagaacgtttttccccttttgccattttaarttacctcttagctcagccccagactgagtaattcagagttaatgggatatgaaagtcatggtccatggcatgattgtgggtacctagccagagggaagcaagatttattttcttggaacccaactgggttgaaaagggtgataaatcagcagggctattgctagctccccttctgctgcaagtttcattccagcttatcagaataatcatcttagttctgagacaggagataaacagccaaatccagagtcccactatgtggtaagagggagagatgtctttctgaagtctcttttcctaggtatctttggatgggggtagggaacatgttatcatcaaactgcagtccagtgaaaagcatcagtctgtatttgcccaaggcacaggcttggattttgtgtccatgaacacagctggtttgaggtttctggtctacttggggatgctgtgtaaaaggtccttggaattgcatgctgattcactgtgtcctgtgaactgattgcagggacacacttctccatgacttggccatttctct

SEQ ID NO: 693292 - DNA, 628 bp, Homo sapiens
gctcacatttaagtcctgaaaaatgagaggacttaatccagtctctatcagatctaaatcagaacgtttttccccttttgccattttaaattacctcttagctcagccccagactgagtaattcagagttaatgggatatgaaagtcatggtccatggcatgattgtgggtacctagccagagggaagcaagatttattttcttggaacccaactgggttgaaaagggtgataaatcagcagggctattgctagctccccttctgctgcaagtttcattccagcttatcagaataatcatcttagttctgagacaggagataaacagccaaatccagagtcccactatgtggtaagagggagagatgtctttctgaagtctcttttcctagrtatctttggatgggggtagggaacatgttatcatcaaactgcagtccagtgaaaagcatcagtctgtatttgcccaaggcacaggcttggattttgtgtccatgaacacagctggtttgaggtttctggtctacttggggatgctgtgtaaaaggtccttggaattgcatgctgattcactgtgtcctgtgaactgattgcagggacacacttctccatgacttggccatttctct

SEQ ID NO: 693293 - DNA, 600 bp, Homo sapiens
tgggttgatgggtgcagcaaamccccatggcacatgtatagctatgtaacaaacctatacgttctgcacatgtatcccagaacttaaagtatagtaattaaaaaaaatagaaaaaacaagaaagaaaagtaattttctatagtttcacaacccaaagttaaccactattgacattttgatgtaggtatccatgcatgtaggtattcacacatgcacacatatgtactatacaagagcatgtacataatatacatatgcatatatacacataggtacatatgcatgatatatgtataatgtataggtgtatatatatcacacatacaatatacattggtatataaaatatagattataaataatatacactataaatagtatatttgtaatgtaaataggcaatattacacatgagtatatataacacatataatttacagatatctgtgtatactattcataaggatataatatacacttaagtatgtatgtataatatacaatatatagatatgtatcatacacatctaagtatgtaagtataataagcattaagtagattatatatctatgtactacataggcatatataatatatag

SEQ ID NO: 693294 - DNA, 600 bp, Homo sapiens
tgggttgatgggtgcagcaaacccccatggcacatgtatagctatgtaacaaacctatacgttctgcacatgtatcccagaacttaaagtatagtaattaaaaaaaatagaaaaaacaagaaagaaaagtaattttctatagtttcacaacccaaagttaaccactattgacattttgatgtaggtatccatgcatgtaggtattcacacatgcacacatatgtactatacaagagcatgtacataatatacatatgcatatatacacataggtacatatgcatgatatatgtataatgtataggtgtatatatatyacacatacaatatacattggtatataaaatatagattataaataatatacactataaatagtatatttgtaatgtaaataggcaatattacacatgagtatatataacacatataatttacagatatctgtgtatactattcataaggatataatatacacttaagtatgtatgtataatatacaatatatagatatgtatcatacacatctaagtatgtaagtataataagcattaagtagattatatatctatgtactacataggcatatataatatatag

SEQ ID NO: 693295 - DNA, 600 bp, Homo sapiens
tgggttgatgggtgcagcaaacccccatggcacatgtatagctatgtaacaaacctatacgttctgcacatgtatcccagaacttaaagtatagtaattaaaaaaaatagaaaaaacaagaaagaaaagtaattttctatagtttcacaacccaaagttaaccactattgacattttgatgtaggtatccatgcatgtaggtattcacacatgcacacatatgtactatacaagagcatgtacataatatacatatgcatatatacacataggtacatatgcatgatatatgtataatgtataggtgtatatatatcacacatacaatatacattggtatataaaatatagattataaataatatacactataaatagtatatttgtaatgtaaataggcaatattayacatgagtatatataacacatataatttacagatatctgtgtatactattcataaggatataatatacacttaagtatgtatgtataatatacaatatatagatatgtatcatacacatctaagtatgtaagtataataagcattaagtagattatatatctatgtactacataggcatatataatatatag

SEQ ID NO: 693296 - DNA, 1737 bp, Homo sapiens
gttcagcacaacacccagcaatttcaaatgtagacgacgcctctcagagcaactactgttgtttcatatctttctatgttccaataaattctgttttgttcctgcatcttgagttggctctaggctcaccatgcaggccccctcagtgtctagctctttaggttgtgggatgtctggaaggggatatcagacacaaacacttctatgccattacttgtgggctccccgaatgcagcccaatgtcatctctatatgtggaacgcccaacccctctattgtggtgaattttttctgatccttcaagagtcagctctagcacccactctgctgtccagtggttaaactcactccttgtgaaatctggcatacacccagtacacaggacctaccacctcatattgagcatcttacttatttgtctgtaaacactctaagaactgtaaagcctggaactgtgttgtacttagctgcacagccgtaacaaagggcacatrggaaatctttgatggatggttttcttgttgagtgaatacccttttcaccttgaccatgactcaactatatctatcttgccgaaaactttagtcaaaaactcttacaggtgactgactagtagtatatagcatcaaaatggaatacatatatatatatatatatatatatatatatatatatatatatatatgatgttatattttctataaaaaccttagattctaaaagaaaccatgcaattccaatgtttgtaatttggctaaataagactgtggctatttagcatgttatgaaaataaactcagagactttcaacattattgtacttacatgtataaaagggaaactatctctgatagagtaggttgttgttctgaaatgatcactcatttctgttcacttccataggagatgacacttctctgctccatttatgttgatcttggccatgtgacttgctttggcctcattgtgggcaaaattaacacaagttgagcttaactatgtaactggctttggccagagtaatattatcagaagcaatgaagcggaggcttgaaatgtgctgtcatggttgaatgtgttctcatgtgcttgggtcactgccaggaggacctgggctcagaggggacatgtgagatgatgatacggtttggctgtgtcccagaccaagtctttctagaattgtagctcccataattcccacgtgttgtgggaggggcttgatgggaagtaactgaatcaggggggagggtctttcctgtgccattttcatgttagtgaacaagtctcacaagagctgatggttttacaatgggaagttcccctccttacgcccccttgcctgttgccatgtaagatgtgactttgctcttcctttgccttctgccatgagtgtgaggcctccccagccatgtagaatccattaaacctttttcctttataaattacccattcttgggtatgtctttattagcagcatgagaacagactaataaagacactgtgtaacagagccaccttaactaacctgcccagctgagccaaatctagataagcactcccagctgtcccaaatgcaatgatagacagtttttagctgaagccactatgctttggggtgtttgttatgcattgatgttaaatgtgcacatttcttatatgaacttttctttatattgtgcctccctcaaagccatgcacaaccagacaataaattatttctgatcaaggcactaaaca

SEQ ID NO: 693297 - DNA, 1203 bp, Homo sapiens
tgcatatattttcaaagcacatggaaaatatatttaataatcttccttgcttcagctcaaattatgacttcatttcccagttgtcttacaagaattgatgctcggatgcgctctcctgtggaatgtgtttggggaacatgttgaagcacggaactatttccattgtctagccacacatgggcaaggaacttgkggggggtcactctgtagcatacaacacaaagccccaaaatattattcaacactagtcgaggtttaatgttgaattgctactacttcaaacaggtcaggttttgacagctaatgaattatagattttaattgaaattaagggaaaaaatatacaattaaaagcaataagacagtttaggaagtgatgtgtgccaagggtagaatggacggagtggtctgccctccgttcaagtaataaaggaatgcattatctgaaagaatttttcttaaatggcaactaaaagttggttgtgtttgctgtcattgtttcctggcaattctttatgtcagtagtaaaataatcttcctccccaaaaaatcttttgttggtttcacttttatacaatagctgaggttactgttcagttttcattgtatacatagtaaaatataattcatatatatatatataattcaaagcatatacatgttttaaatttgcacatttttattacttatttttaaataatcattgcattctacgtggaagtgcttttagagaactcctacttatagtgaactcccaacatagaactgacatatgcacattcaacaccatgtttgtttccagatcacattagtaatggattacttgaattcactcatttggtcaaaggttgtatctctagcctctgcggtattacatatacaagagtttaaacaatagattggaaataagcaaggatagtacgtacagccatctttaccatctaaagatgaacaaccggaacttgagtcacttcgagtctgtcattctgtaatccagggtcctcacgtgtttaggtacacactgtgaaaaagggcccacttgtaactgtcacaccttgagttcttgttgtttcaaaaagttataggaagaagttcagccccagcaaaacaaaactgggatggacgcagcaatgctgatgcttgagttggattgaagttgaataactcccctccttagcatactaaaaccctgcccaggaagga

SEQ ID NO: 693298 - DNA, 1203 bp, Homo sapiens
tgcatatattttcaaagcacatggaaaatatatttaataatcttccttgcttcagctcaaattatgacttcatttcccagttgtcttacaagaattgatgctcggatgcgctctcctgtggaatgtgtttggggaacatgttgaagcacggaactatttccattgtctagccacacatgggcaaggaacttgtggggggtcactctgtagcatacaacacaaagccccaaaatattattcaacactagtcgaggtttaatgttgaattgctactacttcaaacaggtcaggttttgacrgctaatgaattatagattttaattgaaattaagggaaaaaatatacaattaaaagcaataagacagtttaggaagtgatgtgtgccaagggtagaatggacggagtggtctgccctccgttcaagtaataaaggaatgcattatctgaaagaatttttcttaaatggcaactaaaagttggttgtgtttgctgtcattgtttcctggcaattctttatgtcagtagtaaaataatcttcctccccaaaaaatcttttgttggtttcacttttatacaatagctgaggttactgttcagttttcattgtatacatagtaaaatataattcatatatatatatataattcaaagcatatacatgttttaaatttgcacatttttattacttatttttaaataatcattgcattctacgtggaagtgcttttagagaactcctacttatagtgaactcccaacatagaactgacatatgcacattcaacaccatgtttgtttccagatcacattagtaatggattacttgaattcactcatttggtcaaaggttgtatctctagcctctgcggtattacatatacaagagtttaaacaatagattggaaataagcaaggatagtacgtacagccatctttaccatctaaagatgaacaaccggaacttgagtcacttcgagtctgtcattctgtaatccagggtcctcacgtgtttaggtacacactgtgaaaaagggcccacttgtaactgtcacaccttgagttcttgttgtttcaaaaagttataggaagaagttcagccccagcaaaacaaaactgggatggacgcagcaatgctgatgcttgagttggattgaagttgaataactcccctccttagcatactaaaaccctgcccaggaagga

SEQ ID NO: 693299 - DNA, 513 bp, Homo sapiens
ttgttttaacgactattgtcccttccataccgattacaggcctctgttgattccccagctgtgtctctctttaccatcttattgaatttggactcgacttctaactatcagcctttrtatcttttctgttgaagtgatttttccatggccagagcctgcttaaggcctaacaggctggaagtgcaagagagttgatgtctcctggaaacaaccatcaaccaatgactcaagaaagttggtggataaatatcccagctcccttgcacctccagtggggaaactctgaggcttgtatttgatcatgcctcccagtttccagtgggattgactctggttgcccacagtagtaatggcttgataacatatcctttattgactacatcacttcccttcctcccttcgacatacttctaatgctgttccctgggaacttcttcaaaataaacgattttcattcaagtccttgactcaggacctacatgtgatgaaactgattaagaataataaacactt

SEQ ID NO: 693300 - DNA, 674 bp, Homo sapiens
atcctcctgactcagcctcccaaagcactgcaattataggcatgagccatcatgcccagtctgataaattcttttaaagattctgtagtagagtggatagaatagggaatcagaaagaaggcaatatattggccaggtgtggtgactcatgcctgtaataattcactttaggattaggcagcaggcccaaggtcagccaagatttcccgaagcaggggatttgctctcctgcagagcttgcaacctatagataaagcaccccagaaacaaaattctctgctcctgtagcctttgttgtaacaaataattttttatttatttccagttgcaagtcaccaatgttctgtctcagcctctgactcaggccactgttaaactagaacatgctaaatctgttgcttccagagccactgtcctccagaagacatccttcacccctgtagggtaagtcctgatcatattttggyggggcgctgacctctttgttttggaaagttagcctgcagccagtgtaacagattaatacattccagttaggtaaatttgatctactggtatcgaaagcctacagtcgaatgtaagaaaatgatttttaaaatgaagattatttggttttactgtttcattctctgtttctagttggctctgtcttgtcattgtgacataagtagcta

SEQ ID NO: 693301 - DNA, 790 bp, Homo sapiens
ttgctgtttaattctctgcctagatgaagagttggtcttacttacgagtaaatgtaaaatgtgagtataaaataaagccaggtctgagctctgtaaccatttggctggtttatcccctggccatcttaccctaaaatcccaggagatagctgtgaaaagaagttttcctcatcaagtctgccttttgggaaaatgactttttaaaacccagtttcagggcagaaaactaaattgaaacagtgtccaggaaaaaaatayagcattaaaaaaagacaaagctgaaagtacccttctttcttttgtgtctcctacctgccttgtctcgattttgctcacgtgtgctgctggcatcaatcctgtaattatttctccttgcggttctgccagcccggctctcctgtgtgcctgcagaggccacacgtgagctcctctggtgcctgactttgttggagttgagagccttaggtccttgaagtgaaagcccagaggtacaagcatctgtacacagcatttccccagatcctgctggaagtttattctgcacttttctcagtccaggctttatcagtccaatttgcccccaggttgcagacagttctccacatctgtctgtccacaacagaagtgttactatgggagagggtggttgaggcaatgaagtgaagtatatattttctgcctgttctcagagatatactgatcctctctgaagactaactctatatgcctctttcagggtgacatacccagccaaagccaagggcacattcatcgcagacagccaccagaa

SEQ ID NO: 693302 - DNA, 626 bp, Homo sapiens
atggtcaggatgtcatgttctaagctacagaagggccaagtgttggttggcagagctggagtctgggagattgatgatgagcattatttaaactttgctctttgttcatctaattgaaatttacactgtgtttttggccttgcactgtgagaggtgtgcctggaattacctcatctccttatgttgtcacataccactttcttagttattattgagtttgttttgttatttgtatttaagttgtcatcagcttaattatgaactagctgtctcacattcttttgtaaaatgagatggggcatacataaatagacttgggagataaatgattattcccttataaatgggatcttagagcgggagagtacyttagtctctctgttgtcaccagttaggaactgtaactgtgaactgaaaccttcagtaattctgtgtttgtctccattttctttcagaacagcacattagttccagaagaaagatggaaattctgaaaactgaatgtcaagaaaaggagtcaagaacaattcacagtatgagaagaaaaatggaaaaaaaaaactttatttaaaaaagaaaaaagtccagattgtagttatacttttgcttgtttttcagtttcccca

SEQ ID NO: 693303 - DNA, 853 bp, Homo sapiens
aaaaattagctaggtgtggtggcatgtgcctgtagtcctagctactcaggaggctgaggcaagatgatcccttaagcccaggagtttaagactgcagagtttaagctatgatggcaccactgcactccagcttgactgacagagagaacttgtctctagaagaaacaaaaacacaacttacggaattcattttttaaaattatttattatttttaatttttattttttttgacacagagtctcactttgtcgctcaggctgaagtgcagtggtgcaatctcagctcactgcaacctctctgcctcctgggttcacgtgattctcatgcctcagccttctgagtagctgggattacaggtgcctgccaccacgcccggctaatttttatatttttagtagagacagggtttcgtcatgttggccaggctggtctcaaactcctgacctcaggtgatctgcccactttggcctcccgaagtgtggggatcacaggcatgagccacggcgcccagccaataaaacaattttggaaggacaccccaaaccaataaagtttgaactctgtcctgtatgcatatatttctttaataaaaaatgagttcattaaaaacaaagaaaccctctaggagcagaatggttgggttgtgtggtagattgtgtaactgacttcttaagatgctgcctggccacgtgttgtgtctcaygcctgtattcccattgcctttgggaggctaaggcgaaaggattgcctgataccaagagtttgagacaagcctgggtaacatagcaaaatccgatctctacaaaaaattagctgggggtggtggcatgtgcctgtagtcccagttactca

SEQ ID NO: 693304 - DNA, 893 bp, Homo sapiens
tgctcccccaaattaggattactactgggatagtaataatttgtctttggatatagtgtttttcaaaccttggcatgcagtagaattacttggaaggcctgttaaaatacagattgatgggacccatcttcagtgtttctgatgtagcaagtttggggtagaacctgagaatttgcatttctgacaatctcccagtcaaggctgagggaccacacttagagaaccactgcttttgtcaaagggttatgatgctcatcctatgttgagaagtgctattttggctgaatactctgagctgtttagtgcagagagaagcacaggaaaatgaagggccctaatgctcctcctggtgcatatttttaccccatgtgccttcctgctagggctagaacatatggttggaggaaccatgcagctgggctctttctgcacgtcccatgcattccaggatgagctcagattccattctaattatcgaaggcagagtgtggttgcaggcacccaacagtgctgctttgtgggaggtgttgctgtttgtgttagatcttgagaaactgaaatgggaatgttgacaagcgactgcttgggcaaktctatctatattatcagttgtacaaacagagtaaggatggggcgcagccttgacaggtggaggtatgaatgaatacaggttaagccaaggctggcctttttttttttttcaagccaaactatggaagaactgttttacattttggatgcccagcaacatttcccttgccaatggaacctgtgttttctttctttttttctccatctctgatcaactccttcattcaacctgcagctgtatggccaattcttgcctggccagaatgggccttggtgttggcatatggtggttgagccttggc

SEQ ID NO: 693305 - DNA, 1538 bp, Homo sapiens
tgtcatccaggctggagtgcagtggcacaatctcggctcactgcaatctccaccttcccggttcaagcaattcgtgcctcgacctcccaagtagctgggattacaggcatgcaccaccatgcacagctaatttttgtatatttagtagagatgacgtatcgcccttggccaggctggtctccacctcctggcctcaagcaatttgcccacctaagcctcccaaagtgttgggattacaggcatgagccaccgtgcctggctagaatttctaatgaatgagtaagacgtcgtaagcagtgctgtttcactcatttcatttcccatattctcacaaactcagcccaggagagagtgaaaactggaatatctaagtggaagggctctgagggaccatcaagccctatttctcaatttatagatgggaatcataaggcccagagaagtgaggatgctgactaaatgtcacccagcaagtgagtgtcagaaataagattaagagggagctgagcacacaagttcttgccagaggacaccagggcatgttttgatgttggtgtggatataatattttcttgtagagttgaaggtagagaggaagggtgagtctaaaggaatgaagtaatgtctttagtggagacagaggctgaacacccacaaagtgaaagtcagtaaatttctttttttttttttgaaacggagtctcactctgtcacccaggctggagtgcagtggcgcaaacttggctcaccaaagtcagtaaatttctaaatggtacccagggtccccaattaaggctgcattttttcgtaaattttattgaaaataaattaactatctttctggttgcttcattccattctgtcttgcctaattttcaggcccatccaagcatctcactttccaagcaggtgaaataaaatttatgtctttgggacttgggataaatcatggttttggccccttctctccaataatttcttggagaaggctgggtaaggacccacctggggttttgcctctcctttcttcatcctttctcattgagggcatggtgccctacctctgcctccaggccaattctctcccaggaacaatcctgtgcttagaacaggggactccaacgagaaccaacaagatcagcctctacctggcacctcctgctttttcattagcccaagatctgtcacatggactgattctctgtcactggcttcctatgttgttccctctgcctctaactctattactaagtyacatgtttgctcccccaagtaagctctgaactccattaaacaggtctgtgtctagaacgcagtgcttaaaacatgaataggccccaaataaacactcagtacatcttgctggaagagcaaggtaggtgggggggattggtaggtgtgtgaataggtaggtagctatgtggatggatgggtggctggtagagtgtgataagtgggaagatggttgagcagggagagggattagtgaggaaagcatggatgtttgggtacatgaatgcatggattatggatgggtgg

SEQ ID NO: 693306 - DNA, 1077 bp, Homo sapiens
tgcctgtaatcccagctacttggggggctgaggcaagagaactgcttaaacctgggaggcggaggttgcagtgagccgagatcatgccactgcactccagcctgggcaacagagtgggactccatctcaaaaaaaataaataaataaaaataaagaaacagatatgactaagcagatcacaaaaaaatccaagtcaatatacatgagggtgtgggtggtactggcatggaggccagagatggtgctcagcatcctaggtgcacagaacagcctcacaatacagaattatctggccttaaatgtcagtggtcctgaggttgagaaaaacctgcttcgaatcactccagacatttcaaaagcaaaaagacttggaaatgcttgtttcaattaaaactctgaaacagatgccaatccttttataaagccatacattttgcccaaaggaagaactaattgcctctgaagtcacaaataattttaccagatttcatattttgatgtacaattcacaagtgtgggctgaaacacatcatttattatctacatttacaaaatcctggcctgcgtgaagggttgttctgactacagtaggaaacatgagccttggaattaaattaggaaaaaaatgccctttccctcccatgcaccccagcactctgggtggggtggaaaggcagagtgaatgattcacgctaaatgtcctccagttataaaacctcagaaacaacctgtatgttcaaagtgccgcaccttgcacaactcctatggtgccatgcacagatgagcagagcatggccagatggtctaggatgggtcaggatgtgttggtaaaaatgctgttttgaagggttattcactaacacagaaacatattcagaatacaaggctatggaccaggcatggtgcctcatgcctattatcccagcattttgggaggctgaggcaggcagatcgtttgagcccargagtttgagactagcctgggtaacacagcaagacatcatctatactaggtgtatagctaggtgtggtggcgcacacttgtactcctagctactcaggaggctgaggcagcgg

SEQ ID NO: 693307 - DNA, 655 bp, Homo sapiens
aaaaaaaaaagtcrtctgtccatcctgtgcctccccaggctttcagctatttccccttaaagccaagagcgtgtggtaagagattgggtcagagtccctgcagaccccagtgggaacagaggggcaggcacaagcagcccctctcctctcagcatccaggcccttgtgcacctggcccccacccggagctgtctctagcagcctgctcctggggagctgctgtccccgctctgcagggctcccgatctgccaatgcttggaggtggaggccctccaaccacttccttgctccccttgccctggccaggcatggaccacataccccttctggtgctgtggtcttgccagctctcacttcacttccactggactctcctgcgggccaccagaggtcccaaggcccagcagcttcagggaattaggggacagttttggctctgggtctccagcgctatcgtgtagaacccactgcagtgtgggccacgtcgtatgtctgccctgtccagttgggagccttgagggcttggaacgtggcctgcacggccgaggggctgcaaccaggtcctgcatggtggcggccatcttccatgtgaacactccacatggaaagggttcgtgcttgggcttccatgtgcagaacctcgctccgtggggc

SEQ ID NO: 693308 - DNA, 655 bp, Homo sapiens
aaaaaaaaaagtcgtctgtccatcctgtgcctccccaggctttcagctatttccccttaaagccaagagcgtgtggtaagagattgggtcagagtccctgcagaccccagtgggaacagaggggcaggcacaagcagcccctctcctctcagcatccaggcccttgtgcacctggcccccacccggagctgtctctagcagcctgctcctggggagctgctgtccccgctctgcagggctcccgatctgccartgcttggaggtggaggccctccaaccacttccttgctccccttgccctggccaggcatggaccacataccccttctggtgctgtggtcttgccagctctcacttcacttccactggactctcctgcgggccaccagaggtcccaaggcccagcagcttcagggaattaggggacagttttggctctgggtctccagcgctatcgtgtagaacccactgcagtgtgggccacgtcgtatgtctgccctgtccagttgggagccttgagggcttggaacgtggcctgcacggccgaggggctgcaaccaggtcctgcatggtggcggccatcttccatgtgaacactccacatggaaagggttcgtgcttgggcttccatgtgcagaacctcgctccgtggggc

SEQ ID NO: 693309 - DNA, 655 bp, Homo sapiens
aaaaaaaaaagtcgtctgtccatcctgtgcctccccaggctttcagctatttccccttaaagccaagagcgtgtggtaagagattgggtcagagtccctgcagaccccagtgggaacagaggggcaggcacaagcagcccctctcctctcagcatccaggcccttgtgcacctggcccccacccggagctgtctctagcagcctgctcctggggagctgctgtccccgctctgcagggctcccgatctgccaatgcttggaggtggaggccctccraccacttccttgctccccttgccctggccaggcatggaccacataccccttctggtgctgtggtcttgccagctctcacttcacttccactggactctcctgcgggccaccagaggtcccaaggcccagcagcttcagggaattaggggacagttttggctctgggtctccagcgctatcgtgtagaacccactgcagtgtgggccacgtcgtatgtctgccctgtccagttgggagccttgagggcttggaacgtggcctgcacggccgaggggctgcaaccaggtcctgcatggtggcggccatcttccatgtgaacactccacatggaaagggttcgtgcttgggcttccatgtgcagaacctcgctccgtggggc

SEQ ID NO: 693310 - DNA, 655 bp, Homo sapiens
aaaaaaaaaagtcgtctgtccatcctgtgcctccccaggctttcagctatttccccttaaagccaagagcgtgtggtaagagattgggtcagagtccctgcagaccccagtgggaacagaggggcaggcacaagcagcccctctcctctcagcatccaggcccttgtgcacctggcccccacccggagctgtctctagcagcctgctcctggggagctgctgtccccgctctgcagggctcccgatctgccaatgcttggaggtggaggccctccaaccacttccttgctccccttgccctggccaggcrtggaccacataccccttctggtgctgtggtcttgccagctctcacttcacttccactggactctcctgcgggccaccagaggtcccaaggcccagcagcttcagggaattaggggacagttttggctctgggtctccagcgctatcgtgtagaacccactgcagtgtgggccacgtcgtatgtctgccctgtccagttgggagccttgagggcttggaacgtggcctgcacggccgaggggctgcaaccaggtcctgcatggtggcggccatcttccatgtgaacactccacatggaaagggttcgtgcttgggcttccatgtgcagaacctcgctccgtggggc

SEQ ID NO: 693311 - DNA, 655 bp, Homo sapiens
aaaaaaaaaagtcgtctgtccatcctgtgcctccccaggctttcagctatttccccttaaagccaagagcgtgtggtaagagattgggtcagagtccctgcagaccccagtgggaacagaggggcaggcacaagcagcccctctcctctcagcatccaggcccttgtgcacctggcccccacccggagctgtctctagcagcctgctcctggggagctgctgtccccgctctgcagggctcccgatctgccaatgcttggaggtggaggccctccaaccacttccttgctccccttgccctggccaggcatggaccacataccccttctggtgctgtggtcttgccagctctcacttcacttccactggactctcctgcgggccaccagaggtcccaaggcccagcagcttcagggaattaggggacagttttggctctgggtctccagcgctatcgtgtagaacccactgcagtgygggccacgtcgtatgtctgccctgtccagttgggagccttgagggcttggaacgtggcctgcacggccgaggggctgcaaccaggtcctgcatggtggcggccatcttccatgtgaacactccacatggaaagggttcgtgcttgggcttccatgtgcagaacctcgctccgtggggc

SEQ ID NO: 693312 - DNA, 638 bp, Homo sapiens
cagatgggcaggtggtattattcacggagggaagcaggctcccaaaaggaaggttagttcagttttggatatgttgactaaagataccttaagatacttgaaagtcaacatttatagacatgtcaaagtggaaagtaatcaaggaatgtagtgatgatggccggctcagtgaggtgtcaacagaaacggtgaacacagacacaggtttgccttctttcccaaatgctttcaaagaaccctctgttgacacctcatcccccacaaggcttagctgcaatcctagacattgaaaatgtagagaaaatttccaaccttgagcatgaaggaagggggcaattttgaaaagaaccctatttaatgttcaagcttgcagcaagttaccrtatttaaagggagaaaatatgacttcccaaattatgaaaaacatcttgagtgtcatttaaaaactgtaatacattctctacccccaacaacattttagaactgcagaaattagtataaatgttgctctattttatagggaggtgagaagatagggcaatatcaagactttattaaattctggacaaattggggaggatgttttccgctatttgaaagaagtcactgatctttttttcccccttttcttttgcttt

SEQ ID NO: 693313 - DNA, 499 bp, Homo sapiens
atatatatatatwtatatatatatatatatatatataatattttgtgtgtgtgtgtgtgttgctttaaagtcaggcaaagctactgagaaatgtgaggttatttcataattgtgaaaaaattaactgctggatatgtgtatagatgtatctgtgaatcgatgaataaggaagaaaaagtgagaggatacaaataaggaaatgaacatcacttatacatttacatggggacttgactggaagagagttgctggggatgatgaattttttgattagacatctttgatttgtttcacatgtcataaatatataataactctaacttaaaaatataataaagacaggactcaggttaggtgtaatcttctatgtatgtgcacagtacaggtctggaagggccatgccaaattgccaattttagaacctcttaggaggagagtggtattaggaaaagagggtaaaagagagtaagctttttcttgtacatatttctgtatttat

SEQ ID NO: 693314 - DNA, 499 bp, Homo sapiens
atatatatatatatatatatatatatatatatatataatattttgtgtgtgtgtgtgtgttgctttaaagtcaggcaaagctactgagaaatgtgaggttatttcataattgtgaaaaaattaactgctggatatgtgtatagatgtatctgtgaatcgatgaataaggaagaaaaagtgagaggatacaaataaggaaatgaacatcacttatacatttacatggggacttgactggaagagagttgctggggatgatgaattttttgattagacatctttgatttgtttcacatgtcataaatatataataactctaacttaaaaatataataaagacaggactcaggttaggtgtaatcttctatgtaygtgcacagtacaggtctggaagggccatgccaaattgccaattttagaacctcttaggaggagagtggtattaggaaaagagggtaaaagagagtaagctttttcttgtacatatttctgtatttat

SEQ ID NO: 693315 - DNA, 499 bp, Homo sapiens
atatatatatatatatatatatatatatatatatataatattttgtgtgtgtgtgtgtgttgctttaaagtcaggcaaagctactgagaaatgtgaggttatttcataattgtgaaaaaattaactgctggatatgtgtatagatgtatctgtgaatcgatgaataaggaagaaaaagtgagaggatacaaataaggaaatgaacatcacttatacatttacatggggacttgactggaagagagttgctggggatgatgaattttttgattagacatctttgatttgtttcacatgtcataaatatataataactctaacttaaaaatataataaagacaggactcaggttaggtgtaatcttctatgtatgtgyacagtacaggtctggaagggccatgccaaattgccaattttagaacctcttaggaggagagtggtattaggaaaagagggtaaaagagagtaagctttttcttgtacatatttctgtatttat

SEQ ID NO: 693316 - DNA, 607 bp, Homo sapiens
agtttgtgtgtgaccctgagcaagtcactaaggtctctgggtcacactttcttcaaagacctgtacagtgagaccatgggagtcaatcattgttatatcttttcactgtggtctcctcttctttttttttttttttttttttttttttttttagacagagtctcgctctgtcgtccaggctggagtgcagtgatgtgatctcggctcactgcaagctccgcctcccaggttcacgccattctcctgcctcagcctccccagtagctgggattacaggygcccgccaccacacccggcaattttttgtatttttagtagagatggggtttcaccgtgttagctaggatggtctcaacctccagacctcgtgatccacccacttcggcctcccaaagtgctgggattacaggtgtgagccaccacgcccggcctgctgtggtctctaatgagccagtttaatgtttcttgaaccaacctttgctgtttaacacttgcttatcatgtttttaacagggatttctgacctctttgtagaagatttatagttttttgttttgttttgtgttttttgttttgttttgttttgttttttgagacagggtcttgc

SEQ ID NO: 693317 - DNA, 1753 bp, Homo sapiens
cctgaatgtacagtggaattttccagaggcttcatgatatataatgtttaaaaaattgaatacaaaagcagctatgagaatccagctgttctctgttaagcctgccatttagttaaagaaatttgcaaaaaaaaatttatatctaaaacaatgccactcatactaatgttatttttgttcttggaaagtacagttatttttcataaatacatgttgtatgtgttaagatgcaataggttttttagtttctaagtgaattaatgcatacatttttgtaagtttctcattgttagcttccaaatcagtaaaaaaaaaactatagatataacccacataagcaagtgctctttggcatctcaataatttttaaaagtgtaaaggggtcttgagccccaaaagattgagaactgctggcctagagtgcacttcccctctaggattccaggtctgtcccttaagagaaaacttcagactgacccaaatcacaggggagggagcctgaggctgtggactcaagtaaagatgaggctgagggccagaaaaatccagagcagctgtgccctgtgggtggcaccccaggcctctctgctgcttggaacccccatatccagagccccgtgggtccagcaaccacagacctggtaccgcccatgggtgagttccaagggccaagcaaccagctggacacaggatcccctgtgcactctggctgggagtcacctgtgttgttttgggaattcatcctcacaagacaatgagttagaacaacctaycacagctagacctggactggtcgggcagcagggtgtcccttcccctctctgggcctctgtttacctggctataaaatggaagatgatactgctccctctcacccttgggcaaagtcatcgggcaactaataaaagactgtgaagctctaactcacctctacatcacctcatccttaggaccatgcctgtagccggtgacataggtgataggcagctggcgttcatgctcttgcagggaggtgctcacccagttggaaggcaagatgctctagtactgtcatcagcagaccttgtccttgcccaccttatgtgggccagagctgtgtggcaagcctggaggtaagaggtggcctcatccctgtcacctgtgtcctattgtggcctcgtctgtctttccatacatcacacattgttagcacctacgagcggctctgaagctgcaaagacttcagatctcactgtgtcactgctttggatgctcaggaatcacctcacttatgatcccctcttcattcatttcttccattctgcattcattaattcctgtcaaaactcattcagcaaatacttcttcatgctcattaaagggagaatcactgtggaacctattgagatgtcagcggttctaacacttttgctatcaacttctcgatgtcatctgattctagatcctccccttggttcagttcggctcactcactctgtgatgaggatagtgtttttgaaatattttcagtcatatttctggtaaattatgttgacctgaggttccccacccactgaagccaagagtctctgtgcttccgggacagggcagaggagactaattataatgggtcatcatctagcactgactgccctatcaggttttttggtttctgttttgttttgttttgtccttcataagacaatgttgtttttaaagctaggctttgccaagaaagcgtttagtaaactctttaagtttccattaactatca

SEQ ID NO: 693318 - DNA, 1224 bp, Homo sapiens
atagccagtctccctcatttgagcataagctctcagaagataggcactttacccctacacagtgcttggttcataataggcacttggtaagtctttctcaaatgtatgaatagggcygggcatcatggctcacatctgtaatcccagcactttgggaggccaaggcaggagaattgcttgagctcaggagtttcagaccagcctgggcaacatggtgaaacctcatctctacaaaaaaatacaaaaattaccctggcatggtggcacacacctgtagtctcagctacttggcaggctgaggtgggaggaccacttgagaccaggaggtggaggctgcagtgagccgatattgcaccactgcattccaacctgacaatgtgagactctgtctcaataaaaaaacccaaaacagctacaagaaaacaaacaaatacatggatagatatgtggacttgggcctcaactggtagaagatgcaagcatatttttgaccataatggcaggatcacagaatggggagtaatagctttagaagtgactactatgaagatagttctcaattggaagatagttcttaactggattcataaccattatagagtttagctgaagaaaaaaaatatgattagttcatgataagacatctatctgtgtaatacctgctgaatggaatggattccagatcagtagtgacagctaatgttttgctggcatattttcagagaaatttttggtccactcttctgctcctgaatctatgtgtcaaataaccctcctactagcctgtgcagggaattcaacacagagttctaaactcagcttttctcaaaagtattcatgtgacttgagcagtcaatgaacttccaaccctcaatgttttatttataaaataatggtgacagggaaattggaaaatatttttctcctgtttactcttaattctaatgtttaatgatttcaggagacagatttattatcctttaatctacagataagccctaaggtgtagcatgttttttctaagcactcttgtgctttgtgtacttcctccagctttttttgccatctatacaattactgattagcatccttctttaaattgactcacttttattttgcttaccatgtcactgctgtatatgaaaaacacagaatgaattgttataatttaaattataattaaaaaattaagaacatattaaaactaaatataataattagttg

SEQ ID NO: 693319 - DNA, 834 bp, Homo sapiens
caaccagaggcccagctcagctttttatgttattgatatggcggcagatttcacatagagcagcatctcatttacaaagaacacagaatgccatgccatggactccagagatggaaaagtcctttgaggctgggcacggtgggtcatgcctgtaatcccaacactttgggaggctgcagtgggagaatggcttgagctcaggagtttgagaccggcccgggcaacatggtgaaaccgtgtttctaacaaaaattacctgggcgtggtggtgtgcgcctgtagtcccacctgcctgggaggctgaggtggaaggattggttgaggctgggatgtctaggctgcagtgagccgaaatcagtgccactgaactccagtctgggccacagagagtgagaccatgtcaaggcaagaaaagaaaaggtcgggcacagtggctcatgcctataatcccagcactttgggaggccgaggtgggtggattgcctgagctcaggagttctagactagcctgggcaacacggtgaaaccctgtctctactaaaatacaaaaaaaattagccgggcgtggtggcgtgcacctgtagtcccagctatttgggaggctggggcaggagaatcacttgaatgtgggaggcagaggttgcagtgagctgagattgtgccattgcactccaacctgggtgaaagagtgactccatcccmcaaaaaaaaaaaaaaaaaaaaatgaaaggaaaggaaagggagagaggaaaggtgtgggtggggagagagagagagaagaggagaaagaggagaaagagaaagaaggaaagagagagagaaggaaagagagag

SEQ ID NO: 693320 - DNA, 646 bp, Homo sapiens
ttaaagtgtgtatggagataactggaacacatctgggcttctgggtcattctgaggcacataattgccaagcaggcctgcaggcatcagagctcataagaacatttacatacagacaccctcacatgaagatcagttcttctttgaggataacaagatgctgtactctagatatttgaaaaaaacatacacctctccatcctcacaaaaacaatcttctttgctcagccagtcagacaacagtatcataaaaataggaattgactcacttaggtcagctgatagaaaaactgtcagccgaactgtccctggtcagaaaggcaaaggagagtggtggtcacaggaagaagaatcaaaatgcccagtggagttgtgcagagggcaggctgacagcgacacaccatctaaaatgcccccatgtggggtgtgtagtggctgctgttcttcaatatggactgctaattcccaggaagaattagcttytgatgaaaatcagcattggtctggtatatcatatcatttttgaaagaagaaatatgtgctttagattgggtttcctcagaagactgactctgagatgaggatttgagtgcagggtagtttatctgggaattagtcccaggaagcaatggtagggaagtagggaa

SEQ ID NO: 693321 - DNA, 646 bp, Homo sapiens
ttaaagtgtgtatggagataactggaacacatctgggcttctgggtcattctgaggcacataattgccaagcaggcctgcaggcatcagagctcataagaacatttacatacagacaccctcacatgaagatcagttcttctttgaggataacaagatgctgtactctagatatttgaaaaaaacatacacctctccatcctcacaaaaacaatcttctttgctcagccagtcagacaacagtatcataaaaataggaattgactcacttaggtcagctgatagaaaaactgtcagccgaactgtccctggtcagaaaggcaaaggagagtggtggtcacaggaagaagaatcaaaatgcccagtggagttgtgcagagggcaggctgacagcgacacaccatctaaaatgcccccatgtggggtgtgtagtggctgctgttcttcaatatggactgctaattcccaggaagaattagcttttgatgaaaatcagcattggtctggtatatcatatcatttttgaaagaagaaatatgtgctttagattgggtttcctcagaagactgactctgagatgaggatttgagtgcagggtagtytatctgggaattagtcccaggaagcaatggtagggaagtagggaa

SEQ ID NO: 693322 - DNA, 591 bp, Homo sapiens
tgaagcaattgctcactctgatagagtacttgagcatagtcagaatttttcatgtaaaagaaaacagccagatatcaggacctgtttcatcagtatcgcttctaactgtacattaacaccaagaaatattaaagccacattctttgtgtgaaagcaataagaaggttaaagatggcttttgtaattagctttcgaaattacttgttggcatcacaccttccrtatgaaaatgcaaatatgctctcagaatgggattccggagtgttaagtattcatcctcgctgctgtatgcataggagtttatccacagaactttggaagggtcagccacaattttatttcaactggcagttaggttatgttttattccatggataaacttctatataatataatttaaattaaggagttcaacactaaaggaattctaactctcagtgatttttttaaaacagatgattcaacatcattcatttaattagtttagaggggaaaatttggaaattaatcatcaccctagttcttaagtattcatgatgccttttcaaatagttgtaaaatataccttcacaaactttggaaattttggca

SEQ ID NO: 693323 - DNA, 1337 bp, Homo sapiens
cacatagacacatagacatatatacatacacatgcatacatatatacatacatacatatgcacatacagttgctagatattcaagaagtaactattcaaataactctagagatatgaaaaacactatggaatccagctcacaaaagagacatctggcagccacatcagcaatagaagcagtataatggtttatgtggatagtatgatttgctgcagattttcatatattctgtgctgcctaagcactacttgaatatctatttaatgactatggaatatttaatttgagcaaaatgagctccagattgtttacaaagtactggccaatgatcccctccttataaattaatctgccccaaaatatgatcaaatttgatttcttgaaatgtacttatcatcgtgacattgtatactgtctcacagttctcctatggatgccacttcccaaaggccgcccagtaactcctaaatgctactaaaacattctctctgtctctctctctcccccaccccaaaaagaaatatgtgttcctagaattcaggggtaaaaaagaaagcttttggtttgttttggtttttactaataaagaacagtccaggacaaattctaccatgcaggggatattagtctaataatacagagtgagaacagaagggagaagtggcactatgaccagaggccaactactttcactctcttaaaggttgcatgactgcctgagactggacagcccacggaactgaacaagaatggctgcattcaacctagctggtctatacatctagaaactcagtcaatcttgtatgtatctatatattcaaattatgtagtccagcacttgaatacatgtattcttttcaaatattatctttaaagcacacttccaaaatttaagaataacatgtgctcaccccgccactgaaacaatgcaaagttggacaatggaagaagttactatgctccttctaaccattctacatcccttctgcaaaccacaccctccaaaaactatggagtcagactgccttcttcaaacactggcttctctcttggtgactttgattaaggtgagtttatctccatccrcctcagtttccttattctcataaagaaaatgaattatagcacctacatcatatacatacctagttgtgtaatgtatattgataatattaggggtaatggggttgctcaaacctgttttagaatctaagatatttcctaggggatcacctttcactaggtcttttcaagaaaatatttttgagcaccaacatgtgccaatcactattctagttcctaggaagacagcattaaaataaaagactattataaa

SEQ ID NO: 693324 - DNA, 648 bp, Homo sapiens
tgtcgttcaggtataattttgcaatggtcccgtcggttataattctctgtgttctgaattttctgcttttctcactgtggtccctcatgattcaaaaataagtctttctaatgattagtggtctacyatagcaattctttttgtttctactatttgggattgttcctttcttctgcttattaaaatggtaattaaatttaatcccaccaacctactcaggggaaaataaaatccaatatgcttctatttcacatgccaaatgacagttcctgccagactgtcacataactcaaaccaaccagccccttctctagtgttcccttccttcaggccagacacacagcttctcataatgaaggttgctctgtaaaacagaaattacatgcaccattcagagagctccaaagtcacactacaatagaactccctagttctgagtcattggtgtctaaagtcagtctgatttcatgaaagttctgaattataggagattggaactctggggtcagtacttcagggttatgagggcaggctctggagaaagacttgactgggttcagaaagtggcagtgtggcctctaaagcctcagttttgtcctctgaaatatgtgattatagggagcatatattctgggcaacttgaatctg

SEQ ID NO: 693325 - DNA, 648 bp, Homo sapiens
tgtcgttcaggtataattttgcaatggtcccgtcggttataattctctgtgttctgaattttctgcttttctcactgtggtccctcatgattcaaaaataagtctttctaatgattagtggtctaccatagcaattctttttgtttctactatttgggattgttcctttcttctgcttattaaaatggtaattaaatttaatcycaccaacctactcaggggaaaataaaatccaatatgcttctatttcacatgccaaatgacagttcctgccagactgtcacataactcaaaccaaccagccccttctctagtgttcccttccttcaggccagacacacagcttctcataatgaaggttgctctgtaaaacagaaattacatgcaccattcagagagctccaaagtcacactacaatagaactccctagttctgagtcattggtgtctaaagtcagtctgatttcatgaaagttctgaattataggagattggaactctggggtcagtacttcagggttatgagggcaggctctggagaaagacttgactgggttcagaaagtggcagtgtggcctctaaagcctcagttttgtcctctgaaatatgtgattatagggagcatatattctgggcaacttgaatctg

SEQ ID NO: 693326 - DNA, 631 bp, Homo sapiens
aattcccattttttatgagttgggaactgtacctgacacattaactccttggcatttctaccctgaagtgtgcatggccctgagcatgtttctgtgaccagaaaaagtcctccggagagaatccccagtgtttgcaggaagaagatatagacatgtagaggaatgttaaatgctaaggagtcctaactgggtctgctccagaccggagcaggggtgctgccaaagaaggttttcccaaggacaggctgtctgagaggtgtcttcaaaaagggacattcctaccctaggataggatcagcgttagcaaatattttatgtccacttcagaagaatgtgtattctgcaattgttaggtgcggcgttttatgtatggcaattagtttaagtttgcaaactattttgtcaaatcttcttttattccttttggtttgtttaacagttaccaagagttgtgaatttgccaatgtctccttttaattctatcaatttttgcrtctatgttgaggctgtattatttggtacacagatattaagaatcgttatatctttctggtggaatgattcttcaataaagtataatacatttttatctctaaaaatgcttcttgccttaacattcacttgagttttt

SEQ ID NO: 693327 - DNA, 1509 bp, Homo sapiens
tgtaattcaccatcttccccattgtaaaaggcaaattaagtcctctcaaaagtttgacaatatgaaacaaggaaattcagttagtctcttgacagcaatgccaattatcttccttttttttaaacattctcttaggcgaatgcctaagacaatggaaaattattttgcagtgagacccaagccaatccagacacaagctgctctcattacaaccatctcttctcatctcttgaggatgagctcactaataagagtacattatctcttattgggacaggcttaaatacatgcaagaacttcattaagtcattctctatcagaataggagctattgagaatttctgcagaactaggattgtgtcttctctacctatgaaatgagtggtgtcatgacaaagcactctagggagccctgccaacctatttgataatgttgatggacaagattgtatggggagtggggagaaaaaacaccttttatattcttccctgatgtatgtataagtagttctttaggaagagatgaaatgcgtggctttgtcctgaatagattcccttaggggacacccagggaattcctaggcccagtggaattaatgttctagaaagagaatcatgcttctgttgcagagcccccttcttaatcctcatgaatcctagttaataacacatataataaagtattcttattgatgcctgtaacttcctttgaaatgcacccaaaaggataaatgatatagacatatgctaaagcaagtatggtgaaatgctacgggtggaatctatgtggtaggtatatgggtgtccactgtaaaatgatttcaactcttctatatgtgaaaagattttcataacaaaatgttagggaaaaaatcctcctggaatacatttcatgtaagcctctaattcctcagcattagccacaagcagaactgtcttcaaaggagtaaatcatcaggaaaagtccgtgaccccaaaagagtgctgtccaggttttctcaggcatggctcaggttcaggcacaaatgcaagttcccagttcccatctcctcagtgtgtgcccgctgacctccctgcaacagttctgcccattgaccagtaggggataattcagatgaacaccttcgtgcttggaatatgagcacttagacttctagattttaaaaggatttctgagcccgatctttacacacatgctttagtttgtactgtctttctgtacatcctcagttaagagatgctttctggagtgttttgtagatggatttgaagacttctcactgcttcagtacagaatgccctggcaatgcacgcctggaaggagtccatggactgatattttctagccaaagggagctaaaaatcagccattttgacatttggatttttcattgatgtgtcttgtttatttaaytcaatttaatatgaaagagtagagagggtagaacaaactgttcagcaacgtatagatcattaggttttaaaaccaaataaaaagtactcagtgta

SEQ ID NO: 693328 - DNA, 2047 bp, Homo sapiens
agtaaaataccaaattcatttaagctatgggcattttggaaagtggactggaatccacttattaaagattttataagaattgttcacaagaattccaaataaccctgtttattctttaaatacttaataacttggtccaaactcctctcctacccccaaaatacttcttttctctcccttaaactttcattttttatgcacctctgaacatttttctatgaagttatagtcactttcacatttactgcaagatgtttttcggatctctccactgccgccttgtggctttagaacacaaatctgtttactttgttttgtgacatatttgaataaaaccatgtatcctgtttagggctggcaatgtggtagtgggagggttggaaattggatacaaaaattgagtcaatcaattgtcactgttgctctagtcaagattccatcgttattttgtataaccttcatttataattcattatgtcattatgtgctagacagctggtctaatatcttttctatgttgttaaatagctgggtgtggtggcacatgcctgtagtcccagctacttgggaggctgaggcaggagaatcgcttgaacctgggaggcagaggttacagtgagccaagatcgtgtcactgcactccagcctgggcaacagagtgaaactctgtctaaaaaaataaaaatgcatatactaattgtaaaatatgcacgattttatatatggctgcactcttatttaaacagcatgctgcacaaatctcacttcttacctttctacttggctgtttctgaaatctttacttgttatatctacatgtctttttagtgccatataatattctttaacatgcatccatcacacagccagttttaaggaaaaaaaatcctaaatctctacaattccttctgacccaaatctcacatgctccctttagaatgtataacaattttctgggtcacagggcatattatagtttgacaaaacgtacccagattactttctggacatctgtgaattttacactccacccacattacttgtctttcctgcatctcaccactgcttgctaacatttgcattttagttggctccattttggtagttttgtctccttgttttaattctcatttccctaatagtaagatgaagctcacatgatattctcgtcatccactcactattcagcttttttgaattgcttcttcatgttctttgctcattttctaattttttttcttttctttgtggaattgaatatatttyatgttatatataaggtattttttggtttaaaatgtacggttactcctgtcaatctgtcatttgcctgttgactctggggcttctcttgatcagaaatccttcgttttttatcacatccatagcatgtttgacttacagcatttgcttattgtctttttgttgttgtttaagaagcccactgcatcctagaccacaaagacattctcctatcagcattacgggtttaaaattcacattttaatctgtctatatttgtatatggcataatggacaaccagccccattttctctgaacaatgagtcagtttttacaataccacccaccaaagcatccatcctgtcctcactgacttatgatgccatccttacacacaagccatcagtactatacatctatagaaatcatcttctgaaatttcttttattccattcgtgtatttgtctgttctggatgagtataatattcttttttattatagcagtgtggttttctagttatccatcatagtgggttcttttatttaaaattagtttcatattcttggagtgtattctttcactgataatcttgcttcaagtattttgaagctctgtgggtgcaaaaacacctagaattatgctctgttaattccttatccttatgaaataaacttctttatccctggaaatacttattactctaaaatgtattttgtctgatattaacatagctattctagctttcttttaactgttagcatggtatgtattttcctaacgtctactttctaaccaattgtgt

SEQ ID NO: 693329 - DNA, 2047 bp, Homo sapiens
agtaaaataccaaattcatttaagctatgggcattttggaaagtggactggaatccacttattaaagattttataagaattgttcacaagaattccaaataaccctgtttattctttaaatacttaataacttggtccaaactcctctcctacccccaaaatacttcttttctctcccttaaactttcattttttatgcacctctgaacatttttctatgaagttatagtcactttcacatttactgcaagatgtttttcggatctctccactgccgccttgtggctttagaacacaaatctgtttactttgttttgtgacatatttgaataaaaccatgtatcctgtttagggctggcaatgtggtagtgggagggttggaaattggatacaaaaattgagtcaatcaattgtcactgttgctctagtcaagattccatcgttattttgtataaccttcatttataattcattatgtcattatgtgctagacagctggtctaatatcttttctatgttgttaaatagctgggtgtggtggcacatgcctgtagtcccagctacttgggaggctgaggcaggagaatcgcttgaacctgggaggcagaggttacagtgagccaagatcgtgtcactgcactccagcctgggcaacagagtgaaactctgtctaaaaaaataaaaatgcatatactaattgtaaaatatgcacgattttatatatggctgcactcttatttaaacagcatgctgcacaaatctcacttcttacctttctacttggctgtttctgaaatctttacttgttatatctacatgtctttttagtgccatataatattctttaacatgcatccatcacacagccagttttaaggaaaaaaaatcctaaatctctacaattccttctgacccaaatctcacatgctccctttagaatgtataacaattttctgggtcacagggcatattatagtttgacaaaacgtacccagattactttctggacatctgtgaattttacactccacccacattacttgtctttcctgcatctcaccactgcttgctaacatttgcattttagttggctccattttggtagttttgtctccttgttttaattctcatttccctaatagtaagatgaagctcacatgatattctcgtcatccactcactattcagcttttttgaattgcttcttcatgttctttgctcattttctaattttttttcttttctttgtggaattgaatatatttcatgttatatataaggtattttttggtttaaaatgtacgrttactcctgtcaatctgtcatttgcctgttgactctggggcttctcttgatcagaaatccttcgttttttatcacatccatagcatgtttgacttacagcatttgcttattgtctttttgttgttgtttaagaagcccactgcatcctagaccacaaagacattctcctatcagcattacgggtttaaaattcacattttaatctgtctatatttgtatatggcataatggacaaccagccccattttctctgaacaatgagtcagtttttacaataccacccaccaaagcatccatcctgtcctcactgacttatgatgccatccttacacacaagccatcagtactatacatctatagaaatcatcttctgaaatttcttttattccattcgtgtatttgtctgttctggatgagtataatattcttttttattatagcagtgtggttttctagttatccatcatagtgggttcttttatttaaaattagtttcatattcttggagtgtattctttcactgataatcttgcttcaagtattttgaagctctgtgggtgcaaaaacacctagaattatgctctgttaattccttatccttatgaaataaacttctttatccctggaaatacttattactctaaaatgtattttgtctgatattaacatagctattctagctttcttttaactgttagcatggtatgtattttcctaacgtctactttctaaccaattgtgt

SEQ ID NO: 693330 - DNA, 2047 bp, Homo sapiens
agtaaaataccaaattcatttaagctatgggcattttggaaagtggactggaatccacttattaaagattttataagaattgttcacaagaattccaaataaccctgtttattctttaaatacttaataacttggtccaaactcctctcctacccccaaaatacttcttttctctcccttaaactttcattttttatgcacctctgaacatttttctatgaagttatagtcactttcacatttactgcaagatgtttttcggatctctccactgccgccttgtggctttagaacacaaatctgtttactttgttttgtgacatatttgaataaaaccatgtatcctgtttagggctggcaatgtggtagtgggagggttggaaattggatacaaaaattgagtcaatcaattgtcactgttgctctagtcaagattccatcgttattttgtataaccttcatttataattcattatgtcattatgtgctagacagctggtctaatatcttttctatgttgttaaatagctgggtgtggtggcacatgcctgtagtcccagctacttgggaggctgaggcaggagaatcgcttgaacctgggaggcagaggttacagtgagccaagatcgtgtcactgcactccagcctgggcaacagagtgaaactctgtctaaaaaaataaaaatgcatatactaattgtaaaatatgcacgattttatatatggctgcactcttatttaaacagcatgctgcacaaatctcacttcttacctttctacttggctgtttctgaaatctttacttgttatatctacatgtctttttagtgccatataatattctttaacatgcatccatcacacagccagttttaaggaaaaaaaatcctaaatctctacaattccttctgacccaaatctcacatgctccctttagaatgtataacaattttctgggtcacagggcatattatagtttgacaaaacgtacccagattactttctggacatctgtgaattttacactccacccacattacttgtctttcctgcatctcaccactgcttgctaacatttgcattttagttggctccattttggtagttttgtctccttgttttaattctcatttccctaatagtaagatgaagctcacatgatattctcgtcatccactcactattcagcttttttgaattgcttcttcatgttctttgctcattttctaattttttttcttttctttgtggaattgaatatatttcatgttatatataaggtattttttggtttaaaatgtacggttactcctgtcaatctgtcatttgcctgttgactctggggcttctcttgatcagaaatcctkcgttttttatcacatccatagcatgtttgacttacagcatttgcttattgtctttttgttgttgtttaagaagcccactgcatcctagaccacaaagacattctcctatcagcattacgggtttaaaattcacattttaatctgtctatatttgtatatggcataatggacaaccagccccattttctctgaacaatgagtcagtttttacaataccacccaccaaagcatccatcctgtcctcactgacttatgatgccatccttacacacaagccatcagtactatacatctatagaaatcatcttctgaaatttcttttattccattcgtgtatttgtctgttctggatgagtataatattcttttttattatagcagtgtggttttctagttatccatcatagtgggttcttttatttaaaattagtttcatattcttggagtgtattctttcactgataatcttgcttcaagtattttgaagctctgtgggtgcaaaaacacctagaattatgctctgttaattccttatccttatgaaataaacttctttatccctggaaatacttattactctaaaatgtattttgtctgatattaacatagctattctagctttcttttaactgttagcatggtatgtattttcctaacgtctactttctaaccaattgtgt

SEQ ID NO: 693331 - DNA, 588 bp, Homo sapiens
cgagagactggccttgctctagatccccagcagctgaacatgggccccagtgggtcagcaaaggaaaataccaacccatcctgggggacccagaagtgagaaagtgaaagaaccagcatattgcagagaacaacagctacaaaccttctgggggagagaraggacagcctgaaccaaaaacaatgataacaacaacacgtaaggaaccacaaatacagtgtgcataaacgcacgcatacacacacgcatgcacacacgcgcacacacatgcatgcacacatacacacatgcatgcacacgcacacacgcatgcacacacacacatgcacacacacacacatgcacacacacacatgttctggatctaaagaatctcattttcagactaaaaatttcaagagatgaatcaaaggattgcagagtcactgttgaaacctgacctagaatgccaaatggagtaatgaaacaaaacacaaatcaaaaatgcaaagagaggaaaattatgaggtgaaataaacagtttgaggaaatgatgcaggcaatcaaatacttgcatatttggattattctatgttggaattattatta

SEQ ID NO: 693332 - DNA, 1887 bp, Homo sapiens
ccaattaaataggactcttggggaggagcccaggcaaaggtattttcacagtctccagagtgcatctaaagtgtctctcggtctaaaaactgatgccctagactgaatccctcactgaactgatgaggaaattgagtcacagaggggctcgatgacttccccagggacacatcattagtaagcagtagggaaagattcaaactcaggtctgcctagccagcatgctgccctcctggactcattgagcctgttctgagactgacacctgaaggaagcaggtaggataatgttgccaccaagtcattagagctcttcccagctgaagtcagcatgagaagtcggacactcttcagaggagatgccctcgcatctccatggagactgggtgggctttggcatcacagagtcctgtggtttcaggtcctaccacttcctcactctgcamcctcagtcagatcttttaccctttctgatccatttcctcacctgtaacattaaggggtgcccattctgagcctctgagctgctatgaggattagaaatgatggatttaaggacccagtgtgtcgtgggtgcctaacagaagctcattcctttcccttctctccgtatcatcaggaggcacctggggctgtgcctccctgagtagaagacccctggacaccagcatcaggagggagggggcttgcctactcctcatctctgtgttgttctgacttggtttgttgtggaacaagaattggaatatgtgtcctggatcccaggccagaattctttttttttcttatcccttaatccttgctatctgtgaagtgcagttgagtctccagactcaagttccagaccccccaggaggagccccccagctggctctgggagtgggtggtgctgcatggagtggagctcagggattacagacatacattctcattccagccctgtccttggctttgtgtggctgtggaaaaacttcccaatctgattgggcctcagttccccttctgtaaaatggagataacactttatcattcctgtctccctgggtgtgggagaccccttaatgagagaaagagatgaagcactttggaaaagaacagagttctcagccgaggtgaccacatgtcattattatgaagacgtttgtaattattatcatcctgcctcttccctacctccttttgccaccccactgggtctggggaaaccctaggctcacatttagcttctcaaacatttataaaaaatgagtcccacccctgctgctgccagcactgtgcagaatgctttctattaaaaattaaaaaccacttgtcgagtctctgggaacgctcagattacacaggaaacaagccccctctcaacatccacccctgctgccctcctcccaactccctcttcgatcatcacttagaatgccagctggctgggctggcctcgaccctgcttctagcctcccagccagggcagcctaatgcagatgaatggcacacaggagatgcaggaaagtggctgcatgggaggaggcaggtccagagacaagtgacagagaaggcagcacagagagaggggtcaagaaagcgggtaagagacagagaaagaagggtcagagggacagaagttcgtggggcagagacagacagaaagcagtagaaacacagaggttaagtaggaaaccagaggaatctagaaacagagacagagcaaatagaacagagacagaggtacatatggagcaggaagagggggcagagcaggaggaggaactaggagaggaaggtgaagtttggcctggtggggtgaggggcctgctgcattgcaccttcctccagagtctccagggaacgtgaaacaccctcccctcctcaccttttctttccttatggatcc

SEQ ID NO: 693333 - DNA, 605 bp, Homo sapiens
cccactggaggctccctcccccagggtgagtgttgagtgccaacgatatggcaggagctggctgcctgtcccaataaatgcaaaggtcccatgagcagcccgtccttttcagagccctctgctctccagctgagctgaggtggggttcgctctgctcctagctgtggcactaggaaaacagctgtggctttgatgtcaaacagaccagatttcaaatcctagctctgccacacccatactgtgggactccaggcacagcactgaacatctctcaccctctgtttccccatctgaaaaatgggcagtttggattaragaatcgcaaacgcccaactaactctgatgttctgattttctgacaaattagggtatccggtgtcttagtcctggctgtgcctgcaactcaaagtggcatcttgggcaagtcactgcccctctccagaacccactctcctcaatctgccattcaccttcaagcagccaacactccagtcacacagaacttctcattgtgatctaaaccgtgaattcttccctgcgttggttcatgctgcccctctgaaatgctctcctgcccattatccacctggagaactattcatctt

SEQ ID NO: 693334 - DNA, 587 bp, Homo sapiens
gcatgctcctagcccttgaattgtgggagtccagccgctgtgtgttataagaggcacacgggctccaaagacagcacgaaaacatcacaggacggctcgatggtcattttcatgtcagtttcgtgttggagtaaccatggtttgctcgcatcgagtcaaacagaatcccgtagctaacttcgcctgtgtgctgtggctgctgggaagtggctgctgttatatttctgtggatggcacagcccaaggcaggcaaacgtctctgcacctaagtgtgtccctgccccagtacgtgagcaggaatgcggctgtgggggttgggtgtgtgtgcccaggtgtgtgcccaaatgtatggyttttctgatgtttgtggctgctgtacccacgaactagtgggtttagaacagcggaaaatcactcagctctggaggccagtgctccaaaatccaggccttgcagggttgcttcctctggaggctctaggggagaactctcctcgcctctcctaagttctggcggttttgcaagtccccggcttgtcgacacgtccctgcggtctctctgtcttcacatggctctttggtttcttc

SEQ ID NO: 693335 - DNA, 587 bp, Homo sapiens
gcatgctcctagcccttgaattgtgggagtccagccgctgtgtgttataagaggcacacgggctccaaagacagcacgaaaacatcacaggacggctcgatggtcattttcatgtcagtttcgtgttggagtaaccatggtttgctcgcatcgagtcaaacagaatcccgtagctaacttcgcctgtgtgctgtggctgctgggaagtggctgctgttatatttctgtggatggcacagcccaaggcaggcaaacgtctctgcacctaagtgtgtccctgccccagtacgtgagcaggaatgcggctgtgggggttgggtgtgtgtgcccaggtgtgtgcccaaatgtatggcttttctgatgtttgtggctgctgtacccacgaactagtgggtttagaacagcggaaaatcactcagctctggaggccagtgctccaaaatccaggccttgcagggttgcttcctctggaggctctaggggagaactctcctcgcctctcctaagttctggcggttttgcaagtscccggcttgtcgacacgtccctgcggtctctctgtcttcacatggctctttggtttcttc

SEQ ID NO: 693336 - DNA, 510 bp, Homo sapiens
tgggtggagcctcagagtctgaggagcaagaataggacagaaaaagcaattcagagcaaggccctggatttcccaaatgtgcgggaaagtcagcatttatggatccaaaaggctcaaccaccccaaaccgggatcgatacggagaaaaccactcccaggctcaactcagtcaaacctctgaaatctaaaaataaagagaaaatcttgaaagcagagagcaagaaaagctgccttacagacactgaaggaggaggcttctcagcaatcagtgctggggaaaccggaataacccggaatgagctgccacccctgcctcacgccacacacacgctcttaactgcccaccagaggaaaaccagcaaagcttccayaggaaattagaggggaatatccgtgtgatcttggtggagacaaatatttcttaaaacacagactgagcgcggcggctcacacctgtaatcccagcactttgggaggccaatgcaggtggatcacctgaggtcaggagtt

SEQ ID NO: 693337 - DNA, 604 bp, Homo sapiens
cgcatccatgtgccctgcccacctggctcctgcaaccaggtgtaggtgggggacagagaaggctgggcacaggcctgctgtgagtggggaagcaggccctgacttaagccactgagtgaaagatttgtggcagatggggtgacggggccccaggaggtgaggggggcaggtggggggcactggttcagacccatgtctgacccctgctcagccccttgctggttatgaggggcccagatgagctgcttctcctcggtcccaagtccctcagctgctgggaggagggaacaccaccatgagccgcttgggggtcgggcagctgagcacgcaggacagcacgcctgaggagctggccccccgcggagtctccggtcaggcagcgccctcgtcttggatgctgtgaattcagtgacagggaagccggtgttgctggtgggcttccccttcccacctccacccccacgccagcrccttcaagggtcaagtcaggcagagaggaacagctgtctcaggaagacagaaatagcagagtagggcccgtccctgcagggatacgaccactgcagccaggcccggcggctgggatgaacccttcccatcagga

SEQ ID NO: 693338 - DNA, 860 bp, Homo sapiens
cagtgaggtgcctgcacgagcacatgctgtgtgcctggctcggacactgatgcagacggcaggaccatcacgaggccctggcttccccaagccgccatgtgagttggggaggaggcccggccttgcaggcgaggggccattggtgctcagagcctcctctcaacgctctagacccagcaacctgggacaggtcttgagaagacctggcgtcatagagggtgacagtgatggagttgtcgtcaacgacctatggaagggtcctgcggtgttctagacaagtgcttgagccacagcagtgtccagccatgacccccagcraccccagggggctctgctggtcttctgtggctgactgagaggtttgaagactgtgggcatctggggcaggctcaggtctcctgctgctcactgggacaggtcagcccggtgcccgcagagacagggacacagagaaagcgagcatgtcggcccatggctgagcatgaccagcacggagctgcccgcaccctccttctcctcctcgaggccggtgcagcgttctgcaggttgccctgcagttcccacagaggaagtggcaggaagtccagagtgaatcattctaggaataatgatcctgggcccttatctttcttaagaaatacaatttccagaaggaggctgacagactgtgggggcaggtattcctgtgctggaaagtgccctgagcgagtcaggccgggctctctgagcgctattaatagcatggcgtggccctgggcaagtcacttcccctggcgggtaggggcgggaagggaggggcctcgaggcttcagtggaagagcacagggcgtggagcctggaactggagctgtgtcttggct

SEQ ID NO: 693339 - DNA, 1879 bp, Homo sapiens
atgaagatttacatgatcttggagagatttttaccataaaaaataaaccagcctttacatgacagcacccatttggtgccataagctatgcttgcactttctgtgggtatacattttcctcctgaagcggcagttatacctagtggatctgagcctggtctctggagctagactgcctgggtttgaaggtggcctyccttcttgctagccttagtctataaaagacttggctgcttcatttgtaaaatgaagatgatactaataggacctacctcattacgttgtaagaaaggtaatataaagcagaaaacaggggaggagggaaggtaatccacattaaatacttggcgtggtgtctggcttccagtaagtgtctgataaatgcagttatcagtgtggcttctaagatgatgacagtaggtttaaatggaacaagaactcttagagaagccagggctcaatcatactggtcttttcattattgcacttatttatgtgggcagtgtccttggtggtatcactgtaaggaaagttatagcaacgacttttagaactaagaagttaaattccacagtgggacgtgtcatgctatgtaactggacaggaggcccatcaggtatgcaggatgcatttcagtaatgtcttagtaaaatgagtgtgccttctgctgggatgattgggtgcaatgacatgtgcatgatacatatgaaagactgaatgttatcatttattcatcaaaaaacatgctgttagctagccagaatacagatactgcaaacagctggtttgcctaaaggatttgctccttcagatcataaaacctcctcattactaagtacagagatgagtataaattaagttgtaagttagtttatgcaaattattttacattttcctgcctcccagctcctcccaaaagtaaaataaatgcaaaacagtcttttttcatttcttccctttgttttgatccctacgaactaaacacaatatttctagaaagatgtagaaaggtacagcaccccagaaataagaaaagttggtatattttatggggtataaaaggttttttattctgtgtgtttgttcacctacctgtcatcctgcttatctgaaagtgcctgtctgcattacaccaggcaacagctaagcagccatttaatcctgcatgactccctcctctgtatcttgaccacatcacagggaggaacctacaccaaggcagtccaggcttaggtttcccagcaacctgtgacctggctggaaaatgtgaactgtgccaatccgattccctttgcctggaatccagactagaagcaaggtaagctttgccagttagccatgggaactgcagctgcaggatcatgagaaaggcaggaccacaagaacctctgccaattgacctgcatggaaaacaaagttgggcactgggagagctgaagaagcagagaaagtcagggttggttagaaggaagaagcagcatttagagttcagttgagtcatttcagtgggtaaatgctagaagagccagaaccaagctctctggaccctggcccagcaccatcccaggacagtcctcgtgaggacagcatttacagtaccttgtcctagagatcagggatggatggccccctggccttattgcttcataggtatccatttcacttgtgttagattttgagggaggggggttatctctgttttttgcaagtacaagagatttttctaaaacacttacttggcatcagtgttagaggggcgttggctcaaaaaagccatgaaggcgtagctttgtgataacagtagttggcaagatgataatgtccagatcatacacaaatattagctccactgaactctgatctcctcagaaccagagta

SEQ ID NO: 693340 - DNA, 590 bp, Homo sapiens
tgaaacctttctgttaaaaaggaagacacaaacacatgcattagcctaggcttatgcagggtcagaatcatcaaaatcactgtcttccacctccatatcttgtcccactggaaggtctttagggacaataacacacatagagctgtcatctcctctgataaaatgccttgttctggaatacctcctgaaggacctgcctcaggctcttttacagttaactttttttctaataagtagaaaaagtatactctaaaacaacgataaaaagtatagtaaatatgtaaaccagtaacatagtcatttattatcattatcaagtattatgtactatacataattktatgtagtatactttaatacaagtggcagcacagtaggtttatttatgccaacatcaccacaaacacgtgagtaatgcattgtgtgactatctcacaacagcaatttttcagctccattataatcttatgggatcagcatcctatatgcagtcaggtgttgatggaaatattgttatgcagtgcatgactgtaatgagtagcatatggtggtttatcacgaggtcactagtctaattccaggaaaatcta

SEQ ID NO: 693341 - DNA, 1205 bp, Homo sapiens
atgctgtaaacctcgcaactccctagaggaggtattaagcatccccagatcatagattgggaaactgagacttgggagcatggagtcatagccagagttgtaggtctggactctgagcccagcttggaagctgtgctgcccacttctctgtgggaatgaggtaagctgagtcacaagaccagcaaaccacagtgacaggaattttctctcagccccttggccacacttgcagcaggggcaccccatctactcggtccaccacactcagccccttgcaggaggaagcacatgaatgagcaagtgtgggctctggctgaccactccaaacaccgacacaagagcaagctccatgctgggcctgtggccagaccaggcgtgttgcctcgaggggaaagtggcagcacctgggcaggggtacccrcaaccctgaagccccagagggggcgttagtgtgctaattagctgttttagttccaccattgacggcccaatagacggtggtgtattaacagctcagtcggcccctgaccccatcacgtggggcagctgccctccactgatgagggcaaaaggccagtatgacagcctttctgggtacccacactcagtgggtcccaagctcttgtccagcatccaagaagaatgaggacacgctgataattgaagagtgagcaaggcgaggagttttattgagtgatgaaacagctttttgcagagaggggatgagtggatggttcccctacccaaaggcaggaaagtccccacaatgtggctgagtctggggcttttatgggctcagaataggggaagtgtgggcaaacaggaacagaagttctcactctgggtcacaggtttcatgtgggaccagcagtccagtctttcagccttcaggctgtttttttggcttgaaggtggggtttcaccagggacccaccccgtctgcctaggcatttggctgcctcctgtcaccatcaacagggctcagagctgatgcctcctgacccatgtccagggctctctgtcctattcaaggtgcctgcaccctgaatggggtgaaagggagcagggactttgtgcctcagcaccccaggagtctccctttgccagaagaatcagagataaaaagcatctgctgaagaaagtagcttttaatgctgcaaagccctcacaagatctgatttctactgggaatgggatatggtagg

SEQ ID NO: 693342 - DNA, 1205 bp, Homo sapiens
atgctgtaaacctcgcaactccctagaggaggtattaagcatccccagatcatagattgggaaactgagacttgggagcatggagtcatagccagagttgtaggtctggactctgagcccagcttggaagctgtgctgcccacttctctgtgggaatgaggtaagctgagtcacaagaccagcaaaccacagtgacaggaattttctctcagccccttggccacacttgcagcaggggcaccccatctactcggtccaccacactcagccccttgcaggaggaagcacatgaatgagcaagtgtgggctctggctgaccactccaaacaccgacacaagagcaagctccatgctgggcctgtggccagaccaggcgtgttgcctcgaggggaaagtggcagcacctgggcaggggtacccacaaccctgaagccccagagggggcgttagtgtgctaattagctgttttagttccaccattgayggcccaatagacggtggtgtattaacagctcagtcggcccctgaccccatcacgtggggcagctgccctccactgatgagggcaaaaggccagtatgacagcctttctgggtacccacactcagtgggtcccaagctcttgtccagcatccaagaagaatgaggacacgctgataattgaagagtgagcaaggcgaggagttttattgagtgatgaaacagctttttgcagagaggggatgagtggatggttcccctacccaaaggcaggaaagtccccacaatgtggctgagtctggggcttttatgggctcagaataggggaagtgtgggcaaacaggaacagaagttctcactctgggtcacaggtttcatgtgggaccagcagtccagtctttcagccttcaggctgtttttttggcttgaaggtggggtttcaccagggacccaccccgtctgcctaggcatttggctgcctcctgtcaccatcaacagggctcagagctgatgcctcctgacccatgtccagggctctctgtcctattcaaggtgcctgcaccctgaatggggtgaaagggagcagggactttgtgcctcagcaccccaggagtctccctttgccagaagaatcagagataaaaagcatctgctgaagaaagtagcttttaatgctgcaaagccctcacaagatctgatttctactgggaatgggatatggtagg

SEQ ID NO: 693343 - DNA, 2747 bp, Homo sapiens
cccagcactttgggaggcggaggtgggcagatcacctgaggtcaggagttcgagaccagcctgaccaacatggtaaaaccccgtctctatcaaaaatacaaaaattagctgggcgtggtggcgggagcctgtaatcccagctattcgggaggctgaggcaggagaattgcttgaacctgggaggcagaggttccagtgagccaagattgtgccactgcacactccagcctgggtgacagagcaagactctgtcaaaaaaaaaaaaaaaaaaaaaaaaaaaaaggaaagaaagaaagagagaaaggaaagaaagagaaagaaagaagagaaagagaaaaagaaaatgtagtataaagagaacggggtgggatcattttttctccacagaaacagaaaaataatactttccaaatcgaaggctcctgcgctgtccccaggggctttgttgtacggttcctactcctccagttatttattccgacccctacaataatgctgagaggtagacgttaaactggggttcagagaggccaagggccttgccccagatcaccagcagcaagtggtgaagtggacctgaaacccagatctgctcgatgcccatggcaaagagagcccattacagatggtcaaaaacctcccctcaggcacctcagagcctgcagcacccacccgccaactctaagctgctatttggtgctcagagccccagccttgcccacagaagcatcttttaagcagatagaggaggcctgtccttcctccttgccaccacactgcaccactgtgacgatttctgccatgcccccaaggaacagaacgtagtacagcaagcctgggcagagagtcagaaacacatggcttgggatccccgctccatcccagctctgggattacagggccagtggctccatctccttgggtcacagctttctcttctgtaatagttagcagaacaatatggcacccacctcacagagtagctgaggggattaaatgacactgatgtaatctgtgtctttgatactatgttaacactagctggccgggcacagtggctcacgcctgtaatcccaacactttgggaggccaaggcgggcagatcacctgaggtcaggagttcgagaccagcctggtcaatatgatgaaaccccgtctctactaaaaatacaaaattagccaggtgtagtgatgcacgcccataatcccagctactcaggaggctgaggcaggagaatcacttgaacccacraggcagaggttgcagtgagctgagatcacaccactgcactctagcctgggcaaaaacagcgaaactccatctaaaaaaaaaaaaaacaaaaaaacaaaaaaacaaaaaaaaaacctagctcttggctttagtgttcccatcagcacaatcgtaatgcattcagctctgtgctaactccttgagcccagggatttctgacgtgaacagctgcaaccctgagaggtgctgtgtggaaggattttggagcccagcatcctgggttcatcatccagagtctgccacttgctctgtgaagttgtgcaaagcctcttaaattctctgctgctatgaaaccaaggcagtggagctgtgaatgagatgagtaaaaaattttgcctgataaatgttgctttgtaaaaatctgtaggtagtgcatagaatattagtctttctgctttcacttttcccacaatacttgatatcttttattttaaaaaaaagacctaaagattagctgagcgtggtggtgcacgactctagtttcagctacttgtgagactgaggtgagaggattgcttgaggccaagtgttcaaggctgcagtgagctatgatcacacgtgtgaatagccactgaacttcagcctcggtgacagtgtctcaaacaaacaaactaactaaagaaaacctggcaataactttaacatttgttcattctgggtgatggatccgctgatgtttgttataatgcgctctgtgctaaaatttaaaattttattttaagattgggccagggttatggtgccaccttgtggccatactgttattatcttgaacttgagactttttttttcttttttagagacaagagtctcgttctgtggcccaggctggaggcagtgatgctatcatagctcagtgtaacctcgcactcctgtgttcaagctaccttcccacctcagcctcccaagtaggtaggactagaggtgtgcgctaccacacccagctaaattttttaagttttttgtagagacaaggtcttgctgtattgcccaggctggtctcaaactcctggcctcaagtgatcctcctgcctcagcctctcaaagcactagagttacaggcatgaggcccgcacctggctgggacctttatagacgcttcatgtgtgctctcctataactgtcatttgggtcatgaaataacgaagtcctagacctcttaacatttcagggttggccaggcgcggtggctcacgcctgtaatcccaggactttgggaggctgaggtgggcggatcatgaggtcaggagatcaagaccatcctggctaacacagtgaaaccccatctctactaaaaatgcaaaaaaattagccgggtatggtggcgggcgcctgtagtcccagctactcaggaggctgaggcaggagaatggcgtgaacccgggaggcggagcttgcagtgagccgagattgcaccactgcactccagcctggccgacagcgcaagactccgtct

SEQ ID NO: 693344 - DNA, 1945 bp, Homo sapiens
cccagcagcctccctccctgcaatattccctcttgccaccttcctgcctactcttcaaggtgtgcaatgcacttacgtccttattgatctcgatcgccgatctctttcataagaaagtcggctctctcaggtcaaggattttggtctgttttgttctctatatcctcagcccttagaacagcacctggcatacagctggtgctcaagagagacttgttgaatgaatgaatgaatgaatgaagtgggagctatggcaatgtctcttcagattctgtagccagaatctattctggataatgcacttcagatgatttgagtgaatatactattccttcacccttgcacatcctgggctgaacaatgatttcttctttatttttatagaactgtcttagccagtgtttcttaaagtgtggtcaggggaccaactgcagcaaaaccatctggggaccctgttaaaaatgtacacccttggccgagagtggtggctcacgcctgtaatcccagcactttgggaggctgaggcaggtggatcacctgaggtgaggagttcgagatcagcctgaccaacacgatgaaaccttgtctctactaaaaaaaaaaaaaaaaaaaaaaaaattagctgggtgtggtggcacatgcctgtaatcctagctacttgggaggctgaggcaggagaatagcttgaacctgggaggcagaggttgcagtgagccgagatcacgccattgaattctagcctgggcaacaagagcaaaactccgtctcaaaaaaaaaaaatatacacacacacacacacacacacacacacacacacacacacacacacccttgagtcccacatgagccccaacaggccaggggcccaggaacctatatttttaaaaagtacccccttcccatttttagccacatggaagtttgagaatacagatgtacaggaaacacactccttttcttctctctggaggctgtggggaacttctgtttttcacctggcctcatccaccggaggtaataaaactaacaatggctgactgcaggtggaccgacggcctgtcttatctctagggtgcatttccaccagatgtcccataacacttatttgttggaggtaactcatcttcctgcgggggctccacattccccccaaagcttttattcttctatggccacaggtggagattgtcaccaacctcaagctcaagcctgaaacttacaaatcacaaaggctctggggattaagtggctatttagcagcaagttccttttacaacttaccaaacccagggccagggacggcgcttcttggactatcgtggacatttctcctttgccgtgcaagagtggctattacccggcatgccgctttggaaatctggaacaggtcgggagagtaatggaaactggccggtaagtagcttgtgtgtctcctgctgcttctcackgcagcctcgctgatgtttgggtatatggatctcagcgtggggggctgccatgtgaaaacggccgttaggtgtgtggggtttagcacattctctctgagcctggctaccagcgaggctttgacactcaggctttgtgtatgggggtggtttcggggtccagcctaaacacccaaggtggctggaaaccagggcagggctgcctggaagaagaaggagatcctatacctcttttgtgttcccttcaagaataaacgtgtctttgaaaacaacagcacgggccgggcgcggtggctcacgcctgtaatcccagcactttgggaggccgaggcgggcggatcacgaggtcaggagatcgagaccatcctggctaacacggtgaaaccccgtctctactaaaaatacaaaaaaattagccgggcatggtggcgggtgcctgtagtcccagctgctcctgaggctgaggcaggagaatggagtgaacccgggaggcggagctc

SEQ ID NO: 693345 - DNA, 1945 bp, Homo sapiens
cccagcagcctccctccctgcaatattccctcttgccaccttcctgcctactcttcaaggtgtgcaatgcacttacgtccttattgatctcgatcgccgatctctttcataagaaagtcggctctctcaggtcaaggattttggtctgttttgttctctatatcctcagcccttagaacagcacctggcatacagctggtgctcaagagagacttgttgaatgaatgaatgaatgaatgaagtgggagctatggcaatgtctcttcagattctgtagccagaatctattctggataatgcacttcagatgatttgagtgaatatactattccttcacccttgcacatcctgggctgaacaatgatttcttctttatttttatagaactgtcttagccagtgtttcttaaagtgtggtcaggggaccaactgcagcaaaaccatctggggaccctgttaaaaatgtacacccttggccgagagtggtggctcacgcctgtaatcccagcactttgggaggctgaggcaggtggatcacctgaggtgaggagttcgagatcagcctgaccaacacgatgaaaccttgtctctactaaaaaaaaaaaaaaaaaaaaaaaaattagctgggtgtggtggcacatgcctgtaatcctagctacttgggaggctgaggcaggagaatagcttgaacctgggaggcagaggttgcagtgagccgagatcacgccattgaattctagcctgggcaacaagagcaaaactccgtctcaaaaaaaaaaaatatacacacacacacacacacacacacacacacacacacacacacacacccttgagtcccacatgagccccaacaggccaggggcccaggaacctatatttttaaaaagtacccccttcccatttttagccacatggaagtttgagaatacagatgtacaggaaacacactccttttcttctctctggaggctgtggggaacttctgtttttcacctggcctcatccaccggaggtaataaaactaacaatggctgactgcaggtggaccgacggcctgtcttatctctagggtgcatttccaccagatgtcccataacacttatttgttggaggtaactcatcttcctgcgggggctccacattccccccaaagcttttattcttctatggccacaggtggagattgtcaccaacctcaagctcaagcctgaaacttacaaatcacaaaggctctggggattaagtggctatttagcagcaagttccttttacaacttaccaaacccagggccagggacggcgcttcttggactatcgtggacatttctcctttgccgtgcaagagtggctattacccggcatgccgctttggaaatctggaacaggtcgggagagtaatggaaactggccggtaagtagcttgtgtgtctcctgctgcttctcacggcagcctcgctgatgtttgggtatatggatctcagcgtggggggctgccatgtgaaaacggccgttaggtgtgtggggtttagcacattctctctgagcctggctaccagcgaggctttgacactcaggctttgtgtatgggggtggtttcggggtccagcctaaacacccaaggtggctggaaaccagggcagggctgcctggaagaagaaggagatcctatacctcttttgtgttcccttcaagaataaacgtgtctttgaaaacaacagcacsggccgggcgcggtggctcacgcctgtaatcccagcactttgggaggccgaggcgggcggatcacgaggtcaggagatcgagaccatcctggctaacacggtgaaaccccgtctctactaaaaatacaaaaaaattagccgggcatggtggcgggtgcctgtagtcccagctgctcctgaggctgaggcaggagaatggagtgaacccgggaggcggagctc

SEQ ID NO: 693346 - DNA, 1218 bp, Homo sapiens
tagtcacccacatttgaatttcctataattatcatgttatgaaataggtagatatgcctcttttgattttttccaaccattaaaaaatgtaaacaaacaaacaaaaaaaccatcataggccacacggaaacargctgggtagtttgtgccccctgctgcagggccttagtgttgttattcggttagtgaggtctctggcctgaaacaagctcctttttctctcattctccatttcgagccagtgactgctacaaaggaaaatacctgaggacagagaaccctcagcttggcctgattctaaaagtgaacgcttccccagtggaatctcgagacactgtttgtgaccaacctgaaggtctacattcacacaccttcccattctggaattccctgctcttcccttgcattccctgacagcgaagggcattactctatggaccacagacttaatacgacatctcacaaaacccattagggtcgcctataaaagcatcgaatggaaccaattagtgtgggagggaagaaagcccggctattctgggtgagaagatagcgaggggctctgcagagctgactgctcccaggtgcacgtcttggataaatctctgcttccctatggatgctcagttggagcccaaggaacacaaccagatagcaagggtcactaagtctctttgggtcactgtgaagccgaagacagcctggccttttccccatttctttgctgtccctcctcgttttcacaggccctagacgtgggcaggggccgaaggtatccagtgacacagccccttccccatcctgatccatgtgctgcggagcacattcgaggcaggagacgggcaggaaagcctcaaggatagggtcaagggtcacgccagggccactctccatctgtcacccaggaggctctcaagaaacggcagcttcccaatcgtcacctaaggatatctgaataagtaacctctggaaggttctaaaacggcctgctgttatcctaaaaggaaactttatggagtgtttaaacggaggccaaactcacatgctcgctcatctaatccttgccaagaactttatgaggcaaggattactactacccccattttacagatgaggacactgtggtctggaggccttcacaaatttgttccagggagtgacgtttgtgagatgccagaggcaggatcgggtgcacttaagtgtaaggcgaggctgctg

SEQ ID NO: 693347 - DNA, 1218 bp, Homo sapiens
tagtcacccacatttgaatttcctataattatcatgttatgaaataggtagatatgcctcttttgattttttccaaccattaaaaaatgtaaacaaacaaacaaaaaaaccatcataggccacacggaaacaggctgggtagtttgtgccccctgctgcagggccttagtgttgttattcggttagtgaggtctctggcctgaaacaagctcctttttctctcattctccatttcgagccagtgactgcyacaaaggaaaatacctgaggacagagaaccctcagcttggcctgattctaaaagtgaacgcttccccagtggaatctcgagacactgtttgtgaccaacctgaaggtctacattcacacaccttcccattctggaattccctgctcttcccttgcattccctgacagcgaagggcattactctatggaccacagacttaatacgacatctcacaaaacccattagggtcgcctataaaagcatcgaatggaaccaattagtgtgggagggaagaaagcccggctattctgggtgagaagatagcgaggggctctgcagagctgactgctcccaggtgcacgtcttggataaatctctgcttccctatggatgctcagttggagcccaaggaacacaaccagatagcaagggtcactaagtctctttgggtcactgtgaagccgaagacagcctggccttttccccatttctttgctgtccctcctcgttttcacaggccctagacgtgggcaggggccgaaggtatccagtgacacagccccttccccatcctgatccatgtgctgcggagcacattcgaggcaggagacgggcaggaaagcctcaaggatagggtcaagggtcacgccagggccactctccatctgtcacccaggaggctctcaagaaacggcagcttcccaatcgtcacctaaggatatctgaataagtaacctctggaaggttctaaaacggcctgctgttatcctaaaaggaaactttatggagtgtttaaacggaggccaaactcacatgctcgctcatctaatccttgccaagaactttatgaggcaaggattactactacccccattttacagatgaggacactgtggtctggaggccttcacaaatttgttccagggagtgacgtttgtgagatgccagaggcaggatcgggtgcacttaagtgtaaggcgaggctgctg

SEQ ID NO: 693348 - DNA, 596 bp, Homo sapiens
tgacttctgctgtgacttttccattctcacccacagctggaagtgaggctccaggctggtggcrttgtcctgggctgaactgtctcctgaaattcccatgttgaagccctaacccctagtaccacagaatgagactgtatttggaggtagggtcttcacagaggaaattaagttaaaacaaggtcattacgatggcccttggtcccacctggctggtgtccttatgagaagagatgaggacacagacacgcacagagagaagaccacgtgaagacacagggagaagatggagagaggcatcagagggagccagcactgctgacacctccgtctcacatttctagcctctcgaattgcaaggaaataaagttttgctgtctaagccatccagtccatggcactttgttacagcagcgctaccgaactaataaaggcattgaacttggcctcggggaagctgcttctggggctgcccccctccttatcccctccttaccccatcgtaccacgcacactccgctcacccctctccctactccattgctaacctcacacgagcagagccattggctccactccctgctttgtgcttaatt

SEQ ID NO: 693349 - DNA, 596 bp, Homo sapiens
tgacttctgctgtgacttttccattctcacccacagctggaagtgaggctccaggctggtggcattgtcctgggctgaactgtctcctgaaattcccatgttgaagccctaacccctagtaccacagaatgagactgtatttggaggtagggtcttcacagaggaaattaagttaaaayaaggtcattacgatggcccttggtcccacctggctggtgtccttatgagaagagatgaggacacagacacgcacagagagaagaccacgtgaagacacagggagaagatggagagaggcatcagagggagccagcactgctgacacctccgtctcacatttctagcctctcgaattgcaaggaaataaagttttgctgtctaagccatccagtccatggcactttgttacagcagcgctaccgaactaataaaggcattgaacttggcctcggggaagctgcttctggggctgcccccctccttatcccctccttaccccatcgtaccacgcacactccgctcacccctctccctactccattgctaacctcacacgagcagagccattggctccactccctgctttgtgcttaatt

SEQ ID NO: 693350 - DNA, 596 bp, Homo sapiens
tgacttctgctgtgacttttccattctcacccacagctggaagtgaggctccaggctggtggcattgtcctgggctgaactgtctcctgaaattcccatgttgaagccctaacccctagtaccacagaatgagactgtatttggaggtagggtcttcacagaggaaattaagttaaaacaaggtcattacgatggcccttggtcccacctggctggtgtccttatgagaagagatgaggacacagacacgcacagagagaagaccacgtgaagacacagggagaagatggagagaggcatcagagggagccagcactgctgacacctcygtctcacatttctagcctctcgaattgcaaggaaataaagttttgctgtctaagccatccagtccatggcactttgttacagcagcgctaccgaactaataaaggcattgaacttggcctcggggaagctgcttctggggctgcccccctccttatcccctccttaccccatcgtaccacgcacactccgctcacccctctccctactccattgctaacctcacacgagcagagccattggctccactccctgctttgtgcttaatt

SEQ ID NO: 693351 - DNA, 596 bp, Homo sapiens
tgacttctgctgtgacttttccattctcacccacagctggaagtgaggctccaggctggtggcattgtcctgggctgaactgtctcctgaaattcccatgttgaagccctaacccctagtaccacagaatgagactgtatttggaggtagggtcttcacagaggaaattaagttaaaacaaggtcattacgatggcccttggtcccacctggctggtgtccttatgagaagagatgaggacacagacacgcacagagagaagaccacgtgaagacacagggagaagatggagagaggcatcagagggagccagcactgctgacacctccgtctcacatttctagcctctcgaattgcaaggaaataaagttttgctgtctaagccatccagtccatggcactttgttacagcagcgctaccgaactaataaaggcattgaacttggcctcggggaagctgcttctggggctgcccccctccttatcccctccttaccccatcgtaccacgcacactccgctcacccctctccctactccattgctaacctcacacragcagagccattggctccactccctgctttgtgcttaatt

SEQ ID NO: 693352 - DNA, 640 bp, Homo sapiens
cccacagcaatttagtgatgggatttggtccagagccttgaactcctgttggccactctgcctagcttcctcctgcaacgtgttaacacttgcttggttcccctctggcacacacatggacacacacagtgcatctttacagctgccccagaggcacaggtgagctgtttattattatggacamaagacacccaggccctggtctgtctgtcctttaaatgttatgcctacacccaggcatccccattaacacacaggtcccttggaacaatgctgtcctctcccttagtcgtcagctaggccttagatagaaaattcttgtccctgtgaggaaggatcctcctctcaaactccttttctctttctctgccctcacagtcccttctgaagcccagctttcctggtctctagtccatatgaatgaccagcctcctaaaggcctcataccatgctctctccaatccattccttgaaccacggccagagccaacttcctgaaattcaagtctggttatgtaactttctgcccccccatcactctgggaataaaacaagtggtgaggccaagctgtggtttttgagagctgtaacaccccataatatcatcagccacaccaaatacatattccgttttaggcga

SEQ ID NO: 693353 - DNA, 640 bp, Homo sapiens
cccacagcaatttagtgatgggatttggtccagagccttgaactcctgttggccactctgcctagcttcctcctgcaacgtgttaacacttgcttggttcccctctggcacacacatggacacacacagtgcatctttacagctgccccagaggcacaggtgagctgtttattattatggacacaagacacccaggccctggtctgtctgtcctttaaatgttatgcctacacccaggcatccccattaacacacaggtcccttggaacaatgctgtcctctcccttagtcgtcagctaggccttagatagaaaattcttgtccctgtgaggaaggatcctcctctcaaactccttttctctttctctgccctcacagtcccttctgaagcccagctttcctggtctytagtccatatgaatgaccagcctcctaaaggcctcataccatgctctctccaatccattccttgaaccacggccagagccaacttcctgaaattcaagtctggttatgtaactttctgcccccccatcactctgggaataaaacaagtggtgaggccaagctgtggtttttgagagctgtaacaccccataatatcatcagccacaccaaatacatattccgttttaggcga

SEQ ID NO: 693354 - DNA, 640 bp, Homo sapiens
cccacagcaatttagtgatgggatttggtccagagccttgaactcctgttggccactctgcctagcttcctcctgcaacgtgttaacacttgcttggttcccctctggcacacacatggacacacacagtgcatctttacagctgccccagaggcacaggtgagctgtttattattatggacacaagacacccaggccctggtctgtctgtcctttaaatgttatgcctacacccaggcatccccattaacacacaggtcccttggaacaatgctgtcctctcccttagtcgtcagctaggccttagatagaaaattcttgtccctgtgaggaaggatcctcctctcaaactccttttctctttctctgccctcacagtcccttctgaagcccagctttcctggtctctagtccayatgaatgaccagcctcctaaaggcctcataccatgctctctccaatccattccttgaaccacggccagagccaacttcctgaaattcaagtctggttatgtaactttctgcccccccatcactctgggaataaaacaagtggtgaggccaagctgtggtttttgagagctgtaacaccccataatatcatcagccacaccaaatacatattccgttttaggcga

SEQ ID NO: 693355 - DNA, 2158 bp, Homo sapiens
gggttatctgttcttaaagccatgggacaattatggaggttcaataagtagctgttagaccatctaggcaatacctaatgtaacaggtctggaaactgctggcctgatcaccttgcgtaggaactatagctgaatattttgagtagcttctgctattaaaaagactgcagaataagaagcttgtgccagactatgggtcaggagccatcaaaggtgctttattttcaataagaagacattgaggaatctttgttaagaatccagattgatctcacaaaaccattccaatggaatatattctgatataaaaaattccttttaaaaattacttgaatgtaatttggagtaaagggtaatggctaagatcatagactcagaaggagttggataaacctcaatttggttcctggctctgctacttgttagttgtgtgcccctgggcaagttacttaacctctccttgtttcagttgcctcatcagttaaatggggagaaaaatagaatctacctactgatgtcatgaggactgaatgaaagaacatgaagtatttggcagggtgcattgcagaataacaatcacagcctcatgatagttactggcatcacatcagatcccagatgtatgttcaaacagtggactcatttttatctcagttgggtttgagaatgtgtcttaaccatgagtattgtgccacaatgttcttgagacattgattaggcaaaacagagaatggccagggagactggccagtcctctcctttgaacccagttcattgctcttgagttcaaagataaggagtaatctcgctcaaccattgttgaagtctctcctgctggtcttggatgaggaccaagtcctcatttatattcatgtatgcagaccacattataagtacacatatttatatcacagtcacctatttatgtcacgggagttaaactttgatgaccctttggtggggctggatcaagttggatggagataagatctaagttatacagggccttgagggcagactggctcttttagtatctttacattaatccatcgatgaggatattttctccacaaggacttgacaaggattttttcactcaaaaaacattttagacccaccaataataataagttaactcatttaatgatcacagcaacctgtcaggtagatactattatccccattttgaagatgaggaaactaaggcactgagaggtgaaataattttcccaaggccacacaactagtaaacgaattaaagcacggggccagattctgagagagtgtaaggcagcagcgttagaaccatctcttttggatctaactggtttttggcttgttgttcttcttgtggaggttttggtggatggaaggtgggagaagcatctcttaaggactcaccagatcattaaaaaaaggcagtggtgattcttctttggccttcacagcatcacagcagtgaagaaaattgtatagcagactctctgctcaccaggctagcaggcaagcatccctaggaaattgcaccccctgacttagaggactgccttgggaagggagaggtttagggaggagacagtgtgattccagggcaagaggctatgtgtacccttgggcattcttgtaggtatttgctgggtaattttaaggggactggcttagagaaatgtaatgaataaaggagggtcctctcatggtctgttaattccttgcacttttcttcttgtcagtcatctacaatattcagtacttaacaagtttgaagcttctatagaaaaagtttgaataccttgctttctgcatggaatttaggaaattcccttctccaagcactgcagtcaggaagcctcagcatgcaaggtaaaatacactaacttgatttgtaacattgactgtccttgttgtattccccacatttatagcacatcaatctkaaagcatagaaagttagaaaagaattatattcacaagcttggatttgaagttttagcctgtagaagagaaatacacagggaagtgtccgaggataagagcccctttccccctccctctggccacagagtggcatttccagctgcctgacaacctctgtagcctagtgttgaacactggtgctcaccagctgctgctggagagaagccggctggtgggggagggg

SEQ ID NO: 693356 - DNA, 586 bp, Homo sapiens
tttttttttttttgaaacagagtcttgctctgtcgcccagggtggattgcagtggtatgatcttagctcactgcaacctccgcctccccgggttcaagcgattctcctgcctcagcctcctgagcagctgggattacagccacgtgctaccatgccaagctaatttttgtatttttagtagagacggggtttcaccatattggccaggctggtctcaaacttccgacctcagatgatccatctrtctcggcctcccaaagttctgggattacaggcgtgagccaccacacccaacccatggtgttcattcttgagccaatcagtgtgatcagggggattagaattctgggcagcctggcctgatctcacacccacgaagtgtgtgtgtgtgtatgtctgtgtgtgtctgtatgtgcatgagtgtgtgtgtgttcccgtgactatgttttgtagagcattgtgactaagccctaccaggacctcatggaatgggggagagacaggcagaaacaggcagtatctgcccccaattcaatgttcttcattcctatccaccaattttccacaaaggtcttgctctgtgcca

SEQ ID NO: 693357 - DNA, 1522 bp, Homo sapiens
tacaaaggaataattttattcatgcagtgctttcataaaaggtgagtataatctcagtccatgagggtgtaaagtgaaatgagctggctggctggagacggacagggtgccagagactactagccagtcagggtcacagctgtattggtcgattgctgggttcctgttggcttggtctggatcatgttatttctggtgttggatttcctgtccatgctcctgaccacgtctctcacccacgtggcttgtggatcagcacagacttttaggccacgtttggtaataaaactgtaacgcaaggaaaagacagatgaagttagccacgttctcaaagcctcagggtcaggagttaagatcagggcagacatgaagagatcttgtgcagaaattactgcaagaaatagtctttcagagccatgagatcataaatgagcacccttcttctgccatctattttaacataaaggagaaatatctgcaagtagtatccagcccctttgttcaccataattcacaggctccttttctcatccatgtcaccaaatgttgtaacaaaaagacatttgaggccatctagttccattattatataacctcttccttttcaaatttgaaaatactcatcttattttttttaaaaaggtgatttttacattttcattctttagagcaaagcttgcaatatgtattgggaagagttattacttctaaaaatgagattctggtagaagaaagggaccatgtaggttgtgcattgactcattttcttgaaatatggcaactgataaagtatgggactctgcctaactcaaccctaagatcccccaactccagtgaggcttgcagggaaaccctgacatgagccagccatctctaaacccagatctcagagctgtgcacagtattcaacagactcttccactaagacaaatagaggaggacttctattctttctttggcagcccaatttctgcaataatcgctattcggttgggctgcagaaagacatggttgataaggaaaactaaagaggtttttggttaagttgaggtgttcctctatgctgacctacttttcctgaggayggcagcatttctatagagtgtatttctatacctctaggtacccacccagcccaacttctgaggaggcagactcacattactgctctcaaggagccttccgtgatggtgtaggtcttgattctgctaactggcagtcgctgggtagtgaggctcacacaggtcctcctatgtgagacttcactccctacacctgatgaggaaaaaaaaacaacagacaattaaaaataaagcaattacccagatcacaggaacaatcgtctgttaaattactctgagaatgttgtgagaatataaggccatttgctttttgggggaagagaggactgataggcatcccgaatctcttgcccgtcacagattcttagtaaatatttgactaatttaaaaactcaatcaacagaattgtttcaggaatttcatgctgagagaaaataaca

SEQ ID NO: 693358 - DNA, 607 bp, Homo sapiens
aatactttagcagataagacatgcaatgaagaaaatatgtaggccacgggtcatcttgaagttaataaatttcacatttaagaccatttgagccaacaactagctttattgaaaaatgcttggcagacaaagaaactataaccaaatgcctaaagcattggacaaatggttttacagcactgactctaatatatcaaacagcttataaagaagaagaaaatatctgaaaacaagcaagattaatgaaactgttgttttcttaaaaaaagatgaccaatgaaaattatactcctttagaaaatgtaaaattcctttttgctttaaagagattaagtacaagactattaatatctacctccaaacttcgtaaatgtaattcagaatagtcctagggattgatagttttccatcagagttcagtaaagaaaaaaagattattgacttaggcttccctcttcagagatgaagtccactcaactggtatccgttttgatcaaaagcagaagtcgtaaagtgccaagtactcaatgacaaggacacagaaccscgtgagggatgggtgggtgacagggaaaccatcacccaccgagcgccgacactcaccgtc

SEQ ID NO: 693359 - DNA, 632 bp, Homo sapiens
cacactcggagacgagaaccaccacccaccgagcgccgacactcaccgtccacactcggagacgagaaccaccacccaccgagcgccgacactcaccgtccacactcggagacgagaaccaccacccaccgagcgccgacactcaccgtccacactcggagacgagaaccaccacscaccgagcgccgacactcaccgtccacactcggagacgagaaccaccacccaccgagcgccgacactcaccgtccacactcggagacgagaaccaccacccaccgagcgccgacactcaccgtccacactcggagacgagaaccaccacccaccgagcgccgacactcaccgtccacactcggagacgagaaccaccacccaccgagcgccgacactcaccgtccacactcggagacgagaaccaccacccaccgagcgccgacactcaccgtccacactcggagacgagaaccaccacccaccgagcgccgacactcaccgtccacactcggagacgagaaccaccacccaccgagcgccgacactcaccgtccacactcggagacgagaaccaccacccaccgagcgccgacactcaccgtccacactcggagacgagaaccaccacccaccga

SEQ ID NO: 693360 - DNA, 632 bp, Homo sapiens
cacactcggagacgagaaccaccacccaccgagcgccgacactcaccgtccacactcggagacgagaaccaccacccaccgagcgccgacactcaccgtccacactcggagacgagaaccaccacccaccgagcgccgacactcaccgtccacactcggagacgagaaccaccacccaccgagcgccgacactcaccgtccacactcggagacgagaaccaccacccaccgagcgccgacactcaccgtccacactcggagacgagaaccaccacccaccgagcgccgacactcaccgtccacactcggagacgagaaccaccacccaccgagcgccgacactcaccgtccacactcggagacgagaaccaccacccaccgagcgccgacactcaccgtccacactcggagacgagaaccaccacccaccgagcgccgacactcaccgtccacactcggagacgagaaccaccacccaccgagcgccgacactcaccgtccacactcggagaygagaaccaccacccaccgagcgccgacactcaccgtccacactcggagacgagaaccaccacccaccgagcgccgacactcaccgtccacactcggagacgagaaccaccacccaccga

SEQ ID NO: 693361 - DNA, 602 bp, Homo sapiens
tgtagttttacgttaaaactcagactgtttttcagtttaggggatcttttatggtttgctaaaataaaatttccattttgcctaagtcttttcatatgttaagaatggtatccaatataaaaagcaccatatttaccatgcccaaataaattctctaatgtgaacctacatttattttcattacrcttctaaactgtatagcaattatgggcccttaggttatttcagaacttcatacaatagggtaaaacacacacatacgcatgtatgtgcatacacgtgtacattagctaaattctgcggactcaatatctacatatgggacaataaacaaaacaaggaaatcattttcaggaaagttgctcaatagaaatatttaaaacaaattctattccttggcagaattacctctacgtagcaggcaaagaaaattatataagtaatttacaaatgacaaatgtgaaggcagcatcatgaatatttcttaaatcagctaatcttataaaagtatacatgagctgcacatttcctaagtttttttttttttcacctaaaagaccccaaaccatatgaatcactgtaatgaaagagttgctttattt

SEQ ID NO: 693362 - DNA, 602 bp, Homo sapiens
tgtagttttacgttaaaactcagactgtttttcagtttaggggatcttttatggtttgctaaaataaaatttccattttgcctaagtcttttcatatgttaagaatggtatccaatataaaaagcaccatatttaccatgcccaaataaattctctaatgtgaacctacatttattttcattacacttctaaactgtatagcaattatgggcccttaggttatttcagaacttcatacaatagggtaaarcacacacatacgcatgtatgtgcatacacgtgtacattagctaaattctgcggactcaatatctacatatgggacaataaacaaaacaaggaaatcattttcaggaaagttgctcaatagaaatatttaaaacaaattctattccttggcagaattacctctacgtagcaggcaaagaaaattatataagtaatttacaaatgacaaatgtgaaggcagcatcatgaatatttcttaaatcagctaatcttataaaagtatacatgagctgcacatttcctaagtttttttttttttcacctaaaagaccccaaaccatatgaatcactgtaatgaaagagttgctttattt

SEQ ID NO: 693363 - DNA, 745 bp, Homo sapiens
attcaacaaacatagacttgagaagagctgtgcttctgcctctgtctccataattagacttacattttctttctcttcaatttgttggaatatgctgcttggcacactgcctggacaacacacttacaagtttcgctcactgatggactgtgcaccccaagcctgtgctctggcacaccactgacgggcaggaggttaccctactctaggttatatgcatcatacatggaagcaaccaactctgctgttatttttagaatggtcctagacatactcatgtcacaaattatataaagttttccctttcccattataatttcaattactataattagtataagcacatttgaatcaaaaataagttcactatttacctatagaaaatgattaagtttagattcacttagtaaataactttaaataatatacattaatttaaatttttatgactttttgatagaaaaaayaaaaccagtatttaacagaaaacttaaataatacttttttcttatttaatgtttcaaagacgtgaacttcaatgtgtatttgtaagtaaagaccaacagtattcttatttaaaatttataaaattcaaatactaagaactcttaataattgcagataacagaacaattaaaatcttaacagcagttttgtgactcagaactaactagaataatctttactgacatatacacaaataaagaggtgacaacaatttaaatacccaacggtaagatttaaa

SEQ ID NO: 693364 - DNA, 1955 bp, Homo sapiens
cctatcattttgttccagctcttcatttgtgttgtgagatcttgctgggcaaaatgctattcctgttactgactacagatgcactaaatgcctataacgacacatttaactcccatgatcgtctaattttactttccctacactggaagctcctccagttccaggctttctttatagctctagacagatatagctagaactcaatatgtgtttaaaggcagtgagttctttggtattgcttttttgaggctactttatttgaaagtgaaacgtcaatttttatgtaatacattttcattttattgtagaaagtgagaaaatccttttagttactcaaatctgtctgagtgttttgtgttacatatcattgaggaattggacgtcagtgtagtataggactttttcccatatagtaaaaatacttgatagctgacgattttgcttcataagattctacagtcaaactttctctcaacctactataatgggacttggcacacagagttctaactcttaatgttatttcttgcatcattttacaccttttaaaatgtcctcaatgactcaaatccttggcctttggaatgtgttttgttaactggaaagatgtaaacagctcatttaacttgaccttcaaatgttccttccttcctccttttggtatgagcayagcacaggccgttaatatctgtgatagccgtgaagtggcatccacctcccccagctcttccccttcgtgatgccagtcatacttcgtcagtactgacaagcaattattagtctttgtttcctttacactgtatattggcaaaacaatcattgaaaggaattgtagagggagaaaccactatctttgcactattgtggtaacacagcttttaggcttgctgagaatatccattagttttgtcctcttatctaaaaatgatttcttctttgctttgtattgctctgggagttgaatatttcaccaacttctgccacattagggatggatatctttatttcttcaataactggggtcttttccctattgccctctgttccatgcttaaaggcattcttagtacatttcaattccagttgtattagctgtaatttgggtacttttaaaaagcctatttgattctcaagagctttttccatcttttttattggtctgacctcagtctactaaggcaaattggtcccgaggtatattcttatagactgaatgtgtaaagatagcacagggacacttagctaggtgctttactcaagttacagcaaagaaactttatctttgaagttttttaattatatcaagccttggaagtagggcaagttttgcttagtaaagttattctttcaaattttatcataaactctcaagatccatgatttcttaaagattttaccttttggaaataaaggtagaccacccaaatgacaacaaacaaaggcagttattcagagcttgctgtatcaaaggagtcagccaccatgaattaaatttggcagagactcaaagacaggctgtggatagaagccatttatagtgataaaaaataaaaggtgtatagtgataaaaaataaaggctttagatatgcactgttggagtttgttggcatggggaagctgcaggtaggctacctagaagcaggacatcctatgcaattgtttgaggaacattttgggctttgtctagttcctcctgaattgggggtgggacaaagcagtaggaaagctggcagctattgacaaaggcctgaccattctgggccagttactacagagattgtggtgtggcttcttgggctggttgtatcttaggttgtaggtcagagttctatggctaggattttttttttaatctaaaaatccagcaataacaatgcattgtactctgctaaaaagtgtctaggtactatttatatctattggatataaatagggttgggttgcaatctattta

SEQ ID NO: 693365 - DNA, 692 bp, Homo sapiens
aatttttgttacctataacaattacagcatatttgaagtttcttaaaatggaagcaataccatgaatgttcaactgtttacatcatttagaattagtacttaatgtattatatcttctgacagtttccgttttatagttttgaagatatttcccaagaagttttctaaagaactggttgtttacaagagggatccagtatctgtcttttcaccattgtatcaatactcacctgattgctagtgccagaagtagattgttttcttttctttttcttcttccttattttttttgagatggagtctcactctgtcgcccaggctggagtgcagtggcaccatctgggctcaccacaacctccgcctctcaggttcaagagattctcctgcctcagcctcccgagtagctgggattataggagtgcaccaccacacccagctaattgttatatttttggtagagatggcgggggtggttcaccatgttggccaggctggtctcaaactcctgacctcaagtgatctgcctgtctcagcctcccaaagtgctgggattacaggtgtgagccactgtgcccagctagaagtagatttttgttgttgttgttccaaggcattatttcccctaaaaatattcagcaggactctacttccgyagaatgttaataagcattacatgtaaaaggatttatagg

SEQ ID NO: 693366 - DNA, 1050 bp, Homo sapiens
tcatacctggatatgatgtacattaagtatcctataatttccagaggaagggaccactttggcttggttcgtaaaaagaggcagcatgaatgctgatgtcaaaaggtggactggatcttggtaagcagagggtctacccaggtcaggtgtttgttgatgaggagggagtgcctgcaagcaaaggaagggtggttaaaaagaagaagggcaggttgcgatgaggagmtagggagagaactgtttggttggagccaagggtgttctagagtgggaaaggagtaggatagggagagaagggagagaacagattgcagaagtactttcaagccataataaagaactttgctatatattctttatgaatgtgaatggaaagattttcagtgtttttttaaagcaggcagtcacatggaggaaaggtgcgggaaaggggtttgaaaggggtgggatctagagacagagttgaggctttgtagtctagatgtaaggagataaaaggtgtggacagaatggaagggaggggatattgtcaagaggttattttaaagaaaaattacagcttgtgaatttagaaacaaaattcactttgtttctagaccagataaatggtgcaagagtagagaaaggagatgggtagataaaggtggggaaagggcctggttttgcgggcagaagatgaggtttctgtgtgttgggtttgaagggatgttgggacttttgtgtggagatgtctagcaaacatggttaaaaataagcatttgggttgaacactgggagtttataacagtggtggttaaaatcctaagggtggaagagctcttggataggaagaaaagagaaaaaaaaggaaggaggatatgataaacccacaaccaaatcttgagagtacctttcagggagcagatgaagaaagaggtgaaaattaggcctgagtacttgtgtgtgcgtatatatacacatcaaaacatagacatacataaatagataatgcgcacattagatgtgcccacaaagatactgagaagttgaacgtttgatgtaaaacctgaa

SEQ ID NO: 693367 - DNA, 673 bp, Homo sapiens
tactgaatcacagtcttcatcttaacaaaaccgagtgatctgcatgcacgtcaaagttaagaagtacagtggtcttgccgcttctacctttcctagctagcttcttatcattcttcttcctcccttcttccttcatttccttctccctcttctccttgcttccagaaagaaacggacctcaccctccaatagttggcactaacacacacacaggtccagggggttgctccccacttaccttcttcctgcctggaatgatgttacaccaccaggagctgcagcaaccatcctataactgtgaggtaaccagcatgtgaattaaagtcaatgtcctaagaatggcagaggaaacagaaagaacccagtttttagactgttgagctcctgcaccagccctaagctgtcttcctctggacttcttgatatgtgagaaaaaataaataaataaacctgtactcatttaaaccactttagtcaggcattctgttctttycgattatttacataactggataataaggtatgaaatcaatgttaccattgctgagttaacagggagatctgaaaaacggagaatcgcttctgagaagtgaccttcttcgttgcagccaaaatgtccctttccctttgaaaattctgatgaaatatttttatcatacactaaacttttata

SEQ ID NO: 693368 - DNA, 596 bp, Homo sapiens
aagctctccattactaaagataagttccatttgaagcatgtgatctctgtgacccactccctattcataccccctccccttttgaaacccctaataaaacttgctggttttgcggctcaggtgggcatcacggaacctgccracatgtgatgtcacccccggagacccagctgtaaaatttctctcttttgtactctttctgtttatttctcagaccggccgacacttagggaaaatagaaaagaacctatgttgaaatactgggggctggttcccccaataaacttattcgatggtaactctaacatgtttggtcaaccttttctattaagctgtgctgaacaatacccacttaggcaacggtctcccgccacctcattccaatctgcagtgatgtctccagatttgtgataacggcaataacacaaaacaggctttccactgttgtgagtaaacagcagaattcatgaagaagcaaactgtttacccatgtgaggtgaatgagcttttcctgaagagcaggatttagtgccctcaaggaggcaatttattaaatggagccagaaatgtgtgctcattttgctggtctgaataga

SEQ ID NO: 693369 - DNA, 652 bp, Homo sapiens
taaagttcaacaagcaaacaaacaaacaaaatggagtgcagtcatatgcactctaggtctgacctcaacagagaaccatttacgtgttttcaaggggttttatttcaagtattcaaagatattcatgggaccttgtttgagcaaacaattgcccttctagatgtggcaaagacagcccaccactaccagaaggaaaattcttggcccctttgtgactacaccgtaatattggcaaaatacatraaagaaataatgtcccaatacatgaagtatacagtcatcaaagaggctactcacaccccactttgatggggtgcttctcagcttcaaatgtatccatgtatcttgctagtaaaaagcaagtcacagcttcagaatctaaacccctggttctaaaatcctgccatgacataggaatcacccaacaggctgccccaacgccacaagttctgggttgggggtgggagggaggcagcccggtcaggggtgggagggaggcagcccagtcagaggtgggagggaggcagcccggtggggggttggagggaggcagcccaggtcaggggtgggagggaggcagcctggtgcggggtgggagggaggcagcccggtgggggatgggagggaggcagcccaggtcaggggtgggagg

SEQ ID NO: 693370 - DNA, 652 bp, Homo sapiens
taaagttcaacaagcaaacaaacaaacaaaatggagtgcagtcatatgcactctaggtctgacctcaacagagaaccatttacgtgttttcaaggggttttatttcaagtattcaaagatattcatgggaccttgtttgagcaaacaattgcccttctagatgtggcaaagacagcccaccactaccagaaggaaaattcttggcccctttgtgactacaccgtaatattggcaaaatacatgaaagaaataatgtcccaatacatgaagtatacagtcatcaaagaggctactcacaccccactttgatggggtgcttctcagcttcaaatgtatccatgtatcttgctagtaaaaagcaagtcacagcttcagaatctaaacccctggttctaaaatcctgccatgacataggaatcacccaacaggctgccccaacgccacaagttctgggttgggggtgggagggaggcagcccggtcaggggtgggagggaggcagcccagtcagaggtgggagggaggcagcccggtggggggttggagggaggcagcccaggtcaggggtgggagggaggcagcctggtgcggggtgggagggaggcagcccggtgggggwtgggagggaggcagcccaggtcaggggtgggagg

SEQ ID NO: 693371 - DNA, 1610 bp, Homo sapiens
tgcccatcaagacctctccccagggcccatacagccaggccatgctgctgccttacctgttccctgtgcgagtaatgaccttgaatcaaaatagtcaccgtaatcaggtatgtagcgggcaggttcctcattttctgtgcctagtgttatgctcttatcccatctgggatttgactcatcattaggatgaattaggatcattaggatcmatccgcattaggggatacagtctacagtcacagacctgcacagacctgctgggttgcaaggagctttctagtctcttgggcatctcttcccatcttctccttccacgctgtgctggctggtgtagccaatggccgtgagaagggatgcgtttcaaaaaatgcctgtgtgatgcatgtttatagcagtacaatttgcaagtgcaaaattgtggaaccaacccaaatacctatccatcaatgagtggataaagactgtggtataaatatgatggaatactactcagcaataaaaaggaatgactaatggcatttgcagcaacctgggtgagatcggagactattattctaagtgaagtaactcaggaatggaaaaccaaacattatatgttctcactcataagtgggagctaacctacgaggatgcaaaggcataagaatgatagaatggactctggggattcagggggaaagggtggggagaggatgaggtataaaaggctacaaattgggttcattgtgtcctgcttggatgatgggtgcaccacaatctcacaaatcaccactgaagaactaactcatgtaaccaaacaccacctgttccccaacaacctctggaaataaaaaattaaaaaaaaaaacactccaaaatgcctctgtgtgtgcgtgtgtgtgtgtgtgtgtatgtgtgtgtgtgtgtgagagagagagagtcagaaagacctcaaagaagaaagaggagaacaaagatggtgggtgagaaatagaaagagaagtcaaacgctatggtttggagcatgggttccagatgcagcccgcttggggtctcctcctggacccccactggctctgtagcctctgtgccttgcctttcccatctgtgtgatggggacactgatcatctcaccctcatagggtggttgtgaagatgaattaagataatgtttcaagtgtcaggcctggcacatcgtcaagtgttcaatgaacgtgtgctatatataatagcacatgaaaagcattttgagagcccagggagctaacttggggagtaccatctgtgcaggatgccggatacatccctgcttcctgctgtcagtagagattggtgaccagtcgcacaggctcaggagaaaggctgccggagtccatcttcctagctgtgacctggtcccccgggggcctctgctgccccctctgccatatggagatcacaagcacacttagctcacagggtgctatgaggagtaactgagtacacacacttgaagcaatgagaataatgtctggtatgcgaggagcaccagcaaatcgtgctcatcattccagcggagcaaattgttgctgtctctcaccgggctttgggttactgaggctgctatttattaaagtgtgggttgtgactca

SEQ ID NO: 693372 - DNA, 1610 bp, Homo sapiens
tgcccatcaagacctctccccagggcccatacagccaggccatgctgctgccttacctgttccctgtgcgagtaatgaccttgaatcaaaatagtcaccgtaatcaggtatgtagcgggcaggttcctcattttctgtgcctagtgttatgctcttatcccatctgggatttgactcatcattaggatgaattaggatcattaggatcaatccgcattaggggatacagtctacagtcacagacctgcacagacctgctgggttgcaaggagctttctagtctcttgggcatctcttcccatcttctccttccacgctgtgctggctggtgtagccaatggccgtgagaagggatgcgtttcaaaaaatgcctgtgtgatgcatgtttatagcagtacaatttgcaaktgcaaaattgtggaaccaacccaaatacctatccatcaatgagtggataaagactgtggtataaatatgatggaatactactcagcaataaaaaggaatgactaatggcatttgcagcaacctgggtgagatcggagactattattctaagtgaagtaactcaggaatggaaaaccaaacattatatgttctcactcataagtgggagctaacctacgaggatgcaaaggcataagaatgatagaatggactctggggattcagggggaaagggtggggagaggatgaggtataaaaggctacaaattgggttcattgtgtcctgcttggatgatgggtgcaccacaatctcacaaatcaccactgaagaactaactcatgtaaccaaacaccacctgttccccaacaacctctggaaataaaaaattaaaaaaaaaaacactccaaaatgcctctgtgtgtgcgtgtgtgtgtgtgtgtgtatgtgtgtgtgtgtgtgagagagagagagtcagaaagacctcaaagaagaaagaggagaacaaagatggtgggtgagaaatagaaagagaagtcaaacgctatggtttggagcatgggttccagatgcagcccgcttggggtctcctcctggacccccactggctctgtagcctctgtgccttgcctttcccatctgtgtgatggggacactgatcatctcaccctcatagggtggttgtgaagatgaattaagataatgtttcaagtgtcaggcctggcacatcgtcaagtgttcaatgaacgtgtgctatatataatagcacatgaaaagcattttgagagcccagggagctaacttggggagtaccatctgtgcaggatgccggatacatccctgcttcctgctgtcagtagagattggtgaccagtcgcacaggctcaggagaaaggctgccggagtccatcttcctagctgtgacctggtcccccgggggcctctgctgccccctctgccatatggagatcacaagcacacttagctcacagggtgctatgaggagtaactgagtacacacacttgaagcaatgagaataatgtctggtatgcgaggagcaccagcaaatcgtgctcatcattccagcggagcaaattgttgctgtctctcaccgggctttgggttactgaggctgctatttattaaagtgtgggttgtgactca

SEQ ID NO: 693373 - DNA, 895 bp, Homo sapiens
aaaaatccaatttatagtggtttagggaagaaaaataggcgttaatctttcttccataacaagaaatcaggaggcagtaacgcttgccttgatgatggcagggctggattycctgcaatctctttgtcatccttatcatctcattactacagaatggctgctgacccgccaactgtcacatctgcattcaaggcaggaagaagggaaacaaggaaagggcagtctccctggaagtctctgtcttctgatgaggatgagtccccactgtcaccctccctgcacaccccacagacttcctctcatgtctcattagccagagtgccgttatatggccacactcagacccaccatcggtccaggagaatcagatgcccaggactgatgagaccagcctctggcactgagatcgcagcatttcagctggttccataagcagaccagggctctgtttagcaagagaaataaggagggatggctgctgggcagggtctgccctcccaaaaattgccacaggaagcagttcccaggcatagtcccatttgatcctcacacaatctcataaagctgagacgattctctgccaatttagcagacaaggagacaaagctagcaaacagcagagctggcacctagacccaaacctgggttcctcaccactctgccgcctgcaggtcaccagaggcctcaaatgcacggggctgctgccgggtgtcagttacatccgcctcacctgcacctgccgtctcttggctctgagtgtgcaggtcagggtacttgagtgcccaggtactgacaggtgactgcaccatgcagagctccatgtggccgctgtgcactggagagctttgcccagagctatgggctgagcccctgccattggttccttcatccgtcc

SEQ ID NO: 693374 - DNA, 895 bp, Homo sapiens
aaaaatccaatttatagtggtttagggaagaaaaataggcgttaatctttcttccataacaagaaatcaggaggcagtaacgcttgccttgatgatggcagggctggatttcctgcaatctctttgtcatccttatcatctcattactacagaatggctgctgacccgccaactgtcacatctgcattcaaggcaggaagaagggaaacaaggaaagggcwgtctccctggaagtctctgtcttctgatgaggatgagtccccactgtcaccctccctgcacaccccacagacttcctctcatgtctcattagccagagtgccgttatatggccacactcagacccaccatcggtccaggagaatcagatgcccaggactgatgagaccagcctctggcactgagatcgcagcatttcagctggttccataagcagaccagggctctgtttagcaagagaaataaggagggatggctgctgggcagggtctgccctcccaaaaattgccacaggaagcagttcccaggcatagtcccatttgatcctcacacaatctcataaagctgagacgattctctgccaatttagcagacaaggagacaaagctagcaaacagcagagctggcacctagacccaaacctgggttcctcaccactctgccgcctgcaggtcaccagaggcctcaaatgcacggggctgctgccgggtgtcagttacatccgcctcacctgcacctgccgtctcttggctctgagtgtgcaggtcagggtacttgagtgcccaggtactgacaggtgactgcaccatgcagagctccatgtggccgctgtgcactggagagctttgcccagagctatgggctgagcccctgccattggttccttcatccgtcc

SEQ ID NO: 693375 - DNA, 895 bp, Homo sapiens
aaaaatccaatttatagtggtttagggaagaaaaataggcgttaatctttcttccataacaagaaatcaggaggcagtaacgcttgccttgatgatggcagggctggatttcctgcaatctctttgtcatccttatcatctcattactacagaatggctgctgacccgccaactgtcacatctgcattcaaggcaggaagaagggaaacaaggaaagggcagtctccctggaagtctctgtcttctgatgaggatgagtccccactgtcaccctccctgcacaccccacagacttcctctcatgtctcattagccagagtgccgttatatggccacactcagacccaccatcggtccaggagaatcagatgcccaggactgatgagaccagcctctggcactgagatcgcagcatttcagctggttccataagcagaccagggctctgtttagcaagagaaataaggagggatggctgctgggcagggtctgccctcccaaaaattgccacaggaagcagttcccaggcatagtcccatttgatcctcacacaatctcataaagctgagrcgattctctgccaatttagcagacaaggagacaaagctagcaaacagcagagctggcacctagacccaaacctgggttcctcaccactctgccgcctgcaggtcaccagaggcctcaaatgcacggggctgctgccgggtgtcagttacatccgcctcacctgcacctgccgtctcttggctctgagtgtgcaggtcagggtacttgagtgcccaggtactgacaggtgactgcaccatgcagagctccatgtggccgctgtgcactggagagctttgcccagagctatgggctgagcccctgccattggttccttcatccgtcc

SEQ ID NO: 693376 - DNA, 644 bp, Homo sapiens
gggatgacatcaggaatgagttgtatataaaagggaagactttatatgaattagcatcctcaaaacaytatagttgtgcttactcaagaattcagtgtggggcatttagattgaacgcaacctattatgtcaatcatagaacctattctaccaagattaatgaaatcagccaattatttttaggttaataatatttataaggagccaggcatggtggctcatgcctgtaatcctagcactttgggaggctgagaaggccacatctcctgaagtcaggagtttgagactagcctagccaacatggcaaaccctgtctctattaaaaatacaaaaaaaaaaaattagctggtcctggtggcacatgcctgtaatcccagctgcacatgaggctgaagcaggagaattgcttgaacccagcaggcgaggttgcagtgagccgagatctcaccactgcattccagcctgggcaacagagcgagattcgtctcaaaaaacaaaatttttttgaaagatatttcttgcttaaacaggaaatgaatttccttatctctgccttttctgtccccaatccttccccacaatgtgattaatcatagcttagtatgcattgtgctttgtagctttaatgcacaataatatttcaa

SEQ ID NO: 693377 - DNA, 644 bp, Homo sapiens
gggatgacatcaggaatgagttgtatataaaagggaagactttatatgaattagcatcctcaaaacattatagttgtgcttactcaagaattcagtgtggggcatttagattgaacgcaacctattatgtcaatcatagaacctattctaccaagattaatgaaatcagccaattatttttaggttaataatatttataaggagccaggcatggtggctcatgcctgtaatcctagcactttgggaggctgagaaggccacatctcctgaagtcaggagtttgagactagcctagccaacatggcaaaccctgtctctaytaaaaatacaaaaaaaaaaaattagctggtcctggtggcacatgcctgtaatcccagctgcacatgaggctgaagcaggagaattgcttgaacccagcaggcgaggttgcagtgagccgagatctcaccactgcattccagcctgggcaacagagcgagattcgtctcaaaaaacaaaatttttttgaaagatatttcttgcttaaacaggaaatgaatttccttatctctgccttttctgtccccaatccttccccacaatgtgattaatcatagcttagtatgcattgtgctttgtagctttaatgcacaataatatttcaa

SEQ ID NO: 693378 - DNA, 644 bp, Homo sapiens
gggatgacatcaggaatgagttgtatataaaagggaagactttatatgaattagcatcctcaaaacattatagttgtgcttactcaagaattcagtgtggggcatttagattgaacgcaacctattatgtcaatcatagaacctattctaccaagattaatgaaatcagccaattatttttaggttaataatatttataaggagccaggcatggtggctcatgcctgtaatcctagcactttgggaggctgagaaggccacatctcctgaagtcaggagtttgagactagcctagccaacatggcaaaccctgtctctattaaaaatacaaaaaaaaaaaattagctggtcmtggtggcacatgcctgtaatcccagctgcacatgaggctgaagcaggagaattgcttgaacccagcaggcgaggttgcagtgagccgagatctcaccactgcattccagcctgggcaacagagcgagattcgtctcaaaaaacaaaatttttttgaaagatatttcttgcttaaacaggaaatgaatttccttatctctgccttttctgtccccaatccttccccacaatgtgattaatcatagcttagtatgcattgtgctttgtagctttaatgcacaataatatttcaa

SEQ ID NO: 693379 - DNA, 644 bp, Homo sapiens
gggatgacatcaggaatgagttgtatataaaagggaagactttatatgaattagcatcctcaaaacattatagttgtgcttactcaagaattcagtgtggggcatttagattgaacgcaacctattatgtcaatcatagaacctattctaccaagattaatgaaatcagccaattatttttaggttaataatatttataaggagccaggcatggtggctcatgcctgtaatcctagcactttgggaggctgagaaggccacatctcctgaagtcaggagtttgagactagcctagccaacatggcaaaccctgtctctattaaaaatacaaaaaaaaaaaattagctggtcctggtggcacatgcctgtaatcccagctgcacatgaggctgaagcaggagaattgcttgaacccagsaggcgaggttgcagtgagccgagatctcaccactgcattccagcctgggcaacagagcgagattcgtctcaaaaaacaaaatttttttgaaagatatttcttgcttaaacaggaaatgaatttccttatctctgccttttctgtccccaatccttccccacaatgtgattaatcatagcttagtatgcattgtgctttgtagctttaatgcacaataatatttcaa

SEQ ID NO: 693380 - DNA, 644 bp, Homo sapiens
gggatgacatcaggaatgagttgtatataaaagggaagactttatatgaattagcatcctcaaaacattatagttgtgcttactcaagaattcagtgtggggcatttagattgaacgcaacctattatgtcaatcatagaacctattctaccaagattaatgaaatcagccaattatttttaggttaataatatttataaggagccaggcatggtggctcatgcctgtaatcctagcactttgggaggctgagaaggccacatctcctgaagtcaggagtttgagactagcctagccaacatggcaaaccctgtctctattaaaaatacaaaaaaaaaaaattagctggtcctggtggcacatgcctgtaatcccagctgcacatgaggctgaagcaggagaattgcttgaacccagcaggcgaggttgcagtgagccgagatctcaccactgcattccagcctgggcracagagcgagattcgtctcaaaaaacaaaatttttttgaaagatatttcttgcttaaacaggaaatgaatttccttatctctgccttttctgtccccaatccttccccacaatgtgattaatcatagcttagtatgcattgtgctttgtagctttaatgcacaataatatttcaa

SEQ ID NO: 693381 - DNA, 1167 bp, Homo sapiens
tgtcctaatacatgattaatttcataaatggtttatgtgtactagaaaaagataaatatttatatgttttatatatatcatatgattaaatgtactgattacattgctcaaatttgttttttatcaattttttaatgtatttgaactgtaatttctgagaaatgtgtgttaaaatttctcactatgattgagagttattttgtcacttttgctttatattttgaagctatgcttttatgttactagactatgactatccctagatgataaccattataatttttagatagattagttctttatttataattattatctatattctattacaatcaattcattttctataaattcctttgtcctgttataatttttccatatcatatggaaattttgtttggaatttatctgttttttctctttttattcttttattttcagactttgtgtaggtttattttrggtatatttttcctaagaggcatagtgagctaggatttaaaatttattacaagcctttgtcatttgatacattactttaacacatttacttttattgtatgataaacatatctggacttatttttaccattatttattcaattgctcactaacattttcttttctcattgctcgttctcttccctttttaaaattaacaacttttaattattttttcatttgccatttccaaagctgtagattgtatttccttgattttaagggttcgcttattttaatattcatgcttaactatcaattttttataaaacctttgggttttcagctttttaattttgttattaaaatcagaagtaccttgatactctttaatcatatgttgaaaagtctccaaatcaaaaataatattgctattttaaacatttttaattgattttctgtagatttatcaatttattctattcatttctgtattcagtgtttcttttatcccacacttaaatattcccttttatcccgatcacattcttttttaagaatatgattgtggtaattcctcttagtcattttatatggaaactatcagtagtctgtgatgacaaattgagctcagatctgtctccataattactagctatatgatactgggatgttacttattctgcatcttagtgtaagcatgtaataatgatcatttctaagtca

SEQ ID NO: 693382 - DNA, 608 bp, Homo sapiens
agaacccaaatatgcccatatacctacactaataatggtgttgtcttagctattcaggaggctgaggcgggagcatcctttgaagtaaggaggttgaggctgccaggagctatgatcgggccactgcactccagcctgggcaacagagcgagaccttctcttaaaaaatttaaaaataacacaaataataatggtgctgaaagttggaacagatggcaacttgcctgacctaatttcaagctatgccccaatgtcctctgggggccctattcacctgtatccatgccagcattccatcctcaaaagtggcagctactgtctgttgagtattttttatttatttatttatttttcaggtggggtctcattcctacacccaggctggagcgctgtggcatgatcatggctcactgcarcctccacctcctaggctctggtgattctcctacctcagcctcctgagtagcttggactacaggtgcataccaccatacctggctaatttcttgctttttgtagagacgaggtttcagcatgttgcccaggctgggtgtgttaagtcttaaatttaagtccaaatgtacaaatacctcctcattcattcctca

SEQ ID NO: 693383 - DNA, 879 bp, Homo sapiens
acgcccacatttcttcccactttggatcctgtgcctggtctaatgcccaggccccctcccgagcctctggtctccctagagccactccccactgtcgggacacctcatctgtgctccccaaaacgccacgcaaagcactggagagccttggacaatgaacacaacccgcacccccagccacccccgccacagccgcacggcacctcagaaagccgtgtctttttttttttttttttttttttttttgagacggagtctggctctgtcgcccaggctggagtgctggagtgcagtggcgcgatctcagctcactgcaagctccgcctcccgggttcacgccattctcctgcctcagcctcccgagtagctgggactacaggcgcccgccaccacgcccggstatttttttgtattcttttttttcttttttttagtagagacggggtttcacagtgttagccaggatggtctccatctcctgacctcgtgatccgcccgcctcggcctcccagagtgctgggattacaggcgtgagccaccgcacccgaccagaaagcggtgtcttaatcctcttgtccttcctcctaaatctcctggggcccttaggatccgcttaaagccacctcgttaaaacggtttcttctccacctgcccctcccttgatccagcctcactgaggtcacagcctccacctctggccatcctgaacccctcccaaagtcacctcttcgcaaactcctggtcccccttagaaggccccacgtccatcacgggattaattccactcaccctcaaacaccgcggcccggaggctctgattcccaccctagaggaggttctcttgaccccgccggcgcgaccctccccagcacgaccctt

SEQ ID NO: 693384 - DNA, 582 bp, Homo sapiens
tactcggttctgcaatgttcactaagtgccaccaggtggaagtacttcagtattttccagaacattgaaactagagctagaatcaaccagctcatcacaatcagggaagcataaaacttcagtaagttcgctttctctttaaaatawtgtcttgtaaagatgattaagcctgtgaaattaattggggaggcaaatatacaaaacaaaaaaatcaaaacacactgttgacaaattaaaatctgagattcccacagccctagtctgtgtatctctgtatctgacacattgtatatcatcaacgaatatttgttctacccttctctaagtgcatccacctcatttgttatctggtactgttcctacactggatagacttttttctccataataaccctagcctaggtcctccagagtgtcagagattcttgtcctattgaacaattctatcatttttatcttgtcataaacatttttaaagtgatgatttgtctcacatgactcatgtgcccatcagggtagagaaactcctgcactcaaagcacatgttccttcaattaaatggttcaactttcaacaggcaaa

SEQ ID NO: 693385 - DNA, 550 bp, Homo sapiens
caccttggaacctacgtggttggaaaagtaccctgcactttttaacatttataattttttcttttgtttgccatagaaagttgtacagataaatgaactgtatatgatgtaactgcagggtaatgtaaatttgcatcaactaatttttcagcttataatctctgttagtctaaaatttatgatccaggatcacaagaaaaatttaagaagaaaaaaatgcaatggattattttcaaaataagaagtgagatgatctgagtggattaaatttgatattgaatacacagccactgatttgaaacaaatttcagatccagttagaactctccttgttcaagaatgrgtaaaaagggggaaaaatgacactaacatgggacctacgagtagagtttgcaacattgtgggttagtgtttaccattctgggtcattcctccaatacatggttcatcccttcaatatgtggattcaaatcgtctttaacttgcaaaagttttctttgaagtatacactgtagctccattgttattctgttccattattttgattttc

SEQ ID NO: 693386 - DNA, 858 bp, Homo sapiens
ggcctccctcttcaggaagcgcaggctcacctcttcgccgagcttggtcacctgggcctggggcggaggcacattgtcccgtgtgcagcctctgctggacacgcagccggtccccctcctgcccatggtctccatcagagttggagtcccctgctgtccccaagccctgagcccggctgagctgggcctgycacaccctcagccggaagaaagccacggcgggcaggaccactctgtacccagacgaccaaccaggcatgggtttgtgaagcatgagaaggccacgctcaggtggggtccagacacacttggcacccaccaccgaggctgcccagggaaggccccccagccgccaccaggcccggcagggaagcaggagtgtcgtgcaggtgtccccatgcacggggagccaggtgggctgggcagagccttggggccttgtctccacaccaacagctgctttcctgccgccctgaaggggaggggaggggggaggcgcagccggccccatccctgcatctcatacacgcaaagggtaggcaggcggcacaggcccttcatcagccacggagaggcgcctcccgggaaacttcccctccacccaagcccctgctggcctcctgccccccaggaggtcaccttagagtagatatttttctgtaaaaagccagatggtacatgttcccacctcatgggatctctgttgtaaccctctcagcatggcggttacagcccccacagtagacattgacaacatgtaaaaaatgttcctgtgtgccaataaaactttatttacaaaaacaagcagtgactggcgcaatgactcactcccactttgggaggccgaggctggtggat

SEQ ID NO: 693387 - DNA, 675 bp, Homo sapiens
atcgttgttgtttgtttattgttgttgttgtttgagatggagtttcactcttgtcacccaggctagagtgcagtggcgaaatctyggctcactgcaacctccgcctctcgggttcatgtgattctcctgcctcagcctcccaagtagctgggattacaggcgcccgccaccacgccaggctaattttttgtatttttagtagagatagggtttcgccgtgttgggcaggctggtctcaaattgctgacctcaggtgatccacctgctttgtttttatgccaaataagggcagaagaaaaaagccaactgaaggtcataaacccaggggtacaggctcactgaaagactgagactcaatcataggaccaattcgatttagtgcccactgtactccagtataacttcatcttaactaattagatctgaaatgaccccttttccaaaaaagttacattctaagatactgacagttaggacttcaacatataaatttttggaattcatatattttggaatgtcaacacaagacattcaaataattttaaaactttattattattttcatgtgaatatttcagctctacactttgatttactttattttcctcaaaatggggaagccaggacaaagaggaatacaaaagagttactcattttctattgctatataacaaa

SEQ ID NO: 693388 - DNA, 675 bp, Homo sapiens
atcgttgttgtttgtttattgttgttgttgtttgagatggagtttcactcttgtcacccaggctagagtgcagtggcgaaatctcggctcactgcaacctccgcctctckggttcatgtgattctcctgcctcagcctcccaagtagctgggattacaggcgcccgccaccacgccaggctaattttttgtatttttagtagagatagggtttcgccgtgttgggcaggctggtctcaaattgctgacctcaggtgatccacctgctttgtttttatgccaaataagggcagaagaaaaaagccaactgaaggtcataaacccaggggtacaggctcactgaaagactgagactcaatcataggaccaattcgatttagtgcccactgtactccagtataacttcatcttaactaattagatctgaaatgaccccttttccaaaaaagttacattctaagatactgacagttaggacttcaacatataaatttttggaattcatatattttggaatgtcaacacaagacattcaaataattttaaaactttattattattttcatgtgaatatttcagctctacactttgatttactttattttcctcaaaatggggaagccaggacaaagaggaatacaaaagagttactcattttctattgctatataacaaa

SEQ ID NO: 693389 - DNA, 621 bp, Homo sapiens
ttgaattgactcggtaagtaacccgtccttcagaatgtcactggcacatttgacttgggggatcatggctatttgtgttttcctcaatttgtgtgcatgatctttatacaaataaaactaatatgcttcaaatgtgttcaaaaggaagatctttgaatagatcccaggtcttcctgtatcattgattttgctagttgagttttttcaatcttgcatgcactcctcctgtggtcgacagaataatggtccccaaaagttgtctaattcctaatccctggaacctgtgaatacgttagctcagatagcaraagggactttgcaagtgtaattaagttaaagaccttgaaatgaaacgattatctgggatcattccagtggacccagtccaatcacatgaatccttaaaagtggaagagggaggcatagaaatgggtcaattactaaactatttgtatatttgtattcactaggacacatcaaaagcacctactaatagatgtgtctcccttgctagagtcatctctaagcaggcaggacaatgactgacacatagcagacccttgataaacactttcgacttctttatgtggtcactcttgaaatagtacatggagctctact

SEQ ID NO: 693390 - DNA, 621 bp, Homo sapiens
ttgaattgactcggtaagtaacccgtccttcagaatgtcactggcacatttgacttgggggatcatggctatttgtgttttcctcaatttgtgtgcatgatctttatacaaataaaactaatatgcttcaaatgtgttcaaaaggaagatctttgaatagatcccaggtcttcctgtatcattgattttgctagttgagttttttcaatcttgcatgcactcctcctgtggtcgacagaataatggtccccaaaagttgtctaattcctaatccctggaacctgtgaatacgttagctcagatagcagaagggactttgcaagtgtaattaagttaaagaccttgaaatsaaacgattatctgggatcattccagtggacccagtccaatcacatgaatccttaaaagtggaagagggaggcatagaaatgggtcaattactaaactatttgtatatttgtattcactaggacacatcaaaagcacctactaatagatgtgtctcccttgctagagtcatctctaagcaggcaggacaatgactgacacatagcagacccttgataaacactttcgacttctttatgtggtcactcttgaaatagtacatggagctctact

SEQ ID NO: 693391 - DNA, 1406 bp, Homo sapiens
gggttgctgtattagaagagtcaggacttgttcatatgtctgtctctccctctcccccagatcatagctgaatacccagccctggactttgcagataataagtgtagcaaatattttttaaaacatttatcagcatcatttaaattattacaaaagtttataaattgaatcctatatagtgcattgttccccttaactatttctgattatatatcatcttgttattttagatattgaagaatttatccctcatstttcctcaattttgtgtgtgtatgagtgaggaaccacaaaagtgttttcctaaaaaaatacttgctaatattctgctgtgtgttgtattttggtcctaatgttgaaaaacaaatatcctcaaatgacctcaaatcttgctacctagggaaggaaatagtggcttttgggaaatcaagaacttttgaatataaaaaagtacctagaagaataaaaggcacattcctttatgtatcttattaggctttctttttttcctaagtagtaaaacaatcattagtttcactgagtattttggacagcatattagaaatttgaagtaccaagtttactattctttactggagattgtccagcagaggaaagcaaataccagtggatgtgtggaagcattttctgatctttaacacgtacacctgctatacctaacagcctgctcagaagaaggttctatttctagatggtaaatgagagcttcccagtggaccattattttatcatgagtggtagtgggaggagggacagcgtttggacatgagggaattatcatgtatgccatcatatcattgctaggtcatttatctcttgtctagccaagttcacgttaaattctactaggttagcacttgaggtcatttaacaaaactgctgtttattaagaatgggagacatgttcttctttgaatcctgcaagaggtggttgctgaaaataataggaaccatatcttcatattttaggcaaaagtcacttttaagaagctttgtgataaatcacctagagaagccagtgaattatgccctaatggttggaatgagacaagttttctaatagtgatgacaattattaattactaatcacaagtatgtgtgtggtgggagtgaatctcaaagctataataaaaggaaatttgtgcctttttgcataatgaatgagaaaagtctctttaaaagagcaaagaaaactattaaattataaaattgttgaatttcttgtcacaacctttagaaactctataaactcatctaaaaccccaattcactgtagtgtgaaaaatagatacatattcagagtgatcatttatcttgaattaaaattaagcatccgagtcattacaaacttatctcctgcttatggacatgctgacataaaagta

SEQ ID NO: 693392 - DNA, 1406 bp, Homo sapiens
gggttgctgtattagaagagtcaggacttgttcatatgtctgtctctccctctcccccagatcatagctgaatacccagccctggactttgcagataataagtgtagcaaatattttttaaaacatttatcagcatcatttaaattattacaaaagtttataaattgaatcctatatagtgcattgttccccttaactatttctgattatatatcatcttgttattttagatattgaagaatttatccctcatgtttcctcaattttgtgtgtgtatgagtgaggaaccacaaaagtgttttcctaaaaaaatacttgctaatattctgctgtgtgttgtattttggtcctaatgttgaaaaacaaatatcctcaaatgacctcaaatcttgctacctagggaaggaaatagtggcttttgggaaatcaagaacttttgaatataaaaaagtacctagaagaataaaaggcacattcctttatgtatcttattaggctttctttttttcctaagtagtaaaacaatcattagtttcactgagtattttggacagcatattagaaatttgaagtaccaagtttactattctttactggagattgtccagcagaggaaagcaaataccagtggatgtgtggaagcattttctgatctttaacacgtacacctgctatacctaacagcctgctcagaagaaggttctatttctagatggtaaatgagagcttcccagtggaccattattttatcatgagtggtagtgggaggagggacagcgtttggacatgagggaattatcatgtatgccatcatatcattgctaggtcatttatctcttgtctagccaagttcaygttaaattctactaggttagcacttgaggtcatttaacaaaactgctgtttattaagaatgggagacatgttcttctttgaatcctgcaagaggtggttgctgaaaataataggaaccatatcttcatattttaggcaaaagtcacttttaagaagctttgtgataaatcacctagagaagccagtgaattatgccctaatggttggaatgagacaagttttctaatagtgatgacaattattaattactaatcacaagtatgtgtgtggtgggagtgaatctcaaagctataataaaaggaaatttgtgcctttttgcataatgaatgagaaaagtctctttaaaagagcaaagaaaactattaaattataaaattgttgaatttcttgtcacaacctttagaaactctataaactcatctaaaaccccaattcactgtagtgtgaaaaatagatacatattcagagtgatcatttatcttgaattaaaattaagcatccgagtcattacaaacttatctcctgcttatggacatgctgacataaaagta

SEQ ID NO: 693393 - DNA, 1199 bp, Homo sapiens
tttgcttgtttgtggtttgctctctggggttgtgtctggggttgaaaataaataaccacagcccttggttcaaatagcttatctgttacatggtagcagctacaaaacatgctactgataatcaaatatagcaattctactaaaataaatgtaacatccaccatatgtatattgaggcatgttctaaggaactgtgtactatgttagcattatatgtatttatatgtagacacatacatagatatatttgtacatagataacacacacatgcatatttattaccttcttttatgacaccctccttagaggggtggtattattgtcactatgcagatgagcaaactgagtttgtgagagatcttataagtactcgatctcagatggatataagaactgaagtgagaaatggccctggggcaatctgttttcgaacctgatattctttttctctgcatcatgctgtactacctaggatatggaggtgttgttactgccaaaggactttgatattgaggtgtgcaagtgagagagctaaagtgtggatggttttgcctcagctgggcagactggcaccaggtctgcrtctaccagggcagtgtcccttccaccactaggtgcttcaacaggggcagttttttctcttttggaataaatttcacaggtactccatctaatttttacctttaaaacttcttgccattagcatcctttaaaataatatgctggtattttattatactgttatgtgtcttcaagcatttcatgtaatctggtattctttgtaagtttagaactgtggattaccagataaagcctgccattaagggtgaacaaagagtttccacctattggaagcagtcaaatagcatcacagtttaaggataattttgtactgtcttttggaagttgtaatggaaacaaaatagaatgtggttcagttttaatcatatatgaactgttttaatgagtgctgcactgggactcaagctatgaaaccaaaacaaaccagaaaaatggcaatggcacgcatgtttgggggaactttatctttttccagtagttcctccttgtgaggagagctcaaggcttgctttactctcggagggactcaagtgattggttatttgtggaaagcaaaattgggaattctcaacctgattctcccctcttttgtggggcagctgcctacccaagggag

SEQ ID NO: 693394 - DNA, 605 bp, Homo sapiens
ccatctcacctagactgttgttatgaagattgaattaggtgattctgagaggcatttatgcgtcctccctgagtaacaatccatgaaaagtgggcgtcattgctgaagctcaaggaagaaatatgaaatttgattatatccttattcacggcattgggtcaccaactcagcactttttatgaaagtagcatctgacctggcaaaggctgtgtcatcttattacctcagaaagacaaatttacggggtcagacgatggatggcttgtagatttctcaatgggctggaaggaaggagagaaaaagagagacaggagagagtacacatttaattctgcttcccctagggtgatatttccttcctccccttccagggttctcaaaaaggcattctaggaagtcctgtaaaatacatgctcataaaaatctcataatttccacaaattgttgagaatttaaaactcggttgggagtttgctgtttcagcctgagacaccggggtcacgtttcagtgcctgcagtcttgagacagtaccaggcatcygggatgaagctgaggaaagaagatgtgggggccctgctggcctgctccttctctcgaaagacgc

SEQ ID NO: 693395 - DNA, 1551 bp, Homo sapiens
gatcaaatcttgcattttcctgattggattcttccaaaaatatattgctttctcttgaacagttaagttgcatacatatctaaactgaaatgctgaccgattcaattcatatgccaaaaatccatagtagtattaattgccattggtctggtatgctgtgtagttcttcctatattttttcctttaaaaaaaacaacaacatttatagtattgtgtgttgccagttttagggcacagctccttagtctgtagcagcatttatttgcattttttccccaaatggttgaggggaagatgtttgtaccatgtgggtcacaatatggattctgtttgtgttttgtggtgttatttgtagtaaacatttgcaaatcaatgaatgtcttttgttttcttaattgttagctgcttggaaatttagaaaagtcaggtaaacttgttatcttgtaagtattgttcagaccacagttgcatctctaacttccattctgcttcttaaatgcatgaagattcacattggctgactgctttgtgtgctcttcattgtaaaatattggacattttcttctaaattcattttttttttttttttaatgactgcatggcctggaaccttactttgttatgtgtttttcaagtttgttcagattattcactctcaaaagaatgcttttctgtgaattacattttaagttattcagaaatcctgaaaggcatcatttggcagctcatctgttttcactaaattgtaagtttgtcggcacaaatctgtctctaatggaaaggctagatttgctttatttgctacacctggcatgcctctgatttttcaagtcacttatttgtgtcttttatttttcatcctgttgcttaagtatatatacttctgggaaaagatttcttaaaaactcatagtgttggtggagaggagagttaaggaacatattgtgcagtagtatgattgattcatggatagatggagttggtggtatatgtgtgagcatgagtatgatgaatgagagccagaccataaagagtttttggctagaagaaattgagcttatatccaagtttagggtcctgttttctttttgtctccattaagtccaaatgaaagagacgccaactaagccacacttacccagtcagatgaggcaacatagcatttgcagatcattcatcaaagcttttttcartcaggcaacctgtaaatattaattacccataaatattactatgatactcagaaatgcctgtggtgatagaatattcattttgtggatagtttttctgccttcttattattgcaattcaaaattctttcagtataagtttccgttgtattctaaaatgaattattgattaaagacatgatatagaatataaaaatattagataaaatatagttgaccatcaaatttcaagatggagaagtaattcctaaacttgaaataagtcataaaaaatagttgatggattgtctacaggaaaattcgatttctgatcttcaagaaggtaaaagcagcctttactttcttgaaagggggcagggag

SEQ ID NO: 693396 - DNA, 3288 bp, Homo sapiens
taacatatctaagtgtcatttctctgtattcagcctgcttggcttcctgatgggaggactggactcttgcatcagtattaggaagttgtcaggtgctgtcttttgattgttgccctcctcattctctcaattacctccttctgaattgcctattgtgccttctcactttttcctcatatctttccatcacttcatttctctctgatgacttctagataaattcttcagatctaactctcacttttttgattttctatgataattccagcatttgaagtgtttgtgagtctactcttgggatatatcactttgctgattctcactcaagtgacttgtttcctttgtgttttctggtttttaattgtaaggtctgaatttttttttctttaaacctttatctgtgagagatatttgaggttctgaatttgaagtacttgggtcagggatctctttaagctaaattttcatattgggggtttgcagtaaccatgaaagtagtgtgaattccagacccaaacccagtttgttatgatattgtagttactaattttgcagaaaagatagccccactcctgccagtttaccagagacaaggcaaaaataaccaagtgaatattactacttgctttctctatgagggatggaggttagagaggctctattttactcactgtagatgtcagccttgagaatctcagcgttgaaagtcatggttctcttacccagtctcctatgtgtccttcttgacttgggcccagacattctccaggctctggtgcttggccaattaattttctccaggtttttctgtaagctctgtaaggtaaggtttcacttcatgtctagcagtcatattgccgggagtgagtgtacactgtacttgaaaagaaacccattttacaattaggaaactgaggcacagagagattaagtaacttgcccaggatcatagaactagtaagtggtcaagttgggactgagatctaggcagctgactctgctgaccaagtacttaaaccaaacacaggctgccctatggtaattcttcattcttcttaatctacctccacaaatgttctgttgggctttttttttttttgatgaagtctcgccctgtcaccaggctggagtgcggtggcacgatctcagctcactgcaatctctgcctcccaggttcaagcaattcccctgcctcagcctcctgagtagctgggactacagtcacgcaccaccatgcctggttaattttttgtattttagtagagacagagtttcaccatgtttgccaggatggtcttgatctcctgacctcatgatcctcccgccttggcctcccaaagtgcttgttctgttgggctttctaaacatttttttcctaggcattacatttttttttggaagtaactccaggaagctcactattttgcaaacactctggatgtattaccctggtttaaggtacctcataagaaacgggaaaggagtaaagctgggaaggtgggaaatggagttctgttgattcatttgaaaaggcattaatactgtgagaaggtgaccaggaaacagcctctccaagcaccttgagaagttttctgaatgaatgtagatagctaatgggaatctcaatggaaacagagggacagtccctgatgctttatacaggtcacctctctctctaacaactcttggggcttcaatgctcgctcctggtgaacaactcttggggctagatgctcatagttctgtagggtgggaagtccaagatcaaggcatgagatcaagatcagactaaaaaacaagagagctctctgaggcctattttttaaaggcaatggttccattcatgaaggccccactttcatgacctaatcagcaacccaaaatcctacctcctaataccatcacgttagtgactcagatttcaacataggaatttcggagggcacatttggtctgtagcatgagtatatggtgtctattgtatacgtctttcaacattttaatatgtttgaacattttcacaattaaatatagacgagaaggggaaaaaagtagcctggggtcgatccctacctcattgyaggttcctttcaagtgacttctcacttttgtcagcaaatatacttaatatagtactctgtacacacagctgctcatgaaacagaaaactaacatctaaattatcatctaaaagtatatggtgctccccatccccatctgccacatatgattcaaaataaaataatacaaacctgaaaaaatatgcatgaaaaagtctatccaagtttagacttttcccattttagaaacgtgataacatttctaaatattttctatatgtgttcttgctttgctggttctctaagcatggacttactatgcaacttgggcagtctagcactggtaggctcttgcatttgttaattacggaaaaagtagctttttttaaaaaaaaatatttatttatttatttatttatttatttatttatttatttttgagatggcgtcttgctctgtcgcccaggctggagtgcagcggcacaattttggctcactgcaagctccacctgccaagttcatgccattctcctgcctcagcctcccgagtagctgggactacaggtgccggccaccacacccagctaatttttttcatattttaagtagggacggggtttcaccgtgttagccaggatggtctcgatctcctgacctcatgatccgcccacctcggcctcccaaagtgctaggattacaggtgtgagccactgcacccggccggaaaaagtagctttataagggactgaagcttgtccatgcctgcaggtaatatccacctaatttcatggcaagctaaactctcttttatcactatctagataaattcggcattatattctcattaaaacccatctttgcttaaaatactggctaccttgtgtgtgttcaattcttttagtaactggtacttttattgccttgtcatgtttaccttagtcacttactaaaattccttttgcaaaacctcaactgtctggttactttccaggataagaagatttgctttagagagagaagatttgcttcagagacagatttgcttcagagagagaaggtcctctctaatttctttctctgccttatatctggttttgctgctgcgtcaagctgttagccatattcttaaaaacatttactttgggcattttacttttcttattaatttttagtatttctattttatcagcatgttgttacaatattgattaatattgcttactaaatg

SEQ ID NO: 693397 - DNA, 619 bp, Homo sapiens
tgtgtgggcccccaagataattttcttataaatttccagtatgctcaaccaaatgccaaagacgcctatcctctgaggcttgccttttattgggccaaagggatatgtagttgttttgatatgttgcaaagctccaggctctgaaacccactagacgctgagcaatttgagggctgcatggggccttgtttcctgttgtctcagcacctggtccacagcgagatctcagaaaatgctttttgaattagtggccctggacagtttataaattataaattgtgtcctcaagtatttcttatgaaawtagtcacacagcatcccaatgccaaattgtttcagatttgagaacgcttttaatgaagaaaaaaggaaaaataatttctgaagatttttcaccatagatatttttacttgaatttttgctgatacttttttctctattttgattgcctttttcttcttttctgccttttggtgacattggcagggcctggagctcagcctcagacagaaaattagactacgatgaatttttaccttgcattttgaagatataccaactttcttctctgccactgggcttacattcttcacgggtaaaagtagaaggttggactca

SEQ ID NO: 693398 - DNA, 579 bp, Homo sapiens
cagtactctaaagtagtcttcactcttgcaattgaggtggtttcccacttaagatcccgggtctggcagggtacattggctcatgcggtggctcacgcctgtaatcccagcactttgggaggcataaggctattgtgacaaartcacacagcaagagctcagtaaatattctctcctcccttcctgctttttctatgctgggcaatggacatcaaatctgcacatacgttacaggataagaaagaaaagtgtcccccatattattaggttggtacaaaagcaattgcagttttgccattacttattttaatggcaaagatgcaataacttttgcaccaacctaatatctaccttgggaatatctctgtgttcacgtgggcactgtgcttggtaggtgatatggaagtttaactcatcttttggagcaaataatgtggagaaaacagaccctacaaacagcaggtgaccactggtctgagacacagtgaggacatcagccaggaccccacaggggtgggaggaatcttttcctctccctgtgatatcttggattgccctcttagagagtttttcctttga

SEQ ID NO: 693399 - DNA, 579 bp, Homo sapiens
cagtactctaaagtagtcttcactcttgcaattgaggtggtttcccacttaagatcccgggtctggcagggtacattggctcatgcggtggctcacgcctgtaatcccagcactttgggaggcataaggctattgtgacaaaatcacacagcaagagctcagtaaatattctctcctcccttcctgctttttctatgctgggcaatggacatcaaatctgcacatacgttacaggataagaaagaaaagtgtcccccatattattaggttggtacaaaagcaattgcagttttgccattactwattttaatggcaaagatgcaataacttttgcaccaacctaatatctaccttgggaatatctctgtgttcacgtgggcactgtgcttggtaggtgatatggaagtttaactcatcttttggagcaaataatgtggagaaaacagaccctacaaacagcaggtgaccactggtctgagacacagtgaggacatcagccaggaccccacaggggtgggaggaatcttttcctctccctgtgatatcttggattgccctcttagagagtttttcctttga

SEQ ID NO: 693400 - DNA, 579 bp, Homo sapiens
cagtactctaaagtagtcttcactcttgcaattgaggtggtttcccacttaagatcccgggtctggcagggtacattggctcatgcggtggctcacgcctgtaatcccagcactttgggaggcataaggctattgtgacaaaatcacacagcaagagctcagtaaatattctctcctcccttcctgctttttctatgctgggcaatggacatcaaatctgcacatacgttacaggataagaaagaaaagtgtcccccatattattaggttggtacaaaagcaattgcagttttgccattacttattttaatggcaaagatgcaataacttttgcaccaacctaatatctaccttgggaatatctctgtgttcacgtgggcactgtgcttggtaggtgatatggaagtttaactcatcttttggagcaaataatgtggagaaaacagaccctacaaacagcaggtgaccactggtctgagacacagtgaggacatcagccaggaccccacaggggtggraggaatcttttcctctccctgtgatatcttggattgccctcttagagagtttttcctttga

SEQ ID NO: 693401 - DNA, 586 bp, Homo sapiens
gagagagtatttagtctaaaaaagaaaaagtgaggccgggcatggtggctcacaactgtaatcccagcactttgggaggctgaggtgggtggatcattaggtcaagagattgagaccatcctggccaacatgctgaaaccctgtctctactaaaatacaaaaaaaaaaaaaaattagctgggtgtggtggcgcacacctgtagttccagctactcaggaggctgaggtgggggaatygtttgaacccaggaggcggagctggcagtgagccaagcttgtgctactacactccagcctggcaacagagcaagactcggtctcaaaaaaaaaaaaaaaaaaaaaaaagaaaagaaagtgatagtaatgacttaatactatctgtccctctcctcatcctccttctgaagaaatagactgggcagcacttgggctgtattgctccttgctagaccctatacaaagagctagtcagtcattagtaactgtcagtatcaccaaacctggtacacagcctgggcgggtactccaaaaaagtatactggagatggtctttctaaaagtcaccctcataaatggattgttcttc

SEQ ID NO: 693402 - DNA, 649 bp, Homo sapiens
ggttgcagtgagctgagatcgtgccattgcactccagcctgagtgacagaacaagactccatctcaaaaaacaaaacaaaacaaaacgaaaccttccttcctcaggcagccttgcctgtactctaaatccagactggaacccacctgctggtctcgtggagcccagttcctttccttcttggcatttctcacaactaataataatgagatcattatcactaatttgggtatttatgtctctactatctgtctctctcacaagcatgtaagctgcacgagggcggggaccacatcatgttgttcatctctgtatgaccattatttagcatagcgcttggcacacaataggtgctcaggaaatacttgttgactgacactcagctgtcagtttcctcacctttaatatcagggtgttttcgtttggttgkttggttgtttggttttgtttttgagacagggtctcactccattgcccaggctggagtgctgtggcactgtcttagctcactgcagcctctgcctcctgggctcaagtcatcctcctgcctcagcctcccaagtagctgggacctcaggcatgtaccacattgctcagctaatttttaaattttttgtagagacaaagtctcactatgttgctcagcctggt

SEQ ID NO: 693403 - DNA, 595 bp, Homo sapiens
ccagcaaaacacgtcaaggctaatgtgctggtccaaagcatgcggaacggtcgttagcctaaatcagctgatccagctgacagatggacatgtgataatatgttactgttgttgttagcccactgtgttttggaatggcttgttttggggatgktttgttacacaatagtagctgactaagactaacaataatgagaaatttgagctttattctaagtacaatgggatgtcattgaaagtgtttaactagaagtgtaacatgatctggtttatgattgcaaatgatctctctggctgctgtgaggagggtaaggtgtatggaggaggcaagagaccaccctaagccatgtgtccagactcagagcccagcacagtgcctggcatagtagaggtgctcaggagctgttgttcagccctccgtagctggaatgaacccacccttccctgtatcccccaatactctctttgggccctcttacctgtgacttggtggtaacggtgctcattatactcctgctggatttgggattcttgagggtagagacctaggtccttctatatgtctcctgggcccctgtaggctcagctcagagca

SEQ ID NO: 693404 - DNA, 433 bp, Homo sapiens
cctatctgccagtcagagacgctctgctgcaaggacggggagttggggagggtccctggggccaccctaccttccctcgtcctccgttttactataataacatctcamcttcaccaaacactgactgggtccaggcgaagttttttttttgtttttttttttttgagatggagtctcactctgtcacccaggctggagtgcattggggtgatctccgttcactgcagcctctgcctcccaggttcaagcaattctcctgcctcagctacccgagtagctgggaccacaggcgcccaccaccatgccaggcaaatttttgtatttttagttgcgacgggggtttcaccatattggcgaggctggtctcgaactcctgacctcaaatgatccgcccgcctcggcctcccagagtgctgggattacaggcgcaagc

SEQ ID NO: 693405 - DNA, 433 bp, Homo sapiens
cctatctgccagtcagagacgctctgctgcaaggacggggagttggggagggtccctggggccaccctaccttccctcgtcctccgttttactataataacatctcaccttcaccaaacactgactgggtccaggcgaagttttttttttktttttttttttttgagatggagtctcactctgtcacccaggctggagtgcattggggtgatctccgttcactgcagcctctgcctcccaggttcaagcaattctcctgcctcagctacccgagtagctgggaccacaggcgcccaccaccatgccaggcaaatttttgtatttttagttgcgacgggggtttcaccatattggcgaggctggtctcgaactcctgacctcaaatgatccgcccgcctcggcctcccagagtgctgggattacaggcgcaagc

SEQ ID NO: 693406 - DNA, 433 bp, Homo sapiens
cctatctgccagtcagagacgctctgctgcaaggacggggagttggggagggtccctggggccaccctaccttccctcgtcctccgttttactataataacatctcaccttcaccaaacactgactgggtccaggcgaagttttttttttgtttttttttttttgagatggagtctcactctgtcacccaggctggagtgcatyggggtgatctccgttcactgcagcctctgcctcccaggttcaagcaattctcctgcctcagctacccgagtagctgggaccacaggcgcccaccaccatgccaggcaaatttttgtatttttagttgcgacgggggtttcaccatattggcgaggctggtctcgaactcctgacctcaaatgatccgcccgcctcggcctcccagagtgctgggattacaggcgcaagc

SEQ ID NO: 693407 - DNA, 1166 bp, Homo sapiens
tatttttgagatagggtcttgctctgttgcccaggctggagtgcagtggtgtgatcatggctcactgcagtcttgaatttctgggatcaagcaatcctcccacctcagcctcyccagtagctgggactacaggcacctgtcactacgccaggctatttttttttttttcatggagacgaggtcttgctatgttgcccaggctggtctcaaactcctgggctcaagaagtcttccctcctcagcctcccaaagtgttgggattacaggcgtgagccaccgtgcccagacgagagagatcgttttagataatttggtcagaacattcagtcctctccagaaccttatggtgggttcatttgctgtcccattttccagatgattatggtgaggcttcgagggattaaatagggagccagaaaggagccaagcagtaactcagattcagggcactggcctctaatacctgtagtcctgctcactgctgtgaggctccctgtgctgtgctttggccaggcaaaagagctttctatagggcttggggtgggtgaggtctgtgggtctctcccagaggatccaccctgttctttgttgcaaagcatcaggaggaaatctcccatgtctctgactcccttgctgtcagccttcagggcccggtgtgtgcacgtgtgtggcctgtgtacccgtgtggggtgtgcgtgtgcatgtgcatccctgcactcgctcatgtgtgattgtgtatctgtctctctccttccctgcaggcttctgcttcacagaccatcctgaccttttattaggtcactttataattgattgaaatgtcccaggtaccttctcttaactccagggtgattatgacaattatgatgattatcaagtaaaaaaataaaaaagagagcaagagaggaagggggctggggactgggggttgggaattgctggagagctaggcagtgctgtcattaagcgacattgtgtgagattgttcgccttcaaaaggcctctgtgaaaaggagagagtgtctttaaaaacaaggcccattatgcaggcggcacggggtgcacagtgctggtgggaggaccatggggtgtaattagggcagtgacagctggaattacacagcgtctccgcagcggtgccgcctcttggtggttggggggtgggg

SEQ ID NO: 693408 - DNA, 1567 bp, Homo sapiens
taaaactatgactccatttttaaaaagtcatttgtacatatcagttcaatttctcagtattgtaaagcttgagaagtcaaactactctgaggtggccccrtgcccacccctgaccctcacagtcactctccatcactttaccccatctaattgttcttgtaacctagtaacttcctgaaattatcatgtttactatttgatatttcattttgttttgaattcacctagcccaacaagagggaaagctccacgaaggctgggatcttctctgttttgactgccactatatctcaagacctaatgtagtttttagatgctaatcagtacttgatacatatcagttcaacaaatgactaaaccaactaccattcaatctacctgttgaaataggaaagacaatgccagataaaattctatacagttgaaattgtttatttattatagaacaattcacttcttttaaaaataaatatcaaacaatttaatgtcaactaaagccttttttttaagttatgctctttcccttccattcttactaaaacctggtaaactcctttaactgactgtatatgtatcaatcagcctaggacttacagtcattaatatttttctttctcatttatgccacatgtgtaacccaggtcagttgcaactccctccaaccccctgcagtgctaccttcactgtgagacccaggctgatgaagcaacctctttctgggattatttcctgcccatgggagagggaaaagaggagatggcaaactgtgcattgactttgatacgacacacactacttctattcacatggccttagctaaaggaaatcacatggtcaagcctgacatcactggagcaaaggggcacagcaagaagggaaatgaaatatttggtccaccagtcatagactctatcatgctgtgttttcagtcttgggagatgatgagagagaaaacagtggaatttccagatccaaacttaaaaagaaaaataaataaaaattgttcttgttttacctttgaaagccaactggggaaccacatttggccaattctgaacttataaaaaagcacaggggagatgagctggtttttctcctctaatatgttcagaagcagccctcggatgaccacattgtccacccccaatgagaaggcagcatcagtaaagaagatgctcgtcaatcccccgttcccctgctctttaccttcccagagagctgagagtgcctcctggaggctttccttttactttcatgtacaatttgcctctaataaagaggcagaattctggaacctgcaagcctttaatctcagggccattatcttaagtcaagctggtttggctaacagtagtcagctttaaccttccagtagaaggtactccttcgagccaccatttgcaggaaattctctctcccctcctccatgactcactacttaaggggagagaatttcttttcagagactaagaagtgacagcaaaagaggagagtaaagagagaagaatctggaggttcccaacttcagtctgtgtaaataggaatggaagagatgacttgggaagcc

SEQ ID NO: 693409 - DNA, 1567 bp, Homo sapiens
taaaactatgactccatttttaaaaagtcatttgtacatatcagttcaatttctcagtattgtaaagcttgagaagtcaaactactctgaggtggccccatgcccacccctgaccctcacagtcactctccatcactttaccccatctaattgttcttgtaacctagtaacttcctgaaattatcatgtttactatttgatatttcattttgttttgaattcacctagcccaacaagagggaaagctccacgaaggctgggatcttctctgttttgactgccactatatctcaagacctaatgtagtttttagatgctaatcagtacttgatacatatcarttcaacaaatgactaaaccaactaccattcaatctacctgttgaaataggaaagacaatgccagataaaattctatacagttgaaattgtttatttattatagaacaattcacttcttttaaaaataaatatcaaacaatttaatgtcaactaaagccttttttttaagttatgctctttcccttccattcttactaaaacctggtaaactcctttaactgactgtatatgtatcaatcagcctaggacttacagtcattaatatttttctttctcatttatgccacatgtgtaacccaggtcagttgcaactccctccaaccccctgcagtgctaccttcactgtgagacccaggctgatgaagcaacctctttctgggattatttcctgcccatgggagagggaaaagaggagatggcaaactgtgcattgactttgatacgacacacactacttctattcacatggccttagctaaaggaaatcacatggtcaagcctgacatcactggagcaaaggggcacagcaagaagggaaatgaaatatttggtccaccagtcatagactctatcatgctgtgttttcagtcttgggagatgatgagagagaaaacagtggaatttccagatccaaacttaaaaagaaaaataaataaaaattgttcttgttttacctttgaaagccaactggggaaccacatttggccaattctgaacttataaaaaagcacaggggagatgagctggtttttctcctctaatatgttcagaagcagccctcggatgaccacattgtccacccccaatgagaaggcagcatcagtaaagaagatgctcgtcaatcccccgttcccctgctctttaccttcccagagagctgagagtgcctcctggaggctttccttttactttcatgtacaatttgcctctaataaagaggcagaattctggaacctgcaagcctttaatctcagggccattatcttaagtcaagctggtttggctaacagtagtcagctttaaccttccagtagaaggtactccttcgagccaccatttgcaggaaattctctctcccctcctccatgactcactacttaaggggagagaatttcttttcagagactaagaagtgacagcaaaagaggagagtaaagagagaagaatctggaggttcccaacttcagtctgtgtaaataggaatggaagagatgacttgggaagcc

SEQ ID NO: 693410 - DNA, 1567 bp, Homo sapiens
taaaactatgactccatttttaaaaagtcatttgtacatatcagttcaatttctcagtattgtaaagcttgagaagtcaaactactctgaggtggccccatgcccacccctgaccctcacagtcactctccatcactttaccccatctaattgttcttgtaacctagtaacttcctgaaattatcatgtttactatttgatatttcattttgttttgaattcacctagcccaacaagagggaaagctccacgaaggctgggatcttctctgttttgactgccactatatctcaagacctaatgtagtttttagatgctaatcagtacttgatacatatcagttcaacaaatgactaaaccaactaccattcaatctacctgttgaaataggaaagacaatgccagataaaattctatacagttgaaattgtttatttattatagaacaattcacttcttttaaaaataaatatcaaayaatttaatgtcaactaaagccttttttttaagttatgctctttcccttccattcttactaaaacctggtaaactcctttaactgactgtatatgtatcaatcagcctaggacttacagtcattaatatttttctttctcatttatgccacatgtgtaacccaggtcagttgcaactccctccaaccccctgcagtgctaccttcactgtgagacccaggctgatgaagcaacctctttctgggattatttcctgcccatgggagagggaaaagaggagatggcaaactgtgcattgactttgatacgacacacactacttctattcacatggccttagctaaaggaaatcacatggtcaagcctgacatcactggagcaaaggggcacagcaagaagggaaatgaaatatttggtccaccagtcatagactctatcatgctgtgttttcagtcttgggagatgatgagagagaaaacagtggaatttccagatccaaacttaaaaagaaaaataaataaaaattgttcttgttttacctttgaaagccaactggggaaccacatttggccaattctgaacttataaaaaagcacaggggagatgagctggtttttctcctctaatatgttcagaagcagccctcggatgaccacattgtccacccccaatgagaaggcagcatcagtaaagaagatgctcgtcaatcccccgttcccctgctctttaccttcccagagagctgagagtgcctcctggaggctttccttttactttcatgtacaatttgcctctaataaagaggcagaattctggaacctgcaagcctttaatctcagggccattatcttaagtcaagctggtttggctaacagtagtcagctttaaccttccagtagaaggtactccttcgagccaccatttgcaggaaattctctctcccctcctccatgactcactacttaaggggagagaatttcttttcagagactaagaagtgacagcaaaagaggagagtaaagagagaagaatctggaggttcccaacttcagtctgtgtaaataggaatggaagagatgacttgggaagcc

SEQ ID NO: 693411 - DNA, 617 bp, Homo sapiens
gtagaaaaatctagataatccacagttatctgtgctcctttcccctgtggaagagggctggagaggtcgcccagcatactgagtgcatgaatgtcagggttttctctaaatctccaagratgcaacactacaaggctgtttatattgatcaacagcatgcatggaagttaacataaatcaattagtaaaatgctcaggcagcagcgattgctaaactatactgtgtaaataaaagttttaaatataaaacatgatgatcaaatctattaaccatgctcagccctgccaagctctaccgtgaccttcagcagcagaattttcagctgtcactcaaagcccactgccgactcatgtggacaatcttgcattgctagatgttagggtcgtctcagaacttaaccccaagtcccatctttaataacaatgacaaagtgcatcgatacagcacttgacaatttgccagcctctttcaaacactttattggttgacttggtccttgctgtatgccttgataagagggcagctcatagggagaccgtggaggcagacgtagagagtggaagtcttggctctgcaatttaccatcttgtctggaagcaggcaacttaatttcagg

SEQ ID NO: 693412 - DNA, 617 bp, Homo sapiens
gtagaaaaatctagataatccacagttatctgtgctcctttcccctgtggaagagggctggagaggtcgcccagcatactgagtgcatgaatgtcagggttttctctaaatctccaaggatgcaacactacaaggctgtttatattgatcaacagcatgcatggaagttaacataaatcaattagtaaaatgctcaggcagcagcgattgctaaactatactgtgtaaataaaagttttaaatataaaacatgatgatcaaatctattaaccatgctcagccctgccaagctctaccgtgaccttcagcagcagaattttcagctgtcactcaaagcccactgccgactcatgtggacaatcttgcattgctagatgttagggtcgtctcagaacttaaccccaagtcccatctttaataacaatgacaaagtgcatcgatacagcacttgacaatttgccagcctctttcaaacactttattggttgacttggtccttgctgtatgccttgataaragggcagctcatagggagaccgtggaggcagacgtagagagtggaagtcttggctctgcaatttaccatcttgtctggaagcaggcaacttaatttcagg

SEQ ID NO: 693413 - DNA, 814 bp, Homo sapiens
tttgttttatagcagccattctaatgggtacggggtgtcctagggcttttgaacttagaaccagagaaaacatccgcacaatctgtccccagttgtcaaggccataagaggtgaaacacaggtgctactagcagccctgtctcctgccatgtagagaaagcctgtttacagtgagagaggagtgagctgatttgcagagaaaagagaaagtctctaaagcctcagaytgggtagtacaagttgtggctggagcctagatactttcctgcccttgaatttgatgagacacctcattaacccaatcataaatccacctttttacttaagttagagttgtttcatttgcaaccatgattcttgccataaacatctttgtacaagagttagttcttcagtcttttcttttttttttttttaaccttttcttcctttgattctttcttagaagtagatgggatataaataatttgtacattcaaaaaccctaaatttgtacattcaaaaaccctaaagaaatgcccttgcagaagtagagggttgtggttagagtatgagtttggagtcagcccaaactggcttcaaatcctagctcaacaaatgtttatgggatgtgttaactaacttgatggtggtatagatagatagatggatagacagatagatagatagatagatagatagatacacacatacatatatacacatatataaaatcactttatatagtttaaatatatataattttatctgtcgattatatctcaataaatctggataaaaataaaaggctgacttcaagtaaaaaaacaaaaac

SEQ ID NO: 693414 - DNA, 814 bp, Homo sapiens
tttgttttatagcagccattctaatgggtacggggtgtcctagggcttttgaacttagaaccagagaaaacatccgcacaatctgtccccagttgtcaaggccataagaggtgaaacacaggtgctactagcagccctgtctcctgccatgtagagaaagcctgtttacagtgagagaggagtgagctgatttgcagagaaaagagaaagtctctaaagcctcagattgggtagtacaagttgtggctggagcctagatactttcctgcccttgaatttgatgagacacctcattaacccaatcataaatccacctttttacttaagttagagttgtttcatttgcaaccatgattcttgccataaacatctttgtacaagagttagttcttcagtcttttcttttttttttttttaaccttttcttcctttgattctttcttagaagtagatgggatataaataatttgtacattcaaaaaccctaaatttgtacattcaaaaaccctaaagaaatgcccttgcagaagtagagggttgtggttagagtatgagtttggagtcagcccaaactggcttcaaatcctagctcaacaaatgtttatgggatgtgttaactaacttgatggtggtatagatagatagatggatagacagatagatagatagatagatagatagatacacacawacatatatacacatatataaaatcactttatatagtttaaatatatataattttatctgtcgattatatctcaataaatctggataaaaataaaaggctgacttcaagtaaaaaaacaaaaac

SEQ ID NO: 693415 - DNA, 619 bp, Homo sapiens
aacccgggaggcagaggttgcagtgagctgagatcacactactgcactccagcctgggcgacagagcgagactccgtctcaaaaaaaaaaaaaaaaaaaaaaaaaaaaagagagagattcatggtaaataacgctaggaagatggaattggtaggtcttatattgtgaagttagctgcattttgaaatcttatagtatgactgaaaggaagcaaatctgggctgggctcaatggctcacgcctgtaatcccagcactttgcgaggccaaggagggcagattacttgaggtcaggagttcgagaccagcttggccaacatagtgagaccgcacctctactaaaaatgtaaaaattagccaggcctggtggcgtgtgtctgtaatcccagctacttgggaggttgaggcaggagaatcacttgaacccaggaggtrgaggttgcagtgatccgagatcacgccactgcactctagcctgggcaacagagaaaggctctgtttcagaaaaacaataagtaaaataaaataaagcaaatttggtttaggttgaatgtctctaaatatcacagactattatatagaatgaatttatttcagcgtaacctgaaatatttatatta

SEQ ID NO: 693416 - DNA, 666 bp, Homo sapiens
gcaggtatagtggtgtgtgcctgtagacttagctatttgggaggctgaggtggaagaaggatcacttgggcccaggaggtcaaggctgcaatgagccatgactgctccactgctgcactccagcctgggtgacagagcaagaccctgtctcaaaaaaaaaaaaaaaaaaaaaaaggatatagaacagtcctgcatctcctcaggaaaaaatgggtatatgtgttctcaatcacagatttataaagtcgttatttgcagcagaagcctcatttaagcctagttgaagatttaagggaaaacaacaaaagcaactccccactcctatgtgggctaataatacaggccaaaagagaggggttttcytttgctctctattctcttaactgtcttgaggctctcaatctttcctccaactcatttttagacatgagcccaatcacgacccttgaaccctaaagaggctttcatgacgtcacaggtaactgaaaagttgtaatgtgggaaggggcttccgatgcttcaggctcctgccacaagaccagccactttgacagcaagccctgctcttagtaagttgtcttcagtgaaaacagaaacagaatctaagccaatttcacctaacaaaggggcaacacattaacttccatggaacagtctcctaaaagc

SEQ ID NO: 693417 - DNA, 1519 bp, Homo sapiens
atcatctgccgctgtggaggctggatgtccagagctagaggtgttcaaggttcaaggtgattctggtgttaaaagaggaaataccrttttacttctgaacctgtttcatggagaaagaggtacagctccgggcacactggcctgggtacctttgcagcatgtgatcagggactgctccccagcggccctccaccagtgccatgaaagtggccagggccctacctgcacccggcaccatggatgcatcttggggctggaacctcgagtcttacatgcagcagaggctgaggctgtgactgtggagaaagcgtgacattacagaagcaagggttttggcacctggtgtctgtgtgggtgggtattcctccctggtggatgtggctgaaaggcctgcagggtctcactggtgcagggagatgaggggtcatttctggttctgggattgtccctaatcactgggcgttccagatcctgtaactgttcagcactcccttgagacaggaggtcatggtgtttctgacttggagcctctggctctctttattagattctgttgcatgttccagccatcctgacccgggtgttccatcagatttctgtgcctgtgaatgtggccatcaccagtgaccccactttaaactccagattcacctgtatgcatgaccggagggggttagcatcttgagtccgtggttcaggacgcagccccccggcagagggaaggcagccccactctctcatgccccatcgctgtggtccatgctttgtctgcctcagcagtcttggtcagatctggaagcatctggaggcatctggaagctttggtgtcttagttatgagtttcaaagggcagtgaaaacagactggcagagctcagcgagacctgggaaatatttggggtggggaggaactgcagaatgtattcttggttcagagcatttttccctctgactctttctgggcaacagaccttttaggaatgtttgttaaatgctgaaaaaaacaggaattgatttctctctgcgtccacagccaacatgtgaggccacggcactccgtgtatactaacctggtttttctttccttttgctcaacagtgagtgacctgcaggaagaaggcaagaatgccatcaactcaccgatgtcccccgccctggtggatgttcaccctgaagacacccagcttggtacgggggttcctccgctccctgccctgagacagttgagcttccgtggcactaagttggtcttggggaggccaatgaggagcccgatagatctggcctcttgatcagatgctgggggcatttgggagtctaagttcttagctcaaggtcatctttagaaaagtccattgggaaaagcaagtccttcattaagggtttctgccctagtcttaaaacgtaagttttatttttcaggtggtgaagcaaacagattgggagaagactgacttgaaaagatagtttgttaaactcatagttctgaaaggaggtgtagcaggccactcagggccatg

SEQ ID NO: 693418 - DNA, 1519 bp, Homo sapiens
atcatctgccgctgtggaggctggatgtccagagctagaggtgttcaaggttcaaggtgattctggtgttaaaagaggaaataccattttacttctgaacctgtttcatggagaaagaggtacagctccgggcacactggcctgggtacctttgcagcatgtgatcagggactgctccccagcggccctccaccagtgccatgaaagtggccagggccctacctgcacccggcaccatggatgcatcttggggctggaacctsgagtcttacatgcagcagaggctgaggctgtgactgtggagaaagcgtgacattacagaagcaagggttttggcacctggtgtctgtgtgggtgggtattcctccctggtggatgtggctgaaaggcctgcagggtctcactggtgcagggagatgaggggtcatttctggttctgggattgtccctaatcactgggcgttccagatcctgtaactgttcagcactcccttgagacaggaggtcatggtgtttctgacttggagcctctggctctctttattagattctgttgcatgttccagccatcctgacccgggtgttccatcagatttctgtgcctgtgaatgtggccatcaccagtgaccccactttaaactccagattcacctgtatgcatgaccggagggggttagcatcttgagtccgtggttcaggacgcagccccccggcagagggaaggcagccccactctctcatgccccatcgctgtggtccatgctttgtctgcctcagcagtcttggtcagatctggaagcatctggaggcatctggaagctttggtgtcttagttatgagtttcaaagggcagtgaaaacagactggcagagctcagcgagacctgggaaatatttggggtggggaggaactgcagaatgtattcttggttcagagcatttttccctctgactctttctgggcaacagaccttttaggaatgtttgttaaatgctgaaaaaaacaggaattgatttctctctgcgtccacagccaacatgtgaggccacggcactccgtgtatactaacctggtttttctttccttttgctcaacagtgagtgacctgcaggaagaaggcaagaatgccatcaactcaccgatgtcccccgccctggtggatgttcaccctgaagacacccagcttggtacgggggttcctccgctccctgccctgagacagttgagcttccgtggcactaagttggtcttggggaggccaatgaggagcccgatagatctggcctcttgatcagatgctgggggcatttgggagtctaagttcttagctcaaggtcatctttagaaaagtccattgggaaaagcaagtccttcattaagggtttctgccctagtcttaaaacgtaagttttatttttcaggtggtgaagcaaacagattgggagaagactgacttgaaaagatagtttgttaaactcatagttctgaaaggaggtgtagcaggccactcagggccatg

SEQ ID NO: 693419 - DNA, 1519 bp, Homo sapiens
atcatctgccgctgtggaggctggatgtccagagctagaggtgttcaaggttcaaggtgattctggtgttaaaagaggaaataccattttacttctgaacctgtttcatggagaaagaggtacagctccgggcacactggcctgggtacctttgcagcatgtgatcagggactgctccccagcggccctccaccagtgccatgaaagtggccagggccctacctgcacccggcaccatggatgcatcttggggctggaacctcgagtcttacatgcagcagaggctgaggctgtgactgtggagaaagcgtracattacagaagcaagggttttggcacctggtgtctgtgtgggtgggtattcctccctggtggatgtggctgaaaggcctgcagggtctcactggtgcagggagatgaggggtcatttctggttctgggattgtccctaatcactgggcgttccagatcctgtaactgttcagcactcccttgagacaggaggtcatggtgtttctgacttggagcctctggctctctttattagattctgttgcatgttccagccatcctgacccgggtgttccatcagatttctgtgcctgtgaatgtggccatcaccagtgaccccactttaaactccagattcacctgtatgcatgaccggagggggttagcatcttgagtccgtggttcaggacgcagccccccggcagagggaaggcagccccactctctcatgccccatcgctgtggtccatgctttgtctgcctcagcagtcttggtcagatctggaagcatctggaggcatctggaagctttggtgtcttagttatgagtttcaaagggcagtgaaaacagactggcagagctcagcgagacctgggaaatatttggggtggggaggaactgcagaatgtattcttggttcagagcatttttccctctgactctttctgggcaacagaccttttaggaatgtttgttaaatgctgaaaaaaacaggaattgatttctctctgcgtccacagccaacatgtgaggccacggcactccgtgtatactaacctggtttttctttccttttgctcaacagtgagtgacctgcaggaagaaggcaagaatgccatcaactcaccgatgtcccccgccctggtggatgttcaccctgaagacacccagcttggtacgggggttcctccgctccctgccctgagacagttgagcttccgtggcactaagttggtcttggggaggccaatgaggagcccgatagatctggcctcttgatcagatgctgggggcatttgggagtctaagttcttagctcaaggtcatctttagaaaagtccattgggaaaagcaagtccttcattaagggtttctgccctagtcttaaaacgtaagttttatttttcaggtggtgaagcaaacagattgggagaagactgacttgaaaagatagtttgttaaactcatagttctgaaaggaggtgtagcaggccactcagggccatg

SEQ ID NO: 693420 - DNA, 1519 bp, Homo sapiens
atcatctgccgctgtggaggctggatgtccagagctagaggtgttcaaggttcaaggtgattctggtgttaaaagaggaaataccattttacttctgaacctgtttcatggagaaagaggtacagctccgggcacactggcctgggtacctttgcagcatgtgatcagggactgctccccagcggccctccaccagtgccatgaaagtggccagggccctacctgcacccggcaccatggatgcatcttggggctggaacctcgagtcttacatgcagcagaggctgaggctgtgactgtggagaaagcgtgacattacagaagcaarggttttggcacctggtgtctgtgtgggtgggtattcctccctggtggatgtggctgaaaggcctgcagggtctcactggtgcagggagatgaggggtcatttctggttctgggattgtccctaatcactgggcgttccagatcctgtaactgttcagcactcccttgagacaggaggtcatggtgtttctgacttggagcctctggctctctttattagattctgttgcatgttccagccatcctgacccgggtgttccatcagatttctgtgcctgtgaatgtggccatcaccagtgaccccactttaaactccagattcacctgtatgcatgaccggagggggttagcatcttgagtccgtggttcaggacgcagccccccggcagagggaaggcagccccactctctcatgccccatcgctgtggtccatgctttgtctgcctcagcagtcttggtcagatctggaagcatctggaggcatctggaagctttggtgtcttagttatgagtttcaaagggcagtgaaaacagactggcagagctcagcgagacctgggaaatatttggggtggggaggaactgcagaatgtattcttggttcagagcatttttccctctgactctttctgggcaacagaccttttaggaatgtttgttaaatgctgaaaaaaacaggaattgatttctctctgcgtccacagccaacatgtgaggccacggcactccgtgtatactaacctggtttttctttccttttgctcaacagtgagtgacctgcaggaagaaggcaagaatgccatcaactcaccgatgtcccccgccctggtggatgttcaccctgaagacacccagcttggtacgggggttcctccgctccctgccctgagacagttgagcttccgtggcactaagttggtcttggggaggccaatgaggagcccgatagatctggcctcttgatcagatgctgggggcatttgggagtctaagttcttagctcaaggtcatctttagaaaagtccattgggaaaagcaagtccttcattaagggtttctgccctagtcttaaaacgtaagttttatttttcaggtggtgaagcaaacagattgggagaagactgacttgaaaagatagtttgttaaactcatagttctgaaaggaggtgtagcaggccactcagggccatg

SEQ ID NO: 693421 - DNA, 659 bp, Homo sapiens
attcttcacccctccccttatcattgcctggccttgtatcttttgggtctccatgtagattatacactctggaaagccttccatgacaccaacttagattgtcccctctatgggctttaagagcgtgtggtacagcccctttctgtagttccaatagcactgtattgtcattacctacttacttttctcttatgaaactataagcttcttgaagatagggatggtgtctagccactttcttagcacagtgtttagtaaatggaagatgcttagtaagcatttgttaaatgaatgaggagtgagtgttaacttatttctctctcagttcaaactcctttgcttctaagtgtcagaaagcccaatccaaagagcttaagcaaaaagaggaattcgcggctcatataagcaaagaagtctagaggagtstcgtgcccatcattgaaccaatcgttgttctttcaggagaatgcaaggctctgattggccaaacctgggtcacatgtcacccccatttctgctgtcccaagaccactcaggctggggatgagggatggtgctggaagtgggaaggggcggggtctccaaactacagtcctgaactttccctggaattttggtgaggggatcctgggtaaccctcaaaaacaaatttctattaa

SEQ ID NO: 693422 - DNA, 607 bp, Homo sapiens
tattaggagataatacagccagtgacttggagttgaagcccagcactcatttaccatttcgaaaatctaaaggcccttaagaattatgcaaaatctactctgcatttgttctataaatggaaaaacaaggctgagatgatagcacgtatgcttatggcatggtttactgactattttaaaccaacagttgagatctgctcagaaaaaagaattcctaatggaaagcacacttgacttggagacttggaggcagtggaagtagcctcaagttgtggctgaggtcagttaccatctgtgggttttttttgtttgtttgttcgtttgttttttgagrtggagtcttgttccattgcccagactggagtacagtggcgcagtctcagttcactgcaacctccaccctccacctcccgggttcaagcaattgtcctgcctcagcctctcgagtagctaggattacaggtgcctgctaccacactcggctgatttttgcatttttagtagaggcagagtttcaccatgttggctaggctggtctcaaactcctgacctcaggtgatccacctgcttcggcctcacacagttctgggattacagacatgagcca

SEQ ID NO: 693423 - DNA, 1811 bp, Homo sapiens
ttagagaatacagccttaagaaggactggtggatgcagaaaaagggttcaggagagagggtagggctttcagggaacctggaatgttggagactctcccgctccagaaggagacaattagaaagggcagagttagtgcagaatggcctgagcccaggaggggaatctcctgggcttgagaagaaaaacccttcctctgccaggcctagggataggagcagagcatgcagggacttagggcccagagggaaagcataaacccaagctgagtcagaggggaatttgtggggctccttctgtcagataagccaagaagtaagttccaaatatatcttggagttgaagtttctattctttattggtcttcttcctggtggccacggagttggctggaagaaatggctcaagtcccaagcaaccagaggtaaagccacaccagacagaactactaaggctacactccatttatgagatgcaaactcagagcagatggagcaggagtttgcacagcagcctctaagagagtgcttagcttaggccgggcacagtgtctcacacttgtaatcccagcactttgggaggccaaggcaggcagatcaccttggagaggtcargagttcgagaccagcctggccaacatggcgaaaccccgcctctactaaaaatacaaaaattagctgggtgtggtggcacatgcctgtaatcccagctactccagaggctgaggcatgagaatcacttgaacccaggaggtggaggttgcagtgagccaagactgtgccactgcactccagcctgggcaacacagtgagactctgtctcaaaaaaaaaaaaaaaagagagagagaaagtgcttagcatgataatttcatcatcctgtggctgattctttgagagtctagtaagaacatcctaataattaaagtcctggggtcttgccatggactgacaggcaagagaggtcttgccatggactgacaggtaaggagtggagaatattgaaagtctgcagtcctggttagaaaatgggcaaagaaggaaagaaaactagaggatcctacaggaaagatatgaagtgtggcatggtggctcagaacaccagctctggcattatacaaactggattccagtcccaggctacctcttgctatttatgtgtttgtccttgaagaagctgtataaccttcagagcttcagtttcctcatttgtaaaatggagacatagcagtatcttctgcgcagaaattattgcagggaggaaaggatataaagtatctaagtgcttggcacaatcccaggcacacagtgtatgtgcaataaatgctagaaatttttattattatcaatcctctttcttcttgtcttgaaagtagtgagattgtgcaataaaagaacatcagtggggcatttcctctttcacaagcagcaaataactatcagactacacttccaggtgaagtccacattccttgtggacatcgtcctgaaatgctggtcccaaagggcatggccaaaatcgaggtgcaggtgttgaaagacgttttatttctcactctgtctctctaaccttgaaatcagccagagttaaggcatctggatgactcataacaagcatctgtagagaagagtactttctgctctggtcagaggaagaattaacaagccatttggtattgcaaccttctcagtcagaatgccaggactggctcttgccctgtgcctgaactgtcaccaataatccattttaactccttttaaattctgaatagtggcttcaatgactgtgagagtttggggtggggttgaaggggg

SEQ ID NO: 693424 - DNA, 1440 bp, Homo sapiens
tcataatatcatatatagtggtgttttttggaaaagacaaattacgtgctcaaatagatttacaacaccttttccttccagggagcaaatgatctgactaaatgatgctttccgtatgtatgagatgttactgtaaaccagacatgacatccaagacaaagtagaattttgctgaaatgagaacactgcatttccacttgttactctgatttgtaaatctttatttgtattatctgtctccttctaccaaactatgtcagacactcagatgcttattgactgacttaatacatggatttccagatattctcagccaactaggacttgaagtctaacttgtgtatttctctgagcaggagcgtgagttagtaaatggatggaaatgttcttaacaaaaattggctagatttgcatacacaagtcagtgtcctaagtaaagctcagcaaacctgcagcwgtccccagatgacttagggcagtactcatgaaaaggcaattaagtgtaggtatgagataaaaatgaggttgatatatttgacaaaaagccatgaaggagataaggattagttgtcgtaattcactacacatccattaggccaattatacacatgtgggcacgcacttgtctcctgggaaacctgagtgtgccagcctttcagattcctgggtagactgggggatttctagatacacaattattggaagaggaatttgggggtttcttatgagatgctcttccatgtggccaccttcagtgatgagtgtggggccctgttccttgccaacacagggcctttgcacatgccattgcacctcttttaaagaaactcagaaatgagttgcaaggactgagcgtctgagatagttttccgtggtaagatacatgtggtttccaataggattattgctcaatttactgtgcttatatacatagttctctgaaaagctttgcccttgcagctgtcttccatcagtttcttttggtatttggatgtttcctggctccatttcctcagtgtcttttctttacctctttaatccattctgcacaagctttcattcccactgttcatgtcaaggccaccaaagaccttgatcttgccacatctcaaggttaattttcctctccctcttacttgactttttagcagcatttgacctaaatgatcctttagcagcatttgacctaaatgatccctctaaatattttcttcacttggcttcagagggtccccatagtcttgattttcttcctagtgcactggctacctcattaaagtcccccttcttctttccctcctctaaacactgaaatgcacctggtctcgatgccaggccctcttctctatctacattctttccctaggtggcctcatcaagcttcaaggctctaaacatcatccctgtgctgatgacttcaaaatggatatctccatccca

SEQ ID NO: 693425 - DNA, 1194 bp, Homo sapiens
agaggcagtcccgagtaggcataaattagtaattatatagaaattttacatgatactatttttcaggttgaataactacattgaactttcttcagtataaacaaagaacatgaaattatttctagagtacaagaaacatttataagaattaattatattcaatggtaaaagaggaccttgattaaattcccgaaagcaaaaaatcctggggtctcattctctgagtataagcaataatactggaaactttacattaaaatgaactcagtcattcctaattaggaaatgatgaaaataagcragttaccaaagcttctgtgatatggccaaaatggtacattcttagcccttacatacatcaaagaaactaaacattccactgaagagttaaagtatatactcactcataagcatacatacacatgaaatttaaggaaatcggaatagagccaataaaaataacattaaaaattagagaaaagcagcagaattaatgagcaaatctaagaacctatgctttgcaaaaacaaaactgtaagaaatattcctggaaaatctaatcaagaagaaaatgaaaacaaatgaaaatagaaagataaatcctcataattctagatgtgaagatttaaataattataaagtaattgttttttaagagacagggtttcattctggcccccaggctggagtgcagtggtgcaatcatagcttactgcagccttgaattcctgggcttaagcagttctcctacctcagcctcccaaactgctcccaggattataggtgtgagccactgtgccaggctgcaaatattacctagttatatgttaatatattagaaaatctaaatgaaataaaagttttatgggaaaaggagctaaattcaaataaacattgagaatgaaaataagaaagggatcaaagaacttctaccccagaaggctttgggcctagattattttactgattattttaaatttacaggaagcagatcattaccacattgtaggacttagaaaaatatgaaaaactactgttacagtaatttcacttgcagaatctttgaaattggattgttaccaaagtaacaatcctaaatgtgtacatatccaatagtatttatcacaacattatttgtaataactaaaaatgggtgggtggacaaatgtatatgagtaggaaaaaggttaatta

SEQ ID NO: 693426 - DNA, 1194 bp, Homo sapiens
agaggcagtcccgagtaggcataaattagtaattatatagaaattttacatgatactatttttcaggttgaataactacattgaactttcttcagtataaacaaagaacatgaaattatttctagagtacaagaaacatttataagaattaattatattcaatggtaaaagaggaccttgattaaattcccgaaagcaaaaaatcctggggtctcattctctgagtataagcaataatactggaaactttacattaaaatgaactcagtcattcctaattaggaaatgatgaaaataagcgagttaccaaagcttctgtgatatggccaaaatggtacattcttagcccttacatacatcaaagaaactaaacattccactgaagagttaaagtatatactcactcataagcatacatacacatgaaatttaaggaaatcggaatagagccaataaaaataacattaaaaattagagaaaagcakcagaattaatgagcaaatctaagaacctatgctttgcaaaaacaaaactgtaagaaatattcctggaaaatctaatcaagaagaaaatgaaaacaaatgaaaatagaaagataaatcctcataattctagatgtgaagatttaaataattataaagtaattgttttttaagagacagggtttcattctggcccccaggctggagtgcagtggtgcaatcatagcttactgcagccttgaattcctgggcttaagcagttctcctacctcagcctcccaaactgctcccaggattataggtgtgagccactgtgccaggctgcaaatattacctagttatatgttaatatattagaaaatctaaatgaaataaaagttttatgggaaaaggagctaaattcaaataaacattgagaatgaaaataagaaagggatcaaagaacttctaccccagaaggctttgggcctagattattttactgattattttaaatttacaggaagcagatcattaccacattgtaggacttagaaaaatatgaaaaactactgttacagtaatttcacttgcagaatctttgaaattggattgttaccaaagtaacaatcctaaatgtgtacatatccaatagtatttatcacaacattatttgtaataactaaaaatgggtgggtggacaaatgtatatgagtaggaaaaaggttaatta

SEQ ID NO: 693427 - DNA, 1194 bp, Homo sapiens
agaggcagtcccgagtaggcataaattagtaattatatagaaattttacatgatactatttttcaggttgaataactacattgaactttcttcagtataaacaaagaacatgaaattatttctagagtacaagaaacatttataagaattaattatattcaatggtaaaagaggaccttgattaaattcccgaaagcaaaaaatcctggggtctcattctctgagtataagcaataatactggaaactttacattaaaatgaactcagtcattcctaattaggaaatgatgaaaataagcgagttaccaaagcttctgtgatatggccaaaatggtacattcttagcccttacatacatcaaagaaactaaacattccactgaagagttaaagtatatactcactcataagcatacatacacatgaaatttaaggaaatcggaatagagccaataaaaataacattaaaaattagagaaaagcagyagaattaatgagcaaatctaagaacctatgctttgcaaaaacaaaactgtaagaaatattcctggaaaatctaatcaagaagaaaatgaaaacaaatgaaaatagaaagataaatcctcataattctagatgtgaagatttaaataattataaagtaattgttttttaagagacagggtttcattctggcccccaggctggagtgcagtggtgcaatcatagcttactgcagccttgaattcctgggcttaagcagttctcctacctcagcctcccaaactgctcccaggattataggtgtgagccactgtgccaggctgcaaatattacctagttatatgttaatatattagaaaatctaaatgaaataaaagttttatgggaaaaggagctaaattcaaataaacattgagaatgaaaataagaaagggatcaaagaacttctaccccagaaggctttgggcctagattattttactgattattttaaatttacaggaagcagatcattaccacattgtaggacttagaaaaatatgaaaaactactgttacagtaatttcacttgcagaatctttgaaattggattgttaccaaagtaacaatcctaaatgtgtacatatccaatagtatttatcacaacattatttgtaataactaaaaatgggtgggtggacaaatgtatatgagtaggaaaaaggttaatta

SEQ ID NO: 693428 - DNA, 1024 bp, Homo sapiens
ctatattaatgccatgtgaataaattatagttctgaatttaagattagattcaataaatgtgaaccatgtaatagytattaacttaaaaataaatcactgataatatttgtctcatgccttttgggcacctattttctgtgattttgggaaaagcattcatttttatttacatcaaaattaataaaacagaaaaattaagatattacttattttgaggggtagatgaatgaaatgaatgaatgaaaattatttcattcatggttgcgaactcatttataaaagccctccagaaatggctgaagaatttgccatgcaagtattagcacaatccaaatattaataaatatttagttctttggcatacgcctgaaatgtgggtcggtataaacatatcttcctcaacagagtggtaagaaaatattggctggaatgatttaactgaaatgtttgcagttgagtattttttaaataaataaattacattaaccacagtttgaaatataccaaagacataaattcctttactatgattctgctcttctagatgagaggtcacgactttcatcttggcttttatgttgataaaacaaaatgctgcagaggctctggggaatgaggagtgggtcacatgtgtggttacatttaaggtccacaacctcgtaggtggtgtgatgttggacctttgccttaacctttctgaggctcaatgtcctcatctgcaactacttgtgcagtccctgtgaggactgagtgataggacaagctgaaatgattatttcattatatatttcatatatatttattcatatatatttcatatatatttattcatatatatttcatatatatttattcatatatacttcatatatatttattcatatatacttcatatatatttattcatatatatttcatatatatttattcatatatacttcatatatatttcatatatatttattcatatatacttcatatatatttcatataatgaaattattatttcattatatgccacgg

SEQ ID NO: 693429 - DNA, 1024 bp, Homo sapiens
ctatattaatgccatgtgaataaattatagttctgaatttaagattagattcaataaatgtgaaccatgtaatagttattaacttaaaaataaatcactgataatatttgtctcatgccttttgggcacctattttctgtgattttgggaaaagcattcatttttatttacatcaaaattaataaaacagaaaaattaagatattacttattttgaggkgtagatgaatgaaatgaatgaatgaaaattatttcattcatggttgcgaactcatttataaaagccctccagaaatggctgaagaatttgccatgcaagtattagcacaatccaaatattaataaatatttagttctttggcatacgcctgaaatgtgggtcggtataaacatatcttcctcaacagagtggtaagaaaatattggctggaatgatttaactgaaatgtttgcagttgagtattttttaaataaataaattacattaaccacagtttgaaatataccaaagacataaattcctttactatgattctgctcttctagatgagaggtcacgactttcatcttggcttttatgttgataaaacaaaatgctgcagaggctctggggaatgaggagtgggtcacatgtgtggttacatttaaggtccacaacctcgtaggtggtgtgatgttggacctttgccttaacctttctgaggctcaatgtcctcatctgcaactacttgtgcagtccctgtgaggactgagtgataggacaagctgaaatgattatttcattatatatttcatatatatttattcatatatatttcatatatatttattcatatatatttcatatatatttattcatatatacttcatatatatttattcatatatacttcatatatatttattcatatatatttcatatatatttattcatatatacttcatatatatttcatatatatttattcatatatacttcatatatatttcatataatgaaattattatttcattatatgccacgg

SEQ ID NO: 693430 - DNA, 1024 bp, Homo sapiens
ctatattaatgccatgtgaataaattatagttctgaatttaagattagattcaataaatgtgaaccatgtaatagttattaacttaaaaataaatcactgataatatttgtctcatgccttttgggcacctattttctgtgattttgggaaaagcattcatttttatttacatcaaaattaataaaacagaaaaattaagatattacttattttgaggggtagatgaatgaaatgaatgaatgaaaattatttcattcatggttgcgaactcatttataaaagccctccagaaatrgctgaagaatttgccatgcaagtattagcacaatccaaatattaataaatatttagttctttggcatacgcctgaaatgtgggtcggtataaacatatcttcctcaacagagtggtaagaaaatattggctggaatgatttaactgaaatgtttgcagttgagtattttttaaataaataaattacattaaccacagtttgaaatataccaaagacataaattcctttactatgattctgctcttctagatgagaggtcacgactttcatcttggcttttatgttgataaaacaaaatgctgcagaggctctggggaatgaggagtgggtcacatgtgtggttacatttaaggtccacaacctcgtaggtggtgtgatgttggacctttgccttaacctttctgaggctcaatgtcctcatctgcaactacttgtgcagtccctgtgaggactgagtgataggacaagctgaaatgattatttcattatatatttcatatatatttattcatatatatttcatatatatttattcatatatatttcatatatatttattcatatatacttcatatatatttattcatatatacttcatatatatttattcatatatatttcatatatatttattcatatatacttcatatatatttcatatatatttattcatatatacttcatatatatttcatataatgaaattattatttcattatatgccacgg

SEQ ID NO: 693431 - DNA, 1024 bp, Homo sapiens
ctatattaatgccatgtgaataaattatagttctgaatttaagattagattcaataaatgtgaaccatgtaatagttattaacttaaaaataaatcactgataatatttgtctcatgccttttgggcacctattttctgtgattttgggaaaagcattcatttttatttacatcaaaattaataaaacagaaaaattaagatattacttattttgaggggtagatgaatgaaatgaatgaatgaaaattatttcattcatggttgcgaactcatttataaaagccctccagaaatggctgaagaatttgccatgcaagtattagcacaatccaaatattrataaatatttagttctttggcatacgcctgaaatgtgggtcggtataaacatatcttcctcaacagagtggtaagaaaatattggctggaatgatttaactgaaatgtttgcagttgagtattttttaaataaataaattacattaaccacagtttgaaatataccaaagacataaattcctttactatgattctgctcttctagatgagaggtcacgactttcatcttggcttttatgttgataaaacaaaatgctgcagaggctctggggaatgaggagtgggtcacatgtgtggttacatttaaggtccacaacctcgtaggtggtgtgatgttggacctttgccttaacctttctgaggctcaatgtcctcatctgcaactacttgtgcagtccctgtgaggactgagtgataggacaagctgaaatgattatttcattatatatttcatatatatttattcatatatatttcatatatatttattcatatatatttcatatatatttattcatatatacttcatatatatttattcatatatacttcatatatatttattcatatatatttcatatatatttattcatatatacttcatatatatttcatatatatttattcatatatacttcatatatatttcatataatgaaattattatttcattatatgccacgg

SEQ ID NO: 693432 - DNA, 592 bp, Homo sapiens
tgtaattcatattgtgtcagtttagtcaaaagacacacatacacacacacacctttaatgcctgaatgtccagtaacaaacagaacatgaaccttaatttatacagaaagattraattctcaccttcaccccagcaggtaggcatcattagcccattaacaggtagagaaactaaggcttagataagttaagtaccttgaccgaggtgacagaactagtaaggacaggatgtgactccgagtctgctggactccaaagctcatgctctattctctagactacatcattacataactcccttaaatgctttttaaatgaattaaaatattgctctgcttttccaacaactttatgtcaaagtgacgtacaattattcaaacaaaacaatttatttcacttattttcagggaattagtgtaatttcatttagttttcaaggtatccactgaccacaatatttacattttaaagacatgacagtttaaagctaatcactggtaaactgttacagaaaccaacatcaagtaaactaggacatgctattgggagatgacatggtgttgtctcaggtctgccactctcctctctgggc

SEQ ID NO: 693433 - DNA, 1384 bp, Homo sapiens
ggccttttttccctctaaaatgctaccaaacactagatctcttagttctttcatattttaaagtgcacagatgcctgatttcagattctgtgaaacagmgcacaaattaatatttacaaatgctttctgtctcaggacccctctgtagctactaacttcacatttgggaaaaagtagaccctactccatcccactgtgccacgttgtttaccaaaagtatcccaccaggcacttgtattcctcacccacgtgtattactttaaaatgcctttcggtaaaggagaatttgaatagcattttacgcattaactgtctgggaatgctcccaacataatatactgaaacacagaagactggctgtaggtccagatcacctggtagtgaaccatggaaaggtattattcacacaccttggagcctgcggattctctaagccttcttaatcattcttcaggtattactttgtccttcaaaacagcagatttcagacgcatttataaaacaattcagttgtaatctgggtccctaaagcttcagtatagacatttatcttgtaagtaacaaagagatgggaagatttcctaagttctcatgctatcccacctcctgcttgtgttactcactattcaaaatttaagaataagaagtcatctgggagaaaggggatgggaccgagcatccctgaaacacggctcagggcttggttccctcctatgcccatcacctgctccctcactcaaccacaaacacggctgcaatatcagggtcagtgttccacatcccgtagcagatgaccctctgttccagaacaaacaaagtgtgcaccctataagcatgatgacattagaattagacttcaaagctagcctcaagatgctcacagactgatattaaccactgtctgccacaagcatatggcacaagacaggctggagcagatcacaaggaaagactcgttggcatattggcccacaatactgccacagaggcagagcttagagagggtgctaggcaaggcattcatccgctatttcactctggaaaggggatcagttgggggaaaaaaatctgcaaaccttttgaggacagaaggcaatattgcttgaaatttatgagtaatgagccattttgggagaaggaagttgattctgtcattcattttgacagggcttattaacacaaaaggaggagagggctggtggggagggtggggcacttgtgggaaggtgcagagaggacagaagggtgaagccagccaggcaaatgagaatgagaaattgcaattatggaccttatggaggagctgctggtaagctaccctggccaaaggaaaatgttgattggaccaattttcagagggaaacagacagctcttctgcaagca

SEQ ID NO: 693434 - DNA, 1813 bp, Homo sapiens
cttagtgtccatgtgttcttgttgtttagctcccacttataagtgagaacatatggtatttggttttctgttcctgctttagtttgcttagaatagtggtctccacctccatccatgttgctgcaaaggacatcatctcattattttttatggttgtgtagtattccacggtgtatatttaccacattttctttatccagtctgcctctttttaaatatagtcatttttctcatttttaattatcaaacatttataaaatgcttattctgtggaaggttctctgcctcaagagttacaaacattaggctgggcacggtggctcacgcctgtaatcccagcactctggaaggccaaggcgggtggatcacctgaggtagggagtttgacaccagcctgaccgacatggagaaaccccatctctactaaaaatacaaaattagctgggtgtggtgacacatgcctgtaatcccagctacttgggaggctgaggcaggagaattgcttaaacccaggaagtggaggttgcagtgagccgaaatggtgccactgctctccagcctgggcaacaagagtgaaactctatcttcaaaaaaaattaaaaaaaagagttacaaagattaatgatrtacaatctctggccttaaaaatctctgaaaaactagaaataattctaaagcccagaaagagtgagttcccttccagtatcctatacaagttcaaggtcctccaaagcattattaaatcttcctagccttttgatcctctgccttttctcctgcctcactaatgttctaagtctctgttatgacacagattctagaaccttcacaggccacactcccatcatttgcttaggtctgatcaatctgctccacgcaatttctcagtgatcctctgcatctctgcctacaagggcctccctgacacccaagttcatattgctcagaaacagtgaacttgagtttttcgttttatcttgatctctctctgacaaagaaatccagatgatgcgagacctgatgaagacaatacatggaaaatgacagtcttgggtatggactaactccctctttgaggcttcctcaactctagtagttcaggagtctcctcttagggacttagggactttaacacaactgctttatcttccttgcctgcttccttttcaaattcaatattttttctttcactcttattgattcctctggaagcctgggggaaacaacccacagttaactaagctctaggctgatagtgctggtttctcctttggtttctagagtttaaactgaacaaagaaaataaccatcctccgtagcactaggaaaaattccttagcccattatctcacttcctgtagcatggtcactctatataatctgcctcaactcagaaataatgatttcctctcattttccctattaatagggtggaccatcttctaaccgccctatagacagggcatttcagacactaaaggaagaaaaggaatatacagtagtactgagtacaccatctagttatcctttcctccccgatgagttatttaacactagaaaaaaaaattcacataatagagggcatattgactacttgctgttcattttagaggtacattagaagaaaatctccaaaagttgatttggcaggagaattttctcacaggaccaaacacctagaagactcagtagacaaatgcctaatctgccctggttggaggtgtgttattatatcttgagatggattcacctattgttcgtttgaagtagtcttaatgtgggtgtaatctactttcctagtctttcagagctc

SEQ ID NO: 693435 - DNA, 1813 bp, Homo sapiens
cttagtgtccatgtgttcttgttgtttagctcccacttataagtgagaacatatggtatttggttttctgttcctgctttagtttgcttagaatagtggtctccacctccatccatgttgctgcaaaggacatcatctcattattttttatggttgtgtagtattccacggtgtatatttaccacattttctttatccagtctgcctctttttaaatatagtcatttttctcatttttaattatcaaacatttataaaatgcttattctgtggaaggttctctgcctcaagagttacaaacattaggctgggcacggtggctcacgcctgtaatcccagcactctggaaggccaaggcgggtggatcacctgaggtagggagtttgacaccagcctgaccgacatggagaaaccccatctctactaaaaatacaaaattagctgggtgtggtgacacatgcctgtaatcccagctacttgggaggctgaggcaggagaattgcttaaacccaggaagtggaggttgcagtgagccgaaatggtgccactgctctccagcctgggcaacaagagtgaaactctatcttcaaaaaaaattaaaaaaaagagttacaaagattaatgatatacaatctctggccttaaaaatctctgaaaaactagaaataattctaaagcccagaaagagtgagttcccttccagtatcctatacaagttcaaggtcctccaaagcattattaaatcttcctagccttttgatcctctgccttttctcctgcctcactaatgttctaagtctctgttatgacacagattctagaaccttcacaggccacactcccatcatttgcttaggtctgatcaatctgctccacrcaatttctcagtgatcctctgcatctctgcctacaagggcctccctgacacccaagttcatattgctcagaaacagtgaacttgagtttttcgttttatcttgatctctctctgacaaagaaatccagatgatgcgagacctgatgaagacaatacatggaaaatgacagtcttgggtatggactaactccctctttgaggcttcctcaactctagtagttcaggagtctcctcttagggacttagggactttaacacaactgctttatcttccttgcctgcttccttttcaaattcaatattttttctttcactcttattgattcctctggaagcctgggggaaacaacccacagttaactaagctctaggctgatagtgctggtttctcctttggtttctagagtttaaactgaacaaagaaaataaccatcctccgtagcactaggaaaaattccttagcccattatctcacttcctgtagcatggtcactctatataatctgcctcaactcagaaataatgatttcctctcattttccctattaatagggtggaccatcttctaaccgccctatagacagggcatttcagacactaaaggaagaaaaggaatatacagtagtactgagtacaccatctagttatcctttcctccccgatgagttatttaacactagaaaaaaaaattcacataatagagggcatattgactacttgctgttcattttagaggtacattagaagaaaatctccaaaagttgatttggcaggagaattttctcacaggaccaaacacctagaagactcagtagacaaatgcctaatctgccctggttggaggtgtgttattatatcttgagatggattcacctattgttcgtttgaagtagtcttaatgtgggtgtaatctactttcctagtctttcagagctc

SEQ ID NO: 693436 - DNA, 1813 bp, Homo sapiens
cttagtgtccatgtgttcttgttgtttagctcccacttataagtgagaacatatggtatttggttttctgttcctgctttagtttgcttagaatagtggtctccacctccatccatgttgctgcaaaggacatcatctcattattttttatggttgtgtagtattccacggtgtatatttaccacattttctttatccagtctgcctctttttaaatatagtcatttttctcatttttaattatcaaacatttataaaatgcttattctgtggaaggttctctgcctcaagagttacaaacattaggctgggcacggtggctcacgcctgtaatcccagcactctggaaggccaaggcgggtggatcacctgaggtagggagtttgacaccagcctgaccgacatggagaaaccccatctctactaaaaatacaaaattagctgggtgtggtgacacatgcctgtaatcccagctacttgggaggctgaggcaggagaattgcttaaacccaggaagtggaggttgcagtgagccgaaatggtgccactgctctccagcctgggcaacaagagtgaaactctatcttcaaaaaaaattaaaaaaaagagttacaaagattaatgatatacaatctctggccttaaaaatctctgaaaaactagaaataattctaaagcccagaaagagtgagttcccttccagtatcctatacaagttcaaggtcctccaaagcattattaaatcttcctagccttttgatcctctgccttttctcctgcctcactaatgttctaagtctctgttatgacacagattctagaaccttcacaggccacactcccatcatttgcttaggtctgatcaatctgctccacgcaatttctcagtgatcctctgcatctctgcctacaagggcctccctgacacccaagttcatattgctcagaaacagtgaacttgagtttttcgttttatcttgatctctctctgacaaagaaatccagatgatgcgagacctgatgaagacaatacatggaaaatgacagtcttgggtatggactaactccctctttgaggcttcctcaactctagtagttcaggagtctcctcttagggacttagggactttaacacaactgctttatcttccttgcctgcttccttttcaaattcaatattttttctttcactcttattgattcctctggaagcctgggggaaacaacccacagttaactaagctctaggctgatagtgctggtttctcctttggtttctagagtttaaactgaacaaagaaaataaccatcctccgtagcactaggaaaaattccttagcccattatctcacttcctgtagcatggtcactctatataatctgcctcaactcagaaataatgatttcctctcattttccctattaatagggtggaccatcttctaacygccctatagacagggcatttcagacactaaaggaagaaaaggaatatacagtagtactgagtacaccatctagttatcctttcctccccgatgagttatttaacactagaaaaaaaaattcacataatagagggcatattgactacttgctgttcattttagaggtacattagaagaaaatctccaaaagttgatttggcaggagaattttctcacaggaccaaacacctagaagactcagtagacaaatgcctaatctgccctggttggaggtgtgttattatatcttgagatggattcacctattgttcgtttgaagtagtcttaatgtgggtgtaatctactttcctagtctttcagagctc

SEQ ID NO: 693437 - DNA, 1813 bp, Homo sapiens
cttagtgtccatgtgttcttgttgtttagctcccacttataagtgagaacatatggtatttggttttctgttcctgctttagtttgcttagaatagtggtctccacctccatccatgttgctgcaaaggacatcatctcattattttttatggttgtgtagtattccacggtgtatatttaccacattttctttatccagtctgcctctttttaaatatagtcatttttctcatttttaattatcaaacatttataaaatgcttattctgtggaaggttctctgcctcaagagttacaaacattaggctgggcacggtggctcacgcctgtaatcccagcactctggaaggccaaggcgggtggatcacctgaggtagggagtttgacaccagcctgaccgacatggagaaaccccatctctactaaaaatacaaaattagctgggtgtggtgacacatgcctgtaatcccagctacttgggaggctgaggcaggagaattgcttaaacccaggaagtggaggttgcagtgagccgaaatggtgccactgctctccagcctgggcaacaagagtgaaactctatcttcaaaaaaaattaaaaaaaagagttacaaagattaatgatatacaatctctggccttaaaaatctctgaaaaactagaaataattctaaagcccagaaagagtgagttcccttccagtatcctatacaagttcaaggtcctccaaagcattattaaatcttcctagccttttgatcctctgccttttctcctgcctcactaatgttctaagtctctgttatgacacagattctagaaccttcacaggccacactcccatcatttgcttaggtctgatcaatctgctccacgcaatttctcagtgatcctctgcatctctgcctacaagggcctccctgacacccaagttcatattgctcagaaacagtgaacttgagtttttcgttttatcttgatctctctctgacaaagaaatccagatgatgcgagacctgatgaagacaatacatggaaaatgacagtcttgggtatggactaactccctctttgaggcttcctcaactctagtagttcaggagtctcctcttagggacttagggactttaacacaactgctttatcttccttgcctgcttccttttcaaattcaatattttttctttcactcttattgattcctctggaagcctgggggaaacaacccacagttaactaagctctaggctgatagtgctggtttctcctttggtttctagagtttaaactgaacaaagaaaataaccatcctccgtagcactaggaaaaattccttagcccattatctcacttcctgtagcatggtcactctatataatctgcctcaactcagaaataatgatttcctctcattttccctattaatagggtggaccatcttctaaccgccctatagacagggcatttcagacactaaaggaagaaaaggaatatacagtagtactgagtacaccatctagttatcctttcctccccgatgagttatttaacactagaaaaaaaaattcacataatagagggcatattgactacttgctgttcattttagaggtacattagwagaaaatctccaaaagttgatttggcaggagaattttctcacaggaccaaacacctagaagactcagtagacaaatgcctaatctgccctggttggaggtgtgttattatatcttgagatggattcacctattgttcgtttgaagtagtcttaatgtgggtgtaatctactttcctagtctttcagagctc

SEQ ID NO: 693438 - DNA, 1462 bp, Homo sapiens
ttccacctctgattttcctatttttgtgtcaatgctactatcattattgcagttactcaggttcagtaaactctgactgctacttctcctttgtccccacataaattcacagcagtcccaaagtccttccctcctttcctttttaatcatgctaaatttcctcagtggctggtccaagtgcagtagtgtttacaaccaactgatcgcaaatagttacaggtttctttgttccttctccattcccactgcttcacttgactacccttattcgttaatatagtgaggatctgagccaaggaaccaataggttgaagcccttatcacctattgtgataggactgttgttgcaaaaacctcgttaattaatctccctacctccagaatatttcctttgccacccatcctcataatccttcctctactctgaagccaggaaaaatcatgtcttcattaccagacatcttatcaagcatcttttctgtgcaaagcattatgctaaggccctgccctcaaaaactttgcaaactggatggggaagagccatatacatataaaagaaaccaatcaaggtagcataaattaaatactgaatgggtgatgtagactataatctactgaaattaaaaggaaagattacttttggtgggtaagtgaaggaaagatgcatggatgaaatggaagttgaattaaatcttaaagatggaataagacttagattaaaaaggtgtgaaggagagaaatttcaagccaaacaaatgagactgaactttatttttaggcaatatggtatctttaagtagtatttttgaggggaggaaaggtaaggtggtgcgagaagtaccacagtgaacttgtttaagaagatgaacagggactgatttgatggagggtaatagtaaacctgaggactatttaggaggctgttgtgatgtggacagggcatacccaaggagaatatcagtaatagaaaggaaatatcaaatataagaagcactcttttgcttacatatcttcaattagacagcaagctccttgagggaagattttacactactttgtctctcccattataactggtacaaagccttacaacaaacatttactgactgatttagcacagtaaaaaaatcaaaataagaatgccaagcattataaaatatactccagtgagtgtattttgtagagaaaatataaggtgaaatgagggagctagggtgggaatgttttttggacagtcacatcaggggagataaaaccaggcacaactaatagaatgaaaagttggctgaagaggcacaattccaaactaaaggtaaagcaatgacattaaaatcttttcatgtcaagaagcaccccagaagagcagggtccttaagtgttttytgaacaggaaatacttcagggaaaaccggtctttgtgatgtgaataaaacaactcaaattgcttggaagacatttgaaa

SEQ ID NO: 693439 - DNA, 1900 bp, Homo sapiens
tgagccttctcaggtgacgagaactctatacaggcaatgacctttaatatattttacgtttccattgctaaacaaacactttatcattttggatataaagcgttttatcgtccaaattaagaggtgctgaagtaaaatgttctttaaagattttatatcttttctcatatttgagtaaacattagataaagccaagatgatgcaatttctgaatccaaataatttaccatgggataacatggatagggtgaatattaaacagaggtacttctgttttggggtttaatatagttttgtggcaaaaacaaaacaaaacaaataaaaaaccagaaacaaaaacaaaaacaaacgaacactcagagaaggaaatgaaggttggtccagacccaatcacagatttatctccatgagtctagtagagcattctcaggattgccactattctcttaagaaatggaggatggcttcaagggtcttgaatggaagtaaaatgtagctacagccaaactattacttctggtaaaatcatctctgggctacaagatgtaggttgtgcacctctgccatctctctcgtcctcatctgtctctctgaaactcatctgtctgtctcgactttatggtgttatcatatttgcaatccacccccaggtcctcagtgactcaccagtactgacccatttctggtttggtttccctatctgtaaatcaggaatgataaaatctaccctgagagtttgttttttgtttgtttgtttgttttgagatggagtcttgctctgtcggccaggctggagtgcagtggcttgatcttggctcactgcaacctccgcctcccaggttcacgcagttctcccacctcagcctccccagtagctgggattacaggtgcatgccaccacacccagctatatatatatatatatatatatatatatwtatattttttttttttttttttgtatttttagtagagacagggtttcaccgtgttggccaggctggtctcaaactcctgacctcaagtgatctgcccgcctcggcctcccaaagtcctgggattacaggcgtgagccaccacgcccggccaagttgttatcattaaataaaataacatgtgtagagggcctgcaaaagggcctggtcctcagcaaacattaattcttactctctgcaaatatccttgactttataatctagcctatgtaatagagtgctttatgatggcctctgatgcaactgggtgagccagaggaaattactattcctaagcctcagttttcttatctgcaaaatgaggataagaatgattactttgaatggatattgtatggaaatcacttagcaccagtaggagacagggccctgcccaagagtttgatctggcccaatttcaaagatttggctagtcccttaggagaccttcaaatcttcgcttcctaactaactatgcaataaagacagagctccagatagtttaggagcaaactgtgacacatttgtaaatctagattgtgtaataggtattcaggtcatgcttttccatgtagggttcatcatgttagatttataaggaatgcaaatttcagaggattctttttcttaataaggaaagtatttctgatatttgacacaaataacattagtagcaatcaatattatgcatagaatatacatttttcctctttctatagttgcaaatattttgaaatttacttccctttcaataaactggatatttgttttctttgttgagtgcccataccaacaggctttttctcccctccatccaaatgttcaatgtcaatattttttaattattttagaaaaaacaactctattgaggattaattgacatacaatgaaactacacatatttcaagtgtgcaatttgatatatg

SEQ ID NO: 693440 - DNA, 1900 bp, Homo sapiens
tgagccttctcaggtgacgagaactctatacaggcaatgacctttaatatattttacgtttccattgctaaacaaacactttatcattttggatataaagcgttttatcgtccaaattaagaggtgctgaagtaaaatgttctttaaagattttatatcttttctcatatttgagtaaacattagataaagccaagatgatgcaatttctgaatccaaataatttaccatgggataacatggatagggtgaatattaaacagaggtacttctgttttggggtttaatatagttttgtggcaaaaacaaaacaaaacaaataaaaaaccagaaacaaaaacaaaaacaaacgaacactcagagaaggaaatgaaggttggtccagacccaatcacagatttatctccatgagtctagtagagcattctcaggattgccactattctcttaagaaatggaggatggcttcaagggtcttgaatggaagtaaaatgtagctacagccaaactattacttctggtaaaatcatctctgggctacaagatgtaggttgtgcacctctgccatctctctcgtcctcatctgtctctctgaaactcatctgtctgtctcgactttatggtgttatcatatttgcaatccacccccaggtcctcagtgactcaccagtactgacccatttctggtttggtttccctatctgtaaatcaggaatgataaaatctaccctgagagtttgttttttgtttgtttgtttgttttgagatggagtcttgctctgtcggccaggctggagtgcagtggcttgatcttggctcactgcaacctccgcctcccaggttcacgcagttctcccacctcagcctccccagtagctgggattacaggtgcatgccaccacacccagctatatatatatatatatatatatatatatatwtattttttttttttttttttgtatttttagtagagacagggtttcaccgtgttggccaggctggtctcaaactcctgacctcaagtgatctgcccgcctcggcctcccaaagtcctgggattacaggcgtgagccaccacgcccggccaagttgttatcattaaataaaataacatgtgtagagggcctgcaaaagggcctggtcctcagcaaacattaattcttactctctgcaaatatccttgactttataatctagcctatgtaatagagtgctttatgatggcctctgatgcaactgggtgagccagaggaaattactattcctaagcctcagttttcttatctgcaaaatgaggataagaatgattactttgaatggatattgtatggaaatcacttagcaccagtaggagacagggccctgcccaagagtttgatctggcccaatttcaaagatttggctagtcccttaggagaccttcaaatcttcgcttcctaactaactatgcaataaagacagagctccagatagtttaggagcaaactgtgacacatttgtaaatctagattgtgtaataggtattcaggtcatgcttttccatgtagggttcatcatgttagatttataaggaatgcaaatttcagaggattctttttcttaataaggaaagtatttctgatatttgacacaaataacattagtagcaatcaatattatgcatagaatatacatttttcctctttctatagttgcaaatattttgaaatttacttccctttcaataaactggatatttgttttctttgttgagtgcccataccaacaggctttttctcccctccatccaaatgttcaatgtcaatattttttaattattttagaaaaaacaactctattgaggattaattgacatacaatgaaactacacatatttcaagtgtgcaatttgatatatg

SEQ ID NO: 693441 - DNA, 1900 bp, Homo sapiens
tgagccttctcaggtgacgagaactctatacaggcaatgacctttaatatattttacgtttccattgctaaacaaacactttatcattttggatataaagcgttttatcgtccaaattaagaggtgctgaagtaaaatgttctttaaagattttatatcttttctcatatttgagtaaacattagataaagccaagatgatgcaatttctgaatccaaataatttaccatgggataacatggatagggtgaatattaaacagaggtacttctgttttggggtttaatatagttttgtggcaaaaacaaaacaaaacaaataaaaaaccagaaacaaaaacaaaaacaaacgaacactcagagaaggaaatgaaggttggtccagacccaatcacagatttatctccatgagtctagtagagcattctcaggattgccactattctcttaagaaatggaggatggcttcaagggtcttgaatggaagtaaaatgtagctacagccaaactattacttctggtaaaatcatctctgggctacaagatgtaggttgtgcacctctgccatctctctcgtcctcatctgtctctctgaaactcatctgtctgtctcgactttatggtgttatcatatttgcaatccacccccaggtcctcagtgactcaccagtactgacccatttctggtttggtttccctatctgtaaatcaggaatgataaaatctaccctgagagtttgttttttgtttgtttgtttgttttgagatggagtcttgctctgtcggccaggctggagtgcagtggcttgatcttggctcactgcaacctccgcctcccaggttcacgcagttctcccacctcagcctccccagtagctgggattacaggtgcatgccaccacacccagctatatatatatatatatatatatatatatatatwttttttttttttttttttgtatttttagtagagacagggtttcaccgtgttggccaggctggtctcaaactcctgacctcaagtgatctgcccgcctcggcctcccaaagtcctgggattacaggcgtgagccaccacgcccggccaagttgttatcattaaataaaataacatgtgtagagggcctgcaaaagggcctggtcctcagcaaacattaattcttactctctgcaaatatccttgactttataatctagcctatgtaatagagtgctttatgatggcctctgatgcaactgggtgagccagaggaaattactattcctaagcctcagttttcttatctgcaaaatgaggataagaatgattactttgaatggatattgtatggaaatcacttagcaccagtaggagacagggccctgcccaagagtttgatctggcccaatttcaaagatttggctagtcccttaggagaccttcaaatcttcgcttcctaactaactatgcaataaagacagagctccagatagtttaggagcaaactgtgacacatttgtaaatctagattgtgtaataggtattcaggtcatgcttttccatgtagggttcatcatgttagatttataaggaatgcaaatttcagaggattctttttcttaataaggaaagtatttctgatatttgacacaaataacattagtagcaatcaatattatgcatagaatatacatttttcctctttctatagttgcaaatattttgaaatttacttccctttcaataaactggatatttgttttctttgttgagtgcccataccaacaggctttttctcccctccatccaaatgttcaatgtcaatattttttaattattttagaaaaaacaactctattgaggattaattgacatacaatgaaactacacatatttcaagtgtgcaatttgatatatg

SEQ ID NO: 693442 - DNA, 973 bp, Homo sapiens
tataacatatattttgtattgcctcatggtgcagaaaaaatttatttgattttttattttatttttaaaaaactactttacagaggtacaattgagatacaaaaatctgtacatatataatgtgtacaacttgatgagcttggagctaagtttatacccatgaaaccatcaccataatttataccataattgcagtgactttaagcttatgaaactcttaaatcctatttgtttagtcttcagtacagcacctgaatatctgtgtcttcagataaaactatactcaaggataggaaagcagtggaaaagatgttttggttcatatgaatttttcatagcaatttggccttttattcaactgttcaattaaattcttatcctcaggaagcttctcagtgtaacactgatagatttagaatagcagtttagcacctggccacaagttctcaaaaygcaggtctggaatgatacataaaaagggcaatacataaagctgattcaggagttacttagttaaattttacttgggaaccaaaatttcaacttgcaccggacaactagaaaatagtaagttagatgaaaatgaaaagatgcatttaaaagtgaaagtgctacaatataggtaaaaagtcacacatacacctaaaagtataaaagttgtccttttcagtcactgaatctgaaaataacacatttacattatgttcaaattacatatatttaaatcattgaaattggtttggaaaggcagagattcaatgttactgggaaaacattcacattttgcacttaccgataactgagcatttacttctgtatcctcaatgccttctattcttgttcacttaatttcattattgcctcaatgtctagtcactgtaattattgaccaagtcataatgtatagcccttatggtactctacactcttctttttataatttaaacatatttattaagttatttgatttgtt

SEQ ID NO: 693443 - DNA, 973 bp, Homo sapiens
tataacatatattttgtattgcctcatggtgcagaaaaaatttatttgattttttattttatttttaaaaaactactttacagaggtacaattgagatacaaaaatctgtacatatataatgtgtacaacttgatgagcttggagctaagtttatacccatgaaaccatcaccataatttataccataattgcagtgactttaagcttatgaaactcttaaatcctatttgtttagtcttcagtacagcacctgaatatctgtgtcttcagataaaactatactcaaggataggaaagcagtggaaaagatgttttggttcatatgaatttttcatagcaatttggccttttattcaactgttcaattaaattcttatcctcaggaagcttctcagtgtaacactgatagatttagaatagcagtttagcacctggccacaagttctcaaaacgcaggtctggaatgatacataaaaagggcaatacataaagctgattcaggagttacttagttaaattttacttgggaaccaaaatttcaacttgcaccggacaactagaaaatagtaagttagatgaaaatgaaaasatgcatttaaaagtgaaagtgctacaatataggtaaaaagtcacacatacacctaaaagtataaaagttgtccttttcagtcactgaatctgaaaataacacatttacattatgttcaaattacatatatttaaatcattgaaattggtttggaaaggcagagattcaatgttactgggaaaacattcacattttgcacttaccgataactgagcatttacttctgtatcctcaatgccttctattcttgttcacttaatttcattattgcctcaatgtctagtcactgtaattattgaccaagtcataatgtatagcccttatggtactctacactcttctttttataatttaaacatatttattaagttatttgatttgtt

SEQ ID NO: 693444 - DNA, 1042 bp, Homo sapiens
tgaagaaacttcttgatttagtgctacctggaatgaatgattcttaaatacaacacagattacaaaatggtcaggatttgccatcacatgctttaaaagtttcttctttatatcactggaagttgttgatggcaatgaaaatatgcaatagtaactcttcagttactattcttcagaaacttctagacttgcaaacacaaccctgagaggagagactgttgtcatccatctgagaatatttggaaggtacctgataaggtagaagctgatcttcaaagagtttagaaattcttggcaagtggagcctgtcctggaagttggggctttctgtcttctgggaaatgagtgcctgaaaacaatggtggatgggcaactacaggttatgtctacagatgtccagtgcgaggcttctgcaatgaatcctttgactaaaatgcacagaatgctcaatggagtaaaagccttgagtcttttgtatccaaaattcactgtgtggaacaacgaatcaccttaaggatgtggtatgaagggttagggagaagaagctcacactcaaaagaccaccacccttgttccaaacctctactgatccctgaacttctactaccagtcattctctactttcccactttttggaatttatggaagaaaaaaaaggtgttgccaccaggctgtggattaattgatcatattgactccctagttaatttctgggccattggttgggaaaagagaatgcaaggagcccaaaaaaactacctaatctacagttttgcttacttattatacggcctgatgaaacattaccttagaagtgagaatgccttacaatacactagtttttggtggccattttattggatatttactatgtgccaggttttgtactaagcatttcataagcactattcttataaaagaamctgagagatgggtagtatgactattttacagataaggaaactaagagtccctgaggttaaatgatttaaccaaggtcactgagacccaaacctaggtttgtgtaactccactgtccgat

SEQ ID NO: 693445 - DNA, 571 bp, Homo sapiens
gagggacgcaattcaacctctaacagcatctgaaacttcgcatgtcaaaagagaattttcaatttctaccctgtacacctgcttctccttcagtgtttcccatttcagtaaatggcagcaccatccacatgatttctcaggccagatgccatccaggagtcaactttgacttctctttttgtgctcacacccgaaatccaatccatcagggagtcccatcagcccaccttcaaaatgtctttccagcctcactgcttttcactactccatggcactgaccaaagccactgtccccacttgcttggaatacttagtaacctcctgtatagtttccttgcttccacactggccaagaatktgctctcggttgtccacagagcagccagagagaatctttcaagaacatgccattcccctgctaaaaccctcccgtagcttcccagaaccatcagaacacaaactacactgccagtcttgggctcagggtgctgcattgtttcaccctcacctcactgcactttcccctcattttgctgttgtgttcctgactttctgtgtgtgggggatttca

SEQ ID NO: 693446 - DNA, 590 bp, Homo sapiens
ggctttaagctggggagggaggtgacctgattcaccctggaaaagagtgccctagatgcttgtggagaagaaaatgaagagggcaagatggaaggcaacctcgagacagacctcaaggatgccattccctgcctcacccccatcgctccccagaagcttgggtgaaaccaccttccatctggtccttccagttcctacctctctaattgagagggagcctagcaagttggggtagggcctgctatataattagttaggcccagtgcaaaatgaaaataaggactccaagccgggcgtggtggctcgcacctgtaatcccagcacttcgggaggccgaggagggtggatcacaaggtcaggagatcgagaccatcctggctaacacggtgaaaccccgtctctactaaaaatacaaaatattagccaggcgtggtggcgggcgcctgtagtcccagctacttgggaggctgaggcaggaggatggcgggaacctgggaggcggagcttgcagtgagccragatcgcgccactgcactccagcctaggcgaaagagcaagactcagtctcaaaaaaaaaaaaaaaaaaaaaa

SEQ ID NO: 693447 - DNA, 1607 bp, Homo sapiens
tgcctcagcctcctgctgggattacaggcacacgccaccacacctggctaatttttgtatttttagtagagatggggtttcaccatgttgatcaggtgggtctcaaactcatgatcttgtgatccacctgccttggcctcccaaagtgctggaatgacaggcatgagccaccaggcccagccatgtctgtcattttctttgttaacctaatttctaaagattactcatcttttaaacttctttgaaacaagttgtttcatacctgtgatttgtactgtaactcaaggttttttgttttttgttctttgtgtgtgtgtgtgtgtgtgtctgtgtgtttgtcgtctttgttgttgttttgttttgtttgaatcctggggaaccagaggtgttagcctatgttttaaaactcacatttggcaatggtatcaacagctgtcacactgaataattgtcatgtcattataagggtttctgttgctcactaatctgtaggtataaatctggattttaaccacatgtgattggtaaaaattagttcttgtgagagattctatgctgtgyaggccatctgttccctattctcaaacccagaatgaaaagttagccttagaatttgcaaatcagtgaactaagaggtatgttataataggaagatgggctgactgaagtctctggagctaagctgggacctgtatgtgggcactgctggcagaaacataagtgtgtgtggataaactcttcattagtggaaaggaatcttagttttcggctgattttcagtggtgggcatgaccccaaacagaatctgagatgatgtaataatcatctgtgatttgattgtacttataagattcagctaaatcttcccttttttgtcccagtctacttgagatgtaccttccttgaacccttattgcccagctacatcatgaactccttgaaggttggaatatcagcttcaagtttgtgtcccaaacacttagtacagtgcttgggtcatgttagccttttgatgatgttgatcaaatgaatcagcagccgggcgcggtggctcacgcctgtaatctcagcactttgggaggctgaggtgggtggatcgtctgaggtcaggcgagaccagcctggccaacatggtgagaccccatctctactaaaaatacaaaattagctgggtgtggtggcacattcctgtaatcccagctacttgggaggctgaggcaggataatcacttgaacctgggaggcagaggttgcagtgagccgagaccacgccattgcactccagcctgggcaacaagagcgaaactctatctcaaaaaaaatgaatcagcaaggtaacttcttgcattaggaatgacagcacaggccgggcgcggtggcgtacacctgtaatcccagcactttgggaggctgaggcaggaagatcacttgaggccaggagttcaagaccagcttggccagcatggcaaaaccccatctctactatgccgggtgcggtgactcacacctgtaatcccagcattttgggaagccaaggcaggcggatcacttgaggtcaggaattcgagactagcctggccaacatggcaaaaccccatctctactaa

SEQ ID NO: 693448 - DNA, 831 bp, Homo sapiens
tttttttttttttttctttttgagatggagtctcactttgttgcccaggctggagtgcagtggtgcgatcttggctcactrcaacctctgcctcccagattcaagcgattctccttcctcagcctcctgagtagctgggattacaggcatgcgccaccacacccggctaacttttgtatttttagtagagatggggtttcgccatgttggccaggctgatctcaaactcctgaccttaggtgatctgcctgtcttggcctcccaaagtgctgggattacaggcgtgagccactgcgcccggccgctcgttaagtcttgactgtcattcttggtttgcctcacatctctgaccccatctggaacgctctgtacttagcactggttgctgggtgctgccagtcctgggttcagatcccagctctggtgggtcaccctgagctagtgacagagactcttggagcctcagtgtcctcatctgtgaaatggggccaccaacactaccaaggaatggttgggagcaaagtgagatggtggctgtgaggcacttcaggcacctcagctcatcagggtaagtaaagtcctctgttgaccttgccaggctagaagtagctaatttatcgtcatggtgggtggcagaggggcagctaaggccactggctcaaggtcacagggatcagagtggaatctcactttgtggctcaaagctgtgtgatcttgggcaagccacttggcctttctgggcctcagtttcatcctgttgacatcagaagaccccaggaccatacagtggagggctgagtgtaacttggcatccagtcagtgatgtgtttt

SEQ ID NO: 693449 - DNA, 2153 bp, Homo sapiens
ccatcctacccccaatattttggatattgtgatggtagtcactgcatgtacgtctcttccatatcctcagcccattcctcaatggccttaggcctttgaagtccccagataatataaaggagagacatcaactgacaccatgacatagaagataaggctgcattcggcattgtttccttggggatgagacagaacagtagaactctggctcaagaccagctcacagaaatcagaaatgaccttctatcagcaccaatgtcaccaactccccaccttccttcctcctctccctaacaccagcccagcagaaaagtcccctgaggggaggtcccctgtctaacttgctctgtgaactacatgctgtctaatattcagcatgagtttctcatatgtttgctttgggttttggagatcccacattatttacatttttacgtctgaagacctggctttccttgttactgttgagagaaaaacaagccagttctataccaatttagttgaggcaacagcaagagtcgtaagatcaacagaaaggtcccaaccaaagatatcgctgccaagtgacagtttgggcactgcacccaactgagccatgtccgattttgttacttgatatactgtttgaatttgggcaagttggtgggtctcactgaggcttaaattgtggcgagtaacagggctcgttttgggaccttttgctaccatgggatgttgtaaggctgaagttaaacaatatgtgaaagtatttagcagaatgcctggaatgaagtagaagtacctgcctaataatcctcaagtcttgtgggtgaaaaaggaagtgactggtggattcacaagtgccctgctctgttttcctgaatatagtgaccctgagtctttgtgggctcaacccctgcaggaccctccctatcaatactccttggcagggtgaacaaagcagtgttgtctaaaaagcgggggaggagggcgcctggtgggctggagagcgagggcctggttgatgcaccagtgtaaatggagagcctgagcaatagttagagtagagtagacagaacaatgctaaccttggattccaccagctaagtactcgtctcttggggtgatattgattcaacttcccacatgctgtagataaggaagaatgccctctgagagtcagtgaataaactagcacaaaatggatggcattgggtcaggtgccatggtgcactcctgtaatcctaacattttaggaggtcaaggtgggaggattgcttgaggccaaaagtgtgagaccagcctgggcaacatwatgcgacccctatgaaggaagaaatgatgactggtgctgtggaaagagagctctattaaaaaaaaaaaaacatgacatcggaaagacttatgcgacatcatctgaagagatgacaatatagactgaccccaagtcaaggaaaaatttgacttagggttttaatatagctttaaataagatgtgttaatcagttaagagacagaagtgttggtcagaagacagtgtgtaaatatcatatcaagtgtcattgaagcaaatgttgaaagcatccatctatgaactgcccaggatctggatgggagatctctagctattgatgctgcttgaatgatccaacgctttcttctgatttcatgccctccagagcaggctttgtgatcaaaatgacgattttgatcctttttgtgcatacaaaagtcatttgctaaagatgtcagggtgagctgtctggtcaacctgaggattatagtttttgctataggttcctcaatggcctccttgtttatacatctggatcttgtgagctctgcaactgtgcatctgtacctgagtggcaggtttacactctgagcgttgataagattagatccttgagcctataaagctgttgaacacaggcacagtgaaatgtcatttgacaggctttttggcagtctgcccagctgggaaaaacagattggccccactttcattcaaatcacaggtcaggatagaggctgctcacagatgctcaaacaatgctgggagccatcatcaaaaatccacaacgaatgattctcactttgctttgtcctacagagtgcagatccttcattcctgcacattaatgagactgacatacacagtccatcttgtccca

SEQ ID NO: 693450 - DNA, 2153 bp, Homo sapiens
ccatcctacccccaatattttggatattgtgatggtagtcactgcatgtacgtctcttccatatcctcagcccattcctcaatggccttaggcctttgaagtccccagataatataaaggagagacatcaactgacaccatgacatagaagataaggctgcattcggcattgtttccttggggatgagacagaacagtagaactctggctcaagaccagctcacagaaatcagaaatgaccttctatcagcaccaatgtcaccaactccccaccttccttcctcctctccctaacaccagcccagcagaaaagtcccctgaggggaggtcccctgtctaacttgctctgtgaactacatgctgtctaatattcagcatgagtttctcatatgtttgctttgggttttggagatcccacattatttacatttttacgtctgaagacctggctttccttgttactgttgagagaaaaacaagccagttctataccaatttagttgaggcaacagcaagagtcgtaagatcaacagaaaggtcccaaccaaagatatcgctgccaagtgacagtttgggcactgcacccaactgagccatgtccgattttgttacttgatatactgtttgaatttgggcaagttggtgggtctcactgaggcttaaattgtggcgagtaacagggctcgttttgggaccttttgctaccatgggatgttgtaaggctgaagttaaacaatatgtgaaagtatttagcagaatgcctggaatgaagtagaagtacctgcctaataatcctcaagtcttgtgggtgaaaaaggaagtgactggtggattcacaagtgccctgctctgttttcctgaatatagtgaccctgagtctttgtgggctcaacccctgcaggaccctccctatcaatactccttggcagggtgaacaaagcagtgttgtctaaaaagcgggggaggagggcgcctggtgggctggagagcgagggcctggttgatgcaccagtgtaaatggagagcctgagcaatagttagagtagagtagacagaacaatgctaaccttggattccaccagctaagtactcgtctcttggggtgatattgattcaacttcccacatgctgtagataaggaagaatgccctctgagagtcagtgaataaactagcacaaaatggatggcattgggtcaggtgccatggtgcactcctgtaatcctaacattttaggaggtcaaggtgggaggattgcttgaggccaaaagtgtgagaccagcctgggcaacataatgcgacccctatgaaggaagaaatgatgactggtgctgtggaaagagagctctattaaaaaaaaaaaaacatgacatcggaaagacttatgcgacatcatctgaagagatgacaatatagactgaccccaagtcaaggaaaaatttgacttagggttttaatatagctttaaataagatgtgttaatcagttaagagasagaagtgttggtcagaagacagtgtgtaaatatcatatcaagtgtcattgaagcaaatgttgaaagcatccatctatgaactgcccaggatctggatgggagatctctagctattgatgctgcttgaatgatccaacgctttcttctgatttcatgccctccagagcaggctttgtgatcaaaatgacgattttgatcctttttgtgcatacaaaagtcatttgctaaagatgtcagggtgagctgtctggtcaacctgaggattatagtttttgctataggttcctcaatggcctccttgtttatacatctggatcttgtgagctctgcaactgtgcatctgtacctgagtggcaggtttacactctgagcgttgataagattagatccttgagcctataaagctgttgaacacaggcacagtgaaatgtcatttgacaggctttttggcagtctgcccagctgggaaaaacagattggccccactttcattcaaatcacaggtcaggatagaggctgctcacagatgctcaaacaatgctgggagccatcatcaaaaatccacaacgaatgattctcactttgctttgtcctacagagtgcagatccttcattcctgcacattaatgagactgacatacacagtccatcttgtccca

SEQ ID NO: 693451 - DNA, 619 bp, Homo sapiens
agtgtgtgtgagtgagggagtgagtgtgtatatgtgaatgtatgcatgtgagtgcatgcaagtatgtgagtgtgtgagtgtatgtgtgagtgcatgcaagcattgtgtgtgtgtatgtgtgagtgtatgcatgtaagtgcatgcaagcatgtgagtgcctgtctgtgcatgtgggagtgtgtgtgtgtgtgtgtgttttgtgagtgtgtgtgtctgtgtgtgcaggcagcagcagtggtgaatggctgagctggcaggaaggcgctctttggcaccaggctgcaggctctgccatgggtctacccaggccatcatttttactgacatgagtcaagagtctcatatttaggcacaagcacaaattctgggcatggaggaaccagaatgcattgctgatttttactataagcttcaaaaataaaaatcctcttgagaagccaggggtcagcaccaaattgagaagaagaaattgaccaggagaagcctggctgctcttttgaaagggacacaaaaaggagaggccctgtgaagaggacagtggacacaagaaggatgtctggctgtgcaccrtggggagggggcacgacctggagggttcagcgccaaacgggggcagtaa

SEQ ID NO: 693452 - DNA, 621 bp, Homo sapiens
catcagtagcctggccagtcttggcactctgttaaccaaacccagctctggattttaaccacaacccaaattttgtcacacacaaaagaattagaattcagggtcacacagctatttgtggaatgaatattagtatattctttrcaaatgcatgatgtatgaactgcatatatttctttgataaattgtttttaaatatttcctcctttttattaatcaaagaggaacctcgtgtatcactgccattttttcctgtttttcacataaattattttcttgcaatgttcgtttgtattattattgccgatattaagcaaagactttttttgccttgtaaacaagattttgcttacagctaaatgaaagaagtgaagttaatcacattgaaataataggtttaaaaaggtaattcagtggtgtgggaatgaagtttaatcttcagcaatagaagccgtgctaagagaaatggcagaaaagcttgttctgtaattaaatggtatttatcacaggcaggtcagctctgctgggtgagaggctccaggacttcacagagaagaggaaggcaactagggcaggaaaaaagggcccagagtagagcccgcagattccaagagcgggctg

SEQ ID NO: 693453 - DNA, 586 bp, Homo sapiens
ggagacagcatgaatgagggccctgaggtaggcccaagcctgttgtgtttgggggacagccagtttaaatgtctgttctgttatattgtggagtctctgtgtatgaatttttcctaaagaaataacagacaggccgggtgcagtggctcacgcctgtcatcccagcacttcgggaggctgaggcaggcagatcatgaggtcaggagatcgagaccatcctggccaacatggtgaaaccccatctctattaaaaatacaggtcgggcacggtggctcacgcctgtaatcccagcactttgggaggccaaggcaggcagatcacaaggtgaggagatcgagaccatcctggctaacacggtgaaaacccagctctactaaaaatacaaaaaaaaaaaaattagccgggcatggtggcgggcgcctgtagtcccagctactcgggaggctgagacaggagaatggtgwgaacccgggaggcagagcttgcagtgagccgacatcaagccactgcactccagcctgggtgacaaagcgagaatccgtctcaaaaaaaaataaaaattagctgggtgtggtagcgcacact

SEQ ID NO: 693454 - DNA, 608 bp, Homo sapiens
gaaaccaaaaggtggaggttgcagtgagctgagatcaatccattgcactccagcctgggtgaaagagcgaaactccctctaaaaaaaaaaaaaaaaaaaaatgagccgggcgtggtggcaggcgcctgtaatcccagttacttaggaggctgaggcaggagaattgcttgaacccaggaggcagaggttgcagtgagccaagtttgcaccattgcactccagctgggcgacagaacaagactctgtctcaaaaaaaaaaaaaaaaaaaaaaaaaaaaaagaaaaaagaagggaaaatgttgctcattttttaraagagacccaaggtccaaggttgcatactttcaggcaaagtttgatccagcagttcaaccctttataccaaggactttgcaagttttcttagtcttcagcctcctcatggtgcccctaccctggtagcctgttagcttcagactctccccacatgttccccaaatggccactactgtgtggactctcaggtcttcactccacaccatctaagggaagtcagcatttcctgtggtatttccttcagaaaagaaaatagcctgtaatcccatcattttgggaggccaaggtgggtgg

SEQ ID NO: 693455 - DNA, 2116 bp, Homo sapiens
aagatggaaaaatatctatctcagaggaggatggataagaccagcatgggatgcccagggtgtcacccaccctgtatcccctcagtctaccctgagggtcacctgcagcttctttggaagttcttgtacaccatgtaaatggagcaagtcatttccaacccccctttctcagtttccttgtctgtataaagggtacataatagcaccacctcatagaaggttttttttcattttttttctgagacagagtcttgctctgtcaccaggctgcagtgcaatggygtgatctcagctcactgcaagctccgcctcctgggttcaatcgattctcttgcctcagcctcccgagtagctgggattataggcgcccgccaccacacccagctaatttttgtatttttagtagagacgggtttcaccatgttggccaggatggtctcaatctcttgacctcataatccgcccaccttggcctcccaaagtgctgggattacaggcgtgagccaccgcacccgacctttttttctttttaaagagggtcttgctctgtcactcaggctggagtgcagtggcacaatcatagctcactgtagccttgaactcctgggctcaagcaatcctctcacctcagcctcctgagtagctggtactacagctcatcaaaaaaaaaatttttttttagagacaacatgtgtctaaatgcttaggatggtctcgagctcctgggctcaagcaaacctcccaccttggccgcccaaagtgctgggattacaggcgtaagccactgtgcccaactctcatacagtttcatgaggacaaaatgaactcgggatggcgaagtgggtgtgccctgtgtcagcctgcatgctgccaggtgcagctctcacagcctaggctgaggccattggcaatggcaatgcagtctctgtctgtctgcctggcttttgttcatctctggctgttgggagattcgaggtgaggtaggaggtagctcctcatcccaggtaggcaggaggacctgggtggcagtcctcgctctgccagcttgggtgagtctcactacctctctgaggcccagcttcttatctgtattagtgatctcttgggcttattgtaggactaaaagtttgtgaaggtaaagtgcttggcgcatggtagatgctcagttttaaaacagaacttctgcctggccaaaagaaaagactggctgggggctgacatggaggcatattgcccagtggcccactcctgaagatggtgaaggtagtataagtgtaagagcccacactcagagcctgtccctacctgctgagactccaggattaaaaacctgaagtacagccgggtatgctggcccacgcctataatcatagcactctgggaggctgaggcgggtggatcacctgaggtcaggagttcgagaccagcctggccaacatggtgaaaccccatctctactaaaaatacaaaaattagccgggcgaggtggtgggcacctgtaaccccagctacttggggggctgaggcaggagaatcgcttgaacctgggaggcggaggttgcatcgagccaagatcgtgcctttgcactctagcctgggcgacagagtgaaactccgtctcagaaaggctaacaaacaaacaaacaaacacctgaagtaccacaggcatctcagatcattcctgcctccaggctggaaggactctgtgatgttgtgatattataagaaatacacgcgtgtaatcctggcactttgggaggccgaggcaagcggtttgcttgagctcaagagttcgagaccagcctgggcaacatggcaaaatcctgtttctacgaaaaaaatacaaaaattagccgggcatggtggcacacacctgtagtcccagctgcttgggaggctgaggcaagaggattgcttgagcccaggaggtagaggctgcagtgagctgagatcacgccactgcactccagcctgggcgacagtgaatatatacttatttggtctctgcctatggttcctgagatagagatcctaagaccttgtaatttcctgagcaataggggagtgaggagaatcttttgttctgatattcggtctttgaccccagttcctgaca

SEQ ID NO: 693456 - DNA, 2116 bp, Homo sapiens
aagatggaaaaatatctatctcagaggaggatggataagaccagcatgggatgcccagggtgtcacccaccctgtatcccctcagtctaccctgagggtcacctgcagcttctttggaagttcttgtacaccatgtaaatggagcaagtcatttccaacccccctttctcagtttccttgtctgtataaagggtacataatagcaccacctcatagaaggttttttttcattttttttctgagacagagtcttgctctgtcaccaggctgcagtgcaatggcgtgatctcagctcactgcaasctccgcctcctgggttcaatcgattctcttgcctcagcctcccgagtagctgggattataggcgcccgccaccacacccagctaatttttgtatttttagtagagacgggtttcaccatgttggccaggatggtctcaatctcttgacctcataatccgcccaccttggcctcccaaagtgctgggattacaggcgtgagccaccgcacccgacctttttttctttttaaagagggtcttgctctgtcactcaggctggagtgcagtggcacaatcatagctcactgtagccttgaactcctgggctcaagcaatcctctcacctcagcctcctgagtagctggtactacagctcatcaaaaaaaaaatttttttttagagacaacatgtgtctaaatgcttaggatggtctcgagctcctgggctcaagcaaacctcccaccttggccgcccaaagtgctgggattacaggcgtaagccactgtgcccaactctcatacagtttcatgaggacaaaatgaactcgggatggcgaagtgggtgtgccctgtgtcagcctgcatgctgccaggtgcagctctcacagcctaggctgaggccattggcaatggcaatgcagtctctgtctgtctgcctggcttttgttcatctctggctgttgggagattcgaggtgaggtaggaggtagctcctcatcccaggtaggcaggaggacctgggtggcagtcctcgctctgccagcttgggtgagtctcactacctctctgaggcccagcttcttatctgtattagtgatctcttgggcttattgtaggactaaaagtttgtgaaggtaaagtgcttggcgcatggtagatgctcagttttaaaacagaacttctgcctggccaaaagaaaagactggctgggggctgacatggaggcatattgcccagtggcccactcctgaagatggtgaaggtagtataagtgtaagagcccacactcagagcctgtccctacctgctgagactccaggattaaaaacctgaagtacagccgggtatgctggcccacgcctataatcatagcactctgggaggctgaggcgggtggatcacctgaggtcaggagttcgagaccagcctggccaacatggtgaaaccccatctctactaaaaatacaaaaattagccgggcgaggtggtgggcacctgtaaccccagctacttggggggctgaggcaggagaatcgcttgaacctgggaggcggaggttgcatcgagccaagatcgtgcctttgcactctagcctgggcgacagagtgaaactccgtctcagaaaggctaacaaacaaacaaacaaacacctgaagtaccacaggcatctcagatcattcctgcctccaggctggaaggactctgtgatgttgtgatattataagaaatacacgcgtgtaatcctggcactttgggaggccgaggcaagcggtttgcttgagctcaagagttcgagaccagcctgggcaacatggcaaaatcctgtttctacgaaaaaaatacaaaaattagccgggcatggtggcacacacctgtagtcccagctgcttgggaggctgaggcaagaggattgcttgagcccaggaggtagaggctgcagtgagctgagatcacgccactgcactccagcctgggcgacagtgaatatatacttatttggtctctgcctatggttcctgagatagagatcctaagaccttgtaatttcctgagcaataggggagtgaggagaatcttttgttctgatattcggtctttgaccccagttcctgaca

SEQ ID NO: 693457 - DNA, 725 bp, Homo sapiens
aaatatatttctagaaatacatcaaatggatagaartataatatgagccacaaatgcaagtcacatatgtaattttaaattttccagtagccatattttaaaagtaccaaaaagatgatattaacttcacaataggctgggcacagtggctcacgcctgtaatcctagcactttgggaggccaaggtgggtggatctcttgagcccaggagttcaagaccagcttgggcaacacagtgaggccccatctctacaacacacacacacacacacacacacacacacacacacacacacacacaaattagctgtgtatggtggtgaatgcctgtagtcccagctactctggaggctgaggtgggaagacacctgagcccaaggggttgaggctgcagtgagacctgacagagccactgcattccagcctgagtgacagagtgaggccccatctcacaacaaaaacaaaaacttaataatatattttatttaacccaatatatcaaaaatatctcaacatgttgtcagtataaacattattaatgagacataaacaaatgtaaaatgtgatgcatgtaatgtaaaagaatttacattatttgaaaattttttgttgatattatttacatgatttcttattatttgagggctgtaagagaaggatctgtttcaggcctctggaatacactaattcttgtactaaatacattatttcttatactaagtctt

SEQ ID NO: 693458 - DNA, 600 bp, Homo sapiens
ccaaagtgttgagattacaggcatgagtcactgcgcccggtgtagcctctctttatcaagatgttcctgctcattctctgagtgagagtggcgtgaacacagctctgccacagtcaggctggtttctagccatatacctcatgactgttcctactgtagtgccttagcttgtggtatacccccagtcctcctggaatgtccttcaccatcctaaccctaccaccttagctggactcagaggaacaaatatataggactgacaattacagtcgctcaggatgstcactgcacaactcccagggggcaccattcccagttcagcgatcaacctgtccagcatcactttgcaaattatgctacaggaggttgagagccaggctttgggtcaaaaggacccagatatgaatcctggttctgctgcttattagctatgtagctttagaggaaacattaattcttgtttccttggtgttttcatctgcaaaatgagggtataccataccgtagtgattatttttacttttttttttttttgagatggcgtctcgctctgtcacccagcctggagtgcagtggtgcgatcttggctcactttgcagc

SEQ ID NO: 693459 - DNA, 600 bp, Homo sapiens
ccaaagtgttgagattacaggcatgagtcactgcgcccggtgtagcctctctttatcaagatgttcctgctcattctctgagtgagagtggcgtgaacacagctctgccacagtcaggctggtttctagccatatacctcatgactgttcctactgtagtgccttagcttgtggtatacccccagtcctcctggaatgtccttcaccatcctaaccctaccaccttagctggactcagaggaacaaatatataggactgacaattacagtcgctcaggatgctcactgcacaactcccagggggcaccattcccagttcagcgatcaacctgtccagcatcactttgcaaattatgctacaggaggttgagagccaggctttgggtcaaaaggacmcagatatgaatcctggttctgctgcttattagctatgtagctttagaggaaacattaattcttgtttccttggtgttttcatctgcaaaatgagggtataccataccgtagtgattatttttacttttttttttttttgagatggcgtctcgctctgtcacccagcctggagtgcagtggtgcgatcttggctcactttgcagc

SEQ ID NO: 693460 - DNA, 600 bp, Homo sapiens
ccaaagtgttgagattacaggcatgagtcactgcgcccggtgtagcctctctttatcaagatgttcctgctcattctctgagtgagagtggcgtgaacacagctctgccacagtcaggctggtttctagccatatacctcatgactgttcctactgtagtgccttagcttgtggtatacccccagtcctcctggaatgtccttcaccatcctaaccctaccaccttagctggactcagaggaacaaatatataggactgacaattacagtcgctcaggatgctcactgcacaactcccagggggcaccattcccagttcagcgatcaacctgtccagcatcactttgcaaattatgctacaggaggttgagagccaggctttgggtcaaaaggacccagatatgaatcctggttctgctgcttattagctatgtagctttagaggaaacattaattcttgtttccttggtgttttcatctgcaaaatgagggtataccataccgtagtgattatttttacttttwtttttttttgagatggcgtctcgctctgtcacccagcctggagtgcagtggtgcgatcttggctcactttgcagc

SEQ ID NO: 693461 - DNA, 609 bp, Homo sapiens
tttatttttatttttttttgagactgagtctcactctgtcacccaggctagagtgcagtggtgccatcttggctcactgcaacctccgcctcccaggttcaagtgattctcctgcctcagcctcccaagtagctgagactacatgtgagtgccaccacaccaggataacttttgtatttttagtagagatggggtttcaccatgttggccaggctggtcttgaactcctgacctcaggtgacccgccagccttggcttcccaaagtgctgggattacagatgtaagccaccgcacccatcctcttgttgctgtttttaagtgtaactgatcttgaagcaggattctgagcacttcttgcatttgsatactcccagtctcagctcacttctttcacaagagcaaggattctgtcaacctaaatttataattcgaattgaaaattttaataaattccaccatatttccactagacaggagtttctcaaaagagaccactcaaaaggttctcaggtcatgagcttccaccagaagagcagagctttacagattgtcaactgaagcacaggtttccacaagctcttaaatggagcatgaaggattcagaaaaa

SEQ ID NO: 693462 - DNA, 647 bp, Homo sapiens
aatcagcttccaccaggatcagctcaagatgcagacaatctcctggcatgtgtctgccctgtggtataagagaacaaagtataaagaatcagacactaagggctctcattagaactgggaactgagttctctcccagtagatgcatttaggcacgagctttagagagctgttgtacaggagactcaagtacgggataaggaatcagagcaggcgacctttaaatatccttagagccttgacctctacttattgtaattctgtatctgccacttaaaaaaaaaaaactaaaaaactaagtagctcattacctcacttgcctcatctgcagaagagggtgtagagtatgatttcaaaggactcttctagtgtggtaactacaactgttttgtcaacagcctcatgttgatagatcccaagggcccttctcagttcttatcttgactgatcccctacaagtattctaygctgttaattactctcttgactcactctctttctggggctttcatgacaaagaactcgcctgtgtctctaagcactcctctcattctcttccacaggctcctcttcctacctatcttttaaaacaggcttctcttttcttctctctcgacacattcttattccacaatctcattcaccacca

SEQ ID NO: 693463 - DNA, 611 bp, Homo sapiens
cgttgcccaggctggtctcaaattcctgggctcaagtgatcctcctgcttcagtctcccaaagtgctgggattagaggcgtgaaccaccattcccagactcatggaaagttcgagaaccggcaaaactcatcagtcaggtgctagggcgagggaagcacttgactaaaagggacaaagggaactttcggggacctggaaatgcttatcttgattgaggtggtgcttacatgggtgtacatatcagtcaaaactcatcaaactgtatactttaaaatgagtgcattttattgtttgtaagttaatactttaataaagttgattttaaaataataataaaataatacgagttaatatttatctagaccttactatgtgccgtcctagtcgcgcttcgtatgtgttaagccctttrtccctcactccaatctgtgacataggcactcagtaccccgttgcccaaatgaggaaattgaaacacagagaagtttggcaactttctaaagtgacgcagctagtaagaggcagggcctgggttcaaatggaggcagattttaagcctatagctgaacagcgaagtccaagattacccaactggttattactagaggca

SEQ ID NO: 693464 - DNA, 658 bp, Homo sapiens
ccccttagaggaataactcaggcattgccccagagtctgcagcactggagccttagtcgcccacrgtggtcacatgatcagtcctggtctttataccattacttcccgggatcacctcccaaatcaaatgtttatcttcaacattcttgttgtagggctgcttctgggaaaaccccactgaccactaaagctccaattaaccttaggttgggttctgggagaagctaagactgaagtgcacaagaaagttctagaatcaagtgagaaatgtgtattgaaatgggaggagatggcctgtcttttgaaatccacagagaagaggatctgagggatttctcagtgaaggagaccagctgcttctctgtggagtttggagccgcttatccagggatcctgaagactcaagaggatccccaagtttcaaatatgctcttccagacactcagactggtaaccatgtagtggaatctgcctatacttcttccaaataatagtcctggagggttgaaaggaacaagaaaggcgcacaaaattctcccctgtgaggtcagtttcaagctctcacctaagaggggcctggactcctagcagaggctcagcccacagtggtgccaagcccaggggggtgctgagctgacaggggtgcccagccgacagg

SEQ ID NO: 693465 - DNA, 658 bp, Homo sapiens
ccccttagaggaataactcaggcattgccccagagtctgcagcactggagccttagtcgcccacggtggtcacatgatcartcctggtctttataccattacttcccgggatcacctcccaaatcaaatgtttatcttcaacattcttgttgtagggctgcttctgggaaaaccccactgaccactaaagctccaattaaccttaggttgggttctgggagaagctaagactgaagtgcacaagaaagttctagaatcaagtgagaaatgtgtattgaaatgggaggagatggcctgtcttttgaaatccacagagaagaggatctgagggatttctcagtgaaggagaccagctgcttctctgtggagtttggagccgcttatccagggatcctgaagactcaagaggatccccaagtttcaaatatgctcttccagacactcagactggtaaccatgtagtggaatctgcctatacttcttccaaataatagtcctggagggttgaaaggaacaagaaaggcgcacaaaattctcccctgtgaggtcagtttcaagctctcacctaagaggggcctggactcctagcagaggctcagcccacagtggtgccaagcccaggggggtgctgagctgacaggggtgcccagccgacagg

SEQ ID NO: 693466 - DNA, 617 bp, Homo sapiens
aatcttgtctctactaaaaatacaaaaaattggccgggcgtggtggcaggcgcctgtagtcccagctacttgggaggctgaggcaggagaattgcttgaacccgggaggcagaggttgtagtgaaccgagattgcaccactgcactccagcctgggcaacagagcaagactccatctcaaaaaaaaaaaaaaaaaaaraaaagaaaagaaaagaaaagaaaagaaaagaaaaaagacccagaggcaggaaaacccaaggtataccaaagaacatcgaggggcagggtttgtagtggacagcacatgaaggatggttaaagatctgggtagaaagccaggtgccgtggctcatgcctgtaatcccagcgctgtgggaggccaaggcaagcaaatcacttgaggccaggagttctagaccagactggccaacatggcaaaacccaggtctactaaaaatacaaaaaatcagctgggcatcgtggcgggcacctgtaatctcagctactcaggaggctgaggcaggagaatcacttgaaccaagaggcagaggttgcagtgagctgagatcttgccactgcactccagcctgggcgacagagggggaaaaaaaaagatct

SEQ ID NO: 693467 - DNA, 617 bp, Homo sapiens
aatcttgtctctactaaaaatacaaaaaattggccgggcgtggtggcaggcgcctgtagtcccagctacttgggaggctgaggcaggagaattgcttgaacccgggaggcagaggttgtagtgaaccgagattgcaccactgcactccagcctgggcaacagagcaagactccatctcaaaaaaaaaaaaaaaaaaagaaaaraaaagaaaagaaaagaaaagaaaagaaaaaagacccagaggcaggaaaacccaaggtataccaaagaacatcgaggggcagggtttgtagtggacagcacatgaaggatggttaaagatctgggtagaaagccaggtgccgtggctcatgcctgtaatcccagcgctgtgggaggccaaggcaagcaaatcacttgaggccaggagttctagaccagactggccaacatggcaaaacccaggtctactaaaaatacaaaaaatcagctgggcatcgtggcgggcacctgtaatctcagctactcaggaggctgaggcaggagaatcacttgaaccaagaggcagaggttgcagtgagctgagatcttgccactgcactccagcctgggcgacagagggggaaaaaaaaagatct

SEQ ID NO: 693468 - DNA, 617 bp, Homo sapiens
aatcttgtctctactaaaaatacaaaaaattggccgggcgtggtggcaggcgcctgtagtcccagctacttgggaggctgaggcaggagaattgcttgaacccgggaggcagaggttgtagtgaaccgagattgcaccactgcactccagcctgggcaacagagcaagactccatctcaaaaaaaaaaaaaaaaaaagaaaagaaaaraaaagaaaagaaaagaaaagaaaaaagacccagaggcaggaaaacccaaggtataccaaagaacatcgaggggcagggtttgtagtggacagcacatgaaggatggttaaagatctgggtagaaagccaggtgccgtggctcatgcctgtaatcccagcgctgtgggaggccaaggcaagcaaatcacttgaggccaggagttctagaccagactggccaacatggcaaaacccaggtctactaaaaatacaaaaaatcagctgggcatcgtggcgggcacctgtaatctcagctactcaggaggctgaggcaggagaatcacttgaaccaagaggcagaggttgcagtgagctgagatcttgccactgcactccagcctgggcgacagagggggaaaaaaaaagatct

SEQ ID NO: 693469 - DNA, 1692 bp, Homo sapiens
tatgttaagacagctctttcttccctatacaactctgtagctggggttgagtgcatgtaaactcagctaacaaaatcttcttgcattcggtttgaggtctattgctctgcagaatccccaggcctgccactttcctggcacatcttctcagcccttaggctcaggctgcagtctttgattagtggtgcatgtatgtgcgacggggacagttgtcactgaaattacagacagctgaatggtgatttgaattgcatgagcattaaggcctttcttaagagagatatgcaaaacccatggtttgattctcttgaagcatcgggaaggcctgtatagataaatccccctgacatcaacatagcggggacactctaagaacctaattttaatgaatatacattttgactttccaactgcaagagaatgagggcagatttgtttagatcttcctaattaatagcccaggttgactgtacttttctgtttaatataactgatttcatctcattaagggagaggtagaaattagatgcattctccacttcctggtaagaatatcttcttattataagctgggcataaaaacccatcatggcatgcgtactgggactgctgtgttctgggtggagccacgttcggaagaccttgtctgtaatgaaatgggacatttttctgtacttagttaataatctttgggcagcatttgatcatttgaaaaaagtcacaccattcacttgatcaggaggcatctgcagggaatgcaggtcgggcctgagtcctgttggcccaggaacaggtagttgtggcgtcaggcaatttttgttgttgttgttgatgttgttgtttttgagacagaggctcgctctgtcgcccaggctggagtgcagtggcactatcttggttcactgcaacctccgactccctggttcaagcgattctcctgcctcagcctcccgagtagctggaattacaggcacgcaccaccaagcccagataatttttgtatttttagtagagacggggttttaccatgttggccaggatggtcttgatcttctgaccttgtgatctgcccacctcagcctcccaaagtgctgggattacaggagtgagccaatgtgcccggcctgaggtgtttttttagtcaggtaattgaggtgtttccaccaggacraagcctcttggtggctgagagggaccccactgaactctctgctgaccgatgggggagcatgctaagtgcttaggaacattagcacataccttgtgaaactgatgtttttatggtcaaaaagggttggatatcagcacttccataagatacagtggacattgggacgcacatttactcccagtgaccccccactctgttccttggtgctctgtgtccccacctcagctgctctgggctgtggctttctgctcagcagttcttgttttgttactgctgttgttgccttggggtgagaaaggatttgtatccgcacacagaggaagatgaaaaatgtcatatttctttatttcgtaaaagactgaattaaatacgactctcaagcaatatcttggcaggctggtgggaaattcaatctcagacattttggacttccttgtgccttccttttggggcacagacattctggaggttttggtgagttcgagggtggctgtgctggtctccatctctggtgctcacta

SEQ ID NO: 693470 - DNA, 1692 bp, Homo sapiens
tatgttaagacagctctttcttccctatacaactctgtagctggggttgagtgcatgtaaactcagctaacaaaatcttcttgcattcggtttgaggtctattgctctgcagaatccccaggcctgccactttcctggcacatcttctcagcccttaggctcaggctgcagtctttgattagtggtgcatgtatgtgcgacggggacagttgtcactgaaattacagacagctgaatggtgatttgaattgcatgagcattaaggcctttcttaagagagatatgcaaaacccatggtttgattctcttgaagcatcgggaaggcctgtatagataaatccccctgacatcaacatagcggggacactctaagaacctaattttaatgaatatacattttgactttccaactgcaagagaatgagggcagatttgtttagatcttcctaattaatagcccaggttgactgtacttttctgtttaatataactgatttcatctcattaagggagaggtagaaattagatgcattctccacttcctggtaagaatatcttcttattataagctgggcataaaaacccatcatggcatgcgtactgggactgctgtgttctgggtggagccacgttcggaagaccttgtctgtaatgaaatgggacatttttctgtacttagttaataatctttgggcagcatttgatcatttgaaaaaagtcacaccattcacttgatcaggaggcatctgcagggaatgcaggtcgggcctgagtcctgttggcccaggaacaggtagttgtggcgtcaggcaatttttgttgttgttgttgatgttgttgtttttgagacagaggctcgctctgtcgcccaggctggagtgcagtggcactatcttggttcactgcaacctccgactccctggttcaagcgattctcctgcctcagcctcccgagtagctggaattacaggcacgcaccaccaagcccagataatttttgtatttttagtagagacggggttttaccatgttggccaggatggtcttgatcttctgaccttgtgatctgcccacctcagcctcccaaagtgctgggattacaggagtgagccaatgtgcccggcctgaggtgtttttttagtcaggtaattgaggtgtttccaccaggacaaagcctctyggtggctgagagggaccccactgaactctctgctgaccgatgggggagcatgctaagtgcttaggaacattagcacataccttgtgaaactgatgtttttatggtcaaaaagggttggatatcagcacttccataagatacagtggacattgggacgcacatttactcccagtgaccccccactctgttccttggtgctctgtgtccccacctcagctgctctgggctgtggctttctgctcagcagttcttgttttgttactgctgttgttgccttggggtgagaaaggatttgtatccgcacacagaggaagatgaaaaatgtcatatttctttatttcgtaaaagactgaattaaatacgactctcaagcaatatcttggcaggctggtgggaaattcaatctcagacattttggacttccttgtgccttccttttggggcacagacattctggaggttttggtgagttcgagggtggctgtgctggtctccatctctggtgctcacta

SEQ ID NO: 693471 - DNA, 609 bp, Homo sapiens
gaatgattgttatagtaatggtctgggccccacaatacagacggcagctgaataatttgacactttggtaaggaataaatttctcctttcattaatgactgatttattctattttctttwtagtataaatattatctgtgtttcaaattgtgtctgaaaacttacaggccagcaaatggttgggagtggggagcatgcatcacttacagctacagtgattttctgtctctgactcatcttaaaaagccttaattgagtatttattcttatgctgtgagatccaagaaatcttaactgccattaagctgtctacagaagcaaaacaaaatggagaattaaggcaattatcagcatgatatgaaccatagaaaacatgtttccctcaatctggatgtttcgagagaacttatttttgatctaaattatctgagtaatttccccttcagttttcattttattttgcactgatagacaataatttagtatagaaagggacagcccataacatagggaatcagcgtgcgaagaaattcattatccagcatgtgtatgtctgtatcttctatttttactaaactttgttgccagaggagacatttaaaaaaactg

SEQ ID NO: 693472 - DNA, 609 bp, Homo sapiens
gaatgattgttatagtaatggtctgggccccacaatacagacggcagctgaataatttgacactttggtaaggaataaatttctcctttcattaatgactgatttattctattttctttatwgtataaatattatctgtgtttcaaattgtgtctgaaaacttacaggccagcaaatggttgggagtggggagcatgcatcacttacagctacagtgattttctgtctctgactcatcttaaaaagccttaattgagtatttattcttatgctgtgagatccaagaaatcttaactgccattaagctgtctacagaagcaaaacaaaatggagaattaaggcaattatcagcatgatatgaaccatagaaaacatgtttccctcaatctggatgtttcgagagaacttatttttgatctaaattatctgagtaatttccccttcagttttcattttattttgcactgatagacaataatttagtatagaaagggacagcccataacatagggaatcagcgtgcgaagaaattcattatccagcatgtgtatgtctgtatcttctatttttactaaactttgttgccagaggagacatttaaaaaaactg

SEQ ID NO: 693473 - DNA, 609 bp, Homo sapiens
gaatgattgttatagtaatggtctgggccccacaatacagacggcagctgaataatttgacactttggtaaggaataaatttctcctttcattaatgactgatttattctattttctttataktataaatattatctgtgtttcaaattgtgtctgaaaacttacaggccagcaaatggttgggagtggggagcatgcatcacttacagctacagtgattttctgtctctgactcatcttaaaaagccttaattgagtatttattcttatgctgtgagatccaagaaatcttaactgccattaagctgtctacagaagcaaaacaaaatggagaattaaggcaattatcagcatgatatgaaccatagaaaacatgtttccctcaatctggatgtttcgagagaacttatttttgatctaaattatctgagtaatttccccttcagttttcattttattttgcactgatagacaataatttagtatagaaagggacagcccataacatagggaatcagcgtgcgaagaaattcattatccagcatgtgtatgtctgtatcttctatttttactaaactttgttgccagaggagacatttaaaaaaactg

SEQ ID NO: 693474 - DNA, 1916 bp, Homo sapiens
ttgccagcacacaagaagcaccccagcgtcctggccaattgacaacccccttcttttccaccagagctaacctctgcccttcatagttcatagttttcctatatgtgtgcatccctgaacaatacagtttagttgtatctctttttttcttttaaaaacaattatgtttattcaaaaaaggctagatgaaattaaatcaggctattttaattgattcataatgcaattttaaagattaaaaccaaatattgaaagactaaaatagccaagaaatgctgaattgattagtaaataatatgattagttcaaaatgctcttatattaataacataaaatcattttttctgctgacattgattatagctaagttgacattgtgagagttaaatgcagtttattgaaacctgaaatagttaagttgcctagtctagtaatggagttaaggtcactttatttgaaggtactaagcttactgcataagtaaagctggcagagttatacttgctgtacttgcagttaccaaatttaaatgccttccctggtgaaagagtgttggttaaatgagccctgtcaaatttttgattctggctgcctccattgaagttgaccaagcttgtgggtggtgatgccccaggcttccttgtagctgaagaaaactgaagaaatgaggatactacattataagtagaagagaatacagttgcaaagagacagaaaccaagtatacacacacacacacacacacacacacacacamacacacacacactacacacaaggtgtttttaggtgccgtttcagaagcattgtgtctgtgtatgtgtgaatccttggtttgtgtctctttgcaactttttttaaaattttttatttatttttattatactttaagttctagggtacatgtgcacagcgtgcaggtttcttacatatgtataaatgtgagttgtatctctttttgaagtgtacatttttttatgttctacaaaaaaagataaaaactaaatactaaccactctaaagcacatcaatacattatgtatttggggactttccccagtcaatattacttataacgtttaagtttatggtggtagctacagtccatttatttttattgttgtataattttccactgtgtacatatactacagtttattcattgtatggttgggagatagttagattgctttaatgtttagcaaatataaatattcttgctgtgaatattctttgacatacatttctttccacatcatcacacatttatatcggacacatacacagaactggaattgttaggtcataggtaagcattacctacttttatcagacttctacattttggcaacctggtggtcctgtatcttactgcatttatctaattactctgaagccaagcatttttctggatgactttaggcatctggatttcattcgactgaagtgctttttcaagcacttttctttaggatggtcaaccttcttttctcattgtgagaaaaattgtgaggcaagaattctctctatagcctggatactatttcagtcaatttcgtgtttgtaaaagtcttcagtgattcctatggcttgtcttttccatttcttctggatgtttttgaagaaaagctcttcgttttgaatttattaatcttttttatgtttaacacttaaaagtattttcctatataaggaaatggcaatattcccctatattgtcgtctaattattttaggtatttaatccacttagtatccacatcatagtacagtacaggtagtggtatattttattttgtacatagctattccgttttttccagcataatatattgaaaagactgacctttccccatcagcttctgtgctctttctgctgtatattaaagacctatatatgtgttagtttctgtccac

SEQ ID NO: 693475 - DNA, 1916 bp, Homo sapiens
ttgccagcacacaagaagcaccccagcgtcctggccaattgacaacccccttcttttccaccagagctaacctctgcccttcatagttcatagttttcctatatgtgtgcatccctgaacaatacagtttagttgtatctctttttttcttttaaaaacaattatgtttattcaaaaaaggctagatgaaattaaatcaggctattttaattgattcataatgcaattttaaagattaaaaccaaatattgaaagactaaaatagccaagaaatgctgaattgattagtaaataatatgattagttcaaaatgctcttatattaataacataaaatcattttttctgctgacattgattatagctaagttgacattgtgagagttaaatgcagtttattgaaacctgaaatagttaagttgcctagtctagtaatggagttaaggtcactttatttgaaggtactaagcttactgcataagtaaagctggcagagttatacttgctgtacttgcagttaccaaatttaaatgccttccctggtgaaagagtgttggttaaatgagccctgtcaaatttttgattctggctgcctccattgaagttgaccaagcttgtgggtggtgatgccccaggcttccttgtagctgaagaaaactgaagaaatgaggatactacattataagtagaagagaatacagttgcaaagagacagaaaccaagtatacacacacacacacacacacacacacacacacmcacacacacactacacacaaggtgtttttaggtgccgtttcagaagcattgtgtctgtgtatgtgtgaatccttggtttgtgtctctttgcaactttttttaaaattttttatttatttttattatactttaagttctagggtacatgtgcacagcgtgcaggtttcttacatatgtataaatgtgagttgtatctctttttgaagtgtacatttttttatgttctacaaaaaaagataaaaactaaatactaaccactctaaagcacatcaatacattatgtatttggggactttccccagtcaatattacttataacgtttaagtttatggtggtagctacagtccatttatttttattgttgtataattttccactgtgtacatatactacagtttattcattgtatggttgggagatagttagattgctttaatgtttagcaaatataaatattcttgctgtgaatattctttgacatacatttctttccacatcatcacacatttatatcggacacatacacagaactggaattgttaggtcataggtaagcattacctacttttatcagacttctacattttggcaacctggtggtcctgtatcttactgcatttatctaattactctgaagccaagcatttttctggatgactttaggcatctggatttcattcgactgaagtgctttttcaagcacttttctttaggatggtcaaccttcttttctcattgtgagaaaaattgtgaggcaagaattctctctatagcctggatactatttcagtcaatttcgtgtttgtaaaagtcttcagtgattcctatggcttgtcttttccatttcttctggatgtttttgaagaaaagctcttcgttttgaatttattaatcttttttatgtttaacacttaaaagtattttcctatataaggaaatggcaatattcccctatattgtcgtctaattattttaggtatttaatccacttagtatccacatcatagtacagtacaggtagtggtatattttattttgtacatagctattccgttttttccagcataatatattgaaaagactgacctttccccatcagcttctgtgctctttctgctgtatattaaagacctatatatgtgttagtttctgtccac

SEQ ID NO: 693476 - DNA, 1878 bp, Homo sapiens
tgcattgtgtaatgatcaaatcagggtaattagcatatccatcacctcaaacatttatcatttctttgtgataggaacattcaaaattctctcttctagctattttcacatatgcaatatctttttaattactacagtcactctactgtacaatgggacatcactacttactctttttttctaattgtaactttgtacccattgaccatcctctctttatctcccaatgtcccctaccctccccagtctttggtaatcactattctagtcactactttgataagatcagttttttagctcctacatatgaatgagaaaatgttgtatctgctttctgtgtctgcttatttcacttaatgtaatatcctcaagcctcatccacattgtcaaaaatgacagaattttattattttttatagccaaatagtattctattgcatatatttaccacattttctttattcattcatctgttgttggacacttaggttaattccatatcttgactattgtgaatagtgctgcaataaacatgagcaggcagacatcgctttgacacactgatttcattccctttgtatgtatacccagtgatgggattgctggatcttacagtagttctacttttaattttttgaggaacctccatactatttcccataatggctatatactcaaatttcatttttaaaaattttacatatcacctagttatttctctatccttctgccttctctgcactaatcacaaattgccctaacccagggtttcaattgatagaaccaaccgctgcatctttacacgcaacacattggctgattaaaaatcaatgcctcgttagagatgcaatttgtgttttgattagtgtttcggttatgggtttcctgtcctagaatgtctgccttaatcaactatttttgctttgaatcaccctggactattggcagtgagaggtacatctgcatgagtctccactgagaggcttttcttcctatttatgatacctctttgttcaccaaagggacaaaaattctggcaggtcttaattaatgcctgatgtaaagggatgattaagacatataaagccatggcttctgttttagcttttctaaaatgaaaatatagttgagagaagtgcttttttcagtagggtgtagcaatcaaaatcagcctggttcattgcatagttgtttgatttcctggacccattatgttggggttctgtgttttctttgttagtgctgtctctccactgaactttggtcagatattggggggttaattaatgcatttccaaaatccagaaaatatttttaaaacctcaaatccatcttcatgaaaacttttggctaatctatgttaagtaagtctcataacctacacatgggtgggcagattactctgtagaaagtaccttcatggcatgccatgagcatatcactrtccttaaaagcacattcatggtgctggcttgtagacgtgcttccagggacattgcattgcaatggtctacatatctgaagtcttgtaacccatgagcatatgcaagaaagtttttcctcagaagcaattggcttgttactcacagacttcacagaatcgtcttgcaaatgttgtaggtttgccaaaatcttctgttaagtgatcattttgctaaaagattaacttcccaaatttctgtgcacttttaaagctatagtttcatccttgaccctttcttgatctctgttgtttttgaagaagtgtattttttagtacaaaaaatatatatcattgtagacaactcataaaatactaaaaacaataccaacgtgtccacaatataaagataactactgttaacattttgattgatttattttagaattttttcctaa

SEQ ID NO: 693477 - DNA, 587 bp, Homo sapiens
ttctttcctttgttatgtgtcaaatgtctatttacctgcaaacgctctgtttcagtccttacatcaacatctcttgcccctgagttttacatgttaatacatagatgttcttttaaatgcagtttaccatcatcttaaaaaagaaaaaactttatttttagagcatttttaggctcacagcaaaggtgagaggaaggcacagagatttcttgtgtacccaccacccccacacaaacatagcctcgcccatttgcaacatctttcgtaacactgatacatttgttacaatccatgaacctacatttacacatcattattacccaaaatacatagcttacattagggatttctcttggtgctgtacagtctatgggtttggacaaatgtctaatgatatgtaccaccactatagtatcttacagagtattttcaccgtggtaacaattctctgtgctctgcctattcacctctcccgctcccaacccactgacgatcgctgatctttatactgtccccayagttttgcctttctaagaatgtcatatagttggaatcatacagtaagtagcctttttcagattgacttc

SEQ ID NO: 693478 - DNA, 615 bp, Homo sapiens
caaaaatcacctattagctaacttcacaaatactgaaattacttattagaaaagttcccattaaagtattactcttaaggagatagacacacaaaaaacccttcaaaaagccatcctcctgaaactactccaaacaactgaaaacaagggatttcttcctaactcattttatgaggccagcatcatcctgataccaaaacctggcagagatacaacaaaaaaagaaaacttcaggtcaatatccatgatgaacatcaatgcaaaaatcctcaataaaatactgggcaaaccgaatccagcagcacatcaaaaagcttatccaccatgatcaagtgggcttcatccstggatgcgaggctggttcaacatatgtaaatcaataaacataattcatcacataaacagaactaaagacaaaaaccacatgattttctcaatacagaaaaggtcttcaataaaattcaacatcccttcatgttaaaaactctcaataaactaagtattgatggaacagacctcaaaataataagggccatttatgacaaacccacagcccatatcatactgaatgagcaaaagctggaagcattccctttgaaaacgggcacaagacaa

SEQ ID NO: 693479 - DNA, 633 bp, Homo sapiens
gacttgaccagaagtgagtgagatattcaggtcctgggtcaggtaacttatgaagtctatgacatcaagaaccttgcaacttccaggaagatgaatgagaatgcgaggccaggcagctaccttatcccatatctgcttcccaggcagccttcttcaagcaactactctgggccaaagtttcatccggcagaaagaaggaccacttggaagacaagcatggcactacacagttttaaaagaagaccagagtatctgtgccaggctcccagcaggggggaaagtgcttcaaattcacaccttctgggctccaaggttgagcatgccaataaagaagttacctactggtctgatgaccaaaggaacgtggccttgatggcactaaagcaagtcccccagaaaggtcctctggttacttaaatcccatttgccrtagtttccttctccatggaagaaaaacatgcctaagttcatgtcaggacattcctgatttatccaagagcccaggatcaaataaacaaagggctctgagctctgccagggagcctcctccttcaggaggcagaactagagggaagtaggcttggtacagagctggcccatcaccccatgaacttggtgagtgacgtggctgct

SEQ ID NO: 693480 - DNA, 604 bp, Homo sapiens
ggggctgggtgggaggcttggaaggcaggaggaagcacacacagcttggcactggaagcagtggccctagggctcctgctgagccccaggtgtaatatcaagttgatgcaaaagtcgttgtggtttttcctattgctttcaatgataaaaaccgcaatctgacaaaaggctaatatccagaatctacaatgaactcaaacaaatttacaagaaaaaaacaaacaaccccatcaaaaagtgggcaaaggacatgaacagacacttctcaaargaagacatttatgcagccaaaaaacacatgaaaaaatgctcaccatcactggccatcagagaaatgcaaatcaaaaccacaatgagataccatctcacaacagttagaatggcaatcattaaaaagtcaggaaacaacaggtgctggagaggatgtggagaaataggaacacttttacactgttggtgggaccgtaaactagttcaaccattgtggaagtcagtgtggcgattcctcagggatctagaactggaaataccatttgacccagccatcccattactgggtatatacccaaaggactatgaatcatgctgctataaagacacatgc

SEQ ID NO: 693481 - DNA, 636 bp, Homo sapiens
ttgttactcatggacttggccctcaattcttcctctcacctctgtaaaattggtctagagcagtgataattttgcccatctttttctgtcatgcacattttagcacccttatttctctgttctcccagttgatgtggcaggcaggagtgcagtagtgcaccaagattcaggctggacaagagaggaatggagtgaccctcctaggacaggctcctagcacaccgctggtctcccccttccccaggaaattaatccttgttctggcattactaccaccagagccctctagactctatgttagtgtcttggagggggagcttactatctctttgggcagcttactccatatttgagaagttttggggaccaaattcatcactamccctcttggttctcagtaacaacagaacaattcttcacccagctaattctcagacagatctcagcttaaatgctgcattttcaggagcctccctgaccactccattttatttggtaccccccactttctgctacttactacactaagcttgttatctttattacaaataccacaatcgatgttatgtttgtttgcctgtttatcacctgtctttcccaccagactgtaagctttactaagagcagggaccaagc

SEQ ID NO: 693482 - DNA, 636 bp, Homo sapiens
ttgttactcatggacttggccctcaattcttcctctcacctctgtaaaattggtctagagcagtgataattttgcccatctttttctgtcatgcacattttagcacccttatttctctgttctcccagttgatgtggcaggcaggagtgcagtagtgcaccaagattcaggctggacaagagaggaatggagtgaccctcctaggacaggctcctagcacaccgctggtctcccccttccccaggaaattaatccttgttctggcattactaccaccagagccctctagactctatgttagtgtcttggagggggagcttactatctctttgggcagcttactccatatttgagaagttttggggaccaaattcatcactacccctcttggttctcagtaacaacagaacaattcttcacccagctaattctcagacagatctcagcttaaatgctgcattttcaggagcctccctgaccactccattttatttggtaccccccactttctgctacttactacactaagcttgttatctttattacaaayaccacaatcgatgttatgtttgtttgcctgtttatcacctgtctttcccaccagactgtaagctttactaagagcagggaccaagc

SEQ ID NO: 693483 - DNA, 592 bp, Homo sapiens
ttgcaaacgaggaaaactgcaatctgctttttcacagccatcgtgtgtttcagcaattgcaaaatattctcagactatctctaggagtccctaggactctggtcacatcacctcctgcagcaagttgacggaaggccactatacttggtgacttttctctcatgcattcactttcacctcctagagctttcttttggacccaagaactgtgtcttttacttccaagttattctatatctcatatattagatatgcgttaatacccactctttattcataagagagtggataggtgaattaataaatcaataaaaatagtcacctgatttgtwatcaatttatttcaatttagtaaatctttgttaagtgcctcctgtggacgtggcccctagtgtaggctctggggatataattctaagcaagagatcccctgcaaatctatgatgcctcaaagttttacccaaggaccactccatgccccggcccctcatctctccagtaacaggcatgttaatttcccattctttcctctgtttttctaacattcactggtttcatccctgaattccccccattgaaggctttggatctg

SEQ ID NO: 693484 - DNA, 1092 bp, Homo sapiens
gcacttaactgtggactaacacaaagaggagcccatcaaaggagagcaagcaagatgaaaaagaaaccaaatgtcaggccacatgatgaagaattgggaactggggaaacactggacttgggaaacaacatttaagacaaaggaggacagaatagctaagtgcaactatttacgaatctaataagttccacactttacttcttttgacccaagaaagaattgctactagtgaactgaagttgcagagaaatacatgccaccttatgatgaggaatacaacaaaatctaacaattggaagtatccaaggatggtttaggatgatctggagagggaagttgtaggataggtatgtgtgaccaaattatatgaccttaatgtcccatatatcttgagattctatgatttaaagatgcctttagtatttaatccatggcttgacccaatccatagtcaactttttaatctataacattttaaaagataagcaaataaagccaagttggttagattctcccacccaaatccaagcctaaacttatgtaattgacattggatttattagtcgcaaaaattatgtaacacatgggaaatatatatttgtaaaaaaaaatgagagttttttaaggtcaactctttgttaaaagaatttggcattaagtaaatgttacatctactaaatatttaagcttaatcactatgtgaacaaatataattattcctggaaataatcaaggaatatttccagaaatatttatgacatggaggaagacgtggaaatactccatgtcttcattagttatttagtttataaagttgggctctctgtattaccatttcataacatttggaaaaatccacaawgagaaaaaaaactcatttgtttctgaacatttttgaatgctattaggctgactcgtgtcaaatttttatttgaccattttaaattaaaatatttattgaaaaattataggttgacatgcagttgtgagaaataatacataaagaatttatgcaccatttacccagtttcctccaatggtaacattgcaaaactatggaacatttttgatctataaaagagtagttttata

SEQ ID NO: 693485 - DNA, 587 bp, Homo sapiens
aacctctgcctcccaggttcaagcaattctcctgcctcagcctcccgagtagctgggactatatgtgtgtgccaccatgtccagctaatttttgtatttttagtagacacggggtttcaccgtgttggccaggatggtctcaatctcttgacctcgtgatccgcctgcctcrgcctcctaaagtgctgggattacaggcatgagccaccgcgtgtggccccaagttctttctaatcaggcatcaagttctacgacttctttttccttgaagacaggttcaaactcattacctcacatctgaattgccatgctagcatccttgttggttttcctctgtcttcctgtttctcccagctctagtacacattacttaagaaaaccagactataagagccatgggggcagacactatgcttgttttactcaccgctgtgttcctagaacctagtatattaccacattctcaaaaaccttccccaaaggctatttttccttttaatcctctgcttaagtggtccacctcatgtctggcaactcaaatgtaaattcgtggctgccattccaattatacaacatttcccaagtca

SEQ ID NO: 693486 - DNA, 598 bp, Homo sapiens
tatttatggatctccatgacctaggaattacttgcrtttgtaaaaattaaagaaaattagaaaacatatttaattgccttattcactctagtctttatctatgacttgcaattcctctttatttttgtagatttgtggtgaaatctcatcagtttcttcagggcatccttcatgtccttatttcttaaggtgtaaatgagcgggttgagacttggagtgatgacggtgtaaaagagggtgaggaacttgccctggtctttggaagccctgttacctggttgcaggtacatgtagataatagttccatagaacatagacactacagtaagatgagatccacaggtattcattgcttttcgctggcttgcttttgacttcgttctcagcacagctttggcaatgtagccataggatataagaataaggatgagaggtgtgaggacaattataatgcctaaagcgaaaacagacatttcaactgttgtggtgtctacacaagctatcttgaccagagctggcaactcacacaagaaatgatccagaatgttgtttccacatgtgggcaaattcagagtgagtgtacataatactacagaat

SEQ ID NO: 693487 - DNA, 3124 bp, Homo sapiens
gaggactgaatcctcagcacagtagctacaatgaatccacagtaagcaaagataattgattagagaacgagggactaaaatatcctcacaatggagagcatagatacattgaatgtggtgtcaaaacgtgatatcttgatcatcgctgagacctcacacagaaagtcgtccaccttgttaccgcctagtggcagctggacggcaagggatgactgaagtagagttggccaaactgcttagccatgccatggccactaggaggacacagagttgctgatgcatgatagctgggtacctcaagtgtttgcagatggcaatgtaaggatccaaagacgtcacagctaaaatgatgcatttggtgctcccctaaaatatcccctgggtaccacaataattgagatgttgtccaccagtatgcagagataagcaacaagccccattatgaagagaaacatttccggctaggggtggtcaaagaaaccccagagaatgaagatctttcgagcaattgcattgcccagattcctgtcattgctcttgttggtggatttgagggaaaggaaaggctactttagtattgaatttttctgatactccacttattcagttaagtaaaataaactgagttatgaaggggttttctctgtgatgtaactaaactgatgtgatttgacacttgtaagcatgaaaaattttatctaaaggccaaaatgttacctttctagtgcctctaaaaggaagatcaacaaatctctgtatcttacccaagaaatgcaatatagcaaacttttacagaataatgattaagtaatgggaaacataattaatcttatattagaaaaatgaatcagatggagaaatgaataattttaaagaatgcccaagaactacccatgctaactaacacgtgttaatttctttcatccaaaatctgttggccctggtcatgttctggttcaatttgtgagttgatgtaggtgagttcagaactcactgagctccacgtggatcagtctgatttgcatagaaacaacatagtgctattccttacctcttcttcccaaatcctggaatgacgatcgccaacataaaacttttgtcataaaaggaagcacacagctgaaaggaaatggttccttgcaacacgttcagtacttacaagacaagataattcattgcacagccaagtgatataaggtcattaaagtatcagcagttatacagtatgatgtatgttagtgcttttcacactgtgagttgtaatctattacgcagttatatactattttattgatttattttacttattctcatcactcattttatatatgtgtttgtatgacctggattctgatgtacaatatattccttactataggtaatggtaaaaaatttggacaatactggcatagtagaaaagaaacaagaatgatattagaaaatctagatttagtccacttcccaattactaatacatgtacattttaggtcttgcttaaatattcagaaacttctttatctatcttgctccgttgtggagattaattagcaccatatgtgtgaacacgctttattaagtccaatactcaatgttgggttggttatttttcatgaaataaagttccctgtttgattttaagtctatatctgatagttaatttttctttgtatccaaatattaaccatgtccttatattcccataagaagtcttagaagggttgttttttctaccattttatttccctacattactcagatcccttgccttgaatctgatgttaatgatttctagattttaatatcagtacacatatgtttttaatcagtggaaatgctcacaaatgcaaacagtaccatagattatttttcaaaaacatgtttcaatgttttaaattataatgattagtattagtattaataggtgtcaatttatttatactttttttaactgctccttgcctagcagggctatcctataggcagtgtgcccacagtagccttttttaaaatagtttttttagtatgcaaattttcataaggagatcacaacatgcatgtggttgtataaaaagattaaatcaatcaagctaaatagatcatttctactcatatgcaacagttgcctaaatcagtgttgatattttttaggggtaccctcttttcttgcaaaaaagaacattaatctttttcttccatcagaattcagtgttaattggggataaagattgaatgttctttctgtattcagtggttttatgtcatatcagaggtctttaatagttatttatttgattgaaaggatcccaaatcttttgatttattgtttatttatttatttatgctttaacttttaattaaaatgcttaggatacagattgactttcttttgtaaatgactgttttactttttctgaaataggacatacatgcactctgataaaacagaatgaaacatcttaattcatgagaattcctgtacaaggcgctgatcctgtgtttagagctgagctcctcacagcagctgccctacgtagaaccsacagttttctagcttgcaacaaagttactagggacaaatagggaaaaaaaatccgaaactaaaagtaagaaaaccaacatggaagcaatcatacttctcatgtctctgataagagaagtatggggaacctttaaccaaaggaaaatttaaaaaaaatgcaagttaactatctagttcattcactgttagctagatttgttcagttaaggctttaacccctttccaaacaattttatcttaatccagctatgcttgctaataaatgaaatgcatgcacttcccggaaatatacttcactgagcctctgcattcagtacctggcagtgaaaaagtatgtttcccgaacaagtcagtactgaagactgagaactccaactaaataactatactctctccccaataatatgttatccacattttccctaccctcacattagaataaagatatcctcctaacttttcatctcctatctcctgtcttttcctaggagatcttatcttttgatcttttactacaagggtagaatttaggttaagatcataaaaaaccaatttcacatgtgacactaagaaaatggaatgct

SEQ ID NO: 693488 - DNA, 648 bp, Homo sapiens
ctggctgtccgagtctgcaacacacaagtgcaggccatgctgggggacgaggctgctgggggcaggggctgggcaggccatacccccgggaggcagagggtggtggggacatcctcccctccatgtattctcttcaaaatcaaagtggcttttggcgtttttgtttttctgcccttgcccccattacaaaagtaatctatgaaaagaaaagaagaaaagcttatcccagaaaaaaataaaacagtaaatgaagatcaccccacgtgactgtgaaaggcaaataaatcttgggaccccaaactcattaagccaaagggaaaagtcaagccgggaactgggtcacacaaacctgcctccccgttttgattcctaaataagatgaactgctacacacctccctcatattttgcccacaaggaaattcctggcgagcttggagatatttaccctaaagcatttctgttaaaattcaccatggcaatgtaaatggatagcttatctttacacagtattcacccctctgctcacctggcrcaaatgcatatctgattgttcccctgcctcatttatctttatcttatgtaaaaatgtcgatttcctgcatgttccccatctgtctatgttaccttatgtaaaaatgcagattca

SEQ ID NO: 693489 - DNA, 822 bp, Homo sapiens
gactgtttacctactcaatagctgatttgattaggcacagtttctcaatcctgataaaaccaatcgcttggtgaattatgcgccctttcctcgtgtggccaggttggagggaggcttggcatggcggtgctcctctaccaagtttacattttaacccaggattctgctaacgagccaagtttacacttgttctaacattgctgggaccaacaaacttgataaaggtattctcgtgcttgagtcagcaggcaccccacttcctgggggctcaaaactgcagttccaaagtgctgacgacaggacaagactgacgtttaytttaagtactcattatatgagggcttttaagccaaaagtcgaggtacgtgaagcagacagccagccctctgcaggcccacgagtcctgcagaagcaagccctctgtgttcccagacttttcttagaccagctctgattctggagattaggacgccgtttgagaaagtttgtcctgcccatatctggacattttcttttttagccaccgcaatgctgtctctgtagaagtggttcccaaacctgctgccaagagctcttttggtattgagccgagcttgtccccctcccctcgccattccccgttccctcatctccactttatacctgactttcctactcgaagcatcttagccagagctgctttctcgagtcctgggtttccttcctgtcttcgatttttaggaagtcacttgtcacacttgattctttttccaactgttacatttcggaattgtggcaactacagtgaacattctcctaagctcctatgaaatgccagtgctg

SEQ ID NO: 693490 - DNA, 822 bp, Homo sapiens
gactgtttacctactcaatagctgatttgattaggcacagtttctcaatcctgataaaaccaatcgcttggtgaattatgcgccctttcctcgtgtggccaggttggagggaggcttggcatggcggtgctcctctaccaagtttacattttaacccaggattctgctaacgagccaagtttacacttgttctaacattgctgggaccaacaaacttgataaaggtattctcgtgcttgagtcagcaggcaccccacttcctgggggctcaaaactgcagttccaaagtgctgacgacaggacaagactgacgtttactttaagtactcattatatgagggcttttaagccaaaagtcgaggtacgtgaagcagacagccagccctctgcaggcccacgagtcctgcagaagcaagccctctgtgttcccagacttttcttagaccagctctgattctggagattaggacrccgtttgagaaagtttgtcctgcccatatctggacattttcttttttagccaccgcaatgctgtctctgtagaagtggttcccaaacctgctgccaagagctcttttggtattgagccgagcttgtccccctcccctcgccattccccgttccctcatctccactttatacctgactttcctactcgaagcatcttagccagagctgctttctcgagtcctgggtttccttcctgtcttcgatttttaggaagtcacttgtcacacttgattctttttccaactgttacatttcggaattgtggcaactacagtgaacattctcctaagctcctatgaaatgccagtgctg

SEQ ID NO: 693491 - DNA, 565 bp, Homo sapiens
ttttttttttttttttttgtcatgtatagccaaagctacgcctgtccacacaggctgagaggttcacggttgtgggaggaaaggtggyggctggctgggtgcagataccacaaggaaagggacatagtttcagagctggagggccctggtgacagacacagcgagatcagggaagtggagggctacggcagctgaaggaaaggaccctggtgtgcatctgcttcactagctgctccttccaccactgagagcctcggtttcctcatctgtaaaatggcaacaatgataccatcccgacaagagagtacacagagcctgtgcccataatcggagcactggtcacaacacacacttagcaggaatgaggtgagtgattcagtacggggcttttggagagagcctcagtacggggcttttggagagagcctcagccagaagcagggtaagaagatggcctgggtaaagatgcagagaaggcctcttcagtcagagaggccgggaagccctgaaaacgcagggtccaaaggtcacaggaggaggtgtccaacagggaggggcaccggtc

SEQ ID NO: 693492 - DNA, 565 bp, Homo sapiens
ttttttttttttttttttgtcatgtatagccaaagctacgcctgtccacacaggctgagaggttcacggttgtgggaggaaaggtggtggctggctgggtgcagataccacaaggaaagggacatagtttcagagctggagggccctggtgacagacacagcgagatcagggaagtggagggctacggcagctgaaggmaaggaccctggtgtgcatctgcttcactagctgctccttccaccactgagagcctcggtttcctcatctgtaaaatggcaacaatgataccatcccgacaagagagtacacagagcctgtgcccataatcggagcactggtcacaacacacacttagcaggaatgaggtgagtgattcagtacggggcttttggagagagcctcagtacggggcttttggagagagcctcagccagaagcagggtaagaagatggcctgggtaaagatgcagagaaggcctcttcagtcagagaggccgggaagccctgaaaacgcagggtccaaaggtcacaggaggaggtgtccaacagggaggggcaccggtc

SEQ ID NO: 693493 - DNA, 591 bp, Homo sapiens
ccagatttggatagtaaccactggtctagggacaatgtggggtcagatatagctttgatttgttggtgcacatcttgcagggctatctgagacatttcccaaattatgtgggatgtatatatagcagttggtcttaattatcatgcagggtccccactgccaattgtaaccagatatgatgacaggttagctaaatatatatttagcaggctacagaaagtatgagtacccatgaaggtagtcccaagccatgtctagttcttgagaatggaccagtttaggtgaatagctgtgcctcatccaggaggtggcattgcagataggctaggcctctgcatgtaatgaaggcaaacagatttttagtaagaggcattcctatggaaacagaagaaaaacaaatcttaacgttggaaacaatctatccagatgttagactaaaagcatctttaagttatagaggagacagtggcagtctgacatgtcttactgtactacaaggaataatgaataatgtagtagtaatttcattgagtccatattagaaaaayggaagaaaaaattgaaagcattaacttgggacttgtagcctgg

SEQ ID NO: 693494 - DNA, 685 bp, Homo sapiens
atgtgaaaatcatgtctctgggtagttatataaacactaatgataggcattctcttcccgtgagtccacgaaatcgcaaacttaagattattgtgtttgctcccttactacctgctcctaaaaccctgatgctgcagagaactgatgtaggccacagcctaatctcaccagcattcttaatacaagcttatttgggaaaatttaagagatacaaaacaaaatacagtatattttatgtatttatgtaataaaaaatggaatctggaggttacatataaatagcaaatgttttgcaatatccctgttctcattgtctatcaaattaaccactgggattggaaaaaaaamccaccaaaaaacctaagtgggagaagaatagtaatctcacagccagagatctgagtctttaatgtctgtgttaccctgtgagtctgggtcatttaccacttagatgggtgccttcattgttttttctttaacaatttttccccaattataatggatcttccattatgctttccgctctatttcattcctcttttgtgatgcaacatcttggcccatatccaaagctttatttatttttctgtatttatagaaagaaattcactttcagatgctgaaggcaagatagcaaatgaggaattaaaatgatcatgagtatttgtattctactcttcttcct

SEQ ID NO: 693495 - DNA, 1502 bp, Homo sapiens
caggtacaggagggtgacaggagcctgtgaataaggtggggttgggggagacttgatagatttctttgtactggggaacagggaacttggctgggcagatgcaaaagctacttatgctccctcattctggtcacttgccagctgccttcccattaggcctytatttaaagtactcatatttgcatgtgttatcttctggggtggctaaaaaattacatagatctagtctctgcctgtaagtatcttacagtgctgtgaaatcacagtaggacaccacatatggcaaatatagtaaagaagtgctgattctgaagtgccaggtatttaaaattatcggatatatttttccagtgaccagaaagaaaatcctgatattttttccaactttgaaggctctcaggaggttggagggtggggtttcaggggacaggaagaactcctatacaaccaaccatgaagaacctttgagcttaggacccccagtgggatgctggcagcaatattgctgttgggctgagagggaaatgtaaaaatctttcacgagcttcctgttaacgatgacttttctgtaggttagggtttcaactccgtggctgcagcacctgtctggagcctgtggtgtggtggatgaggctgtcctggtgtgtcctgacccgagctcacgttccctccaaactttggctctggagacggaatgggagttgagacagatcccactgcaggtgagaggctgccactgcttcttctggcctgaggcatttcctgcggggagtagaaagtttggcatgattcccctggagggtctttctcctagactcttcctgagcagtggaagccattcaggcctctggctgaactggtgtaagaggaaatcagtcactttcctctttggggaacttgaactggagcatttggagccacctgccatggcccagttacttcccccggcaaagtagggcagaggttgtgagcctgggatgggtcagggagtcgtcagctgttagccataatcctcctccttcttgccttccagtctctcgacttagaatttggaagtggattccaaccccgggtcctgcctacccagcccaacccagtggacgcttcccgggcccagttcttcctgcacttgtccccaagccactatgctctgctgcagtaccattatggaacgctgagtttgcttaaaaacttcccacaggtaactgcaggcaacatggtttgctaggattcaggagatctctccaagacatggatgctagaaggcagtgcttttgaatctggaaacgtttgctcttaggcccaagattgatgacaccttcccgtaagtggtttgagagggggtaggtagccttatcatagaaatggtgtatttcctcctgagtattacaaaggatctttagagcaaaactagtgccttccttagtccaaaggaaatatggggacataaatgagagcttccccatagatagtaagaacaagcagcatgggatttaagattg

SEQ ID NO: 693496 - DNA, 1502 bp, Homo sapiens
caggtacaggagggtgacaggagcctgtgaataaggtggggttgggggagacttgatagatttctttgtactggggaacagggaacttggctgggcagatgcaaaagctacttatgctccctcattctggtcacttgccagctgccttcccattaggcctctwtttaaagtactcatatttgcatgtgttatcttctggggtggctaaaaaattacatagatctagtctctgcctgtaagtatcttacagtgctgtgaaatcacagtaggacaccacatatggcaaatatagtaaagaagtgctgattctgaagtgccaggtatttaaaattatcggatatatttttccagtgaccagaaagaaaatcctgatattttttccaactttgaaggctctcaggaggttggagggtggggtttcaggggacaggaagaactcctatacaaccaaccatgaagaacctttgagcttaggacccccagtgggatgctggcagcaatattgctgttgggctgagagggaaatgtaaaaatctttcacgagcttcctgttaacgatgacttttctgtaggttagggtttcaactccgtggctgcagcacctgtctggagcctgtggtgtggtggatgaggctgtcctggtgtgtcctgacccgagctcacgttccctccaaactttggctctggagacggaatgggagttgagacagatcccactgcaggtgagaggctgccactgcttcttctggcctgaggcatttcctgcggggagtagaaagtttggcatgattcccctggagggtctttctcctagactcttcctgagcagtggaagccattcaggcctctggctgaactggtgtaagaggaaatcagtcactttcctctttggggaacttgaactggagcatttggagccacctgccatggcccagttacttcccccggcaaagtagggcagaggttgtgagcctgggatgggtcagggagtcgtcagctgttagccataatcctcctccttcttgccttccagtctctcgacttagaatttggaagtggattccaaccccgggtcctgcctacccagcccaacccagtggacgcttcccgggcccagttcttcctgcacttgtccccaagccactatgctctgctgcagtaccattatggaacgctgagtttgcttaaaaacttcccacaggtaactgcaggcaacatggtttgctaggattcaggagatctctccaagacatggatgctagaaggcagtgcttttgaatctggaaacgtttgctcttaggcccaagattgatgacaccttcccgtaagtggtttgagagggggtaggtagccttatcatagaaatggtgtatttcctcctgagtattacaaaggatctttagagcaaaactagtgccttccttagtccaaaggaaatatggggacataaatgagagcttccccatagatagtaagaacaagcagcatgggatttaagattg

SEQ ID NO: 693497 - DNA, 1502 bp, Homo sapiens
caggtacaggagggtgacaggagcctgtgaataaggtggggttgggggagacttgatagatttctttgtactggggaacagggaacttggctgggcagatgcaaaagctacttatgctccctcattctggtcacttgccagctgccttcccattaggcctctatttaaagtactcatatttgcatgtgttatcttctggggtggctaaaaaattacatagatctagtctctgcctgtaagtatcttacagtgctgtgaaatcacagtaggacaccacatatggcaaatatagtaaagaagtgctgattctgaagtgccaggtatttaaaattatcggatatatttttccagtgaccagaaagaaaatcctgatattttttccaactttgaaggctctcaggaggttggagggtggggtttcaggggacaggaagaactcctatacaaccaaccatgaagaacctttgagcttaggacccccagtgggatgctggcagcaatattgctgttgggctgagagggaaatgtaaaaatctttcacgagcttcctgttaacgatgacttttctgtaggttagggtttcaactccgtggctgcagcacctgtctggagcctgtggtgtggtggatgaggctgtcctggtgtgtcctgacccgagctcacgttccctccaaactttggctctggagacggaatgggagttgagacagatcccactgcaggtgagaggctgccactgcttcttctggcctgaggcatttcctgcggggagtagaaagtttggcatgattcccctggagggtctttctcctagactcttcctgagcagtggaagccattcaggcctctggctgaactggtgtaagaggaaatcagtcactttcctctttggggaacttgaactggagcatttggagccacctgccatggcccagttacttcccccggcaaagtagggcagaggttgtgagcctgggatgggtcagggagtcgtcagctgttagccataatcctcctccttcttgccttccagtctctcgacttagaatttggaagtggattccaaccccgggtcctgcctacccagcccaacccagtggacgcttcccgggcccagttcttcctgcactygtccccaagccactatgctctgctgcagtaccattatggaacgctgagtttgcttaaaaacttcccacaggtaactgcaggcaacatggtttgctaggattcaggagatctctccaagacatggatgctagaaggcagtgcttttgaatctggaaacgtttgctcttaggcccaagattgatgacaccttcccgtaagtggtttgagagggggtaggtagccttatcatagaaatggtgtatttcctcctgagtattacaaaggatctttagagcaaaactagtgccttccttagtccaaaggaaatatggggacataaatgagagcttccccatagatagtaagaacaagcagcatgggatttaagattg

SEQ ID NO: 693498 - DNA, 1502 bp, Homo sapiens
caggtacaggagggtgacaggagcctgtgaataaggtggggttgggggagacttgatagatttctttgtactggggaacagggaacttggctgggcagatgcaaaagctacttatgctccctcattctggtcacttgccagctgccttcccattaggcctctatttaaagtactcatatttgcatgtgttatcttctggggtggctaaaaaattacatagatctagtctctgcctgtaagtatcttacagtgctgtgaaatcacagtaggacaccacatatggcaaatatagtaaagaagtgctgattctgaagtgccaggtatttaaaattatcggatatatttttccagtgaccagaaagaaaatcctgatattttttccaactttgaaggctctcaggaggttggagggtggggtttcaggggacaggaagaactcctatacaaccaaccatgaagaacctttgagcttaggacccccagtgggatgctggcagcaatattgctgttgggctgagagggaaatgtaaaaatctttcacgagcttcctgttaacgatgacttttctgtaggttagggtttcaactccgtggctgcagcacctgtctggagcctgtggtgtggtggatgaggctgtcctggtgtgtcctgacccgagctcacgttccctccaaactttggctctggagacggaatgggagttgagacagatcccactgcaggtgagaggctgccactgcttcttctggcctgaggcatttcctgcggggagtagaaagtttggcatgattcccctggagggtctttctcctagactcttcctgagcagtggaagccattcaggcctctggctgaactggtgtaagaggaaatcagtcactttcctctttggggaacttgaactggagcatttggagccacctgccatggcccagttacttcccccggcaaagtagggcagaggttgtgagcctgggatgggtcagggagtcgtcagctgttagccataatcctcctccttcttgccttccagtctctcgacttagaatttggaagtggattccaaccccgggtcctgcctacccagcccaacccagtggacgcttcccgggcccagttcttcctgcacttgtccccaagccactatgctctgctgcagtaccattatggaacgctgagtttgcttaaaaacttcccacaggtaactgcaggcaacrtggtttgctaggattcaggagatctctccaagacatggatgctagaaggcagtgcttttgaatctggaaacgtttgctcttaggcccaagattgatgacaccttcccgtaagtggtttgagagggggtaggtagccttatcatagaaatggtgtatttcctcctgagtattacaaaggatctttagagcaaaactagtgccttccttagtccaaaggaaatatggggacataaatgagagcttccccatagatagtaagaacaagcagcatgggatttaagattg

SEQ ID NO: 693499 - DNA, 643 bp, Homo sapiens
tcaaaaaaaaaaaaaagttattgtaaaaaactcctgctccttaagagggacgtaggatgtttgtctgcttcttgggtaatgggaaattaacttggatagagctcattcctcattctctatttctgcagctataaaattgggccaataaccttagccctccttattgtctcaggaaagccctgggtgaggatgccactgagcccgcctggagccaggagctggtctgcagaaactgctgggcctgtttctactctgatgtttacttggcctggaggcccagtgtgatgaaacccggccctgttgccgagcaccttgggargcctccctccagggtccctctgtgctcagacagtggccctttgtagagtggaggagcagactgaaagcggagctgctggaaaccgtttcctcccctctgcctcgagcaacctcctcccgcagccacagaccatcctgtgcctgggtggcctctgctttaagtctgcagctggcggggtaagatagggtctctaggcagcctgctaggctggaagggtgaggaggggtcctggcaggatggccagctgaaacacagcatcccctaactcaatacagatcacttataacagggctttccaaagaggagactggccccttacaggca

SEQ ID NO: 693500 - DNA, 639 bp, Homo sapiens
ttatgttgtgatacaggtttttattaatgtttattttgttttatgtagtaaagcaaatttcttattatttcacctctaataaatagtgcttgtagacagatcaataaatggatgatgagtgatagatacatagatgacaaattaatagatgacagatgaagagatacagattgacagatacttgtgtcagtgttaaaaatgttcaacttaygtccatattctatgagtcatatttgagataattatgatcatcaactttatctatttggttttcagtgtgatggatatagtaatttgatcattataatatgtatacctgcattaaaacatcacattgtactccataaatatgtgcaattagtatgcatcagttctgaatagaaaaataaattaaacataatattctcaaggtctttagaaatagctgcttaataagaaagatctagtagaaatgcaaaataattcagccactgtggaaaagagttttgtggttcttcaaaaagttaaacatagagttatgatgacatgattcctcaatttctctctagtgtatatccacaaaataattgaaaacaggtactaacacaagtacatgtacacccattttcatagcagcatttttcacaatactcagaaggt

SEQ ID NO: 693501 - DNA, 2678 bp, Homo sapiens
ttccccatttcttcacatgctcttctcttccctcttcccctggccaacttctattgacagttctagctttggcttaaacgtgatttcatccaggaagatttcttgagccccattccctgagtgctgctggaaacagccacatgttatcatgtcatccatttttcttagcactttccacaggtgccattgaataattatcatgaccatttgttcaccagaagcctcccctgcttgtctttgccttccaagagggaggaagctttgtctaccttattcttgctaagatgctaagctcctggcatctagcacagttcccaggcccaaggaaatcctcggtaagcatccgatgaattttcaagtcttttcctgaatgacactcttatgtcctttgagaggcaggaaacccatcttttttccctcatgactcggcatgcagtaggtgctcagtagtggacagcactggctgccaagggtgttcaggtccagattcagcagttcaagccctgggagttattggtgtacatgtaaaatgctggtgaaggccataaccatggcaaaaatacggtcctgtccccccgataggactcccgaaattaataaaacctaaatatagccttctccttgcagttgctcttctggtgagtatagaataacagggatttaagtctaaactctgacgttgaatagttctaagacatgcataaactatttaagcctgcggagcctcagtttgtcattctgtaaaatggaaatcatgataccttcttcatctggttgttcatacaaccctttgcatttgacaagctagatgaagaccatgcattcttctagctaggtgctgggatacagccgtgaactaagtggacatgatcgctgccagcaaggggctcagagtcttgtgccagggatagactaaatataattaaccaatcacagaaataaatgcagccatggcagcagtccagatgagaggtgatgccccaggtcttgagtggcagggagtggggagggtgggttgaagattaaataaactgtgtgtgaggcagctagctcagtgcctaggatatagtaagtgttcaataaaccctagatttttgacaggtcagagtctttgcccagaaaggattaactggaaagatgaaaaggagccacacagaagacagagagagctcaggaagaaaatgagaccagctccaattttctgcccggtttgtaagttgtttgtaagaaagcatgtttgtgctctggaatactcagattttgaatattccagaatttttaaaaattcacacaaaaagaatggaaaatatctcattaatgattgtatattgtttacacacaaaaaaaatattgtggataatgagttaaataaaatgtattattaaaattggtttcacctttttaaatatggctactaaaaatttttaagttacatacatagttcatattatacttccattagaaagttctggtttaagtcatttggagttagggttttccttgacctgcagacaaaagagtatcttaatgsatacaggtaacatcattttgattttacagttggaaaagccgaaactaagaattttaatgacttgctcatattaacacaatgtggcagttgttggcaatcacagccaagcgtcctgactagtgctttcacctctaagaatatgagaacttcccttacaagttaaaagttccaaaattctcacccaaatctcagctctgaagaaagcgtgaccatttcggaaatgcaagtgctatggttcagatgtttgtcccctccaaacttcatgttgaaatgttatcctcagtgttggaggtggggactaatgggaggtgtttgggtcatgggggcagatccctcatgaatagattaatgccctcccttgggggtgagtgagtttctgctctgttaattcccacaagagctggttgttacaaagagcctggcaccttttcactctcactcttgcttccactcttgccatgtgatctctgcacacaccagctccccttcaccttctgccatgagtggaagcagcctgaggcccttatcagaggtagatgctccaccttgaactttccagccaccagaatcgttaatcaaataaaccttttttctttgtaaattacctggccttgggtatttttttttttttttttttttgagatagagtctttctctgttgcccaggctggagtgcagtagtgtgatcttggctcactgcaaccaccgcctcctgggtttaagcaattctcctgcctcagcctcccaagtagctgggactacaggttcctgccaccatgcccagctaattttttgtagttttagtagagacggggtttttcactgtattggccaggctagtctcgaactcctgacctcatgatccgcctgccttggcctcccaaagtgctgggattacaggcatgagccaccacgcctggccctcaggtattcttttacagcaacacaaaattgactaagacaccaaggaaaagctgggagatccagaatccagtttgagacatcaaagagacatatgggccagaccaggattctgcctccaaatacagaatggacactgagaacaccatcccatctggccagtgacaccttcctatttccagggaactatctgaggttggaagatcagtgtgcctcggtgctacgg

SEQ ID NO: 693502 - DNA, 3071 bp, Homo sapiens
agatagtcctgccattagtagggatctcagatgggagggcaccaatgaatcagtgtagttgagtaccacttttgggagaaaatagaaacttggacactctaaatgatagtttaaggacgttgtttgttttgttttgttttttgtatgggaaaagttggcttagactctttagttcagcccttcaagttgatgtgtaatttaagattgtttaggaagttaaaaaatctaaagccctgtggatatagttcattcagtgcagtaattatctttcagatgccaagtacagcattaattctttagctttagcatggcactgattttcttaacacttcatgatcacgtggagcagactgtgctttacagcacaacagagcgtcagccatgtgctgaagattcttcgtggtagtggtttagatccaccctgaatagattatcttcatttatttaattattaagtagcttgcttatcaaaagcggcattaaacttactaaacttgagtcaaacgtaaatcttcatagatagtaccatttacttctgaaatcttgttcctgggagaaaaatgtggactggaagttaactttcttttatccacctattcactcctttttcttcacagttaactccttaggggaaaaaatgtatagttcttgaccatgtgcttatgtttgtaaagcaatgatgtttccttaacgtgagtggttgtgacatagatcactgttatcttcataattacctgggagcttttcatccaagtgtggatttactaaaataattagtctgaattgatgcttattaaagagctgaactcttaaacgttaacactatcttgtatttattaaaattgtatgcatgtttccttcaaatgctgaaggcagaatactgagaactttgaccctgtgttattatcgctaagtagttgaaaattaggggaggagtcaagggagtatattatattggttatcactcaaatactacccctaggcatgatttttagaaccgaaacttgaatttttacataaagaattatctccaaaagtgtcttttttttttttttttttgagatggagtcttgctctgttgccaggctggagtgcaatggcactatctcggctcactgcaacctccgcctcctgggttcaaacgattctcctgcctcagcctcccgagtagctgggactacaggcacatgccaccatgcctagctaatttttgtatttttaatagagacggggtttcaccatgttggccagatggtctcgatctcttgacctcgtgatccgcccacctcggcctcccaaagtgctgggattacagacatgagcctctgcgccaggccaagagtgtcttatatatccccacttttttgaaaaatttgctgtctaaaggatgatcatgatttgggacgaatgagcacagctttcaactagatgacaagaaagatgaatacaaagagtgctgagttccattagtcaagacaaggttgccatagaatgtctttaataaaataaaacaaaagccttttgcgttattttgcaccgaggattgtgttaaaaacaaagttgcattatggtttccagattggcatccttgtttttttctatcattttaggcccctttcaggctgttatcagcatagcatatccaggattgctttggccttgctcagtgggtatgtgcgttctttgaagttcttacctgacagatgtgggcagctggctttacacaaggaagagttgtttaaagagctttggtatggaaacaaagttactaaacttgacagtcacttgaggattatttaaaaaacaaacaaaataactgaatgtggtaaaatactatctctagaatatttttcaaactgttaaatgcatccttttaacagaagctgttgatgtctacaaacactgtctttgtagacaaagacaaaccccccttgcatgggggtttgggggttgggaagcagttgagaaaatggcatagtcccgtgagaaaaccttggaatactttcttttaataacatttttttattgcatagaactgtaaagctacagaaatgctttcttggagttttccttcatcctttcagaagggctaatattgacctttggttagcatgttagtattttcacctgtgtcaagtgatgtcttcacgcttttggggggtgtgtgtgtgcatgcccacctcgtgttgtgtagggcacattkgccgatacctataatgtgtttcaattactacattgttggcatttcagtaggctccttcagcctttgcccatctgggaagtggagactagggcaataaatgttttaggggtagattgagactgcagtgtttttcatcttttagcttgtactttaagacaatgggatgtacccctagaccatttacctagatttaaattacttccttgtgatgtggtttagagctctaagttccctgagttgtcttgaaaggctgaagggtgctcagagaatggaggggaattgaaaatggaacctaaggatctgggagtggtcatatgtgtgagtggtgaaatgtgccccccaacaccccgttgggtcgggtctggagttaaaagcagtggctgacatacattttgcaatataagggtaaagaaaggtaaagaaggaacaaacatttctagaggataaatgctttaattccagaagataggccacacagtttaggaactgtggtaagaggtgctttgccatatttatgttactgtttaatctgtgtaacaatcgtatgagatgacttagtcagtggctaggtaactttctgctggatgaggctgcactagtaaatggtggcacaggcaaagccttgtactttccctcataccagtatcagctcattagagttaactcataaaggggtttgttcttgagagagggaggcagagaatttaaaaccattaatgaagtattaatagctgtcaggacaatttcttaagaacatcaattcattaagagttattctctgaattttttaggagggatttcttgccctacttttgaaaaagttcagacagatgactccaaagaatgtttgatttctcttgtgaatatt

SEQ ID NO: 693503 - DNA, 3071 bp, Homo sapiens
agatagtcctgccattagtagggatctcagatgggagggcaccaatgaatcagtgtagttgagtaccacttttgggagaaaatagaaacttggacactctaaatgatagtttaaggacgttgtttgttttgttttgttttttgtatgggaaaagttggcttagactctttagttcagcccttcaagttgatgtgtaatttaagattgtttaggaagttaaaaaatctaaagccctgtggatatagttcattcagtgcagtaattatctttcagatgccaagtacagcattaattctttagctttagcatggcactgattttcttaacacttcatgatcacgtggagcagactgtgctttacagcacaacagagcgtcagccatgtgctgaagattcttcgtggtagtggtttagatccaccctgaatagattatcttcatttatttaattattaagtagcttgcttatcaaaagcggcattaaacttactaaacttgagtcaaacgtaaatcttcatagatagtaccatttacttctgaaatcttgttcctgggagaaaaatgtggactggaagttaactttcttttatccacctattcactcctttttcttcacagttaactccttaggggaaaaaatgtatagttcttgaccatgtgcttatgtttgtaaagcaatgatgtttccttaacgtgagtggttgtgacatagatcactgttatcttcataattacctgggagcttttcatccaagtgtggatttactaaaataattagtctgaattgatgcttattaaagagctgaactcttaaacgttaacactatcttgtatttattaaaattgtatgcatgtttccttcaaatgctgaaggcagaatactgagaactttgaccctgtgttattatcgctaagtagttgaaaattaggggaggagtcaagggagtatattatattggttatcactcaaatactacccctaggcatgatttttagaaccgaaacttgaatttttacataaagaattatctccaaaagtgtcttttttttttttttttttgagatggagtcttgctctgttgccaggctggagtgcaatggcactatctcggctcactgcaacctccgcctcctgggttcaaacgattctcctgcctcagcctcccgagtagctgggactacaggcacatgccaccatgcctagctaatttttgtatttttaatagagacggggtttcaccatgttggccagatggtctcgatctcttgacctcgtgatccgcccacctcggcctcccaaagtgctgggattacagacatgagcctctgcgccaggccaagagtgtcttatatatccccacttttttgaaaaatttgctgtctaaaggatgatcatgatttgggacgaatgagcacagctttcaactagatgacaagaaagatgaatacaaagagtgctgagttccattagtcaagacaaggttgccatagaatgtctttaataaaataaaacaaaagccttttgcgttattttgcaccgaggattgtgttaaaaacaaagttgcattatggtttccagattggcatccttgtttttttctatcattttaggcccctttcaggctgttatcagcatagcatatccaggattgctttggccttgctcagtgggtatgtgcgttctttgaagttcttacctgacagatgtgggcagctggctttacacaaggaagagttgtttaaagagctttggtatggaaacaaagttactaaacttgacagtcacttgaggattatttaaaaaacaaacaaaataactgaatgtggtaaaatactatctctagaatatttttcaaactgttaaatgcatccttttaacagaagctgttgatgtctacaaacactgtctttgtagacaaagacaaaccccccttgcatgggggtttgggggttgggaagcagttgagaaaatggcatagtcccgtgagaaaaccttggaatactttcttttaataacatttttttattgcatagaactgtaaagctacagaaatgctttcttggagttttccttcatcctttcagaagggctaatattgacctttggttagcatgttagtattttcacctgtgtcaagtgatgtcttcacgcttttggggggtgtgtgtgtgcatgcccacctcgtgttgtgtagggcacattggccgatacctataatgtgtttcaattactacattgttggcatttcagtaggctccttcagcctttgcccatctgggaagtggagactagggcaataaatgttttaggggtagattgagactgcagtgtttttcatcttttagcttgtactttaagacaatgggatgtacccctagaccatttacctagatttaaattacttccttgtgatgtggtttagagctctaagttccytgagttgtcttgaaaggctgaagggtgctcagagaatggaggggaattgaaaatggaacctaaggatctgggagtggtcatatgtgtgagtggtgaaatgtgccccccaacaccccgttgggtcgggtctggagttaaaagcagtggctgacatacattttgcaatataagggtaaagaaaggtaaagaaggaacaaacatttctagaggataaatgctttaattccagaagataggccacacagtttaggaactgtggtaagaggtgctttgccatatttatgttactgtttaatctgtgtaacaatcgtatgagatgacttagtcagtggctaggtaactttctgctggatgaggctgcactagtaaatggtggcacaggcaaagccttgtactttccctcataccagtatcagctcattagagttaactcataaaggggtttgttcttgagagagggaggcagagaatttaaaaccattaatgaagtattaatagctgtcaggacaatttcttaagaacatcaattcattaagagttattctctgaattttttaggagggatttcttgccctacttttgaaaaagttcagacagatgactccaaagaatgtttgatttctcttgtgaatatt

SEQ ID NO: 693504 - DNA, 1311 bp, Homo sapiens
attgtaaaattgaaaaatcgcaagtcaaaccaatcggggattgtctgtacataagagatgattgtccaaattagagctgttttgggtttctgccctttgcagatcctttgaggttttctttatagacagatgactccttctgggggaattgagcgtgactctgattgagatttggttcagttaccacatactgaaagcttcctgtgggccaggcactaggttgcactggggacctgggaggaaggcctagcccttaaagtttccagcctctaggtattgggagacgagggaaaatggggacaagatatttatggcctgtccttattgagagcttagaaaaagctgtgttaattctgctttgggygttcgatctcacagggaagatggcatttgagatatgtgacttggcgagcttacactgtgcgcttgccatttttctaagcgttcatttatttaattcttaatgcaagcctaggaagtgggtacagttatgatcctgaagttattaacccaagttatgaacctgactgagggttggagctgggatttgaatcaagatctgtctgattgcaaaggctatggctttttttttttttgtcgtcatgctggctgtgtttcttcccttaaaagataagtgggagtgtgcccttggctttcttatttattatgttaggaagatgagaggaggagtgagactagagaaagaggcttgaaagagaaatgggatagaaaaataaaggaaaaggctgggcacagtggctcacacctgtaatcccagcactttgggagtctgaggtgggtggatcacctgaggtcaggagttcgagaccagcgtgaccaacatagtgaaaccccatctctactaaaaatacaaaagttagccgggcgtggtggtgcatgcctgtaatccaggtactggggaggctgaggcaggagaaccgcttcagctggggaggtggaggttgcagtgagccgagatcgtgccattgtactccagcctgggcaacaagagcaaaactccgtctcaaaaaaaaaaaagagagaaaaagaaagaaaaagtgccttattataattgtagtcttgtaattgtctcgttggcacctcttacataaagtgcagttgctctgggacattagaatgactgtgactgacttttaatctttgccagccatggtggctcacgcctgtaattccagctttgggaggctggggtgggtggatcgcttgagctcaggagtttgacaccagcctggtcaacatggtgaaacccctctttactaaaaatacaaaagttaaccaggcttggtggtg

SEQ ID NO: 693505 - DNA, 2503 bp, Homo sapiens
cccgcatgatttggtcccaaccccaggccccaagccacgctgccctcctcagtcttgtcaggcaccactgatcgagtgagccgtctgccccgtggtggagctgttagtccctttgcatggagggccctgcctcctacttctcggtgagatcctccaagacccatcacccaagaccaaattggagctctaggaagcattccgcctcccctaggcaaaataagtggccactgcagattacacttggcacatcctcctgccgtgcccaccactctgtcttcctgagtttctctttcctgttgggttgtaatttccttaagattttatacaatgccgcagtgcctaacacatagaaggtatttaataaatctttttaagtgggtgtatggaatgaatgaggggatgaatggcccagccctctgtgtcctcctctgtccctgagctgagggtagagagaagcagacagtgaacacgctggagagccagaaactgcttcagtttcttcggaggctcatgggagcccaagacaaatcttttaggataaaaattagcggagatccctgtccccttatttccccatctcaggctgcagtgccagctttgggcttggaaacacatatccaatttaatctacccttcactcttaacctgctgtctttcccaaggccttcacaggacacactgttgtttggaacatcctgccccagctcgtatatccattcactgcataccttctttctagatctgcactgtccaatatggtagtctcgagccacatgtgactatttagatttatgttcattaaaatggctgggcgcagtggcccacgcctgtaattccagcactttgggaggccaaggcgggtggatcaccagaggtcaggagttcatgaccagcctgaccaatatggtgaaacgctgtctctactaaaaatacaaaaattagctgggcatggtggcagtcgcctttagtcccagctactcaggaggctgaggcgggagaatckcttgaacccaggaggtggaggttgcagtgagccgagatcacgccactgcactccagcctgggcaacagagcgagactccgtttcaaaaaaaaaatagatttatgttaattaaaatgaaataaaattcagttcctcagttgcactagccacatttccagtgcttagtagccatgcgtggctaatgcatatcattctggaaaaagttcccttagggagcactgtaatctagacacgttcttccttgcccctgacagacctgtagtggaaaatgcactcgggctctccttccagctctttgagttactgacagctttctctttggaagtgagaacataatttcagccctaagtatctcatggggatgcagggaagaaaaagctggtgaaaagccttagctctgtgacctaagttttcttagggtgggattcctggaagcagagcctgagatggggattcttgtgaaagaggtttatcaaaggagagctctcaggagaaaaggaatgagtatagagggagtttaacaaggaggtggtctcggtcggagtctagcgtcagcctatcccatgcagaggtctggagtgtgaatggccagagagttggtcctccttgtaatgtcaatctgtcattggctgtgggctactggtggggagtatatgctcttggctgagggtaattctcagattaccttggggcagctgcgagccatttgacagtctacactgcagctggggcatgagggaatcaggcaggcatcaactcactgtaaagttcctggacgttgtcttccaaaagaagctccaggccaggcatggtggctcatgcctgtaatctcagcattttgggaggctgaatcagaaggatcgcctgagcccaggagtttgagaccagcctgggcaacgtactgagacctccgtctctacaaaaaataaacaaaattagctgagcatggtagtgtgacctgtagtcccacctgctcaggaggctgaggtgagaggatcacttaagcctgggaggtcaaggctgcagtgagccaagatcacaccactgcactccagtctgggtgacagagcgagaccctgactgaaaaaaaaaagcagctccatcccactctgccttctaccccctgaaaacctagaatttaacagtggactcacatcaattgccttcacacttgccttctctactgagtgtctcttttgagtaaagcactgtgcttggggagttaatgcaatggtgtcacccctgagaagtagtgtataagttaaatgtttgcactttagccatactcaacccagagtttgcttctttggtaggaaatactccatggacaagacgtttcttttcatttcatcttgagctgtttttatggggaggaataaaaagcgtttatagacatgattacgaaggctaaaccaagttcaggatgtggtaaggtgggtgtgtgggtgaactactctgagctttcctttaagtcacaggcatcagagtcatgatgcataa

SEQ ID NO: 693506 - DNA, 635 bp, Homo sapiens
cacactttggaaggccgtggctcagagaagagaatctaaccccttcccctggtgtctgtgtccttccatgatctggcacgaacttccagtacaaactttcctcctttcacttcgctttttgacacctgcggtacagcagcagcctctacacatccagccattccttgtgctgtttattctgcccyttttcttgttcatctgttgagctcctgtttattcctcaaggacttaggggaaagccaccattccatgaagccttcccttcatctcccataaaaagaattaatattttcttcctttgcttctccagtttttttgcatggacatctttggggggcacctgcccctttgtctgatgttgtacctctctctctgtctcccctcttccaggcatttgctcctagccccagttgttgccatgtgtccagtgcttggtgtatcactgggatgcaggggatatttggggaagagggaatgccttcctcctgctctcactctggccttgcttctgggcatggtttctgatgagccaggagagatcccttagcaaggccagaagagaagttcctcctgcccaagggagcctgtggttgtctctcccaaagcctggaggcaggttcctctacactttgggg

SEQ ID NO: 693507 - DNA, 813 bp, Homo sapiens
tgagaaccacagtgctacagcagagtccagtcgccttctagacgtacctcgctacctctgtgaggggacggaatccccttaccagacaggacagctgcatccagccatcagggtagctgatttactgcagcacattaatctcatgaagacatcagacagctatgggttcaaagaggaatatgaggtgaataagttttgatactgtattgaatttgatttttaactatgatactcagtggaatttagcatttttttccctctctttaacacaacaaggaggggattgttctataggctctctaatctagtgtttatgagtgtacaaccaagtgtgtgtacctgggaatgggaagggaatggggaaaaaagcacttcccagagatatatgagtctaaatttattacaagaatctttaatgttggattccgtaatttattttactatggtattaaaaaaaaacactttgcgtatctccccatgcaaaaatcaagtagcaatacactttgggtcccattgttccattgcagattctatcatttgaatgaatcaagtagcaggtacttctctgcccctttttttgttgaccttatggttgagaaatcagatgaagctttgtgctctaaatatactacttgccactctcagtttaattttatggattattggttgagggtggctgagaaaaaaaatagagcamtgcaaatctagtaaacaacactgagaagccaaaagaaggcagtgggaaattcttcttccaaccttatttccccttcctactcaaaccaaaataccaggacttatctcacaaaggca

SEQ ID NO: 693508 - DNA, 605 bp, Homo sapiens
ataacagcaccctattataaatacaaacattcttaattacagttattactaacgctctgttactactagttatttctgcatgcttcacctaattagcttcatacaatatatctctgttcgtttttttgtaattctttcacatgcrtaaagatctattttaccaccttcccttttcttgtgtagaaaaacaggaccatttttagctttgacagtttattatgtactcgagttttatttgttgatgatttctgtttctggcttttattcttacccttccctaaacatatgtgagaagctggatagtatgatgtgtattagtgttactgaaattttactttttacatttgacttctgacgttaaaatgagtagggagactattttgtgatgtgttgtattggcttttaaagtaataaaattactcaggcaaaataattactaaatttcaattgtaaaatacacatatcacacatatatatcgaatcacagaaatgaaaaaggttgctttgatcatatatttcactgttaaattttgattacatacatatctacatggaaattctttatttaaaggaagtaattatcaaacaaaatatagaatattctt

SEQ ID NO: 693509 - DNA, 691 bp, Homo sapiens
ttttaaaatgtagaatctacaaaaccytggaggcctttcatccttggaagctggaattattgcatcttttcatccttcttaaagaggggaatgttttcacccttacagttaagttgacagttcatatgcgatgtttacttgactttttatatctggttacaataaatgtataggctgttaacacataataaataatgactcatatatttgatttaaaatttcctggattatctataatcagaatttagaatttctctcctagaagtgtggcgagctgaagctattagagctgtggcctttacaatcctttaacggaataacccatctcctgttgctgatctgaaccgcataactggctaaactagtgcaggcagcatgattcttcacacacaaccagatgccagaaagaagaaaaccacaaaggggctgaaaaacacagcatagagcccagaagcaagagggtaaggtggggcagaaaccaaccagcagtgattggaagggaagattaagtcaggaggcagggctcaaagggcatctgaaggtgagaggcagcagcccgaggatgcctcaggagtctgcgttgtacaagaagctggacattagagataggtcgcaggtcaaaatcagatagaattttgcgatcagagcagacacagcaaaccagaagcacttgaactgttcaaatagcacc

SEQ ID NO: 693510 - DNA, 691 bp, Homo sapiens
ttttaaaatgtagaatctacaaaaccctggaggcctttcatccttggaagctggaattattgcatcttttcatccttcttaaagaggggaatgttttcacccttacagttaagttgacagttcatatgcgatgtttacttgactttttatatctggttacaataaatgtataggctgttaacacataataaataatgactcatatatttgatttaaaatttcctggattatctataatcagaatttagaatttctctcctagaagtgtggcragctgaagctattagagctgtggcctttacaatcctttaacggaataacccatctcctgttgctgatctgaaccgcataactggctaaactagtgcaggcagcatgattcttcacacacaaccagatgccagaaagaagaaaaccacaaaggggctgaaaaacacagcatagagcccagaagcaagagggtaaggtggggcagaaaccaaccagcagtgattggaagggaagattaagtcaggaggcagggctcaaagggcatctgaaggtgagaggcagcagcccgaggatgcctcaggagtctgcgttgtacaagaagctggacattagagataggtcgcaggtcaaaatcagatagaattttgcgatcagagcagacacagcaaaccagaagcacttgaactgttcaaatagcacc

SEQ ID NO: 693511 - DNA, 573 bp, Homo sapiens
aagccgttctaagatcataaagtcaatcaggtataacatggaattgatcctgtttatggtagagtagagatggaaataacctgagttcttgatgacaaagtggagcatcttaattaagcaagcatgaaagcactcctatctctgaacttattatgtgacaaaataaattttatttaacgtgagtttaggcagaagttccatttcttgcaggtggatacttccttaccgataaagtctggattccagagttaggaagcagacaactcaaattggaaccattttaccactcrgaacctagtatagtgcctgtaatgaggttttctgtaatcagtaatgacaatacaacaaagtattagtccctggcactgtgtgtcaaggcctatactaatgttttacatgagctatattcctatgctagccttactaggtggatataattattgacagttttcaaatgcaaaaattgaggcttcaggaagttaaggaaattgtgtaagatacacagtgattaagaggattggtctctataggatatcaccttcaattctccactctccctgagagttagaatac

SEQ ID NO: 693512 - DNA, 613 bp, Homo sapiens
gaggatttttgcatctattttcatcagggatattggtctgtagttttctttttttgttattgcccttcctggttttggtaatagggtgatattggcttcatagaatgatttcaggaggattccctctttatcttttggaatagtttcagtaggattggtaccaattcttctttgaatgtctgatagaattcagatgtgagcccatctgtaccagaatttgttgacatttttattattgattaaatcttgctgtttgttattggtctctccagagtttctatttcttcctgagatcagagcagaactaaatgaaattgaaaccaaaaaacaaacaaaacaatacaaaagacaagtgaaacaaaaactggatcttggaaaaatacaactgatagaccattagaaaaatctagaggagatggatacattcttgcaaatatacaactctcccagattaaatcaggatgaaatgcatttttttattttctaaatgtcttttggttagcagaattttaaattttttatgaaacctaatttgtcatttatgtgatggtttgtaccatctgtgtcctatttgtaaaaactttatcacaacatttttycttttcttttatcg

SEQ ID NO: 693513 - DNA, 857 bp, Homo sapiens
atggtagaagggtagattttggactagatacaactgtttattaaaaaaattccaatttggctactaagaatgaagcatatatttcataggaatcatgtccttgtatgggccacaatgtcagtgttaatttttacatgttattataatatatgcatgcaatggttttaaaattgtcccttaacaatattatgtgttagtaaaacataatatttatttatccattatgttgtgcaaaactacctttggtgtatctatagaaggatgtcagaaatactttataggatttaaattggggcaaaaccgtttgtttcatttcttctattcccttaacaaagataaagtgagtttgtttgaactggaacatagttaagtgttgataggccatgtcagtcttctgtatgaactcctcacccccaccaacttcctgtttctctgaagtgcatgcatacagtgwtatatgttttggttttctaagaagggaaaggaagcagaagaatacagaatgagcttgtgagttttgaaactttgggacaaacatggaagttggtgaaaaaccatttgtcagtttgcttgacaggaaaaaaaaatgaaacaaatgcatgcatggacacaaaatggtgtatctagtgtctgcatagggcttcctatgtgctaggcactattacaagtgtttacatttgttaacacatttaattctcatgaaactaccacaacaaaaactatttttatccacatcttacagattatgaaactaaggcacccggagataaagtaacctcctaaaggtcaaaggtcacatagctatcaaatgtgagagctggtatttgaatacaagcagtctggctttttttaaattt

SEQ ID NO: 693514 - DNA, 857 bp, Homo sapiens
atggtagaagggtagattttggactagatacaactgtttattaaaaaaattccaatttggctactaagaatgaagcatatatttcataggaatcatgtccttgtatgggccacaatgtcagtgttaatttttacatgttattataatatatgcatgcaatggttttaaaattgtcccttaacaatattatgtgttagtaaaacataatatttatttatccattatgttgtgcaaaactacctttggtgtatctatagaaggatgtcagaaatactttataggatttaaattggggcaaaaccgtttgtttcatttcttctattcccttaacaaagataaagtgagtttgtttgaactggaacatagttaagtgttgataggccatgtcagtcttctgtatgaactcctcacccccaccaacttcctgtttctctgaagtgcatgcatacagtgatatatgttttggttttctaagaagggaaaggaagcagaagaatacagaatgagcttgtgagttttgaaactttgggacaaacatggaagttggtgaaaaaccatttgtcagtttgcttgacaggaaaaaaaaatgaaacaaatgcatgcatggacacaaaatggtgtatctagtgtctgcatagggcttcctatgtgctaggcactattacaagtrtttacatttgttaacacatttaattctcatgaaactaccacaacaaaaactatttttatccacatcttacagattatgaaactaaggcacccggagataaagtaacctcctaaaggtcaaaggtcacatagctatcaaatgtgagagctggtatttgaatacaagcagtctggctttttttaaattt

SEQ ID NO: 693515 - DNA, 610 bp, Homo sapiens
agacatttggattaacataatttctaccttttcctacctttgtatgcacaattcacatctcaatctgccaatacaaacatccttcacatttttagattaacttgcagacagaggctgaggaaatgcctgaaaacatagaacttacttgcactacactgaaagaatttatttctgatgacaaaactaacaagtgttcattgtagaactatttcaaaacaccagaaaccccacatacacaaaagatattgcctcagacaggtcacatcactggaccccttgcaaacattccccagcaccakcctggagtgttgcagcttcactgggtagctagacccagaggagcaacaacactcacagtactctagaggagggaggagtgcaccacatgaagggaacaccatgtgggacaaaataatctgagtggcaggccttgagcactaggtctttctgctggtggaaagcttctttcagcagtggcacagttaaagtgctgggttgagcaggaaaagtcttcagctctaccccaacagttagaaagccctggtgcatgtgaagggtcttaagaagaggaagtctttcccaccttgtccaccatcataggcatcaaaac

SEQ ID NO: 693516 - DNA, 600 bp, Homo sapiens
ttccttccttccttccttccttccttccttccttccttccttccttccttcctttctttctctctctttttctttctttctctctctttctttttccttcttcctatctctctctctctctcgctttcatttttttaagtcacagaacaagaagacacagaaggaagaaatcatcctgaaagtacttgtaagcactttactaacccattaagtcattgcttttctgaaaggagagctctggaaatgataataatgaatatttgcataatgctctaaggcttaccaaagtcatgttggaatacaccgccttgattttcctcctagggaggaatggatagtttgtctaaggcatggatagtttgtctaaggtctcaaggcagggagctggrtgatgtaaccaggactggcacccaaaactgacttcacatcccatgctctatttcaatcccatacccaatcctcttttcttttggctccctctccccaaaccagtgtgcctacagcagagctcagttttctttgccaggcatttctgacccttctcaattggccccaagctggagaattcagctgccaccaccccaccaactatgcccactc

SEQ ID NO: 693517 - DNA, 1479 bp, Homo sapiens
acccccaggcatgagctggaacctcactcatcagccatgaaaacgtggccactcatttttctcagtctctgcttccttcgttttcaaaatggggctaatttatatgaattttcaatatactttatattcacatttaaagaacagctgacaatgatgcacatcactactgaccatgactgaaaacttcaaatttgactctgaaacaagacacagttgactaacaagacagagaattattcactttattatgcatgcaattgagcaggaaaatatataatggaagaaactgggtaagaggcagcaaaagtgtgcagtcaaaagagaactcatttaatcactgaagctatttaaatatactttggagaacttgtaggacttattaaactagatctagacctagatcttgatgtctaaatatatgtcaaatgttatgtttttaatttttccagacacagattaacattctttgatatctgccttgaatcatggaattggaatattgggaaaaagtattagtaatttcaaaaaataaactaaacataactgctggaaggagtacttgaaaattctgatggaagtcataaattactaatatatctccttcaagctacactggcatagactacagccttatttaggtctctccaaagaatcctacagtggtcactggtgcccacatgctttcctgttaagtagggtatctacaagtactgttaaaaactttttttttttggctaggtgtggtggctcaagcctgtaatcccagcactttgggaggtagaggcgggcggatcacttgagaccaggagcttgagaccagcctggccaacgtggtaaaacctcgtctctactaaaaatacaaaaattagctgggcgcggtggcacatgtttgtaatcccagctactcaggtggctgaggcacgagaattgcttgaacccgggacgttggggttgcagtgaaccaagatcgcaccactgcacttcagcctgggtgacagagcragacgcctgtctcaaaacaaaaaaataaaacacaacacttttttttttgttttaaatctaagagaaacctaagctaacacaaagctccggaccacgtttttaggcacaggagctgaaacacgtgctttggcgcctgagggcctggcttcctgactggaacactcgatgcgtctctctgggcatcagtttgcctgcagtaaaacaggggttttatgtaccacaaagggatatgagggctacatgcgaatgatacaaacctctctgcacaatgcctggcacatggcaagtgattaacaaaacagtaaaacatttaaaagagagttgttattattattctttttagctttcctgtgacattagcaatgaaaccttaatatgtcataaattgataaagctagaagtaatgaaaacagtttgggaaatcattaaataaaataaatatttcacttattaaccttgtaaatcaaaaatcctttt

SEQ ID NO: 693518 - DNA, 1200 bp, Homo sapiens
aggttcctcattttccaccattccccaggtgatgtctgatcaccttgccctgccttcagcaagaatcttgttagatgggtttaagcgagaatcctctcatctctgatgcagtttcctatgcactggcgctcaatcagtggatcctttctccttcctcataaattcccagttgcccatgctgatttctgaattgagcccaaatactctccctgaccgcaaaacccactgcagtggtccctacacccatcatgatgccaataaagtcggccttgtagtctttaacaagtgtcattcaatattttttttaacatcctatacataaaactccagccaagtgaggtcctgattcttctatgtgtctccggttcccatctatgagaagggcacaacgcaaccagggttttgggcagccttccatgaaagcacctggaagccggagaaggggggcggggggacttttgacacagatggggaagggcggaggcgctgggtttgagcagcatcagcccagaaatgcagaactgccaaaagaaacccccctaaraggcaggacacttttaaagaaaataaaggtgaattccaggcatgagctttcgacggggaatggggcttccccgactcgcccccacgccccccgcccttctccccaggtgcgcagcccgcgccgcccaccccgggcgcggcgaggcgacgggagccgagctctctaggacccgaggaggaagagctgcagggagacagtgcctccagcgggtgctgccgcgagcggccagccgaggggctggaaatgaaagtaaagcgctccagagccacatggacggagctgccggggcggcggcgccgggagcaggatgcggccgcccgtaattaaatagcatttactcttattattactaataataataacgtaatcatacctctagtcatagcataccatttatcgggctcggcgcaggcccgcggggagcgcagcccggcggaggtgagtgcttggcgcggcccgagccccgcggggcagaggccggggacactgcgtccggagccgcccgcgcgcgagggttcggggacgcccgggccgggcagggctggggaagaggcgaagagagccctttccaggccggggccgcgcgccgggccacctggaaagtgggattttgcaaaaaataaatcgtctctaaaaccccatttgctcctttttgg

SEQ ID NO: 693519 - DNA, 957 bp, Homo sapiens
caggggggcgtttccggtcgcaggatcagtctctggacttcgaggcctgtgggaggcccgcggccgtccagggagtgctagggggctgcggaccccggctctggcgcctggggacgggggcgccctgacggggctgggggcctgggagccgccgactccggcctcatacccccatcctgcccgctgcgaacctcagggcccccctccgggtttgctccctcctcctttcccctcctttctcctcaactctgtctgttttaggcgtttataaggcgcctggttggggggactttcacagacaaagccgtcttcccaggggggaaaataatcatataaaaacagctcactctgatagaacctgatggctgtattgccaacagggcattgacggggaagactagggggctagggccctgcgtggggagtctgggggctctaaaagggggctgggcctgagtggggagctggtgatcagcggttttatttctcgggttgctagctttggcatcagactttgaaccccaacttcttgccatattcctcagcatctgcagttcagcctgatgaaaatagcagaatgcagatccttgaattttcacacaaatgagataattatagtacatgtagcaactgtgttggacacaaaatgctggcagaatctttagttctactaccaatacttcctctacacacatacagccatcccctccgtggtggtcttctttccccgtgtccacctcccacagaagttggactgcaaggtggaaatgacacctggtcaacagttggatgsagcatgtttgagaagtggggagacttaaggtgggaagaaagaacctgtccaggagggatgagatctgaggatgggagagagactttgttgtccctgagctgggataaagtttctgttctgtagatgctgtgtgttcttagctgctggcttttgtataggttaga

SEQ ID NO: 693520 - DNA, 1400 bp, Homo sapiens
tctaattttaccatggcttacttttttcccttttaataattaaacctttaatccaattaaaatcagtttttgatgcatgacgtcatgagtaggtgtaattagattctttctcccttttaataattaaatctttaatccaaataaaatcagttttttttggtgatttttttggttttgttttgttttttcttgagacagtctcactctgttgcccaggctggagtgcagtggcaagatatcggctcactgcaacctctgcctcccgggttcaagcaattctcctgcctcagcctcccaagtagctgggactacaggcgcacaccaccacacctggctaatttttttttctcttttagtaaagatggagtttcaccatgcccaggctggtctygaactcctgagctcaagcaatctgcctggcttggcctcccaaagtgttaggattacaggtgtgaaccactgaacccagaatcagttttgatgcatgaagccataggtaagtgtaattagattctctctctcctcaaataatactgcttaaccatttttgtgtttcttatttaccgcatacattattttctacaggaggatcaagttcagggatatcaattgtttctatagctgtctctttttgaggcattctgtactgtttcaattatgttactctagatggaaatatttagatattctgtttccagaagccatgtgaagtatgcttgtgaaaatatttaaagagaattatctttgatgtaggtaagcgaatcttgtttgtgctactcaaatgaccagattaatctgattaatgccctccttcacttgaaattcaaaggatccattttccaatttgcctacaagtgttggggtatataaatagaatgtaactctaataatcatacagaaaggtaaagtaaaatgtcagagtcaggcagctcagctgagttggtggctcactgtttcctgaagatttttattcattgagtccagggtagaacttgagaatatttatttatttttttttaaaaaaaagctctctcaggtttgcaaaccactgggctggtttacaaattaaaactgcagagataaactacctaaaagccattttccacatgtcaccaactttcagggtccctcacaaataacccaaactgagaatgttaaatctcccttatgagggttagaagtagataactggccaagtcagtagagacagaatttgaagaataagttttccaaattcaaaacttagtggtgttaagtaactattttatccttattcatagtttctggaaatcagggtttccagaggggcttggttaggcaatttttcttcacatagtcttagggcctatccacgtggtctctgcacaggctgtggagagagggcttcctcacttcatggc

SEQ ID NO: 693521 - DNA, 629 bp, Homo sapiens
ttaacctggggttcatgaacttggatggaaaaaatttactcctttattttcattgacctctaacttaaattaagcatttcttttgatcatgaatgtaggcaataaactacagtagtgttagcagggcctgctacattgtcaccaatagaaggcacagatatttctatttgatatcacactagagttgctgctgcagatgtcttgaattattgtttgcacacatcattactctgaaattatggaggttttaggcttgccactagagcttgttatttaatccagtattaaagaggcatatatatactatatcacatacttgtcttaatattttgataactatatttcaatataactggtcttctttataactctctcatattttacatttacaaagatttttctgagaagartctgtaggattctccagatggccagagaaatctacaacacaaagaaaacttaagaatcctgttttaaagaaagtagccaacaacttgggtgaaaagctcttttaagggcatattaagaggtgagtgctttctttgagtcagccatagtgctgaggactttatatatatcttcatttaatcctcccaacacccttagaagtaggtattattatttattcc

SEQ ID NO: 693522 - DNA, 723 bp, Homo sapiens
agaatgaatgagtcttagcttggaagtcagaagatttggggttgtcttaagtccaagatagggaaacggaatgattgcctggtaaggtaacgatctctacatcactggaggtatgtaaaccaaagtgtgaagttgccagagagaggcatcttggctgtgggagaaaagtaggtcaattctggtacgatcgtcccctcctgggacagtgagacaagcttcccaggaccagctggggagccctagagaagcccggcactggcaatgtcctgagagtccattcctggagccaagggacccaggcttcctaccgtgtatgtccatttcctgggcaaggcactggatggcaggacyttaagcagaggcaggaaagggcaacttccagcctcttgcagaaggcctgattgcgggggcagtcagttgggattgctcagccctgaagcagagactgagaaccccgcctgcctgtgtgaccaccatccatgtccactccctctctgagcttcagtttctccaccggtaaaatgggaagagaatggaccagagagtatttttctcccattcccaaattacagagtttttttttttttttttaagacaggtcttgctgtatcacccaggctggagtgcagtggtgtgatcatagctcactgcagccttgacctcctggactcaggtgatcctcctgccttagcctccctagtaactgggactataggcacaggc

SEQ ID NO: 693523 - DNA, 723 bp, Homo sapiens
agaatgaatgagtcttagcttggaagtcagaagatttggggttgtcttaagtccaagatagggaaacggaatgattgcctggtaaggtaacgatctctacatcactggaggtatgtaaaccaaagtgtgaagttgccagagagaggcatcttggctgtgggagaaaagtaggtcaattctggtacgatcgtcccctcctgggacagtgagacaagcttcccaggaccagctggggagccctagagaagcccggcactggcaatgtcctgagagtccattcctggagccaagggacccaggcttcctaccgtgtatgtccatttcctgggcaaggcactggatggcaggactwtaagcagaggcaggaaagggcaacttccagcctcttgcagaaggcctgattgcgggggcagtcagttgggattgctcagccctgaagcagagactgagaaccccgcctgcctgtgtgaccaccatccatgtccactccctctctgagcttcagtttctccaccggtaaaatgggaagagaatggaccagagagtatttttctcccattcccaaattacagagtttttttttttttttttaagacaggtcttgctgtatcacccaggctggagtgcagtggtgtgatcatagctcactgcagccttgacctcctggactcaggtgatcctcctgccttagcctccctagtaactgggactataggcacaggc

SEQ ID NO: 693524 - DNA, 1575 bp, Homo sapiens
taatatgtcttttaagtggagatttccccaggcaaaggagaatcaaatttcttatttctcttatcctgtgaggccatggagccttcttctttctacctacctctttttataaaatatattgcttccttaaatattcaactattaataatatggcaagagtacctcttatgcactaggaccattgcttcccacgtctccttagggaagcacaacttttctcctctctcagatattccacacaaaggggtatgtctacttctacttctccctccttcttccagccagatttgttagaagtgggtggtgagagaactgggctctgttttgtacaataacaaagaaactaaaggaaaagaatgaatgtatgaacaaataaatcctcagctatcatctactttttttttgtattcttcatagactaaataatgttcatttattcatccattcattcatcttttcagtaaaaaatgttgttgagtgtgtattatgaaaacatactgctcaaagggttggggatacgggcaagaggcttacttgcatgagcttccattctaaagggaagaaaaatatgccaaatatgtaaacaataaacaaggtggtcagggctgtttcctttgtcccctggaaaaggaagattctcccctatcttacctccagagatttattactgcctaaaccctataatcatccttctagacttattttagagaatactgttggttggttagtttgttttcactgcaaagcaaaagaatgaaccagaatataaataaatacatacatacatacatacagtagactctgtctcacctgcatttaggtgtggcccagtgagtaaattctgatcatcagggaatgggtcaaattgttttgtgcaacttagtgatcacaccttcaaggtgaaagtgttattttcttctgaggcctggaatacagacatagtggtgtaccgttttgggctatgtgcatggggataaaatcttatgaatgatgaagaaagaatatggaaaaagcctggctccctaacrgggatcaccatatcatcttttgattgtttattcttctacaattacatgtgggagaaataaataggttcttgttcaagtcattattattttgggtccccaatatgcagctgaacataccctaactaacctatacactcctgccctgcatgactctaattcatggacctcttttcaatttctatgaaatcacaaaatattagaagtgaggaataccatagaatcactattcatggttttcaacaacggtacgcagaagtagtaactctgcagtgatcatgtagaaccaattttctctcatctccatatccacctgcattttgatgtacagctctccctcagtgtctatggggcatttgttcaagatccacttccaccctaaataccaaaattcatggatgctcaagtcctttatgtaaaatggcatagtctttgcatataacctacacacatcctcccgtatactttagatcatcactagattacttatacataatacaatgtaaatgctatgtaaataattgttacaatgtattttaagacttgtatt

SEQ ID NO: 693525 - DNA, 2984 bp, Homo sapiens
ggggttttaccatgttggccagggtgatctcgaactcctgaccccaggtgatccacacaccttggcctcccaaagtcctgggattacaggcgtgagccaccacacgtggtgacctggaagattttaaagtgcttttctaatgctaaaagttgaggggaaaatgtatttggtcatgcagttcagctcacaggcctgatcccagagagctgcaacagcataaaccatctatggcagttttaaaacatagccataaatcctgtgacactactcccagtaggatgtgcacctatggtccctccccgtgaaccagagggacttatgactgctttgaccaatagagtacagaagtgacactatatgatttcctaggctatatcataacatgccatgaggcatctaccttatttaatggagccattgtactgagagtcaggagactgctattaagaaactctaatgctctactaacctgagaccacaatgctggaagctatatgtaggtgttctagctgacagttgcatgtgagccctgacttcaaccagaccaacccaggcaccagaaataagaatgaagaagccatcttgaaagtggattccccagccccagccattcaagtcatcccaggtgaggtccccagatgtcatgaagcagagatgagctgtctcttctgtgactttcctaattcctgacccactgaacttgtgagtgtactgaaaggggtgttgttttataccagcaagttgtggggtggtttgttctgcagcaaaaaagagataatcagaacaccatctgacccaacagctcatttctcaatgctctgaacttgttgatggaaatgcactttgattttcaaagtcagaagttccatatggaccattcagaaagtcatatctgacccagatactttggctgagtaagaggctaggcttgctagagacctggacttcagcgtcctgataattttggtgtcccatctgttcatttattagtagttattgcattgccaccttgtgccaggcactgtgctaggcatggagataccacgataaacaaaatggacatcggccttgcccacaggagctcacactccagtgggggagacagataycacataagaaattttaagttaaaaatggagatgcacagccttagggtcatctaaccatgtgtggccaagggagcaggactggcctaagaaggtgaccatccgagggctgaacaacagaggcagtgcccatctgatgtggaagaggcagagacaagaactgcaggcagagagaacagccggaggggaggctgtgctgagagaatgcatgaggcattcaaggacacaacagatatctggtgtggctggaatgaagacactgaggcagagtggtgagaggagatgctggacagggctgctgggtggaaatggatgggttatcccagcctaggtccccatccagccccagtcccaaactgctggccagctgaccacgtctgcttcttggagtcccctggctttcctctcatctctgactgttccttctccgtttccttggctgccttctcgttctccaatcattgccacatgtgagcattccctcctcacaaaacactcatagttctcagttgctcatgcgctcttctgataaccccaaaatattaagttgaaacacagggaatggcaatatttgaccatgtgtgacttaagaaaaaacatcacccagcaatttcaatggttcagcttaattttaagctattgcccctttcaagttatcttctgcagtgtcccaatcagcagagaaagtcttgactttattattttctgaggtttgtcattttcaaatctttccaaatatgaaattatataataatttcaaataaaattatgtaatctgaaccctttgaattccaccatgcccctctaaccacacctcccaaggcctcaaccccaactcctagatatgagacactgctccattttggtccagagggttctcaccaccctcatcttttcagactcttccacatccactggaaggttcctaagaacattaaaagtcttagagggaattgaggaaaacagcaggttggagaggttgaaactcagaatgaaataagtttggagatgatcccagcaattgctgagaatggcctatggcaggtgtccaaggtgcccagaatctaaatctgaaaggcccatgcatttatttctgccctgaacccaagaatacgatagaaaaacacaggggctaaaaaggctctcaggcttacttctccaaccagccagccagaccctgcctgatacagatagggaaactgaggagacctagagacaaaaagggatacacatcagaccttgccttgaggttgagcttagggctagaaaccaggtgtcccagtgctccatctacccctccactcctgcagagtggggcaagagtcctgagtggccagctggccatgtccaagcctgaggccagacactgctcacatgcactgctgtttgctcaagggaacaggcctgtggccatctggtcacatgtcaggcattggagtgtgaatggccagacagaggcataggtgtgggggtggatcgcaggatggagggtaattttttaaactgctctgcatcactgtccccagagatactgagaaattgggtgaaagcgcaccatctctggagcctcagccacctgggtcagggatgcggcatactatgccccctggtcaatcctgcacctttccaggcctgggaatcctgggtttttgtcccaatgtgctagagactcttgtttgtccctagcactggcccactcagaggtgaaggattgttctgggccttgcaagagctagtgtggtaaggacaggctggatctgactctttctctctctctctctttctctgtatgcgtgtgtgggtctgtgtgtctgtgtaggtgtgtgtgtgccagagagagccacagagagacaggcaccaagtgcagctccaccgtcc

SEQ ID NO: 693526 - DNA, 2984 bp, Homo sapiens
ggggttttaccatgttggccagggtgatctcgaactcctgaccccaggtgatccacacaccttggcctcccaaagtcctgggattacaggcgtgagccaccacacgtggtgacctggaagattttaaagtgcttttctaatgctaaaagttgaggggaaaatgtatttggtcatgcagttcagctcacaggcctgatcccagagagctgcaacagcataaaccatctatggcagttttaaaacatagccataaatcctgtgacactactcccagtaggatgtgcacctatggtccctccccgtgaaccagagggacttatgactgctttgaccaatagagtacagaagtgacactatatgatttcctaggctatatcataacatgccatgaggcatctaccttatttaatggagccattgtactgagagtcaggagactgctattaagaaactctaatgctctactaacctgagaccacaatgctggaagctatatgtaggtgttctagctgacagttgcatgtgagccctgacttcaaccagaccaacccaggcaccagaaataagaatgaagaagccatcttgaaagtggattccccagccccagccattcaagtcatcccaggtgaggtccccagatgtcatgaagcagagatgagctgtctcttctgtgactttcctaattcctgacccactgaacttgtgagtgtactgaaaggggtgttgttttataccagcaagttgtggggtggtttgttctgcagcaaaaaagagataatcagaacaccatctgacccaacagctcatttctcaatgctctgaacttgttgatggaaatgcactttgattttcaaagtcagaagttccatatggaccattcagaaagtcatatctgacccagatactttggctgagtaagaggctaggcttgctagagacctggacttcagcgtcctgataattttggtgtcccatctgttcatttattagtagttattgcattgccaccttgtgccaggcactgtgctaggcatggagataccacgataaacaaaatggacatcggccttgcccacaggagctcacactccagtgggggagacagataccacataagaaattttaagttaaaaatggagatgcacagccttagggtcatctaaccatgtgtggccaagggagcaggactggcctaagaaggtgaccatccgagggctgaacaacagaggcagtgcccatctgatgtggaagaggcagagacaagaactgcaggcagagagaacagccggaggggaggctgtgctgagagaatgcatgaggcattcaaggacacaacagatatctggtgtggctggaatgaagacactgaggcagagtggtgagaggagatgctggacagggctgctgggtggaaatggatgggttatcccagcctaggtccccatccagccccagtcccaaactgctggccagctgaccacgtctgcttcttggagtcccctggctttcctctcatctctgactgttccttctccgtttccttggctgccttctcgttctccaatcattgccacatgtgagcattccctcctcacaaaacactcatagttctcagttgctcatgcgctcttctgataaccccaaaatattaagttgaaacacagggaatggcaatatttgaccatgtgtgacttaagaaaaaacatcacccagcaatttcaatggttcagcttaattttaagctattgcccctttcaagttatcttctgcagtgtcccaatcagcagagaaagtcttgactttattattttctgaggtttgtcattttcaaatctttccaaatatgaaattatataataatttcaaataaaattatgtaatctgaaccctttgaattccaccatgcccctctaaccacacctcccaaggcctcaaccccaactcctagatatgagacactgctccattttggtccagagggttctcaccaccctcatcttttcagactcttccacatccactggaaggttcctaagaacattaaaagtcttagagggaattgaggaaaacagcaggttggagaggttgaaactcagaatgaaataagtttggagatgatcccagcaattgctgagaatggcctatggcaggtgtccaaggtgcccagaatctaaatctgaaaggcccatgcatttatttctgccctgaacccaagaatacgatagaaaaacacaggggctaaaaaggctctcaggcttacttctccaaccagccagccagaccctgcctgatacagatagggaaactgaggagacctagagacaaaaagggatacacatcagaccttgccttgaggttgagcttagggctagaaaccaggtgtcccagtgctccatctacccctccactcctgcagagtggggcaagagtcctgagtggccagctggccatgtccaagcctgaggccagacactgctcacatgcactgctgtttgctcaagggaacaggcctgtggccatctggtcacatgtcaggcattggagtgtgaatggccagacagaggcataggtgtgggggtggatcgcaggatggagggtaattttttaaactgctctgcatcactgtccccagagatactgagaaattgggtgaaagcgcaccatctctggagcctcagccacctgggtcagggatgcggcatactatgccccctggtcaatcctgcacctttccaggcctgggaatcctgggtttttgtcccaatgtgctagagactcttgtttgtccctagcactggcccactcagaggtgaaggattgttctgggccttgcaagagctagtgtggtaaggacaggctggatctgactctttctctctctstctctttctctgtatgcgtgtgtgggtctgtgtgtctgtgtaggtgtgtgtgtgccagagagagccacagagagacaggcaccaagtgcagctccaccgtcc

SEQ ID NO: 693527 - DNA, 622 bp, Homo sapiens
cattgagccccagggacaggtatttgttctcagggaaagcagagcatcagaggagaaggggaaaaaaatccccaagtgagcaacagctgacctctgtgagttattgagaaagtgccgaggtggcaaggctggtggtgacagggccccaggggcctaaaagaaggatgcttatctgattgggagtgcatgcgggcagattctacctagagatagttgcggctgggctgtctgggaagagagggcaaagagaggccccagctggaataggctaccagtccagaaagaagttcccagcattagagcttgccacccaagaagcttcagacctgagcaagccaaatcccaaatccccataggccatgccatcagccgtggcctctgttctaaggaggacacacagaataccgggtgtaggaacagatgyctgtctatgcatagacatggacagactttgtctctaagtgggtctgtgcttgtctgcaggggtgtgtgtgagtgtgtgtgtgtgcatgtgcacgtatgtgcccacacagcatctgagagtgatgtgtgggacagtgtctctctgcagttgtgtctctctgtgaggatgagggtgggtgggcatgtgtatgagtgacca

SEQ ID NO: 693528 - DNA, 1472 bp, Homo sapiens
tgtccgcaggctgcacacatgtgggcttaatgccacaagtgagagtcctgcatccctccctggtctcactcatgggcacacagggtgtcacacctgcacattcaccaccatagatatccgtgctcctccccatgccggcacagactcacacatacacacgcacaaacagccagatatcagccatgkatacaaccctcacagtcacaggcactcacacgaatttctcaccccttcacacacccagagtctcatgatggagacagcacatgggaatggagcaggcagggaatggagcgggcagggaatgaagcaggcagcagaggaaagccctcccagacagagtcctcaacagcaccaaagaaggaagccctcatccaagatgcaagtgaggagagaaggcgaaaaggacttccaggccagaggctacagcaagagggagctgaccgggacagggcaaggaaggtcagaaccctggccaggaagcagcctgggttcacagttaggagagcagagatctcagggaacagcagagtggcaggcctcgtggaatgatgatgcctgcccaccaacaccatactgtcctgaacagaaacacacacatgcaggctctctgtcaacctgcaaggcacgagggccgtcactagtcaaaacatgcttcagggtgaggaggtctgctccagctctgttgcaaatggagggagtttctgctttcatgcagtgcagtcaggggatgggagttgggtttagcttggggctaatcttgtacctgagttcttctggtcataaaacatgagggtgtgtctttttggggacatggtgagccatgtgcctgctttccagtgcatcagatatgtcttgccaatctctgagggcaaaatgaaatgtcttgggagagcaaacagccgcctccctcctgtgccaggagagcagaatcattttgctctgtctacacaagcattcctgtcctctccctgctgatggccttgggagataatgtgttccatgtgtgtccctgagtacggggacagctgtcgtaaatgtagtgggagctgcaatggcctatgtgtctggatgaagtgggttccatgtctttccaggttgcagactcttgagggaagcaggatcccatatcccagggctgtaatgtcagagagggcctgccagggtcagtatttgcctcttcacccagctctgggcagagcctgaagggctggctagcagactccagccatggaaggtagagctggaattagttcttctgctctaagaatggagtgtggggcctacctggctggacatggagcttagtttttgatctgcacccaaggtcccagtgcaaaacacagggcactggttttcacgtgtgtcttatctggttttcccatcagagcacacaactttgtttatgagaccgtctgtggattccaagatgggcaatgatagaaatgagcagagctaacatttattgtgca

SEQ ID NO: 693529 - DNA, 1472 bp, Homo sapiens
tgtccgcaggctgcacacatgtgggcttaatgccacaagtgagagtcctgcatccctccctggtctcactcatgggcacacagggtgtcacacctgcacattcaccaccatagatatccgtgctcctccccatgccggcacagactcacacatacacacgcacaaacagccagatatcagccatggatacaaccctcacagtcacaggcactcacacgaatttctcaccccttcacacacccagagtctcatgatggagacagcacatgggaatggagcaggcagggaatggagcgggcagggaatgaagcaggcagcagaggaaagccctcccagacagagtcctcaacagcaccaaagaaggaagccctcatccaagatgcaagtgaggagagaaggcgaaaaggacttccaggccagaggctacagcaagagggagctgaccgggacagggcaaggaaggtcagaaccctggccaggaagcagcctgggttcacagttaggagagcagagatctcagggaacagcagagtggcaggcctcgtggaatgatgatgcctgcccaccaacaccatactgtcctgaacagaaacacacacatgcaggctctctgtcaacctgcaaggcacgagggccgtcactagtcaaaacatgcttcagggtgaggaggtctgctccagctctgttgcaaatggagggagtttctgctttcatgcagtgcagtcaggggatgggagttgggtttagcttggggctaatcttgtacctgagttcttctggtcataaaacatgagggtgtgtctttttggggacatggtgagccatgtgcctgctttccagtgcatcagatatgtcttgccaatctctgagggcaaaatgaaatgtcttgggagagcaaacagccgcctccctcctgtgccaggagagcagaatcattttgctctgtctacacaagcattcctgtcctctccctgctgatggccttgggagataatgtgttccatgtgtgtccctgagtacggggacagctgtcgtaaatgtagtgggagctgcaatggcctatgtgtctggatgaagtgggttccatgtctttccaggttgcagactcttgagggaagcaggatcccatatcccagggctgtaatgtcagagagggcctgccagggtcagtatttgcctcttcacccagctctgggcagagcctgaagggctggctagcagactccagccatggaaggtagagctggaattagttcttctgctctaagaatrgagtgtggggcctacctggctggacatggagcttagtttttgatctgcacccaaggtcccagtgcaaaacacagggcactggttttcacgtgtgtcttatctggttttcccatcagagcacacaactttgtttatgagaccgtctgtggattccaagatgggcaatgatagaaatgagcagagctaacatttattgtgca

SEQ ID NO: 693530 - DNA, 623 bp, Homo sapiens
tatctatattttcttacttaaatatccagcaaactgtatgagttagttattattttttccattttgcaagtaaaaatacagggaagttgggtggaatcttgccttgcaaaaggacacacaaacagttagtggtgagctggtgtggaagacaggctgtgtcccagagatacccacttatccactatgccccagatgcgattattagcccagccctgtaagtctgaattcccaactccctttattcaagcagcactttctcattgtttgctgtcatctcctgctgcttttgcttttattttgctatttttatttcgagttttgttggttaattttatgagttaacttgactgcatcaggaggtgcccagatcaaacattacctctgcgtatgtctgtgagagagtttctgcatgagattagcctttgaattgatggacttagtaaaatagatggccctccccsatttgtgtgggcatcatccaatgcactgagggactgaatagaacaaaagggaaagggaaataaattcaccccctttttcctgcctcactacttgagctggggcatctcatcctatcttctcctgccgttaggctgaaatttacactatcagttcccctagtt

SEQ ID NO: 693531 - DNA, 1465 bp, Homo sapiens
tcatcacctcaaggagtttcctcctaaatcttcataatcaactccccccaccctttggccttaggaaaccatttatttgctttctcactcaattgttttgtcttttctagaattttatatagatggaattatacagcatgtactctttttaaaactgtggggtgaaatcaatttaatgtgttgcaaccatcattctctaaataagacagaaaatatcagagtgaatcacacttgataatggtgagtatgttttgtgaaactttgttttcagtgtgtatctcttcatgtatatttctctgtgtcctgaatcataatataagctctattcatcactgataaatggaaacaactttcacctattatttgagccagtttttttttttttttttttgtccagaggactagaaattggaatgacaagagctgatatatcattgtgtgttctcctttgtgccacagaaggtgatgaggaattatctcatttaatcctccctacaagcctattaggaaagcacatctgccttttacaggggaggagcctgaggctcggggaagctaagttcaagttctcataactggtgagaatagaagctaaagttgaaaccatgggcagttaagaagcagcctggacatgtggctgataagactggagaaggggaaggattggcatacaaatataactatgtattctcttggctgttattagattatcaaattgctaatggacaagtactaagtactaaatgccaatcccgccacaggatgcggcaagtcagagcaggcagaaaggtgtgttttctgcccacagataggatataaagttgtccagaactgggcagcaaagagtgtgggcttgggtgatagacccggactccagttcctgttctgctgcttacaggttccttgacccttagcgggacctcggtctctctgaggttcaggttcctactttgtaaaatagtgatttgtaggactttgtgaggagtcagataaggtgggctttctccccctcggcattattgatcacctgagctggctcattctctgcggcgggggctgccctgcgcactgcagggtgcttagcagcatctttggacttcacccactagatggcagtagcacccccaccaggtataatcaccgtaaacaaaatttccccagttgaaaactacaaaaataactcatgaataaaatgtcccttcccgrctggctgcaatggcttgcacccgttgtcccagctactccagaggctgaggaggcaggatggactgaacccaggagttgtgagtcttgcttgggcaacatagtgagaccctgtctctaagaaaagagcaagaaaaagaaacaaatacagtgtctacatctacaagtcacatggacaaatgggatcatatcaagttaaaaagcttctgcacggccaagaatccccttctcttttaccgtcataaaatgaaagttctgtcgc

SEQ ID NO: 693532 - DNA, 630 bp, Homo sapiens
tgcatccatgttgctgcaaaggacattatgtcattcatttttcatggctgcatagtattccatagtgtctattaccacattttctttatccagtccaccactgatgggtayctacattgattccacgtttttgctattataaatagtgctgtaacgaacatatgagtgtgtatgtctttttggtagaacaaattattttcttttggatatatactcagtaatgggaatgctgggtagaatgatagtttcatttcaagttctttgagtaatctccaaactgcttttcatggtggctgaattaatttacattctcaccaacagtgtataagagtccccttttctctgcagccgttccagcattgttgttttctgactttttaataatagctagaggatagtttttatcatcctgagttgggaaagcgctttctacctagcattaaaaaatctgcaaggtctaaggagaaaaactgaaaaatgtaatttcataaaattttaaatgtttacagataaaatataccataaacaaattagaagatgtggaacaggctgacagcatttaaatgtgtataaaagatcgattagaatataaaataaataaaaagtttctataaataaaaagacagaaaa

SEQ ID NO: 693533 - DNA, 630 bp, Homo sapiens
tgcatccatgttgctgcaaaggacattatgtcattcatttttcatggctgcatagtattccatagtgtctattaccacattttctttatccagtccaccactgatgggtatctacattgattccacgtttttgctattataaatagtgctgtaacgaacatatgagtgtgtatgtctttttggtagaacaaattattttcttttggatatatactcagtaatgggaatgctgggtagaatgatagtttcatttcaagttctttgagtaatctccaaactgcttttcatggtggctgaattaatttacattctcaccaacagtgtataagagtccccttttctctgcagccgttccagcattgttgttttctgacttwttaataatagctagaggatagtttttatcatcctgagttgggaaagcgctttctacctagcattaaaaaatctgcaaggtctaaggagaaaaactgaaaaatgtaatttcataaaattttaaatgtttacagataaaatataccataaacaaattagaagatgtggaacaggctgacagcatttaaatgtgtataaaagatcgattagaatataaaataaataaaaagtttctataaataaaaagacagaaaa

SEQ ID NO: 693534 - DNA, 636 bp, Homo sapiens
tgctatattgataatcacttagactttttgtgagctaaatcttctgtggttgctacagcaaacatttattgaataccttctaagtatgagactcagtactaggatgttttaaagattatacaattcttatttaagatgtgatatatagtgattaaatctcattcacaaaagtagggttttagttgtgcttgagcttatatgtaaaggtatgtacatatacatgtatgcggtttgttcttcctatttgcaaatgcccatattgggagaaaatgccagtgccagtcaaagccaactgaattgttgtgcattgacacatactgagaaaaaaagggcacagcaacaaaaatgttctagtcccaatcaagcgataaacaaaataaacaaaagatattcaaatcaactttaaagaacctgtttttgctgagttttggaagaaacattaagacagtggctcaagttcccacttgaacatgagtgtttgttgttatttttaatgctagttttaaggttgaattcattaatgtcatggttttgaataacttgaattttatttacctctgggcaggtragcctccctacaaatgaccatgatgtagaaaacacttgcacacatagacatatgtgtcacatggatgt

SEQ ID NO: 693535 - DNA, 641 bp, Homo sapiens
tgatttctgaatgtgcacataattaagcactttacatgaagaacagggcagaagtagatttaagaataagcagactgatttgtgccctccctgcacacatcaatatactctctctcacacacacaagctgctatcctcacaagtcactgcaggggctgcagccatcaccgagaccacatcctttcttttctggacgtttccagaacggggtaaaacatctcctttgagtcccaggccacacccctgcccccatgttctctcatctgtggctgagtctctgggcagctgtagtaagctctctacttcaaaacctgtggtgggtttggtggtgagatggcccgatgacctctgcacccccagttcagctgtggagtcagcacagctcctagaatgcaccacagagcgctagtaaaagtcacctctgagtccactttccccagcgcctctcccgcttgcttgcgtcctgagtggtaaaaagtgcagccgcccctcattttatgcaagggaagctgagaattacctgtgtatygatcacatttgggcaattccagttgcattttaagtaaccgcgctcatgacagggcctgcggggcacactccctgtgaaatgcaccgccttccatcatgctcctgtcacggga

SEQ ID NO: 693536 - DNA, 646 bp, Homo sapiens
ggaacctgccaccatggcccggctaatttttgtatttttagtagtgacggggtttcaccatgttggccaggctggtctcgaactcctgaccttgcctcggcctcccaaagtgctgggattacaggcgtgagccaccatgcccagcccttcccctctgacttcttctgtctcaaaactgaaaaggcctgttacttgaaacagagctctcccmgacctctgctttacacttactaagtaacttcccagtgttcatcttctccagggaaacctggccgtacttgagtgaggctcagtgaaaagaacataaaaccctcaataggaccctcaataggactgtagcccagagctgtgggtggggtctgaagagtgatggtggaacagcagtaaatcccctcccaggccacgctggtcagagtcagccacaggcctgagccgctggcttgccaaagtccccaagcccaagacacacattaaaaaggcatcgcccttcgacaagttccctggggggcttacaacctcagcactgatattttacttgcatttttatcctcggatgcaaagtcctgaggacactcctgagggactccccaggagccgattcctcagatgcaaaaagtcctgaggagggacagtggcagatggctgg

SEQ ID NO: 693537 - DNA, 666 bp, Homo sapiens
aaagaaaagaaaatgcaagccaatgaaattccacttctttctaggacttcctgaaacctcccacttacttcattggttatgtgtcaaaaccttatacctttcatgtactcaacaagcatgcatggagtaaccatattcatgctgtatatgctggaagctgtatttttctatttctatataatcacaatgatgttctatccccatcctcttcactctctcactgtgagaaatgagcagagcaattaagaaatgtcatgattgattgacatgaatttcacctttttttcctgcctactctcaggggtgagtgctaatgagcactggaatgcagaggggcaagtaagcaagatgaagtacagaaatgcaagctcggtaatcagctcctaaaaacttgagaattggcagaatttcttgagaacttaattactggagttatagatggccagtcatctatattttatttaatgccatttgtagcattttcctccattctactacttgagaaaacagaaacagagaggatatctagattgtctgaagccacaagatgaaattagaataaarttcaggtatttctgacaattatttctgtatgtagagtacaaagttcattactgttatccttttattgctctcctctatatatacattttgctattttttcct

SEQ ID NO: 693538 - DNA, 673 bp, Homo sapiens
aaattccaaactactctctagaacaagaaagaaaggtatataaacgtgaccttattcaagtcaatctatgtttacaactatatatcaaaaatacagcattaaaaagaacccaaaaagatgctaaagcgatttcagccacttataataaattttaatctaatggggaattcattctcaagaaaataaatcaagctgtatgttctgtagtcacatttgaaactgctgctttaaacacaactcatgaccctctggattatactgtgagaatacatatataaaaaaagtttctcaaactgaccatcataaactgctcagacttccaacatacgaaagattcttcattgagaattccacttagataaaacgatcctcctaattactgccttctcccagwatttgctattctcttttatcacctccttcttaaataaagggaaggtgttataattttccacaatacgtcaattcagctgctttattggtttgcttctcatgagaaatgaggcctagggatcataggattaaaatgtttttgtcccactgatttttgaagagtagtatcagggtaatgataaaattcaatgtattttcaaacagaaaacttttggctaccataactatctgttcctactcttcctttaaatggatgatttaaataccactgatgtgattg

SEQ ID NO: 693539 - DNA, 631 bp, Homo sapiens
cagactgatgatcttcaaaatcccccaaattaaaaatattattttggatatgtgcaagcagtatgttaaaacaggtaatcaagtctatgagagctgtaagtgcctactgttgagaagaaaaaactacaatgaaaaggatattttaaatatttttgtatgctgctgacataacaagaatactcactgtgataaaccaataggaattgactctataaaccaacttggataagaagccaagctgatccactggtgccagaacatgaaggtgcaagtgggaaatggaacagaatggtggcatatgaaaacccatcctaaaatagaaagtaaagagatgattgacaaaccagttctaaaataaagtcatttttcaggtgaaaacacataaattttaatgagatccaaaataagtacctaaggtaaatagactgtcacaaatctcattaatgtttctctttatgcacttcagaggattcacacacttcctcttcttttcatgttgaagttcgtagtaacataagctcatcatcaaggaaggccttaacagcatattacgcctcartataatctttatgaattctgagttggcataatgtcttatcacttcagtctttatcatcgtaagctttcattc

SEQ ID NO: 693540 - DNA, 675 bp, Homo sapiens
atggcacagatacaatgtatatatgtttatgttctgtatggtatacctatgctttacatataaaaagaataaaaattgtttttctcctgccacctctgctctgccccagggaagaaccaacttttatccttttggaaatgcatggattagaggaagagctagcctatcctgacttcattatcaccactgactctaataaacaatttaaatacaacgaataactgtttcagatttctttaaatctgaaaacccaaatagggcagactggcactcaacctccattctaaatatttctgtgctttctgtaatgcagaactaaaaaagctaaaaatcccagagggaatttagatcttgccaatcaaaaagccatgtttttgctgcttctgttatcatccatctagcaaacttggccagctttaagactacaaagacaggttttctttatctttctccccctcccccttttgaataccttatcactagcttcacggatgtcaagaatggcaaracatctattttttgttgggaaaaagctgccagcgtggacccagcagatggagtgtggctctgaagcagtgtttctcaaccagaggtggaaatacatagacgcccttttgatcacgcatactgctaaaatttggtgcgccgagatcggggatgctaaccatcttccaa

SEQ ID NO: 693541 - DNA, 2230 bp, Homo sapiens
ggtgagcattttatctccccactgatctggtcatcttcatgggacacccactctggccccgtcccacaggaaccactgggaatgccaggatagctgaatgacctggggtgaactggggacaaaaagccaagcactgattgcagcaactggtgtactggtgcactctgagctctgatcagtggggacaccatggtgaagggactggctggcacaatccacagggaggtccaaatccctggctgcattttccacgagcctaggtatactcgagagccctcccctggcctggaaacaacaaaaagctcaagattaagttctgatacccacttacatcttccctgaactgggaaatgttgacagagcagcaatatagttccagggcaatgtttaagttccagtgctcaccgcaagtctcactcagaacaggaagaaacaacagaccagagtttaagttccaatactaagtagcaaagctctgacaccaccaagaacccttaaaaaactgtcagaggtgactatcttctcaattgcacggggatcgacgtgaagtgcaaggactgtgaaaactcaggggaaaacgacaacatcaaaagagataacaaagctgtagcaatggacccagaagaattgaagatctccgaaatgtctgacagagaattcagagaatcacaaaaagtacagatagaaaactaaatgacatttggaaaacaatctagaagcaacatgagaaatttgaccaaaaaaaccccagaaataattaaaactgttggtctcctccagaaaagagtgtttcatttgtgcctggcacttgcctcttatcatttgaatcattagtttcatgttgggtaagatctgtaagtcactytgaatttgctttaacaattcaaccctttgtattaacatgtatatgtacacatttaaataattagtgtaagaggatctccttatccatgaatgactggttttagtaaaagattgttaaaaaggaatcttgttaaaatgaggaccaaaatttcatagaaaatcatgaaaaaagtgaaattaaaatcatgaaaattgttttaattttgctttactaaaactcattataatttcaacaacatgccaataattttaagcaaatgagaccccaatagctgatttttggcctttaggaaaagctaagtctcaggagacttccttccagaacacaatcaccatgttgtaagaaacccaaaccacatcaaagggccttgtgtaggaactctggtccacctttccagctgagccccaggaaatgaccagccttgtgagtgtaccacctcgattgccctgcctagtcaagccttcaggtggcttctgcctcagccaacaactcactacaactacaagagacgccaaatgagaaactgaactcaatcaacccatggagccttgagaaatgacaatacattgttcttttaagccacaaaagtacttaattttttggcataatttttcttttttttgagacggagtctcactctatcacccaggctggagagcagtggtgcgatctcagcttactgcaacctccgcctcccaggttcaagcaattctcctgcctcagcctcccaagtagctgggattacaggtgcccaccaccacacccagctaatttttgtattttcagcagagatggggtttcaccatgttggccaggctggtctcaaactcctgacctcaggtgatctgctcacctcagcctcccaaagtgctgggattacaggcatgagccaccgtacccagccaatttttctgtctttacttaatggttacttttgctgaacatcaaaaagtgggtaatttttgcaaaaatatctaaagacttcagcagttttcccaagagcctctcttcaacatttgatattaaaacgcttctttttggaagctcccatctcatcatcatccttgtttatttacctctgattcagctgctaaccggtctaactctgctccatgctcttttatcaatagttgaagtgtattttagcagttctgtgacacctctcttacctccttcacagaatcctgaatgtttgtcaagatcatcaattaaagttcgaggacagtttgcacattgactctcaggcatcacaagactgatccacaaaactgtagatgaggcagtgagagagactctggtgctaagcagggggaggcctgatggtacccattttataagtgatacatttgctaatgttttcatatc

SEQ ID NO: 693542 - DNA, 626 bp, Homo sapiens
gtgtgtgtgtgtgtaaaatcaaaaaagacttgggaggcaaacttgggtgggaagcactgaggaaggcgaaacaattcccaacttatctggatcccagacgagtccctctgattgcttaagtcactagaaaaggagattcgtctcagcgattaacaatgataccctttttaagagagatcaaagaaggcgcctagggaagctctacaacgcggcttcttggagttctgaggccgcctgcgcattcactttccagtgtaagcccccgctccggaatcccggctccagcccagcccgcgcccccttccctggaaagacctggccggccgcgcccccgaacccccgaggcgtgggtgtcaggctaagcggggctggtccgaccggtcgcttccagctctctccacctgttggaaagcccaggcccaagaaccgcgccagcggyggcagcacgtcactcggcggccacggggagtcagggagcgcggaacgcgggtttctgttgataagtgcaaagtacggccctctcggtgctaagtgcacagtaagtgcgaagaataaatacatcatctcccggggcggctgtctcgaaaacgcctctcagctgcctgcgtttcagagcccgtcaaggg

SEQ ID NO: 693543 - DNA, 670 bp, Homo sapiens
aaaatgacatcttccttcgtggagccatcatactgcatctctcctcttcacatccctgcaactaygaacacacctgcacctgcactcaccctctccagcccctctcacaacacaaaaagtggccttcctcctgttaggggccgattcctccctctctgctggatctgagcccttcttgccttccaaagtacttcccttcttcagttcttggatctctctctcaaattaccggtaattcatctctgtggaatccttcctgtgagtgtaaaacaagttctggcccttcgatctttaaagaactgtcttgtggttgctgcatttctctttctcttcatagcaaaccctctagaaggaattatcctccccttctgttcactcttcatcccataaaactctggctcctgtctttacgcatcccccaaaactgctcattatggtcattcgtgacttttgccacagtgtcacaggcgaaggacgctccctgacctcatcttctgcaaactctcagtagcattcaacacaaatcaccattcctcctctggaaggcccgccttctcagcttccccaacaccataaatcagcattcctcctctggaagccccaccttctcagcttcccaaacaccataaatcagcattcctcctctggaagccccgccttcttggcttcc

SEQ ID NO: 693544 - DNA, 670 bp, Homo sapiens
aaaatgacatcttccttcgtggagccatcatactgcatctctcctcttcacatccctgcaactatgaacacacctgcacctgcactcaccctctccagcccctctcacaacacaaaaagtggccttcctcctgttaggggccgattcctccctctctgctggatctgagcccttcttgccttccaaagtacttcccttcttcagttcttggatctctctctcaaattaccggtaattcatctctgtggaatccttcctgtgagtgtaaaacaagttctggcccttcgatctttaaagaactgtcttgtggttgctgcatttctctttctcttcatagcaaaccctctagaaggaattatcctccccttctgttcactcttcatcccataaaactctggctcctgtctttacgcatcccccaaaactgctcattatggtcattcgtgacttttgccacagtgycacaggcgaaggacgctccctgacctcatcttctgcaaactctcagtagcattcaacacaaatcaccattcctcctctggaaggcccgccttctcagcttccccaacaccataaatcagcattcctcctctggaagccccaccttctcagcttcccaaacaccataaatcagcattcctcctctggaagccccgccttcttggcttcc

SEQ ID NO: 693545 - DNA, 606 bp, Homo sapiens
acttgatatggtgctaggtagtcaagataaaatatatatatataagaggcaggccctgactgcaccaatcttgcaatatgggaagggagacactaaaaaatataactaaatgtactgtgctatgtgccatagtagaaaaccaatataacattctcagtgcccagggaagaaagagattaagtccagttaatggagtagtatctgtagaaggattggaaagatcttcgagtaaaagtagcatttgaacttgaccataaagcatgtttttcaactggagaaattgtgctatgctagactattttatatagagaaaataacataagtgaagattcagaaatgttaatgcactttcatgccacgatgtagagtttgttatgcatgaagcacgtagagagatgtagtgttgggcaactttgcaaatgcaagaagagtatagaatatagataatggttaatgtaccaagaggaagtttcagtactttttctataaatcacaaggtgcaataaaggtttttgtgaagtttcatcatcatgtrtaagctttaggggaagaaactgacttatagaaagaccagttaatagagtgccacagtaatccaataacagg

SEQ ID NO: 693546 - DNA, 599 bp, Homo sapiens
gaaaaaattgagtctgaaagaagtgatcatacaattggaaagtgccaggcctcctgattcaatgtccagagatctcattgctaacatcatactgagtaaaatttatttgtaacaaattctaacttcatttaaaaaataaatctttacatagaaagtgaagaatgggtgacctgatgtaaataaaatattaaagcaaagtmatactgagttaagtatctctcaaagagagataggctgttatatcaaggaagactatttggacaatggaaatatatgggtaaagttacgcagaatccatcagtgtatgacaagcagtgactttacaaaaggaagaaaggaaaggaaaaaggaatgggaagaggaggagaggagagggaaatggaggagagggaaagggagaggagggagggagggaaagaaaggaaggaaggagggaaagaagaaggaaggagagaagggaaaagaagagagagagacctttgcactttaagaagaaattgaagaggaccctttctaactaaactacttctggggtttctttaaatccacaacttctgccaaaagattcaagcacagatttgggacttatatttgacaag

SEQ ID NO: 693547 - DNA, 883 bp, Homo sapiens
tgtttatttgatcactgataaaaatgatatttaccaggattctcttctgtaacattactttggaattaataagtagattttgtggagaaatttcaggcccatcaactgtcccattccttatcccattttcatctactagatttagcatttactgaattaattattagcataatgagtagtaagtggtgattttaagttatgtcagaatttctatatttattattatatatccaagcataaaagtagtttctcttatatacatttatttatatttaatgtatttaaatatatttaatataaatcatttaatggtttatattcaacatagatacagtaatataaatatttgtatgctataatttccccaggtttggacagtggtaactctttggactagataagatatctttgaaatatttccttcattcttccagcactgtcttcctttgtggcacaaccagatgtttcaagaatattttctactttacttatcagccctgcataaagcatctctctatgaaggtttggttttttaaatgaagagtactatctaaaaatcaaagtctgggtgctaggtatgttaattgatacgcgagtctcgctgcttgacttgtaccttttatttagattttctattaaatcttttctagcagtctacactacagagtttaagttcactcagatcttcctttattccatacttatwttcgctccttcattggtgataagcctagccccaacatcttcaacctctttgcttatttgcccaatctcctatgttgcccatgtctcagcttatcagacttccctcatctcccatctctgacccccatcctggcaccacccaccattacttgttctgcttgtgtcaagaaaggaagca

SEQ ID NO: 693548 - DNA, 637 bp, Homo sapiens
gatctcctgactggcctttctgcctttgattttctctcaatttaactttttcttttactggagattatgcatcttcctccatcaagctgacatctcttctttatccaccactactctgggtccagcttagcctgggggatatttctgttttactacttatggcactaatttgamctgtctccttatcaagaaactctgaggttctatagagcaggaaccatttaaatcccaggattaaaaatacctggaatttactatatactcaataaacattcgctgaatgaataagttaatgagaccagtctcattaaggaatattcaaggaatattgtgtctaaggaagcttgtgttagatattgtcatctcttcctttataagttagtttctgccattgaattattttggggtggggagggacggagggcaagactcaggagtctgcatttttaacacgacccctaaggaattctatccaggtcatactttaataaaaactatgatttgtttctagtttcttaattttaagtccaaagagagaatttcattctccagagcaaccagtagagcattgagaattagaggcactaaatgaattatgtgtttttataaggagctgagatgcagccttaattaccta

SEQ ID NO: 693549 - DNA, 668 bp, Homo sapiens
tccattgctgtgcaatagtcaaaacactactcagtctaaaaaatcttagtatttttgataaccgtataaaatagcacaatttaggtcactaagtgccatcagcatatactccctaaatataccaaatagtggtatatttattgcatttttaaagaaggaggttaatttagcagtatttcacatggaaccatacagaatggagtatgataaaatttcttaaggcctaacatgttgcttaaagaaaacttagacacagaaaaaatatctgacttgataaatgctgtctctcacaaatatgacaaactctgaataaattccagctttgaaggaaggaagccagccacaaacaggcctttttgttttgtgtaagaagatacttgcagatggccagcaagtgtttctagatatatcctgttattatgcaaagttctcatctgctgatggatgactttagactattaaagatgaacttttatcatatatgacccaataaataattaatatctattcataaaggcttggatcacattctgaccacaytctcaagcattttgcattacttcacatgtcgtgattatgttgcaaatatctaatataatgcatgtttatcattagggttatttacctctggccatccttcctggcctcaagccatccctcttgaaacc

SEQ ID NO: 693550 - DNA, 668 bp, Homo sapiens
cctgaaaacttacacaggtttcttttttcgactcgtaaagacaatatttatgataaccttttttgtaaaagctttttcagtcaaatatccattcagctagcagttttaattttgctaaaataagcatgmtgaaatggaagaatttttaacatcacatcggagtgacagcatcagtctgcttcctttgagaatcaattagcagccaaacaactatacagactctgtaatgacacaagtctgtggtatttccccaaattacctggagcaaggtaaatggcatgagagctttggtcaccagggaaagcatgaaaggatataccacacaagcatgaagttatttaggaaaaatctgcaggaaaaaaaaaaaaagtgtctaaggctacacggcagctgtttcaaataataaaatatcatttgcatctctgcagagggttttagttttttcagctggttgtgtcccacacattttttcctgaacttgctgctcattgttttcagcttagccagttacaattaaaccatcaagtaggtacacttgtttgtttcgggtgtataagagacagtaaagcttcatttcaaatagagatacccaagaggaaagggttagaaagtgctgtgcaaagctgtgaaacactgactagcaatttaaactggaatcaggcaattca

SEQ ID NO: 693551 - DNA, 668 bp, Homo sapiens
cctgaaaacttacacaggtttcttttttcgactcgtaaagacaatatttatgataaccttttttgtaaaagctttttcagtcaaatatccattcagctagcagttttaattttgctaaaataagcatgctgaaatggaagaatttttaacatcacatcggagtgacagcatcagtctgcttcctttgagaatcaattagcagccaaacaactatacagactctgtaatgacacaagtctgtggtatttccccaaattacctggagcaaggtaaatggcatgagagctttggtcaccagggaaagcatgaaaggatataccacacaagcatgaagttatttaggaaaaatctgcaggaaaaaaaaaaaaagtgtctaaggctacacggcagctgtttcaaataataaaatatcatttgcatctctgcagagggttttagttttttcagctggttgtgtcccacacattttttcctgaacttgctgctcattgttttsagcttagccagttacaattaaaccatcaagtaggtacacttgtttgtttcgggtgtataagagacagtaaagcttcatttcaaatagagatacccaagaggaaagggttagaaagtgctgtgcaaagctgtgaaacactgactagcaatttaaactggaatcaggcaattca

SEQ ID NO: 693552 - DNA, 646 bp, Homo sapiens
tggataggtggattgatggatggacagattaatgagatagtgaaatctaagagttggcctttatcattctaataatccagctagtccaccttccctctgattcttttcctttttaggttacttagtatgtcagtaagtaaacattctgactcttctctcactagccctgactatcccactgcttttctctatttttcagaaacctatgagcagtaaacttgaaaacacattgcatgagaaattatggtaatctcgtattaactgctctaatttggcctgaggaaattacttgatgtrtgggggataactgtatgcttattcaatcggtctcacttaattctgaaagaactttcaaaaataaatatttaccccttactgatagctagctagctggctagctagataggtatacatatatgtactctacacattttaaaatccttttaattcttttgtttcttgaatgtctacattatacaaagtaaaagtcaaaatccttggtgactaagcaaacaagagaataaagttatcactcagtgtacagaaaaatatgtgtcatctgggcttgaagaagcaattagaataatttgcttctagtgtcgtaatttgcttctagtgtcataattttgctagatagaaggaaaca

SEQ ID NO: 693553 - DNA, 679 bp, Homo sapiens
aaccctagaccccatccccagtcatgacaaccaaaatcatctcctagacattgtccaatgtcctctgctgggcaaaatagcccccagttgagatgcactgcatttctacagtctaagttccataagagcaggttgcctgtttgctttacrgctgtgtcttccgcacgtagcacaatttcttggcacatagtaggtgttcaattaatagttcttgagttgcatgaatgaacaaatgaatgaatgcctgatgcagtgcagtactggggtccacacagtgaagaacacacagaccttacccccaagaagatcaagatctagtagaagccccaaagtgtttccaaaatggggaaccttctgtccctctcagtgacatgtcacaggaactcacaagctagcaggtcagaggctatgccaccaaaccacagtgggcttcatgcgctctgcagacataacagccacggtcaggcttacagtcaacaagggaaccagaacagtgaggccagctgggtggtaggcccgctagaaaaaatttaatccctttgaacccatgagcaacaatgtgatgtgtcgttttctttttcttttttctttctttctttctctctcttttttttttttttttgtgtgtgtgatagggcctcactctgtcactcaggctggagtgcagtggcataatcat

SEQ ID NO: 693554 - DNA, 679 bp, Homo sapiens
aaccctagaccccatccccagtcatgacaaccaaaatcatctcctagacattgtccaatgtcctctgctgggcaaaatagcccccagttgagatgcactgcatttctacagtctaagttccataagagcaggttgcctgtttgctttacagctgtgtcttccgcacgtagcacaatttcttggcacatagtaggtgttcaattaatagttcttgagttgcatgaatgaacaaatgaatgaatgcctgatgcrgtgcagtactggggtccacacagtgaagaacacacagaccttacccccaagaagatcaagatctagtagaagccccaaagtgtttccaaaatggggaaccttctgtccctctcagtgacatgtcacaggaactcacaagctagcaggtcagaggctatgccaccaaaccacagtgggcttcatgcgctctgcagacataacagccacggtcaggcttacagtcaacaagggaaccagaacagtgaggccagctgggtggtaggcccgctagaaaaaatttaatccctttgaacccatgagcaacaatgtgatgtgtcgttttctttttcttttttctttctttctttctctctcttttttttttttttttgtgtgtgtgatagggcctcactctgtcactcaggctggagtgcagtggcataatcat

SEQ ID NO: 693555 - DNA, 679 bp, Homo sapiens
aaccctagaccccatccccagtcatgacaaccaaaatcatctcctagacattgtccaatgtcctctgctgggcaaaatagcccccagttgagatgcactgcatttctacagtctaagttccataagagcaggttgcctgtttgctttacagctgtgtcttccgcacgtagcacaatttcttggcacatagtaggtgttcaattaatagttcttgagttgcatgaatgaacaaatgaatgaatgcctgatgcagtgcagtactggggtccacacagtgaagaacacacagaccttacccccaagaagatcaagatctagtagaagccccaaagtgtttccaaaatggggaaccttctgtccctctcagtgacatgtcacaggaactcacaagctagcaggtcagaggcyatgccaccaaaccacagtgggcttcatgcgctctgcagacataacagccacggtcaggcttacagtcaacaagggaaccagaacagtgaggccagctgggtggtaggcccgctagaaaaaatttaatccctttgaacccatgagcaacaatgtgatgtgtcgttttctttttcttttttctttctttctttctctctcttttttttttttttttgtgtgtgtgatagggcctcactctgtcactcaggctggagtgcagtggcataatcat

SEQ ID NO: 693556 - DNA, 679 bp, Homo sapiens
aaccctagaccccatccccagtcatgacaaccaaaatcatctcctagacattgtccaatgtcctctgctgggcaaaatagcccccagttgagatgcactgcatttctacagtctaagttccataagagcaggttgcctgtttgctttacagctgtgtcttccgcacgtagcacaatttcttggcacatagtaggtgttcaattaatagttcttgagttgcatgaatgaacaaatgaatgaatgcctgatgcagtgcagtactggggtccacacagtgaagaacacacagaccttacccccaagaagatcaagatctagtagaagccccaaagtgtttccaaaatggggaaccttctgtccctctcagtgacatgtcacaggaactcacaagctagcaggtcagaggctatgccaccaaaccacagtgggcttcatgcgctctgcagacataacagccacggtcaggcttacagtcaacaagggaaccagaacagtgaggccagctgggtggtaggcccgctagaaaaaatttaatccctttgaacccatgagcaacaatgtgatgtgtcgttttctttttcttttttctttctttctttctctctcttttttttttttktttgtgtgtgtgatagggcctcactctgtcactcaggctggagtgcagtggcataatcat

SEQ ID NO: 693557 - DNA, 1367 bp, Homo sapiens
acaagtagaagttgcttttctacggggaacacaagctaaggcgtattaatgaagccatagaaatagtcactgggactagtcataaatatggtggttttctttcccttctgggaacatgtaggactacatatccttaacccttaacctggctttgtttaatgaactgtgggtggagtgatgtggatgacttctagctgtaagctttaaaagacagaatacagtttgccaattccctttctctcctgtgtgctcattaagacacataagacacatatttagatgaagctcttcgttaggctacatccccaagtgactacaggagcagagccactctgctgatctgtgctgaacctatgtagtatgagtgaaaaataagtaagtagcttattgtgctaagctactaagcattgggggttattaattactgcaatataacatagactaccctgaccaatacgcaggctaagctgctgcaatgaacaaccagaatatactgtccactacatgggtcattcagggtcctgggttccttccattttatagcctttggctgggcacagtggcttacacctgtaatcctagacccttgggagcctgaggcaggtggatcacctgaggtcaagagtctgagatcagcctgaagaacatggtaaaaccctgtctctaataaaaatacaaaattagccaggcgtggtggtgcaagcctgaaatctcagctacttgggaggttgaggaaggagaactgagtgaacccgggagatgaaggttacaatgacctgtgatygcgccattgcactgcagcctgggtgacaagagtgaaactccgtctcaaaaataaaccaaaacaacattttatagccttccgttgccctagtgcatttcctcatccacataaagattgcactctagttccacacctgcattccagtcatagggaaggggcaaagaggaaacaaaaggcaatcaatttccttttatggaagttacattgcagttggatatgtcactcctcctcacattgcattggtgagaacccactcacaaggtcacatctagcagcatgggtaccactaaatttggatgagaatgggatgggttctatcactaaaaagaagaaaggcagaatggataatgggacaattaacagtgtctgccacagggtacatagaatgtttaagaaactgaagtaaatgtagtatggctggagagtacagtgagacatggagagtgctcagaaagaggcagtagaggtaagggaggggaccaagattaaggaggcctgaaaacattgacttagaggtaatggaaagcccctgaagagttttaagtggaagaataccacaatcagatttgcattttgaaagatt

SEQ ID NO: 693558 - DNA, 1367 bp, Homo sapiens
acaagtagaagttgcttttctacggggaacacaagctaaggcgtattaatgaagccatagaaatagtcactgggactagtcataaatatggtggttttctttcccttctgggaacatgtaggactacatatccttaacccttaacctggctttgtttaatgaactgtgggtggagtgatgtggatgacttctagctgtaagctttaaaagacagaatacagtttgccaattccctttctctcctgtgtgctcattaagacacataagacacatatttagatgaagctcttcgttaggctacatccccaagtgactacaggagcagagccactctgctgatctgtgctgaacctatgtagtatgagtgaaaaataagtaagtagcttattgtgctaagctactaagcattgggggttattaattactgcaatataacatagactaccctgaccaatacgcaggctaagctgctgcaatgaacaaccagaatatactgtccactacatgggtcattcagggtcctgggttccttccattttatagcctttggctgggcacagtggcttacacctgtaatcctagacccttgggagcctgaggcaggtggatcacctgaggtcaagagtctgagatcagcctgaagaacatggtaaaaccctgtctctaataaaaatacaaaattagccaggcgtggtggtgcaagcctgaaatctcagctacttgggaggttgaggaaggagaactgagtgaacccgggagatgaaggttacaatgacctgtgattgcgccattgcactgcagcctgggtgacaagagtgaaactccgtctcaaaaataaaccaaaacaacattttatagccttccgttgcyctagtgcatttcctcatccacataaagattgcactctagttccacacctgcattccagtcatagggaaggggcaaagaggaaacaaaaggcaatcaatttccttttatggaagttacattgcagttggatatgtcactcctcctcacattgcattggtgagaacccactcacaaggtcacatctagcagcatgggtaccactaaatttggatgagaatgggatgggttctatcactaaaaagaagaaaggcagaatggataatgggacaattaacagtgtctgccacagggtacatagaatgtttaagaaactgaagtaaatgtagtatggctggagagtacagtgagacatggagagtgctcagaaagaggcagtagaggtaagggaggggaccaagattaaggaggcctgaaaacattgacttagaggtaatggaaagcccctgaagagttttaagtggaagaataccacaatcagatttgcattttgaaagatt

SEQ ID NO: 693559 - DNA, 1367 bp, Homo sapiens
acaagtagaagttgcttttctacggggaacacaagctaaggcgtattaatgaagccatagaaatagtcactgggactagtcataaatatggtggttttctttcccttctgggaacatgtaggactacatatccttaacccttaacctggctttgtttaatgaactgtgggtggagtgatgtggatgacttctagctgtaagctttaaaagacagaatacagtttgccaattccctttctctcctgtgtgctcattaagacacataagacacatatttagatgaagctcttcgttaggctacatccccaagtgactacaggagcagagccactctgctgatctgtgctgaacctatgtagtatgagtgaaaaataagtaagtagcttattgtgctaagctactaagcattgggggttattaattactgcaatataacatagactaccctgaccaatacgcaggctaagctgctgcaatgaacaaccagaatatactgtccactacatgggtcattcagggtcctgggttccttccattttatagcctttggctgggcacagtggcttacacctgtaatcctagacccttgggagcctgaggcaggtggatcacctgaggtcaagagtctgagatcagcctgaagaacatggtaaaaccctgtctctaataaaaatacaaaattagccaggcgtggtggtgcaagcctgaaatctcagctacttgggaggttgaggaaggagaactgagtgaacccgggagatgaaggttacaatgacctgtgattgcgccattgcactgcagcctgggtgacaagagtgaaactccgtctcaaaaataaaccaaaacaacattttatagccttccgttgccctagtgcatttcctcatccacataaagattgcactctagttccacacctgcattccagtcatagggaaggggcaaagaggaaacaaaaggcaatyaatttccttttatggaagttacattgcagttggatatgtcactcctcctcacattgcattggtgagaacccactcacaaggtcacatctagcagcatgggtaccactaaatttggatgagaatgggatgggttctatcactaaaaagaagaaaggcagaatggataatgggacaattaacagtgtctgccacagggtacatagaatgtttaagaaactgaagtaaatgtagtatggctggagagtacagtgagacatggagagtgctcagaaagaggcagtagaggtaagggaggggaccaagattaaggaggcctgaaaacattgacttagaggtaatggaaagcccctgaagagttttaagtggaagaataccacaatcagatttgcattttgaaagatt

SEQ ID NO: 693560 - DNA, 1746 bp, Homo sapiens
gctaacctccctttactttatttttattttttgaaattttgaagctatttcttttgttcagttactcatctagataaattttagaataattttatccattaaaaaatgtgtgaataattttattggcttaaacttaaaaattaatttgagaagaaataatttaatgtttctgcccttaacatatttttctccacttatataaattttatatctgtcaaaaaattgaatagtaaactgaacataccaaatatttgtacaatagggaactactggggcactgtgagaacttgtaacagtaaaatctaagccagactcaggattatagacaaggcttttcaaaagtgacatcttgattgggtcatagagagtgaataggagttcactgggcaaagagagagagaggtaagggaagaaagttctaaatgacttgatcaacttataggaaggtccaatagtaaaagagagtgtggatgttgctttgaagcactgaaaaagtttaacatggctagcacataaaaagggggtgaaagaacaaaattggaataatttgggtaaacaacgatcaaattatgaatagctttgaaaactgtatttgggaacttagatgtatatttggagttcagatggcagaaccaacttaatgtgataatagaaagataggtataggtataggtataggtataggtatagttatagtgatggaaagagaggtattcaatagaatgcctaggcttctggcttgggaactgggagaatggcagygcctttcacaggagaataagaggtgaatcacatccaggaggactgagggatatcatgaatgcatttttgtacctgttgaatttgagatgcttggcagggtataaaaatgggaatgtcctacaggtgtttgaattattgatcaaaaccacaataaaatgatataggtaaagtgattgattttttgaatcattgtggtatttgaaggcatttaagtgggaaaaatcagccaaggatcgtgtgaggatcaagaagcacaataaaaacaacatggattttagaacctctgctctgaaccccaaggatgacctcagtgggctcagaattcccattacactggagatccataccatgctcatggaaaccttctggtatgtttcatactaggcgatctggttgcaagcagcagataattaattccaattaatttacgatttttttttttttttaaagcatgggctcaaagaaccaggagccaggagattccaggtagacttcaaacattactgtgtccaaaaactcaaacactgatgtgcttatttgcgatttgcaacattctacgtgaaggctctttctacatggtagaaagatgaaccccagctgacccagcttacctcctcaaagcttagcaatattggtggaaagaatattgctctctccaaatgtacttatattaatcctggagaagatacctattaaccctgtttgtcttatgccaactgtaattcaatttctgtgcccaggagaatgaagcattgtcactggtcatcttggatcaggaattctaagacaattgaaattcttaagatccacaccaggacttctgagtcagaatagctgtgaaagagtcccaggagtatgaatttttaagagctgctaaagtgattcttattgaaggtgtgcacagattgtgttttgagaaacaccacaagctccagacctggcttgaacagaatgttgcctaagaagagtcaggtttgcaccctg

SEQ ID NO: 693561 - DNA, 192 bp, Homo sapiens
tgctgtgttgagaagagaccataggagcgtcaggggaacactctctcctgcgagaattgagaatgggcgggggccaggccttctagtagcaggcctgaggaggcctcccctcctgggcyccagattactccactgtccctgtcaccacaggagaagcacctccggccgcatcctacctccctggggtgaggt

SEQ ID NO: 693562 - DNA, 673 bp, Homo sapiens
ggagggtaggagcactgtagttttcaggtgggattagggaacttgagtgtatccaggagcacaggaaatcagttcttactaaattagtgctcgtcaaatctgggagtgtgttggggaatgacatgaatgaacacgaagaggaagagcaagaagaataagaactgaatcaccaaaatcctggaacattattattgttattaatacttaacattgagaacttactatgtgctagagactctggtagaaattttacatacattatctcatttaatccttatagtcctatgtgggaggctttttatttatttatttatttatttatttatttatttttgagacagggtggccttgctctgttgtgcaggctgkagtgcagtagcatgatcacagcttaccacagcctcaacctcccgagcttaagtgatcctccctcctcccatgctgggactacacatgcatgccaccatgcccggctaatttttgtattttttgtagagacggggtttcaccatttttcccaagctggtctcaaatgtctggcctcaaacaatctgcctgccttggcctcccaaggtgttgggattgcagatgcgagccgctgtgtccagccaggctctgctattatctatttctcctaggaggagacaggctcagagaagttacctggctcacc

SEQ ID NO: 693563 - DNA, 663 bp, Homo sapiens
tgagttaagtggtggtggtggcgaaatttggaattttctatgcgtaccttatttaaatagaataaagctaccatatatgtcaattttgtcactacttggtaatacagacagggattcttcttttacttactgactagattaatgtgagacttaacatttgacttgattcatggtaatgtagtgctctggctattgttggtaactgcagagtttgttttttttttttgagacggtgtcgctttgtcacctaggctggagtgcagtggcggatcattgctcactgcaaccttgaacttctgggctccagtgatcctcccacccatcttcctaagtatttgggactacaggtgtgtgccaccacacctggctagttcttgtattttttgtagagatggggtctccagtgttgcacagaccagccttgaactcctgggttcaagcaatcctcccacctttgcctcccaaagtactgggattacaggcatgagccaccacagccggtatgcaggtggttcttaaagctctgtaaatgtatcatattgatctcccatcttccaggttgtcttagagtgtttctaagattgccttacccaaattagcaggaaatttgagtttggggatcatttctccaacaaaggtttgttgagtccstattacgtataa

SEQ ID NO: 693564 - DNA, 1310 bp, Homo sapiens
tacagaaaatataaaaacatctgacacatttttagaatgttcatttttgtaatgaggtatgttttcttagaaacttactgtgaacagtttaggtatttttttaatgtggtactgaattttcaactgtacatatatctgtwtataacttcactcatttgttcttttgcaaagaaatctctaaggccagagcgtaaagtagaaagaacccatttagtgacagagttcaacttaatctttaaaaaatgctactgatttatttttgtccgtttctttgccaggctcaaattggttaatgctaaggatattaaaagcccgaccaaaaaaaagcacaacagtgtgagaaataggaagaaaaaaaaggaagtggcaaagagttttataaaccacaggatcctttaatacaagaaattcaatgtaagaaacaaaaagttaacaactccccaattccttatttttaacaagtccctagataggtaacagtaaccttctatatgtcagtccatggcaaagaaaatgttctaaaatttcctttcttttgcaacaaaaatagtccttatgaagtcaaaggcaactatgaaagaactgtccccctgacaatagaaccctgtagagcacaaaaactaaaagcactgactgggagagagagagaaagagaaagagatagagagattgaatactctggctctagtcaaaatgccttgttagggcacaaggaggaaaaagaatacagaaacaaaaagttcagttacaacagaaaccattcagagaaaaaagcaatgtttatgacctagtggtaggattttcagaagaatattgtaaattgtagagagagaccaaaattacaaattaaagaaaggaggaaaaaagagagattggattgagttaataaaaagtgccaaggctgaggtttaaaaggtagagctttcaccatcttacgcaaagtggcatattttgttcctatttcagaaaataggaacaaaaatttcagaaaaattttcattattaaccaataggtaaatttggttttgtaagtttgggctattatgagggaagtgtaagaaattatgatttagagagggcaggtagtaagtgtactgaaaggaaagcactactagtagtgatgtcagataaaatagaagaaactcattaaaatttaaattttatataaacaacaaatactattccacatgacatgctaatactaaaataatacccatagtttatgcagaattcaaatttaccttgatgccgtctatttttatttgccaaatctgactatcctagccatggaataaggtaaatgaggaaat

SEQ ID NO: 693565 - DNA, 1310 bp, Homo sapiens
tacagaaaatataaaaacatctgacacatttttagaatgttcatttttgtaatgaggtatgttttcttagaaacttactgtgaacagtttaggtatttttttaatgtggtactgaattttcaactgtacatatatctgtatataacttcactcatttgttcttttgcaaagaaatctctaaggccagagcgtaaagtagaaagaacccatttagtgacagagttcaacttaatctttaaaaaatgctactgatttatttttgtccgtttctttgccaggctcaaattggttaatgctaaggatattaaaagcccgaccaaaaaaaagcacaacagtgtgagaaataggaagaaaaaaaaggaagtggcaaagagttttataaaccacaggatcctttaatacaagaaattcaatgtaagaaacaaaaagttaacaactccccaattccttatttttaacaagtccctagataggtaacagtaaccttctatatgtcagtccatggcaaagaaaatgttctaaaatttcctttcttttgcaacaaaaatagtccttatgaagtcaaaggcaactatgaaagaactgtccccctgacaatagaaccctgtagagcacaaaaactaaaagcactgactgggagagagagagaaagagaaagagatagagagattgaatactctggctctagtcaaaatgccttgttagggcacaaggaggaaaaagaatacagaaacaaaaagttcagttacaacagaaaccattcagagaaaaaagcaatgtttatgacctagtggtaggattttcagaagaatattgtaaattgtagagagagaccaaaattacaaattaaagaaaggaggaaaaaagagagattggattgagttaataaaaagtgccaaggctgaggtttaaaaggtagagctttcaccatcttacgcaaagtggcatattttgttcctatttcagaaaataggaacaaaaatttcagaaaaattttcatkattaaccaataggtaaatttggttttgtaagtttgggctattatgagggaagtgtaagaaattatgatttagagagggcaggtagtaagtgtactgaaaggaaagcactactagtagtgatgtcagataaaatagaagaaactcattaaaatttaaattttatataaacaacaaatactattccacatgacatgctaatactaaaataatacccatagtttatgcagaattcaaatttaccttgatgccgtctatttttatttgccaaatctgactatcctagccatggaataaggtaaatgaggaaat

SEQ ID NO: 693566 - DNA, 1310 bp, Homo sapiens
tacagaaaatataaaaacatctgacacatttttagaatgttcatttttgtaatgaggtatgttttcttagaaacttactgtgaacagtttaggtatttttttaatgtggtactgaattttcaactgtacatatatctgtatataacttcactcatttgttcttttgcaaagaaatctctaaggccagagcgtaaagtagaaagaacccatttagtgacagagttcaacttaatctttaaaaaatgctactgatttatttttgtccgtttctttgccaggctcaaattggttaatgctaaggatattaaaagcccgaccaaaaaaaagcacaacagtgtgagaaataggaagaaaaaaaaggaagtggcaaagagttttataaaccacaggatcctttaatacaagaaattcaatgtaagaaacaaaaagttaacaactccccaattccttatttttaacaagtccctagataggtaacagtaaccttctatatgtcagtccatggcaaagaaaatgttctaaaatttcctttcttttgcaacaaaaatagtccttatgaagtcaaaggcaactatgaaagaactgtccccctgacaatagaaccctgtagagcacaaaaactaaaagcactgactgggagagagagagaaagagaaagagatagagagattgaatactctggctctagtcaaaatgccttgttagggcacaaggaggaaaaagaatacagaaacaaaaagttcagttacaacagaaaccattcagagaaaaaagcaatgtttatgacctagtggtaggattttcagaagaatattgtaaattgtagagagagaccaaaattacaaattaaagaaaggaggaaaaaagagagattggattgagttaataaaaagtgccaaggctgaggtttaaaaggtagagctttcaccatcttacgcaaagtggcatattttgttcctatttcagaaaataggaacaaaaatttcagaaaaattttcattattaaycaataggtaaatttggttttgtaagtttgggctattatgagggaagtgtaagaaattatgatttagagagggcaggtagtaagtgtactgaaaggaaagcactactagtagtgatgtcagataaaatagaagaaactcattaaaatttaaattttatataaacaacaaatactattccacatgacatgctaatactaaaataatacccatagtttatgcagaattcaaatttaccttgatgccgtctatttttatttgccaaatctgactatcctagccatggaataaggtaaatgaggaaat

SEQ ID NO: 693567 - DNA, 641 bp, Homo sapiens
atccgcccgccttggcctcccaaagtgctgggattataggcatgagccaccgygcctggccgatcaccaccacttttgagtttactttttttcttatggccgctggtgaggggggatcttggaaacaagaaaatctgactattgtttagtatttttcctggtaggtgtctcttgccactgagtagaccttttgtaaaggggatggggtctttacaaacaatattgaggttaaactgaatcagttcttatgaattcagaccagtcagtgaataaaaacgttaaaatctgttctagccaaacattattggttcatagtattgatttattagtgttatatggatggtcagtcccctcacataattagcaaatctttcttgcagaacttttggctctttccagactatataattcaggtttttccaaattgtttgcagaattgttgaaaaaattctaccctaatactagacttaaaataatgttttatttccttgctctggtatgttggctgcctcaaagtgaaaatttttaccttcataaaaagctattttatattcagttgttttgtttgttttagcagttgaagtttgttttgattttctttgattccttttagctctgctaaaatagcttcaactacccaa

SEQ ID NO: 693568 - DNA, 645 bp, Homo sapiens
tgtaaagcattgagatgtttatgtgtatgcatatctaaaagcacagcacttaatcctttaccttgtctatgatgcaaagacctttgttcacgtgtttgtctgctgaccctctccccactattgtcttgtgaccctgacacatccccctctcggagaaacaccsacgaatgaataaatactaagggaactcagaggctggcgggatcctccatatgctgaacgctggtcccccgggtccccttatttctttctctatactttgtctctgtgtctttttctttcctaagtctctcgttccaccttacgagaaacacccacaggtgtggaggggcaacccaccccttcactgtaacatgaagctatttataatgctcacctcactgtcttcttgagagatggaaataagatgatgcatgtatgttctcacttacttgtggtatttaaaaatccaaacaattgaactcatggagatagagaatagacggatggtcaccagaggctgggaagggcaatggggctgcgggggagaggtggggatggttcatgggtacaaaaaagcaatagaaagaatgaataagacctagtatttgatagcacaacagggggactatcgtcaataataatttaattgtacatttaaaaata

SEQ ID NO: 693569 - DNA, 604 bp, Homo sapiens
aaacattagatgtacctacatacagatatctgcccaatcaactggggactacaggactggcagaaatgcttgtctcagtttatctataggctaccgttattatcccttcaatcgtaataactaaattattataaccttatttaaaaatattttgtcattgttgctcasagtttttagtttacctggaatagaatgttttgtaaatttaaggatatatttaaaatatcaacatgaaggaaactttcatttatagcttgcctataacaaacatacacactgtccgtttagaaatattatactaacagatcatcaacatacacagcaatgaaagaaagctaagaattgaatacttatcagtgttaaacagatacaaagaggtgagaaatattcaaaagtctcatttgttaaagatgaatatgcctaaaagattcatgtcaaaaaacctaaactcatcccggcagaccacttttctatgtagctgcactgacggtcttcaaagaactaaatggatcaaactgaatatgactaaaaggaaatgaaattcattattttgttcaaaggaaatgcagagtaaacattactaaaggcaaatgtaagggtgtct

SEQ ID NO: 693570 - DNA, 1445 bp, Homo sapiens
ttttgtattttcagtagagatggggtttcaccacgttggccaggctggtctcaaactcctgaccttaggtgatcagcctgcctcggcctcccaaagtgctgggattacaggcatgagccaccacatctggccagagttcacacctaatttaataataacaccagtgaaaaaaagcaggctgcctcatttcaatgagagtttttcaagacccctggtcccaggaccataggggtcccttttcttgttctttgtcaagagtccaggtaacaagatgataacgtggccctgctgtcgtgagcggggaaacagcaggaagccttgcttcccttcaagtatttagtgccagctggagggataaagagacctgtaaataattgtggctttacaaggaaacaagggaaggccatcggggcttccagacacagggatgacaagctgttttcctcccttctggaataaattcgcgagaagctgaaacagaacttgaaatgaacttattttatgaaggctctggagggtactgccatrgattatgtgaagtttgtttttttttttttttcgttttggtcaataaagttaccacaggctttcatatcacagaataacctttcccatagtttccagtggttctttgtgctctgttctagacctcctcccccgaggaaaatcagaggcgatgggcagaccgtgtcgaatctgaacatgacgtggcttgctgcagcaagcttactgccatgctaaacacttagtgaggaagcatgcctggaaactgtccctctggtcagagtgcctccagacccagaatgtcctggccgcaatcattcaggcacatgttactgtcctgagtacagacgtaggatctgagccctcgctggctgcagagccaccactgcccacctctctggcacgtgccttcctccctgacaccacccagcccgaaggcccacagtggagtgcgtgatgcccctgctgtgcccctcctggtttatccgtgcctggcagagtcccagcacccagcacgggagcaggtgtaggggaggctcagaaataaacatggatcaatattaactggtaacgttcacgggggggaatgttccaaagaaccttgttgaaaccctctaagttggtccccttttgattctagttgatcaccctggaagaaatggcagcattcaattcctccatccttttttccagttcgcaagggctggttccctggaccagcagcatcagggtcatctgggaacgttttaggatcgtgaagtctcgtcagctcccaagacctgctgactcggaagctctggggacggggctggcagtctgggtgtgaatgccctctgaggttgctgtggagactcctgaggtaacacatgctgaagtcagcctgtcctaatggaccaggctcttggttaggagccccagcacctaggggaggccgtggttca

SEQ ID NO: 693571 - DNA, 1445 bp, Homo sapiens
ttttgtattttcagtagagatggggtttcaccacgttggccaggctggtctcaaactcctgaccttaggtgatcagcctgcctcggcctcccaaagtgctgggattacaggcatgagccaccacatctggccagagttcacacctaatttaataataacaccagtgaaaaaaagcaggctgcctcatttcaatgagagtttttcaagacccctggtcccaggaccataggggtcccttttcttgttctttgtcaagagtccaggtaacaagatgataacgtggccctgctgtcgtgagcggggaaacagcaggaagccttgcttcccttcaagtatttagtgccagctggagggataaagagacctgtaaataattgtggctttacaaggaaacaagggaaggccatcggggcttccagacacagggatgacaagctgttttcctcccttctggaataaattcgcgagaagctgaaacagaacttgaaatgaacttattttatgaaggctctggagggtactgccatagattatgtgaagtttgtttttttttttttttcgttttggtcaataaagttaccacaggctttcatatcacagaataacctttcccatagtttccagtggttctttgtgctctgttctagacctcctcccccgaggaaaatcagaggcgatgggcagaccgtgtcgaatctgaacatgacgtggcttgctgcagcaagcttactgccatgctaaacacttagtgaggaagcatgcctggaaactgtccctctggtcagagtgcctccagacccagaatgtcctggccgcaatcattcaggcacatgttactgtcctgagtacagacgtaggatctgagccctcgctggctgcagagccaccactgcccacctctctggcacgtgccttcctccctgacaccacccagcccgaaggcccacagtggagtgcgtgatgcccctgctgtgcccctcctggtttatccgtgcctggcagagtcccagcacccagcacgggagcaggtgtaggggaggctcagaaataaacatggatcaatattaactggtaacgttcacgggggggaatgttccaaagaaccttgttgaaaccctctaagttggtccccttttgattctagttgatcaccctggaagaaatggcagcattcaattcctccatccttttttccagttcgcaagggctggttccctggaccagcagcatcagggtcatctgggaacgttttaggatcgtgaagtctygtcagctcccaagacctgctgactcggaagctctggggacggggctggcagtctgggtgtgaatgccctctgaggttgctgtggagactcctgaggtaacacatgctgaagtcagcctgtcctaatggaccaggctcttggttaggagccccagcacctaggggaggccgtggttca

SEQ ID NO: 693572 - DNA, 566 bp, Homo sapiens
aagaaaaagcagctgggagtactaggtcagacagcacctggttatttactagttgtgcaagtttcttaacctcagtaaggctgcttcctcacatatataaaaggggttaataacatctatctggcaaagttatggaaaagactggagataatatgtcaaatgcattacaaagtgcttgacaggtttttcataatataggcagctattaccttgctctagctctactactcttttgccagggatagtgcaatgtaggatcaactgtgccaacaaaattggggcaaaggcaaggaaagtagtaaagccacagaacagatttacatttcagcaccaatttggtatgcatattagaaaattatttttgttttctttttacaaaagagaatgttgttgctaccgtgaccgtaaacaccagattgtttataattcatgttgtgaaatttacatctgttcacagatttactgagttggcataacatgggtgatgactgtgggaaacggcccaagttccttagtactgacacttccttgattgtagaatatcgagaggtagtcaacttttmccc

SEQ ID NO: 693573 - DNA, 650 bp, Homo sapiens
ttaaaacaaccaattcattactttaaaaatgttgaaggctggagagagaagatgcatttgcagtttattcactcattctcatagccaacatttagtgggcacttagtatgtgccaggcaccataccagggatacagcagtgagcaccgtgcctgctagcaggcagctcagaatctagtgggagaaacagagaatacagaatacacaatcaasagaagcaccagcaacaggcacagtgcagaaaatgcaaattggtggggggttctctgaggagatggtatttaggcagagacttggatggcaagaaggagttggccatgggatggcaggggatggagcccttgagcagagaaatcaccagtacaaagcccaggatgcagaacagccaggccaaaagtgggggtgtggccagtgagatgagaccagcaagattagcagggcccagatcacatgaatggggaggaaaaaacgatttcactgcaagtgtgatgggacttttaagcacgggaatgtatggttttatttctgttttaaaagatccatctggctgagcagaaaatggattggggtgggagggtacaagagtggaaacagtctccttctagaaaaaagatatttagtgtctaggcaagagatgatggtggcttggac

SEQ ID NO: 693574 - DNA, 1443 bp, Homo sapiens
taacaaaatacaaataaaaccacattctatttcatctaaacactttctcccaagtcattctctcttagcctcatccctatgccacttctaagtccgtgtcatttccagctctctcctaggggacagacatcttcagccctctttaaacttcttaatccctgggcagcaactagcccaccataatccatgtagtagttactcagttaatatgtagactaatgaaaaactaacagtttaaaataaaaattttagataataatgaaaataatattaagtaagaacaaataatatttattcaattacggattagaaagatgaattagatatggcccacccactgaggagctgccatttcactaggagcaagcctttcagatatttacaaaaatagctagaaaacaggtataatgtagcaaacaagaagctgtgaacatctaggacccctggattcaagtgcaatgctttctctagaaacgtccaattgtcattgaaagaatactgaaatgaacatatttaaagaagagctttctttttccatttttatagtttataaaatactagtgatagtccttctccttcatataacttccttcaagagttgagaatatgaatctaagaaaactttgagttctgcatataatatatgtgccttacagagcttctcatgtcatgcatcacaactacagggtcacttcatgtcagtgtgcattgtctaagtattgtgatctacaattttttaaccctcagtgctctggtgattttctgagctacaccagatgtgttggcctggttccttccttcctttctttcttttctttcttttctttcttttctttctttctttctttctttctttctttctttctttctttctttctttctttctttctctctctctttcttttctttctttctttctctttcctttctttcctctcttctttcctttctttctctctttcttttctttctttcttctttctttctttctttctttctttctttctttctttctttctttctctttcttctttcctttctttcctctcttctttcctttctttcctttctttctttttctctctctctctttcttgtttttttttttgatggagtctcactctgtcgccaggttggagtgcaggtagtggctcctgcactccacttggctcacttcaacctctgcctcctgggttcaagccattctcctgcctcagcctgccgaatagctgggactacaggcgcatgccaccatgcccagytaatttttgtgtttttagtagagacggggtttcaccatattgaccaggatggtcttgattgtcctggtttctgtgtcattagtgattattggcagggatttatttctaacacttatgtaatattgactttaattcttataatgggatgcataaaatgccaaccagttttaatattctaatg

SEQ ID NO: 693575 - DNA, 624 bp, Homo sapiens
caattaggtgtttctgccccaaacatagaccctgactttaatctttgccttgtamagtagcaccatatataagtccattcagggtgctattaaaaaaaaatagtaccggaaactgggtggcttctgaaaaacagaaatttatttctcacagttctgaaggttgggaagtccaagatcaaggcaccagtagattcggtatctggtgaaggcctgttttcagatagatggcaacttcttgttctgtcctcacatggtagaagaggcatggcagctctctggggcttctcttttataagggcaataatcccattcacggggccctactgtcatgacctaatcacctcccaaatactgtcaccttgagggagcaagatttcagcatatgaatttgggggggacacaggtattcacaccatggcatcccttaacaacattgtccctactgggcaaaacaaacacacacacatccatgacactttcaacagagttggttagttccataaacaaagaagtgttctcttcatcttttcagaatatttcatttgttccaatattcaaaagtataaaggcaaaatatgatcaagatgacttttctgttcaactacctctaccttgtcccaattt

SEQ ID NO: 693576 - DNA, 616 bp, Homo sapiens
tttgagctaggcatcatttttgtgttctcacaacttaacgaatgtgagacaatttgctctgtagtgttgcttggtaaatcactttttcactttcagggtatttttcagtcttgtggatgagaggtcttgacaatagtcattaaagatatgatagcattttcacaagaacaaggacatgtgccttatgtctctttgctgagatccagtctgggtggactaattttaacatttttctagatctacactaatatttcactaggagaagtcactatcygcctaggtcagatctgattaagagctagtaaagaccacctcagttatactctctggtaatggaaggatgtgatgttgtgtagttcaaggaggatgggatagaagtcaaccggtttgggtttgctggatggtgactttggttaagtcacttgaaactccaaactgcagattattattatctagtggagacatattacatatctgtttagcttactcccattaaaccaaacatcatttaaaaagcagtgttacagctcttttagaattagtctagcaggttttccagctctcaccagaaaactaaagaaaaaataaataaaaaaaataagagagagagagaatg

SEQ ID NO: 693577 - DNA, 1034 bp, Homo sapiens
cgacaggaagaaacatcagacagaaatgacgtggcctgatcactcagctattatattggcagcaaagcctttctctggcattacttaattcgtattctcacagtaacagcattctcctatccctaattctcagtgctttaggctatttcccaggaacatgctatatagctggaaagagatataagtacaatttgccagcattaataatagggatattgctccttgcatttgctacttctttctgtatctgtctacttttattttttttcttattccctaaacactctatctccattgtgctgattttttgaagatattcatctatcttgattttccttactttttattttctttttgccttggagtagtgtttccttttcttttcatcctggaatagattattgtcatttcaaggcctcccttgtgagtacttttttctcctttttattgccattcttcagcatttttactggtacttataacagttctccttttcttgctggcttctggcgtgggtttgttgctatttcttgttctttgatgtttcgcatatctgattgttccctttctcacccctgctttctgccacgtttacctctttgctattatttgtttcctattttgaaggttgacaactaaggggacagtrtcattccttaatgtgtttctccagcttactcatgaaatcagcagcagcctccttcacacataaaaccagtccgggagggcaaagtgactcacgtctgtaatcccagcactccgagaggccgagatgggcggatcacttaaggccaggagtttgagaccaaagcaggcaacataaggagaccccatttctacaaaaatgagccagatgtggtggcgcaactgtagtcctagctactggggaagctgaggtgggaggatcgccggaatacaggagttccaggctgcagtgagttacgatggtgccactgaagcctgggagacagagcgagacccctgatatagtttgaatatttgtccctgccataatctcatattgaaatgtaatc

SEQ ID NO: 693578 - DNA, 1836 bp, Homo sapiens
ttcttcactcagcaactgggcacagctcccagccacccaggaacgctaatttggcattaaacagagacttgcagaagtcccccaaatagcagcagtttcccatcctgtagacccacagaatacagcctttttgatatcctctgtctcagttcttcattctgcaaatgaagaagttgaagccaatgaaggtatgaccatctaatctctgtgacaggcagatcttggatgccctctgcaatgggcagctcctagtgccagctgctgtgtccttgtcattgtctctgtgtgtttctgaccctggactcatctggctgcaattcagtggccacatttgtagatacaatacctatttttgaagtatttttgaagagtaaatgagatagcattaaaagcactttaatagtttataaaatactagttgttgttattgttgaaatgtcagtttgcattagattgatatggaaacttaaggtggggcaccaactttgatttgtacctgtaagaatagtcatgtaacaatattgtttgtggatctggttcccttttgccagtctttaaaaaatttcctaatgcaatgccctattcagtgagttaagctaattatctatctgttctcctggagcttaaagccaagacagaaaatactggcagtggcaaagatgactgggccattggccagagtggatccattgataaatccatttttatgtcttgcccaagcactgtgggaaactggaacagaaccatgggacctatactctgccagtgttccaaaaatcaggtcctaggcattcatcatggcaaatttctgctgagttggccatgttaatctttggacagatcagatgtttaagatcatattcaattatacagcaatcatacattggaatatgggaaactcattataaattaggttgttgaatattgaaagacatgggaatttatttatgacaactgttttaggtgcaaaaagcaagctgcaacatggaaatgtatgtaccaaatgttaagaaggagtttctagtggaagaaggagtgtctttttattttcatctttgtatctcttggcattttttaaagaaatgccaattcttccagatgaaggtggcttgacggaagagataacgtcgaaggtgggtctttgatagatgtataagagtttgaaaaggcagaagcgccgggcacggtggcccacgcctgtaatcctagcactttgggaggctgaggcaggaggatcacgaggtgaggagattgagaccatcctggctaacatggtgaaaccccgtctctactaaaatacaaaatarttagctgggcgtggtggcaggtgcctgtagtcccagctactcgggaggctgaggcaggagaatggtgtgaacccaggaggcggagcttgcagtgagccgagatcatgccactgcactccagcctgggtgacagaacgagactccatctcaaaaaaaaaaaaaaagaaaaaagaaaaagaaaaagaaaaggcagaaaaatcatccagaggaatgagagtagcatttgtggaggcatggagtagtgaaatcccatagtttgttctggaactggctggctgttccagctggaccacattcagatggctgactggttatcaaggcaatgtaccactgagactgagagcagtttgtttgacccacacaacctgagtttgagtcttggctttaccatttcaattgtgtgaccttgggcaagtcagtttacatcacctactctatgtgttttcatgtgtaatatgtggataataaaaggaccaaggtatgggggaaggttaaatgaattaacacacgtgaagcaattagacccctc

SEQ ID NO: 693579 - DNA, 1836 bp, Homo sapiens
ttcttcactcagcaactgggcacagctcccagccacccaggaacgctaatttggcattaaacagagacttgcagaagtcccccaaatagcagcagtttcccatcctgtagacccacagaatacagcctttttgatatcctctgtctcagttcttcattctgcaaatgaagaagttgaagccaatgaaggtatgaccatctaatctctgtgacaggcagatcttggatgccctctgcaatgggcagctcctagtgccagctgctgtgtccttgtcattgtctctgtgtgtttctgaccctggactcatctggctgcaattcagtggccacatttgtagatacaatacctatttttgaagtatttttgaagagtaaatgagatagcattaaaagcactttaatagtttataaaatactagttgttgttattgttgaaatgtcagtttgcattagattgatatggaaacttaaggtggggcaccaactttgatttgtacctgtaagaatagtcatgtaacaatattgtttgtggatctggttcccttttgccagtctttaaaaaatttcctaatgcaatgccctattcagtgagttaagctaattatctatctgttctcctggagcttaaagccaagacagaaaatactggcagtggcaaagatgactgggccattggccagagtggatccattgataaatccatttttatgtcttgcccaagcactgtgggaaactggaacagaaccatgggacctatactctgccagtgttccaaaaatcaggtcctaggcattcatcatggcaaatttctgctgagttggccatgttaatctttggacagatcagatgtttaagatcatattcaattatacagcaatcatacattggaatatgggaaactcattataaattaggttgttgaatattgaaagacatgggaatttatttatgacaactgttttaggtgcaaaaagcaagctgcaacatggaaatgtatgtaccaaatgttaagaaggagtttctagtggaagaaggagtgtctttttattttcatctttgtatctcttggcattttttaaagaaatgccaattcttccagatgaaggtggcttgacggaagagataacgtcgaaggtgggtctttgatagatgtataagagtttgaaaaggcagaagcgccgggcacggtggcccacgcctgtaatcctagcactttgggaggctgaggcaggaggatcacgaggtgaggagattgagaccatcctggctaacatggtgaaaccccgtctctactaaaatacaaaatagttagctgggcgtggtggcaggtgcctgtagtcccagctactcgggaggctgaggcaggagaatggtgtgaacccaggaggcggagcttgcagtgagccgagatcatgccactgcactccagcctgggtgacagaacgagactccatctcaaaaaaaaaaaaaaaraaaaaagaaaaagaaaaagaaaaggcagaaaaatcatccagaggaatgagagtagcatttgtggaggcatggagtagtgaaatcccatagtttgttctggaactggctggctgttccagctggaccacattcagatggctgactggttatcaaggcaatgtaccactgagactgagagcagtttgtttgacccacacaacctgagtttgagtcttggctttaccatttcaattgtgtgaccttgggcaagtcagtttacatcacctactctatgtgttttcatgtgtaatatgtggataataaaaggaccaaggtatgggggaaggttaaatgaattaacacacgtgaagcaattagacccctc

SEQ ID NO: 693580 - DNA, 1836 bp, Homo sapiens
ttcttcactcagcaactgggcacagctcccagccacccaggaacgctaatttggcattaaacagagacttgcagaagtcccccaaatagcagcagtttcccatcctgtagacccacagaatacagcctttttgatatcctctgtctcagttcttcattctgcaaatgaagaagttgaagccaatgaaggtatgaccatctaatctctgtgacaggcagatcttggatgccctctgcaatgggcagctcctagtgccagctgctgtgtccttgtcattgtctctgtgtgtttctgaccctggactcatctggctgcaattcagtggccacatttgtagatacaatacctatttttgaagtatttttgaagagtaaatgagatagcattaaaagcactttaatagtttataaaatactagttgttgttattgttgaaatgtcagtttgcattagattgatatggaaacttaaggtggggcaccaactttgatttgtacctgtaagaatagtcatgtaacaatattgtttgtggatctggttcccttttgccagtctttaaaaaatttcctaatgcaatgccctattcagtgagttaagctaattatctatctgttctcctggagcttaaagccaagacagaaaatactggcagtggcaaagatgactgggccattggccagagtggatccattgataaatccatttttatgtcttgcccaagcactgtgggaaactggaacagaaccatgggacctatactctgccagtgttccaaaaatcaggtcctaggcattcatcatggcaaatttctgctgagttggccatgttaatctttggacagatcagatgtttaagatcatattcaattatacagcaatcatacattggaatatgggaaactcattataaattaggttgttgaatattgaaagacatgggaatttatttatgacaactgttttaggtgcaaaaagcaagctgcaacatggaaatgtatgtaccaaatgttaagaaggagtttctagtggaagaaggagtgtctttttattttcatctttgtatctcttggcattttttaaagaaatgccaattcttccagatgaaggtggcttgacggaagagataacgtcgaaggtgggtctttgatagatgtataagagtttgaaaaggcagaagcgccgggcacggtggcccacgcctgtaatcctagcactttgggaggctgaggcaggaggatcacgaggtgaggagattgagaccatcctggctaacatggtgaaaccccgtctctactaaaatacaaaatagttagctgggcgtggtggcaggtgcctgtagtcccagctactcgggaggctgaggcaggagaatggtgtgaacccaggaggcggagcttgcagtgagccgagatcatgccactgcactccagcctgggtgacagaacgagactccatctcaaaaaaaaaaaaaaagaaaaaagaaaaagaaaaagaaaaggcagaaaaatcatccagaggaatgagagtagcatttgtggaggcatggagtagtgaaatcccatagtttgttctggaactggctggctgttccagctggaccacattcagatggctgactggttatcaaggcaatgtaccactgagaytgagagcagtttgtttgacccacacaacctgagtttgagtcttggctttaccatttcaattgtgtgaccttgggcaagtcagtttacatcacctactctatgtgttttcatgtgtaatatgtggataataaaaggaccaaggtatgggggaaggttaaatgaattaacacacgtgaagcaattagacccctc

SEQ ID NO: 693581 - DNA, 600 bp, Homo sapiens
tactrtaatgatggatacatgacattacatattttcaaaactcataaaatgtagaacatcaaaggctgaccctaatgttagccatgcacctcagttaataataatgtatcaatattggttaatcagttgttacaaatgtacctcaccaatgcaagatgttagtaataggggaaactggttatcgggggagcatttgggaactctgtacattctgttcagcttttcccaaaaccactctaaatttgttaagaccttattttaaggtctattgacaaatgacaagaaaaaaattatgtaaattggagttttaaaaattagtatttgtgattattaacttacaaaataaattggaacagaattcatggtttgcttgttaaaaaatgagttctgtttgaaagacaaaagggcgacattatagaaatggaaaatactgtgtttgaggttgtgcatggtgtagtggaaggccacagttcaggggctggtcactctgtgtttgagtcccctccagcccgtttctgagaagtactgggacttcaaattagttacaactaagcttcggacttcacatctgcaaagtgaggatagggagacctacttgat

SEQ ID NO: 693582 - DNA, 600 bp, Homo sapiens
tactgtaatgatggatacatgacattacatattttcaaaactcataaaatgtagaacatcaaaggctgaccctaatgttagccatgcacctcagttaataataatgtatcaatattggttaatcagttgttacaaatgtacctcaccaatgcaagatgttagtaataggggaaactggttatcgggggagcatttgggaactctgtacattctgttcagcttttcccaaaaccactctaaatttgttaagaccttattttaaggtctattgacaaatgacaagaaaaaaattatgtaaattggagttttaaaaattagtrtttgtgattattaacttacaaaataaattggaacagaattcatggtttgcttgttaaaaaatgagttctgtttgaaagacaaaagggcgacattatagaaatggaaaatactgtgtttgaggttgtgcatggtgtagtggaaggccacagttcaggggctggtcactctgtgtttgagtcccctccagcccgtttctgagaagtactgggacttcaaattagttacaactaagcttcggacttcacatctgcaaagtgaggatagggagacctacttgat

SEQ ID NO: 693583 - DNA, 642 bp, Homo sapiens
acaatttctaaatttcttctctaagaagttctttcctaaacttccataggaacaagccagcatacttgcattgactccacattgggagactacagaatcgctccctcaagcaatcctctctccttgcatcagtctcctgtctctgtgcctctagactaacattcagccacactagctgagtgtccccttctgcagactaggaggattgggttgtgtattagacactgtccatgcctagttcgtatctcttaggcgttactacttagtatgtattatcagagcctcccattgcctgaacctgaatctctttgcctgagggttctgggagacttctccaatccctaagaggaccacaccacctgcccctcaaagcagaccagaagttccaggagaatgaagacccctgagaaaagtccttgaccaagaactgatgagtcagtgtgtaaatatcccagttcccttgcctattcgatgggatggctctgaggtgcatgctctgtgtggttttctggaggcccccagcaggatgragcttcagttgcccacagcagtaactggcttgataaattactttgttgactcctttgttggctcctttattccctatccctttctcctcacatgtatctttgtcttaagctc

SEQ ID NO: 693584 - DNA, 642 bp, Homo sapiens
acaatttctaaatttcttctctaagaagttctttcctaaacttccataggaacaagccagcatacttgcattgactccacattgggagactacagaatcgctccctcaagcaatcctctctccttgcatcagtctcctgtctctgtgcctctagactaacattcagccacactagctgagtgtccccttctgcagactaggaggattgggttgtgtattagacactgtccatgcctagttcgtatctcttaggcgttactacttagtatgtattatcagagcctcccattgcctgaacctgaatctctttgcctgagggttctgggagacttctccaatccctaagaggaccacaccacctgcccctcaaagcagaccagaagttccaggagaatgaagacccctgagaaaagtccttgaccaagaactgatgagtcagtgtgtaaatatcccagttcccttgcctattcgatgggatggctctgaggtgcatgctctgtgtggttttctggaggcccccagcaggatggagcttcagttgcccacagcagtaactggcttgataaattactttgttgactcctttgttggcycctttattccctatccctttctcctcacatgtatctttgtcttaagctc

SEQ ID NO: 693585 - DNA, 2204 bp, Homo sapiens
tattatttaatcctcagagcaacactgtgaggaagttactgttctgtattcattttatagatgaagaaactaaggcatagaggagtcaggtaacttgcctaagttacattatgtgtagtaaagatattaggattcaaactcagacaggatagcttcatagtcatgctcttatcctctctgccacaggcctcttagctttgatgtgtaaactcctaacccctagtttctttattggaaaaatgggaataatcttcttcccaatgttacttttggttttaaattaagatatgtattggaaaatgttttgcaaactttaaaacagtgtataactcttgctttaatgcattcctccattttttccatttgttcaagcatattaattgaataattacttcagatgaaataagattgagttcytgctttcaaaaagaacgctgtctactaaagagacagataattaaacaactagttgtactacagagtgatgaactttctacagtaagaaaatggtagaggggattggaggtttgcgcccaagtccattattgaacctcgccagagatatgtaattaaaataattctaaaatatattttgtaagtaacaaaatatttttaaaattatttagctataagatgaatggtttgttagtagtttctatttgggttcccatcttcttacgggacctatattttgaaaggcaaagaaatctgtgggttgactgcatttggaaaatttcccaagtcagcataattcacagatgaacctgtcagggaccaaaacaacatccccaaatgaatataactcaaattattttgaaggtttagtctttacctgtgtactatgcacatggcatatgatgtttattggctttactttgatctactttaatcctgtttttttcctaaaataaattctcgctttagggtaatgtggcttactgacacacttcctatgcactatgtacacaactactgcacctgtttaaatcattctttttaatgggatgcatcctggagttctgaaacggatcatttgatgggattgctagaatgtttgcttccactgaacattttcaacttaagcccttaaaagaaaaacgtttttataacaaagtaatctaaggtaattgtaattttatttgattgactgtgtttagtccaaataaaattggtctggtgttctatcaaccatcaagtaaaataggcgggataaaattattcttctcataatgaaataaaagcatgtgcaaagagaaatgctgacgtagggactataaaaggcatttcaaaaaatgatagaaatactgagttgctgaaaaaagcatttcttatgtttgcattataaggctagtcacttgagcttttgggaatagatatgtcttagaagccgcagtcacattgttagggatcctgggatggctgcctttaatgatttaaaaactcaacaggaaataattgcttcaaaaaattctgtatgctgttcaacccaagagggaccctggccaaattcttattcttgggactttcttggaaatggattaaggaagatgatgaataacattgatctttgcttcctgctccaggtatgaaaggcgagagcagtcttgaagggtagaggaagctgcagggcatctgtgaagggggagtgtggaaaggggaatggtgggcatacaatcagtcccctcctctgtacactcagcagataactggaaagtgctcaaactagttcggggatgtcttctgtttagattgctcagtggggatacccctcagtggggtttgtcagattttcatggtgattttaataatgcactagaatagtaacttggacaaatcttgaggaatatctgtgtttagcagaatgtgtatatttacacagagagacacccatgctgcaaagtttcttatgactgcacctgcagggttgtttatatttgtagatcttcttaatggagaattaaactgaaccaatggcaagcagtgaagcatacaacaaaagcaaaaataaacaaatagaactgcatcaaaccaaaaagcttctccacaacaaaggaagcaattagcagagtaacaaaatgatctacaaaatgggagaaaatatttgtaaaatacacataggataagggttcatcttcaaaatatagggggaacacaaacaatttaataccaagaaaacaacccaattaaaagatggaaaaaggacc

SEQ ID NO: 693586 - DNA, 599 bp, Homo sapiens
gtgtgttgggatgttgtgtatgtgtgtgtgttgggatgttttgtgtatgtgtgtttgtatgtgtgtgtgtgwgagagagagagaataaatattgaaaatttccctgtggaaattctttgaggaaatatttatgcttacttcttcagcgcttgggggcatcaagtatccataaagcccttaaaattattattcttggctgggcatggtggctcacatctgtaatcccagggctttgggagactgaggcaggaggatttcttcacttgggcccagcagtttgagaccagactaggcaatatagtgagaccctatctctacacatacacacaaacacacatacacaaatagtcaggcgtggtggtgcatgcctgtagtaccagttactcagaaggctgaggtagtaagacagcttgagcctaggagttcaaggctgcagtggattactatagtgccactgcactccagccaaaaacaaaacaaaaaaatcattaagtgtgtgtgtgtgtgtcgtgatttcaagactattctttttaatatcattgcagaactcttggtcactcactttcctcccccatcttgccatatgattgcatttgtga

SEQ ID NO: 693587 - DNA, 1228 bp, Homo sapiens
tttgataaaagacatataaaataagtctccctayatcaacaaagctattgctaattaaaaataatcatactttattaatgtctatatcagtttaaaaatattatttttcgttctcagaacaatcttgccatgcaggcattatccttatttgacaaataggaaagtccagttgaagaactccaaggtcacaagggtccaaatgacagactctgtaactcgaagccagtgtgctcctgaatccaagtgtagctgtggactgatggtccttagcctccttcctcagaatggtgatccatcactctgtttacttacaggcaagggcatgaggtaatgccatttattctggcgagaccattgatgctgtgtctaaaggaacctggcacaaataggttctccgtaggtagacatattggggaaatagaaatacccttgaaggactaaggcaacttggaaaatagaaagtaagatggatgggtatggatatggaaatccactgaatcagatacagacacattccttcatggtttaaaaaaaataaaaaataaaagaaactatgaaagtaccaaagacatgaccctaattctccaaggagcacagttgtagggctgctttgggtctctctagtttccgtgagaaaatcttggctggcagggccccctgatgaaagagaaatgactccttgtgtgagatttaaagcatttctaatttgaaagcaaacataattgcacatactttacatacacatgccatgtggaaataataaatgcatttgtgatgaaaatgcttgcttcatttattatactaggagtttttccaagaaatggaaacaattgttagaagtgacattaaatatttaactgagtttcttttttcttctttttcttcgtattttttattaacatattttaaaatgttactaccacccaataaggcatatggctcctgatttgtcggagtctttcattagtttaaaatggagaaatcagtctccaaaaaacacatgcaacgttagaatatgacacaggtgaaacctgaaatgtaaaactatgctctccaaggattttgaggtctgtggaaaatagccttcaattcttacactgtgaaatgggacttcctaagttaggacttggaatagcatttggtggcatagtaaccatgacctaactaactggatggctgttttctgaagtggatagttgaatggccttaaattttcagggtgagatag

SEQ ID NO: 693588 - DNA, 1258 bp, Homo sapiens
aaaaaaaaaaaaaaaaaagttctgtgattacctacagtaaaatactgcatcatcccaataaatacatcaaaaaaaccatcagaaatatcactgtaaaagtaacatgctacttagatgtaaaagtgacatgctacttagaaactctggtacctactgcattataaacataaagctcatttactgaaacttaccataccttaactgtcccttctaaccttccaatccaaacagattttagcatatgtcttactataaaacactaagtcactgtcaaggaccccaatttatacgtaaaggagaaagtataaagaattcaaatatcccgaggcagaaaaacgacagacagaattcacactcaagtcttcctgactccaaagcctgagctcttsccagttcgccaatcttcccaacttgtaaaccttgtgttgccggccacataaagatcccgcaaaaatcaatcaacaactaattaatgggggctgccttttgctctagctactgtgggagccccagaagtagtaccacaaggcccttgacttcaagcttgcattcttcttgaagaaggtatttaagagaatgagatgaggaacaagaacacaggtaaaattagatgtaaaaaaaaaaaaaatagctatactgagggaccggtcagatgaaggaagggctgagattactatgggctgaagctgtcatggaaggcctggatggggaaggccttgaaggagatgattatttttcgctcactcattcgtctatctacacataacatctatgtggcaggcaccattttaggtgcactggcaaacaaaaccaagtcctgaatgtgactgctgaataaagagtataaaggaatgtgcacagtgaaggatttaagaacgtggaaggatctggaatcagattaccctaagtataatgcccagacctgcagccaggcactgcgggcaagctccacggaaaacaactgttgtcacccacccattcaccccgactccccagttacaggcactacttagaggtggttatcgagccacgcaaatccccgaggacgctcgagaagcacgcgccgagagcggctgcgtattggagaggtgattctgttatcttggagcgccccaaaagaggggtggaggacaaacggcgtaggccaggtatccgtccggatgcagagccttcatcctgaggccggtcccctctcggcccaggaagaacacagacaccgatcttggcatccatacccggccctcccgcgttgggtacc

SEQ ID NO: 693589 - DNA, 647 bp, Homo sapiens
ttggccaacaaagaggaatcctggagcatgtccatgatgataataaaaagttcatcaacccatttcctcatttccaggccactaacctgcaaaatgaaaaagagggtggcagaaagggttagaaattctggcattagaaagtattttggaggccgggcacggtggctcatgcctgtaatcccagcactttgggaggctgaggagggcagatcacctggcatcaggagctccagaccagcctagccaacatggtraaaccccatctctactaaaaatacaagaattagccaggtgtggtggcacacacctgtaatcccggctacttgggagggtgaggcacgagaatcacttgaacccaggagatggaggttgcagtgagccaagatcacaccactgcactccagcctggacaaagtgaaactgtctcaaaaacaaataaataaaataaaaaattttttttaaaaaagccctctcttcctttctccaccatcatggtgtgtgcctgactctgattcttgccattcttctcacaagactttcagaattaagcaattcctggccaagaaacaaaagtaaaatcgtcccattccccagtggattcggatgaaaactggtaataaaaccaggtacaactccaaaaaaagaca

SEQ ID NO: 693590 - DNA, 606 bp, Homo sapiens
ctgtaatcccagcactttaggaggctgaggcaggtggactgctcgagcccaagaggcagaggttgcagtgagacgagatcccaccattgcactctaaccttggtgacagagtgagattctgtctcaaaacaaaacaaaacaccaaagcctttaccaaggcatgaaaatgtacacctcaatttggaaaaatctatatcaaagtttaaaaacaaaaaagagtaattttaacatttcaagggctaaattcagtacataaattcattcaaaggagcttcacactctgcaatattgaaaaaatgaaatggcctgatagcttaatatcagctttaagaagattagagccagccgggcgaggtggctcacacctgtaatcccagcactttgggaggccgaagcgggcagaccatgaggtcaagagattgagaccagcctggccaacatggagaaactccatctctactaaaaatacaaaaattagctgggcgtggtggcrggcgcctgtagtcccagctactcaggaggccaaggcaggagaatcgcttgaacctgggaggtggaggttgcagtgagccaagatcacactactgcactccagcctggcgacag

SEQ ID NO: 693591 - DNA, 1191 bp, Homo sapiens
cgccttggcagagaaatagctgaatatcagctttttgagccgaagaactctagagaggccatgtaatgaaactggctactcccaattgtcctaagctccttaactcccctagattccttctgtctggcaagccttaccaggatctgttatcccaactacgagcagtttgctaagcacatctgccaccacttgcactgcggtctggctaaccacatgagcatggccactgatgaggtggatggagggtgtgagcaggcgggagcaggtgcgggcagcctccatgcggatctccttgtgctcactgttcaggaaatgatccgcacagtggcgaacaaattgggtcagagagtggcctggatagaaaggcagagagaaaacagaataaacactgctgctgtagacaggtaggtctgcagcttgctagctgaattttccattttgaggctactaattctactttcaactagayattgatcaatacgatactgacccggaactcttcttttttttttttttgagacggagtcttgctctgtcgcccaggctggagtgcagtggcgcaatctccactcactgcaggctccgcctcccgggttcacaccattctcctgcctcagcctcctgagtagctgggactacaggtgcctaccaccacgcctggctaatttttttttttttttttggtatttttattagagacagcgtttcaccatgttagctaggatggtctcgatctcctgaccttgtgatccgcccgcctcggcctcccaaagtgctgggattataggcgtaagccaccgcgccaggcctgacccagaacttttaaagggtaacaagggggatttcaatcagcagaaaggtaaaagggggtggtgaaggagcaaagagacagataaaaggtatcccccaatcctagcctttttatattccctttaaataataaattattttgttttattccaactcaaccccttacattctcagaggataatacaattcttgatcaaatttaccttgcctcttttagttcccggatttaaataccagacaaagagtctgtgtaggctgggtttaaacatagctactttctattcactagaaataaattatcatgggtgtgaatcaatgttaagtggaggaactgcaatagagaaaccatgggtggctgtctccagacagcatgttcaggct

SEQ ID NO: 693592 - DNA, 1310 bp, Homo sapiens
tctcagaaatccaagtgattgtatttctccattgatccatgctgagtaagtgtaaagctygcctggtgtctgcagggaatcacagagtgagcgggctgtgctgggtgaggaaggaggagggggctgaaactggcccaatggggcccaggctccaaggacctgaacaaagtggcttacttgtagaagggaaagggattacttcctgttgggagaatcagagaaagctttatgatgcttgagcatcatctcttttgtgaaacccttcctgaccacctctctcatccctaaagagaagtgacagctcccctcacatgtgagctccactgtgtatggatgtctggctcagcacctagaactcttttttatttttattttactttaagttgtgggatacatgtgcagaatgtgctggtttgttacataggtataaatgtgccatggtggtttgctgcacccatcaacgtgtcatctaggttttaagcccagtatgcattaggtatttgtcttaatgctgtccctccccttgtccccaaccccctgacaagccctggtgtgtgatgttcctctccctgtgcccatgtgttctcattgttcaactcccacttacgagtgagaacgtgcagtgtttggttttctgttcctctgttagtttgctgaggatgatggtttccagcttcatccgtgtccctgcaaaagacatgaactcattctttttctaatggctgcataatattccatggtatatatgtgcctcattttcttcatccagtctctcaatgatgtgcatttgggttggttccaagtctttgctattgtaaacagagcacctagaactctttagggtcattatttgttcataggtttttcttctttaggggactatgcacttcctagaaacaatgatccaggggtacttaattcacaccctccgtggccatcctgcagcctctatcctatctggctgagtctgtttccaattcagtgctctttatgggggtctatgtaagtaacactcactcagtaggttggtggctttgggaaagtgcctcagtttcctcatctctaaaataagtgtatcaatgaaccagcgcaggtgaagtgcttggaatacgatagaaaatgctcagtcatgtgagctcttgtaactgctattaccattattatcactgttgtcatcatcatcatactcttcaggcttgggtgccttgtagttaattggccatagaatcctagctctcttagttatgaatggataggacactataatttttgatgcagaaggctagttataatccatgtgggctttttta

SEQ ID NO: 693593 - DNA, 1310 bp, Homo sapiens
tctcagaaatccaagtgattgtatttctccattgatccatgctgagtaagtgtaaagcttgcctggtgtctgcagggaatcacagagtgagcgggctgtgctgggtgaggaaggaggagggggctgaaactggcccaatggggcccaggctccaaggacctgaacaaagtggcttayttgtagaagggaaagggattacttcctgttgggagaatcagagaaagctttatgatgcttgagcatcatctcttttgtgaaacccttcctgaccacctctctcatccctaaagagaagtgacagctcccctcacatgtgagctccactgtgtatggatgtctggctcagcacctagaactcttttttatttttattttactttaagttgtgggatacatgtgcagaatgtgctggtttgttacataggtataaatgtgccatggtggtttgctgcacccatcaacgtgtcatctaggttttaagcccagtatgcattaggtatttgtcttaatgctgtccctccccttgtccccaaccccctgacaagccctggtgtgtgatgttcctctccctgtgcccatgtgttctcattgttcaactcccacttacgagtgagaacgtgcagtgtttggttttctgttcctctgttagtttgctgaggatgatggtttccagcttcatccgtgtccctgcaaaagacatgaactcattctttttctaatggctgcataatattccatggtatatatgtgcctcattttcttcatccagtctctcaatgatgtgcatttgggttggttccaagtctttgctattgtaaacagagcacctagaactctttagggtcattatttgttcataggtttttcttctttaggggactatgcacttcctagaaacaatgatccaggggtacttaattcacaccctccgtggccatcctgcagcctctatcctatctggctgagtctgtttccaattcagtgctctttatgggggtctatgtaagtaacactcactcagtaggttggtggctttgggaaagtgcctcagtttcctcatctctaaaataagtgtatcaatgaaccagcgcaggtgaagtgcttggaatacgatagaaaatgctcagtcatgtgagctcttgtaactgctattaccattattatcactgttgtcatcatcatcatactcttcaggcttgggtgccttgtagttaattggccatagaatcctagctctcttagttatgaatggataggacactataatttttgatgcagaaggctagttataatccatgtgggctttttta

SEQ ID NO: 693594 - DNA, 1869 bp, Homo sapiens
gtaaactatccaagggcaaaggctatgtctgattcatctctgaagtcctagagctgtgctatccagcatggcagccatgagccacatgttactattgagagctttatatatggctggtctggattgagctgagctgcaagttcaaaatacacagtggatttcaaagactgagggcaaaaaacatgcaaaataactcaatgttttttatattgattgcatgttgaaatgataagattttgaatatgttgagttaaataaaacgagtgaaaaaagtattaaatattaatggtatttgtattttatattaaaataaatatatactatgctacaatactcactttataataacaaaaataattattacatagtaactttattatttaaattgattttacttatttcttttttatttttaaaaatatggctactagaaaatttaaaattacatgtgtggctcacattatagttctactgggtggcactgccttaggacacagttaacaatctgcttaccgcaagtgagcaatgcatgtagatgggaatggatgggtaaataagtagaggaggaaaaataaaagtaaatgaatggatagataaataaattagtaaattaataaagggttaaacgaacagatgaaaatagatgaatagagagataaatgaataaataaatagaaggatggatagatggggcaggtgratagatgaatggaaggaagaattaatagaatgagggagtgaaagaatggctataaataaaaatgaataattagtagataaataaattaagaaaaaagttaaatatgtaaatgcctacatacaaaagatagacacataaagaaataaagaacagatgtccggagaaaccaggacttgactttgacaagaaggtttgttcttgttcctgggcctgtggagtctaagtctttgaccaagaaaaaaggtttacccttgatcttggggaatttattattttaattgttagccttcatcagaggttattggaatttcttccccctcagacagtttatcacttgtaaattatttgtcacatcgttgcaattctatccagatccttaactttctaatcatgcatcttttatggggtctcctttaaagaagcactataattacgtgccaagggtctcagtaaattttatcaggccataaaatattatactttaattatttgaaaggggaataaaggcaaatgttccctctgcaatactggtgatcaatactgcagggcccatggtagcccaggctggtgcagacgcccttcttggggagtccaagagctgatgcttcctgtcccatgcagagtctgcacacaacagtggggcctggtgtactgatggcctttcttgattccccagtggacattgggcaataatcaactcataagtatacatccttgaagtggtttcattaggcgaagcaagtctaagcagttgttggggagaatgctgttatttcacctttttcacagatgaggaaacttagacccaaagggcaattagacatgggattctaacttaggtctcctggctccatggtggttttctgcccccctcatcatgtcacaactgctattatgaacttgattcagaggatatatatgagtttactgagtggatttttttttttattctcaagggtttggaagtagtaatactctggcgtcagcactttgcctccaacatttaattaggttgtttcttcatgttaaaccctggtgctggaatgaagcagtaaacaaggcagacaagcccatgttcctctggggcttgtggtctccctggggagacaggcattggtcaaattatcatacaaaccatagaaattgcacctatcatgactgctaagaat

SEQ ID NO: 693595 - DNA, 1064 bp, Homo sapiens
ttgtttgtttttgtttttgtttttgagacagagtctcgctctgtcgctgaggctggagtgcagtggtacgatcttggctcactgcaaactctgcctcccggattcaagcgattctctcgactcagcctcccaagtagctgggattacaggcgcccaccaccccacccggctaatttttgtatttttggtagagatggggtttcaccatgttggccaggctggtctcgaactcctgacctcaggtgatccgcccacctcggcctcccaaagtgctgggattaccagcatgagccactgcacccggccgtgtttatgcattttaaagctgtctaggaaaagcaaattttctcaggatacatttttatgcatcttaaagctgtttagcaaaatgtacagtccaggccactgccagaagtgaagcgccaaagtgcatgctctgctgataactgcttctgcttattttcccagttcaatagaaataaatatatatattttttttttggtggagggtaaacttcatgctctgttgcacataagcagccatttccatcagttagccttgtgctttctttataccaaaggcccccaacccccgggccatggaccggtagtggtctgtggccagttaggaattggkccttgcagcaggaggtgagcggcaggcgaggtagcaaagcttgatctgtatttatagccacaccatccctcgaattactgcctgagctccaccttctgtcagatcagtggcgacattagattctcatggcagcatgaaccctattgtgaactacacatgtgagggatctaggttgcactctccttataagaatctaactaatgcctgacgatctgaggtggaacaatttcatcccaaaaccacccccacctccaccccacccctggtctgtggaaaaatgaccttccagaaaactggtccctggtgccaaaaacatgggggaccactgctttatgcaaaactacatgttgtgcctccaagtagaagctgaagaaggctaaagtgggaatgtttcaaacctgtccttccccactcccccaactctcct

SEQ ID NO: 693596 - DNA, 1064 bp, Homo sapiens
ttgtttgtttttgtttttgtttttgagacagagtctcgctctgtcgctgaggctggagtgcagtggtacgatcttggctcactgcaaactctgcctcccggattcaagcgattctctcgactcagcctcccaagtagctgggattacaggcgcccaccaccccacccggctaatttttgtatttttggtagagatggggtttcaccatgttggccaggctggtctcgaactcctgacctcaggtgatccgcccacctcggcctcccaaagtgctgggattaccagcatgagccactgcacccggccgtgtttatgcattttaaagctgtctaggaaaagcaaattttctcaggatacatttttatgcatcttaaagctgtttagcaaaatgtacagtccaggccactgccagaagtgaagcgccaaagtgcatgctctgctgataactgcttctgcttattttcccagttcaatagaaataaatatatatattttttttttggtggagggtaaacttcatgctctgttgcacataagcagccatttccatcagttagccttgtgctttctttataccaaaggcccccaacccccgggccatggaccggtagtggtctgtggccagttaggaattggtccttgcagcaggaggtgagcggcaggygaggtagcaaagcttgatctgtatttatagccacaccatccctcgaattactgcctgagctccaccttctgtcagatcagtggcgacattagattctcatggcagcatgaaccctattgtgaactacacatgtgagggatctaggttgcactctccttataagaatctaactaatgcctgacgatctgaggtggaacaatttcatcccaaaaccacccccacctccaccccacccctggtctgtggaaaaatgaccttccagaaaactggtccctggtgccaaaaacatgggggaccactgctttatgcaaaactacatgttgtgcctccaagtagaagctgaagaaggctaaagtgggaatgtttcaaacctgtccttccccactcccccaactctcct

SEQ ID NO: 693597 - DNA, 1064 bp, Homo sapiens
ttgtttgtttttgtttttgtttttgagacagagtctcgctctgtcgctgaggctggagtgcagtggtacgatcttggctcactgcaaactctgcctcccggattcaagcgattctctcgactcagcctcccaagtagctgggattacaggcgcccaccaccccacccggctaatttttgtatttttggtagagatggggtttcaccatgttggccaggctggtctcgaactcctgacctcaggtgatccgcccacctcggcctcccaaagtgctgggattaccagcatgagccactgcacccggccgtgtttatgcattttaaagctgtctaggaaaagcaaattttctcaggatacatttttatgcatcttaaagctgtttagcaaaatgtacagtccaggccactgccagaagtgaagcgccaaagtgcatgctctgctgataactgcttctgcttattttcccagttcaatagaaataaatatatatattttttttttggtggagggtaaacttcatgctctgttgcacataagcagccatttccatcagttagccttgtgctttctttataccaaaggcccccaacccccgggccatggaccggtagtggtctgtggccagttaggaattggtccttgcagcaggaggtgagcggcaggcgaggtagcaaagcttgatctgtatttatagccacaccatccctcgaattactgcctgagctccaccttctgtcagatcagtggcgacattagattctcatggcagcatgaaccctattgtgaactacacatgtgagggatctaggttgcactctccttataagaatctaactaatgcctgaygatctgaggtggaacaatttcatcccaaaaccacccccacctccaccccacccctggtctgtggaaaaatgaccttccagaaaactggtccctggtgccaaaaacatgggggaccactgctttatgcaaaactacatgttgtgcctccaagtagaagctgaagaaggctaaagtgggaatgtttcaaacctgtccttccccactcccccaactctcct

SEQ ID NO: 693598 - DNA, 896 bp, Homo sapiens
aggaatgcagggcctggcccaagacttgggctgtgagaggcaagggcatcaactctcaaaaatgtggaaatggccatcagagcgccaaggccaaaccccaggggagaggaatcaaggccgtctctggatccctagggcagtctagccatggtgcacaggcaggggcaattgttggtacccactcacaaccgcccaaaacttcacaagcatgttcatattttaaattcttaaatattatatcttgcatcctaatcttgtaaacattaatttagcaaacatcaatcgcctacttggtcaggcactgggttctgaatattaattaagacaatggcctcgagaacctttgcaagaagctcaccagctaatcctrgagaggccccttgttttggatgaggaaatccaggttctatgagattaggtggcagaggtgggatttgaacccagaccatgctagggtgtttctactccttttccagggatcttggccccaccgttgagatggatttcttctggcctgcgggaggggcaccaaactcttagtccatgtgtgggggttgacgggtttgtgagggcagatgtggggtgaggacttgagtagccccagactagatgcaaggcttaaggaggaggggaaaaaagcttgcttgggccggacgcggtggctcgaggcggttggatcacctgaggtcaggagtttgagaccagcctggccaacacggtgaaaccctgtctctactgaaaatacaaaaaaaaaaattggccgggcttggtgacgggcgcctataatcccagctactcgggaggctgaggcacaagaatcgtttgaacccgggaggctgaggttgaagtgagctgagatcgcgccactgcactgcagcctgggcgacagagcgaaa

SEQ ID NO: 693599 - DNA, 639 bp, Homo sapiens
ttaaactcctgacctcaagtgatccacctgcctcggcctcccagagtgctgggattataggcatgagccaccttgcctggccctgtttctatattgtcttccagaacttttgctgttttgcctcttatgttcaggtgttggatccactggaaatgattgtgttgatggtgtgagayagggatcttgttcagggtttttccacatggacaccctcctggcctagcaccatgtgtagaaagcctatcctctttactcctaccacccttatctgacacgtggggtctgtgtctggcttctctctcctccattgggccattcagtgtaggaccgccctgtctttattactccggcagttgatttatcttctctttatcctactagggcgtctgaggcttcataggggcagggacccagatctctctttctcatagacctaactccagtgcccagtacagagtctggttcctcataataagtatttgttggatgaatgaatgagtggatgagtgaccaaatggatggatggcaagctgtggggactcagttaaaatccaggccaggtttattctcctgcgattgaacctttctggggttcctcccaggcctgtcaccagctccctcccctctgtttccttcttc

SEQ ID NO: 693600 - DNA, 1439 bp, Homo sapiens
ggaagctggagccggaggccgggcgcggagttggtctccgccgcccgaggtcagccgctccgcgcacgtcccctcgctgcagcgctaccgcgagctgcaccggcgctccgtggaggagccgcggggtgaggcccggcccgggcgggcctggggtgtcagtgaggagaagagtgggggctccctgggggagtcgggggctcccttgggaagctgaggggtgggtgaggagatggaggttctgtgaaggaagaattgcggttctttgaaaatggaaaagggattccgggaggagacgagggttccatgggagctggggagttccctgcagacttggagggtccgtggtggagatgcgggtttttgcgaggagacgcgggattccgtgagggaagaagtgaggttccttgagattgggacggggaggtcggccaagagagtgaaagtttcatgggaagagaaggggagttcctgaggcgaaaagagggtctctaaggggcgacgggagccttgaagggaggagggccacgaatagaactttctttgcttccctttcacaccagctcagccactgcctcctgagacccttaacctgtgaactgttgagggcaataacgggtctggttcccatcttggggtcctcagattagtaatggagtccccgatctatttttagtatatcggacatcctaatggaaattacgcggtataagactgaacgagttactacgatgtcaagttgttttatttatttttttaacttgggctgggattgtattagtaatagttcagaagttctgatagatggttccatgtctgttaaaatgtatgaggaaaatcggccaggagcagtggctcacgcctgtaatcccagcactttgggaggccgaggcgggcggatcacttgaggtcaggagttcgagaccagcctggccaacatggtgaaacccccgtctccactaaaaatacaaaaattagccgggtgtggtggcgggcacctgtaatcccagctactcgagaggctgagacaggagaattgcttgaacccaggaggcagaggttgcagtgagccamgatagcaccactgcactccagcctgggcgacagagcaagactttgtctcaaaaaaaaaaaaaaaaaaaaaaaaaaaaaaaggtataaggaaaatccccctacccttgccctcagtctgggtaaaggacagatagatagacagatagatagatagatagatagatagatagatagtttgttttgagacaaggtgttgctctgtcacccatgctggagtgcagtggcccgttctaggctcactatagcctgcatctcctgggctcatgcgatctttccgcttcagcctcctgggtagctgggactacaggcggacgccatgacacccagctacttttttgtattttttggagagacgaggttttgccatg

SEQ ID NO: 693601 - DNA, 1439 bp, Homo sapiens
ggaagctggagccggaggccgggcgcggagttggtctccgccgcccgaggtcagccgctccgcgcacgtcccctcgctgcagcgctaccgcgagctgcaccggcgctccgtggaggagccgcggggtgaggcccggcccgggcgggcctggggtgtcagtgaggagaagagtgggggctccctgggggagtcgggggctcccttgggaagctgaggggtgggtgaggagatggaggttctgtgaaggaagaattgcggttctttgaaaatggaaaagggattccgggaggagacgagggttccatgggagctggggagttccctgcagacttggagggtccgtggtggagatgcgggtttttgcgaggagacgcgggattccgtgagggaagaagtgaggttccttgagattgggacggggaggtcggccaagagagtgaaagtttcatgggaagagaaggggagttcctgaggcgaaaagagggtctctaaggggcgacgggagccttgaagggaggagggccacgaatagaactttctttgcttccctttcacaccagctcagccactgcctcctgagacccttaacctgtgaactgttgagggcaataacgggtctggttcccatcttggggtcctcagattagtaatggagtccccgatctatttttagtatatcggacatcctaatggaaattacgcggtataagactgaacgagttactacgatgtcaagttgttttatttatttttttaacttgggctgggattgtattagtaatagttcagaagttctgatagatggttccatgtctgttaaaatgtatgaggaaaatcggccaggagcagtggctcacgcctgtaatcccagcactttgggaggccgaggcgggcggatcacttgaggtcaggagttcgagaccagcctggccaacatggtgaaacccccgtctccactaaaaatacaaaaattagccgggtgtggtggcgggcacctgtaatcccagctactcgagaggctgagacaggagaattgcttgaacccaggaggcagaggttgcagtgagccacgatagcaccactgcactccagcctgggcgacagagcaagactttgtctcaaaaaaaaaawaaaaaaaaaaaaaaaaaaaaggtataaggaaaatccccctacccttgccctcagtctgggtaaaggacagatagatagacagatagatagatagatagatagatagatagatagtttgttttgagacaaggtgttgctctgtcacccatgctggagtgcagtggcccgttctaggctcactatagcctgcatctcctgggctcatgcgatctttccgcttcagcctcctgggtagctgggactacaggcggacgccatgacacccagctacttttttgtattttttggagagacgaggttttgccatg

SEQ ID NO: 693602 - DNA, 1439 bp, Homo sapiens
ggaagctggagccggaggccgggcgcggagttggtctccgccgcccgaggtcagccgctccgcgcacgtcccctcgctgcagcgctaccgcgagctgcaccggcgctccgtggaggagccgcggggtgaggcccggcccgggcgggcctggggtgtcagtgaggagaagagtgggggctccctgggggagtcgggggctcccttgggaagctgaggggtgggtgaggagatggaggttctgtgaaggaagaattgcggttctttgaaaatggaaaagggattccgggaggagacgagggttccatgggagctggggagttccctgcagacttggagggtccgtggtggagatgcgggtttttgcgaggagacgcgggattccgtgagggaagaagtgaggttccttgagattgggacggggaggtcggccaagagagtgaaagtttcatgggaagagaaggggagttcctgaggcgaaaagagggtctctaaggggcgacgggagccttgaagggaggagggccacgaatagaactttctttgcttccctttcacaccagctcagccactgcctcctgagacccttaacctgtgaactgttgagggcaataacgggtctggttcccatcttggggtcctcagattagtaatggagtccccgatctatttttagtatatcggacatcctaatggaaattacgcggtataagactgaacgagttactacgatgtcaagttgttttatttatttttttaacttgggctgggattgtattagtaatagttcagaagttctgatagatggttccatgtctgttaaaatgtatgaggaaaatcggccaggagcagtggctcacgcctgtaatcccagcactttgggaggccgaggcgggcggatcacttgaggtcaggagttcgagaccagcctggccaacatggtgaaacccccgtctccactaaaaatacaaaaattagccgggtgtggtggcgggcacctgtaatcccagctactcgagaggctgagacaggagaattgcttgaacccaggaggcagaggttgcagtgagccacgatagcaccactgcactccagcctgggcgacagagcaagactttgtctcaaaaaaaaaaaaaaaawaaaaaaaaaaaaaaggtataaggaaaatccccctacccttgccctcagtctgggtaaaggacagatagatagacagatagatagatagatagatagatagatagatagtttgttttgagacaaggtgttgctctgtcacccatgctggagtgcagtggcccgttctaggctcactatagcctgcatctcctgggctcatgcgatctttccgcttcagcctcctgggtagctgggactacaggcggacgccatgacacccagctacttttttgtattttttggagagacgaggttttgccatg

SEQ ID NO: 693603 - DNA, 1201 bp, Homo sapiens
ctcacccagcttttttgccacgtctccaatagagatgccagggtttgtggatttgatcttggggcagaattctgaacagaacaggaagaatccagacagtggccttttgggggcattaggatcgttcttgcctcccttagctggtccataatccttcatttctctatcacagtgcactttatccgcctttgccatttaatcgaatttagactctctctctctttttttttttctgagatggagttttgctcttattgcccaggctggagtgcagtggcacgatctcagctcaccgcaacctctgcctcctgggttcaagccattctcctgcctcagcctccccagtagctgggattacaggcgcccaccaacacgcccggctagttttttgtatttttagtagagacgaggtttcaccatgttggccaggctggtctcaaactccttacctcaggtgatccacccaactcaccctcccaaagtgctgagattacaggcgtaagccgccgtgcccagcctagacttctctttcccagacattgtcttccacctctcagagcactttttggaaaattctgcaaaattgacagggacctctggatttttcttatgctcttctctgcacgtctgcacaaagaaggcaaaagcagacatcttgccccttagtttcctggggtcacttctagccatcctgactgtattgttcactagtcttgaaggatatcacttttaagtggacaccattcacatgacattataatttgcaaatttattatgataatttaccagtagatggcagtaaaatgccttgttatttcagaatctgttcgttgtaacaattttcagatatatggaaataaaatgccttgaggagggggtcacttgtgctttgcataaagacatgctatggcgaggcgcagtggctcatgcctgtaatcccagcactttcggaggtggaggtaggtggattgtgtcagcccaggaattagggaccagccagggcaacatggcaaaaccccgtctctacaaaaaaatacaraaattagccaatcgtggtggtgcatcatgcctgtagtcccagctccatgggaagctgagatgggaggatcacttgagcctgggaagcagaggttgcagtgagctgagactgcaccactgcactccagcctggatgacagagtgagactctatctcaaaaaaa

SEQ ID NO: 693604 - DNA, 618 bp, Homo sapiens
gctctagaaattagataatggtgatggttgtacaaccttgtgagtattctaaaaattattgaattgtacgatttaaaatggtcactcatccatgtaaattgtatcaataaaaattatattcatccagccgagcgcggtggctcatgcccgtaatcccagcattttgggaggccgaggcaggcggatcacctgaggtcgggagttggagaccagcctgaccaacatagagaaaccctgtctctactcaaaatacaaaattagccgggtgtggtggcgcatgcctgtaatcccagctactcaggaggctgaggcaggagaactgcttgaacccaggagttggagatcacaccattgcactccagcctaggcaacaagagtgaaactccatctcaaaaaaaaaaaaacaaaattatattcatccaaccttagtgatcatttttaatttttcatgaactacgcaacactrccaaaagaaggtggtttctagataagccttgctgtcatgcatgtattcaatcttttatggttggcccatctccatataccatataataatgttttttaaaaatctgtgctttatggttttaaaatcaatttcagaaggtattaatcttagca

SEQ ID NO: 693605 - DNA, 1596 bp, Homo sapiens
tctcatctatgtttatcacgttcattcatttttcaaattttcattgtggcaccattttatgacaggcactatgctggggatgctggcgactagggtagggagttaaaatgagagtgtctacttggaaagatgaacagataaataatcaccgtgataagtgctgtgctagagatatgcagatgtcaaaagaccttagaaggtctacaatccacttggagggtagggaatatagaaggcatttcagtgaaatagggtgcctttgacaaatcattaagaatgagttctacattaaaaaggggaagagagggtgatagctgaggaggcagcataggcaagaacatccagcatgaaagaacagtgarggacatcaggaacatctttcaggaacatcaggtaaaacagacttagggcccaagtcaaaggagctaaaataatacaccctggaaagtggtatgatcatttctgcatctgctccagagaaacctgccaaaatatgattagcataatacccaagagaacatcacattccccatgtgtgaaaatgcaagagggagttatttctaatagttcataagctcagcaacaacagagtagacacaaaagccatagaatgtgcttaggctttactttaatgatatagggatatcacatatcatcagcctgtggagtacagaggtagtttacaaaggataaaccttcattgtttggaaaggaaagatcagagagctctttatgaagtttaaacaaaatcagagaaataaagagatgtgggaaagaaagaaaaaaaagaaagtacattgaggacagtccaatctaactgtgaactcataagggacagccagtaaattcaaaacagcctactgttttttgattacttgtgctactctattaaaatagccacaaacacaaaactagtctacctctttctctccccattattggccctaacccaaaaatagtgggagtaaatgatttaataatttattttcatgctccattttgttcttaagttaaaattactgtggttggtgcccctcctttagcttctgctaaagactttacataatgaaagctcatgaagtgtctggattactaacagttacttatccaaaaagatgagacatggttcattgatttgattctattagttctctcttgaagatatttttctcctccctctgtgaagaaacatttctttctgtgtcatacaagaggagtcatttttgtagttttaattccctcttgagtcctacaataatactaaaatactcacagtgactacagtatcctttgcagggaaaaaattgtaaattaaccatttaaatatagtcactaagttatgtggcattcactgactcagagttgaaaaagactccaaaattcttatccagtattagagtatacaaggacaaaaggagaggccaaactaagtctaggacgcacaatacaaagaagaaaatgagaagaccaaagttacagtctcaatactatgacatgatactaaaccatacagtcagtcagccaatatatatttgtgggcctagtatatactgggcactgtttgtaggtgtttgggttacatcagtaaacaaaaac

SEQ ID NO: 693606 - DNA, 1596 bp, Homo sapiens
tctcatctatgtttatcacgttcattcatttttcaaattttcattgtggcaccattttatgacaggcactatgctggggatgctggcgactagggtagggagttaaaatgagagtgtctacttggaaagatgaacagataaataatcaccgtgataagtgctgtgctagagatatgcagatgtcaaaagaccttagaaggtctacaatccacttggagggtagggaatatagaaggcatttcagtgaaatagggtgcctttgacaaatcattaagaatgagttctacattaaaaaggggaagagagggtgatagctgaggaggcagcataggcaagaacatccagcatgaaagaacagtgaaggacatcaggaacatctttcaggaacatcaggtaaaacagacttagggcccaagtcaaaggagctaaaataatacaccctggaaagtggtatgatcatttctgcatctgctycagagaaacctgccaaaatatgattagcataatacccaagagaacatcacattccccatgtgtgaaaatgcaagagggagttatttctaatagttcataagctcagcaacaacagagtagacacaaaagccatagaatgtgcttaggctttactttaatgatatagggatatcacatatcatcagcctgtggagtacagaggtagtttacaaaggataaaccttcattgtttggaaaggaaagatcagagagctctttatgaagtttaaacaaaatcagagaaataaagagatgtgggaaagaaagaaaaaaaagaaagtacattgaggacagtccaatctaactgtgaactcataagggacagccagtaaattcaaaacagcctactgttttttgattacttgtgctactctattaaaatagccacaaacacaaaactagtctacctctttctctccccattattggccctaacccaaaaatagtgggagtaaatgatttaataatttattttcatgctccattttgttcttaagttaaaattactgtggttggtgcccctcctttagcttctgctaaagactttacataatgaaagctcatgaagtgtctggattactaacagttacttatccaaaaagatgagacatggttcattgatttgattctattagttctctcttgaagatatttttctcctccctctgtgaagaaacatttctttctgtgtcatacaagaggagtcatttttgtagttttaattccctcttgagtcctacaataatactaaaatactcacagtgactacagtatcctttgcagggaaaaaattgtaaattaaccatttaaatatagtcactaagttatgtggcattcactgactcagagttgaaaaagactccaaaattcttatccagtattagagtatacaaggacaaaaggagaggccaaactaagtctaggacgcacaatacaaagaagaaaatgagaagaccaaagttacagtctcaatactatgacatgatactaaaccatacagtcagtcagccaatatatatttgtgggcctagtatatactgggcactgtttgtaggtgtttgggttacatcagtaaacaaaaac

SEQ ID NO: 693607 - DNA, 1556 bp, Homo sapiens
cgtgtcctaaaacctagcatccataggatcaagatgatctgccaatcttgacaaaattcaacattctttagtgggagataaactttaaaatctatcacccacaatgtccagtaagtaatgtaaaactaccatacatgtgtaaagtaaagggaagtcatacccatggtccaaagaaggagcaggtgatagaaacagaaacacatccatagacaacccagatgttaagaaccagcagacaaagattttaaataactacaataaatgtccttaaaatacatattttgtcaattatacaaatcataacctaacctacccccagaatcctagtgaacttgagttgtccatgatctttaatcaaattgggatttagaatggtttatatttgaaaatctgaagcaaacaacttgaaagtgattaatgacatcaaatttaattacatatttacacctcccagtaggacaagggaaagaataaaatatcttatctccctgtagtgagagggctttattaagatttgacagtagttatttaacagcaataattgagttttatgcaagattatacaagttctcctaatctggcatcaaaatctaatcacagactgatagggtacttaggctcctaacactgagaaaaaacagttgagctgagtacaaaactaatcttcaaaagtagttatcttcatctgtcaatgtgatcttatcaaggatttttataatttctataaacaatcattatattttagctgaatcagtagcattatgctgtctaaacagatagtcagattccttctattttaaaacactttctaccagttcccatcccaccactcaccactcacccccacgctggccctgtaaaaggaatttggcttcaactttcttttcttaatccactaagcaatcgcatgaataaaaagataatcacatgccctgcatgcctgatagaatttttataaatcttctgttttaatatttattttctattttgtgaaaataatatttactgaacaagctagatcatcttctttctccacagaaaaaaaggtaaggttggtgaaaatacactgaaagctctgctaggtacacattatttttgcataaaattttgcttaaaattctgtggaggctggcaaagcactgtagaatgattgacrtggctgccttgatattgttcttgctttttctttgtccacttatgttgaccctgccactcctaaatatgctaatattacttttgctgaggtagggaatcactctctttatacaagttttgttgttcatcttggtctcccaaaaggatggcctcaccaaattttttctttctctcaaggagtttgtttccctcaaaacaggaaagacatctgagggacatacccagaactgtatccataagcattccatcctatcaacaattaacaagtagccagggacagaatttaggcagctccattttctttttttttttttttggagacacagtctcgctctgtcgctcaggctggagtgcagtggtgcaatcttggctcactgcaagctccgcctcctgggttcagg

SEQ ID NO: 693608 - DNA, 1556 bp, Homo sapiens
cgtgtcctaaaacctagcatccataggatcaagatgatctgccaatcttgacaaaattcaacattctttagtgggagataaactttaaaatctatcacccacaatgtccagtaagtaatgtaaaactaccatacatgtgtaaagtaaagggaagtcatacccatggtccaaagaaggagcaggtgatagaaacagaaacacatccatagacaacccagatgttaagaaccagcagacaaagattttaaataactacaataaatgtccttaaaatacatattttgtcaattatacaaatcataacctaacctacccccagaatcctagtgaacttgagttgtccatgatctttaatcaaattgggatttagaatggtttatatttgaaaatctgaagcaaacaacttgaaagtgattaatgacatcaaatttaattacatatttacacctcccagtaggacaagggaaagaataaaatatcttatctccctgtagtgagagggctttattaagatttgacagtagttatttaacagcaataattgagttttatgcaagattatacaagttctcctaatctggcatcaaaatctaatcacagactgatagggtacttaggctcctaacactgagaaaaaacagttgagctgagtacaaaactaatcttcaaaagtagttatcttcatctgtcaatgtgatcttatcaaggatttttataatttctataaacaatcattatattttagctgaatcagtagcattatgctgtctaaacagatagtcagattccttctattttaaaacactttctaccagttcccatcccaccactcaccactcacccccacgctggccctgtaaaaggaatttggcttcaactttcttttcttaatccactaagcaatcgcatgaataaaaagataatcacatgccctgcatgcctgatagaatttttataaatcttctgttttaatatttattttctattttgtgaaaataatatttactgaacaagctagatcatcttctttctccacagaaaaaaaggtaaggttggtgaaaatacactgaaagctctgctaggtacacattatttttgcataaaattttgcttaaaattctgtggaggctggcaaagcactgtagaatgattgacgtggctgccttgatattgttcttgctttttctttgtccacttatgttgaccctgccactcctaaatatgctaatattacttttgctgaggtagggaatcactctctttatacaagttttgttgttcatcttgrtctcccaaaaggatggcctcaccaaattttttctttctctcaaggagtttgtttccctcaaaacaggaaagacatctgagggacatacccagaactgtatccataagcattccatcctatcaacaattaacaagtagccagggacagaatttaggcagctccattttctttttttttttttttggagacacagtctcgctctgtcgctcaggctggagtgcagtggtgcaatcttggctcactgcaagctccgcctcctgggttcagg

SEQ ID NO: 693609 - DNA, 597 bp, Homo sapiens
tcaaattttttaatttgaaatttaaaatattaccaaagccataaatattcctttaatgcagtgaatgtaagaaatctattaatttcaacctgtcktgaataaaaattataatacatatataattttctatgaaaaaattgtatgtattttagataatctatgtacctcacgagtagcccttctatcaaagctcttctcaggatggtggagaatggtgaatctcagctctcacaacataaaagtgtcaaattcttcttagtgaaagaggtgtatagccttgatgtgctagataaaagtggccttcagagaagaagctctccactgaccacggggcatggtcaaatgtccagttggattgctgtgagagtcaaaatgatccacttggcattttgttgatattgaggtgtcaaacctttaactagttggccactccttccagtaagcttctgtacactggacaactgaaagaaagtttgttaagaaggctcccttaaacaaaaggtacaacttataaaatacactgttgtggaaagacaagtatagcttcattatcatatagatgtaaacaaggcagagactaggctaaaataaagtgta

SEQ ID NO: 693610 - DNA, 597 bp, Homo sapiens
tcaaattttttaatttgaaatttaaaatattaccaaagccataaatattcctttaatgcagtgaatgtaagaaatctattaatttcaacctgtcttgaataaaaattataatacatatataattttctatgaaaaaattgtatgtattttagataatctatgtacctcacgagtagcccttctatcaaagctcttctcaggatggtggagaatggtgaatctcagctctcacaacataaaagtgycaaattcttcttagtgaaagaggtgtatagccttgatgtgctagataaaagtggccttcagagaagaagctctccactgaccacggggcatggtcaaatgtccagttggattgctgtgagagtcaaaatgatccacttggcattttgttgatattgaggtgtcaaacctttaactagttggccactccttccagtaagcttctgtacactggacaactgaaagaaagtttgttaagaaggctcccttaaacaaaaggtacaacttataaaatacactgttgtggaaagacaagtatagcttcattatcatatagatgtaaacaaggcagagactaggctaaaataaagtgta

SEQ ID NO: 693611 - DNA, 597 bp, Homo sapiens
tcaaattttttaatttgaaatttaaaatattaccaaagccataaatattcctttaatgcagtgaatgtaagaaatctattaatttcaacctgtcttgaataaaaattataatacatatataattttctatgaaaaaattgtatgtattttagataatctatgtacctcacgagtagcccttctatcaaagctcttctcaggatggtggagaatggtgaatctcagctctcacaacataaaagtgtcaaattcttcttagtgaaagagrtgtatagccttgatgtgctagataaaagtggccttcagagaagaagctctccactgaccacggggcatggtcaaatgtccagttggattgctgtgagagtcaaaatgatccacttggcattttgttgatattgaggtgtcaaacctttaactagttggccactccttccagtaagcttctgtacactggacaactgaaagaaagtttgttaagaaggctcccttaaacaaaaggtacaacttataaaatacactgttgtggaaagacaagtatagcttcattatcatatagatgtaaacaaggcagagactaggctaaaataaagtgta

SEQ ID NO: 693612 - DNA, 810 bp, Homo sapiens
tttccagggcagcctacaaatatccaccatattgaaagaactgtttgaatggatatgtttaatgttccaagaatttatgaaacttaaaaatatatgttgatactacagtttgaaaaggacccagaattggaaaagctgcttgttcatgagtgtcccttgtctctactgtcctgtagtcagtgccccctcaaagttggatgcatctgagtggagatgcttttctgtcacctaaagtcacacatttacctttgatccagaccctccccagaagcagtgcttttgaaatctcttctcctcttctttttgtttgacaaaatataaatgatagtttatttctagaacgatgccaaattcaataaagcaatgatggagttgtgtttcgttttctggtcaagttgacaccataaagtgggttttcctgaatatttccctgttccactggtgttcttggcattgtgaataaacagagctggtgataacatccatcatagaattaagcacattgagtgggtgataaagtcaacaagaagctgaaacaagaattaccacggataagctgccaagagttggctgtagattctaagtggacactgtggctcattcatcttcrcccttcagctttccaccccaacatcatccctgcctcagcactcatgacaagagtaggaaagtaggagagaaggaaagcacagggatcaagtacaggggacaaatacatagcattgatctgcctgagataaaatctaaagacgcagtagtaaattcttaatgagtactgagagagaacaaagaaaaatgttgtgggttttg

SEQ ID NO: 693613 - DNA, 603 bp, Homo sapiens
taaatcactcttgccatgatttaagttccttatactccactgtggcttccccactgtgatttatggtttgccagtaaaaagtagtaatccaaagtagtaatagatcatgttctttcccctatttgcagccactcctattgagtgatttgaaatacacttattttatgtgattgtcaagcccggcaatacagacaaactaatgcttttaggattaaaaatcaaaagccctcccctgcaaaatgtcctaactgtatgtctaggaattacttaaaacataaaatttgcttatcaaatataaacaataccaggttcaagatagaaaataaacacagatttcaggtaaaatataagtattgtatcagccagggcctgccatccccaacttgaccccattgcccaagctgatgtctgcctcttgcagacggccttgcccaatcccygtgccagtgagaaccataccttgttctaatccaattctttctccagaagagagaagagaaatcaggaaatagtttattatttcaattcccagcacctagcccaatgtctggcacagtgcctagaatataaagagcattcagtaaatattgattgaatgaacaa

SEQ ID NO: 693614 - DNA, 594 bp, Homo sapiens
gggaatcatgtataaaatatatttcaatgatagtatgcttttcaggctaaaagaagcatgtacaagtttatgtgcaaagactggcagaatattaaagattgctttttaagattctagattcaattctgtgaagaaagtcatggtagcttgatggggatggcattgaatctataaattaccttgggcagtatggccattttcacgatattgattcttcctacccatgagcatggaatgttcttccatttgtttgtagcctcttttatttcattgagcagtggtttgtagttctccttgaagaggtccttcacatcccttgtaagttggattcctaggtattttattctctttgaagcaattgtgaatgggagttcacycatgatttggctctctgtctgttattggtgtataagaatgcttgtgatttttgcacattgattttgtatcctgagactttgctgaagttgcttatcagcttaaggagattttgggctgagacgatggggttttctagatataaaatcatgtcatctgcaaacagggataatttgacttcctcttttcctaattgaatgccctttatttccttctcct

SEQ ID NO: 693615 - DNA, 664 bp, Homo sapiens
cagggagatcgtcacagtgctaaacctggcaactcttggagaattgttcttttgggcagcccattctgttccatctactgatacttgagagggacctccactggtgagtaggtaacagaacaggttttaatttattttcttttctcctttcctcctcttcttgggtctttaaccatctatctgggatggacaatctccaggaagacaagaggcagccattagttaaaaggaaagttatgctatatcaataaataattgcaggtaacaggactaagatgggaaacatgctgggttcagtttgccagaaatttttaatggtaattctaggatgaggcaatcagcactgtctctggaggccagggcctagactaaatgaaaaatagcccccccaatttagatgctgagtagcctttaagtgtgagagggaaattgtcatcaattttagttctatgggtccaaacatggtactaatgggggcaaggtcatgagttcaaccccaatctctatcagcaagtttaaccccatttaaaaaataagtcgatctcacagccatagactgwtcaccaatttttagtcaaatggctcatcaatttattctactgggctcatgagggactgagggatagaaactttataaaccctccttcaatactggaaaaacaaa

SEQ ID NO: 693616 - DNA, 453 bp, Homo sapiens
ttcactttgagtgtgaaggatgaatgtttttcaaaactctcattgctgtacaaatatgatgtgttaatgcctcaaaatcactgtttacccagctgcttccatgtaaggtacctggaactctcgccagaactttttctctttatgcatctactctcattttcattgccatttctgtagattattttaagaggcaaaagaagcatcatgattttgaggaggtggctccagatactcttaatatttccacaggcaccaaatcccagcttgatggcaggatggaagttaacttgggtaacatacacatgattagagaatccatcatcggggcattcccacccacaattttcctcccaagattctgttattctttkttaggacaaagactacccaggggacgtcattggaaagtctcatgtagctatgaaccaaaactttcctgcagaaaaccctaca

SEQ ID NO: 693617 - DNA, 1152 bp, Homo sapiens
ccaggtacttttgatgtacacactgatggagacaaactaatccagatgaaaagacaaatgaatttttttctacatgcctggaaataatgccagatgattatagatttcaaacttcatagaaaattgaaatttcccccttttgtagggggaatgttttgttaatctagcatacacagcctatgttttctattcttattacttttaataataatttttttcttttcttttttttcagagacaaggtctttgtctgttgctcaggatggagtgtagtggtgccatagcacactgtaatcttgaatttctggactactggcatacaccaccatgcttaggtaattgtttcttattttttgtagtgacagggtcttactatgttgcccaggctggtctcaaactcctgacctcaggtgatcctcccaccttagcctcccaaaatgctaggattataggcatgagccaccatgcccagcctacttttttttttttttttttttttgagatagagtcttgctctgcagcccaggctggagcgcagtggcttcatctcrgtttactgcagcctcccgggttcaagcgattctcctgcgtcaacccccagttaactgggtctacaggcacctaccaccacactcagctaattattgtgggtttttttttgtttttttttgttgttgttgtttgtttgttttttgttttgagacggagtctcactctgtcgcccaggctggagtgcaatggcacaatcttggctcactgctacctctgtttcctgggctcaaacaattctcctgcctcagcctcctgagtagctgggaccacaggcaccagccaccacatctggctaacttttgtatttcgagtagagatggggtttcaccatgttggccaggctggtctcgaactcctgaccttgtaatacgaccgcctcggcttcccaaagtgctggaattactggcatgagccaccgtgcccggcccaccagcctacttttaatggtaattttgaaaatgacagttgacctggtagcctttggggatgtttgtgttcctcctcccagcaaatcgccttccatgggcaacaggcactgctcctctctcatgtgtcagaaaatcagtctgaaactagctatcaaagcgtacaatagtctat

SEQ ID NO: 693618 - DNA, 1152 bp, Homo sapiens
ccaggtacttttgatgtacacactgatggagacaaactaatccagatgaaaagacaaatgaatttttttctacatgcctggaaataatgccagatgattatagatttcaaacttcatagaaaattgaaatttcccccttttgtagggggaatgttttgttaatctagcatacacagcctatgttttctattcttattacttttaataataatttttttcttttcttttttttcagagacaaggtctttgtctgttgctcaggatggagtgtagtggtgccatagcacactgtaatcttgaatttctggactactggcatacaccaccatgcttaggtaattgtttcttattttttgtagtgacagggtcttactatgttgcccaggctggtctcaaactcctgacctcaggtgatcctcccaccttagcctcccaaaatgctaggattataggcatgagccaccatgcccagcctacttttttttttttttttttttttgagatagagtcttgctctgcagcccaggctggagcgcagtggcttcatctcagtttactgcagcctcccgggttcaagcgattctcctgcgtcaacccccagttaactgggtctacaggcacctaccaccacactcagctaattattgtgggtttttttttgkttttttttgttgttgttgtttgtttgttttttgttttgagacggagtctcactctgtcgcccaggctggagtgcaatggcacaatcttggctcactgctacctctgtttcctgggctcaaacaattctcctgcctcagcctcctgagtagctgggaccacaggcaccagccaccacatctggctaacttttgtatttcgagtagagatggggtttcaccatgttggccaggctggtctcgaactcctgaccttgtaatacgaccgcctcggcttcccaaagtgctggaattactggcatgagccaccgtgcccggcccaccagcctacttttaatggtaattttgaaaatgacagttgacctggtagcctttggggatgtttgtgttcctcctcccagcaaatcgccttccatgggcaacaggcactgctcctctctcatgtgtcagaaaatcagtctgaaactagctatcaaagcgtacaatagtctat

SEQ ID NO: 693619 - DNA, 1152 bp, Homo sapiens
ccaggtacttttgatgtacacactgatggagacaaactaatccagatgaaaagacaaatgaatttttttctacatgcctggaaataatgccagatgattatagatttcaaacttcatagaaaattgaaatttcccccttttgtagggggaatgttttgttaatctagcatacacagcctatgttttctattcttattacttttaataataatttttttcttttcttttttttcagagacaaggtctttgtctgttgctcaggatggagtgtagtggtgccatagcacactgtaatcttgaatttctggactactggcatacaccaccatgcttaggtaattgtttcttattttttgtagtgacagggtcttactatgttgcccaggctggtctcaaactcctgacctcaggtgatcctcccaccttagcctcccaaaatgctaggattataggcatgagccaccatgcccagcctacttttttttttttttttttttttgagatagagtcttgctctgcagcccaggctggagcgcagtggcttcatctcagtttactgcagcctcccgggttcaagcgattctcctgcgtcaacccccagttaactgggtctacaggcacctaccaccacactcagctaattattgtgggtttttttttgtttttttttgttgttgttgtttgtttgttttttgttttgagacggagtctcactctgtygcccaggctggagtgcaatggcacaatcttggctcactgctacctctgtttcctgggctcaaacaattctcctgcctcagcctcctgagtagctgggaccacaggcaccagccaccacatctggctaacttttgtatttcgagtagagatggggtttcaccatgttggccaggctggtctcgaactcctgaccttgtaatacgaccgcctcggcttcccaaagtgctggaattactggcatgagccaccgtgcccggcccaccagcctacttttaatggtaattttgaaaatgacagttgacctggtagcctttggggatgtttgtgttcctcctcccagcaaatcgccttccatgggcaacaggcactgctcctctctcatgtgtcagaaaatcagtctgaaactagctatcaaagcgtacaatagtctat

SEQ ID NO: 693620 - DNA, 1152 bp, Homo sapiens
ccaggtacttttgatgtacacactgatggagacaaactaatccagatgaaaagacaaatgaatttttttctacatgcctggaaataatgccagatgattatagatttcaaacttcatagaaaattgaaatttcccccttttgtagggggaatgttttgttaatctagcatacacagcctatgttttctattcttattacttttaataataatttttttcttttcttttttttcagagacaaggtctttgtctgttgctcaggatggagtgtagtggtgccatagcacactgtaatcttgaatttctggactactggcatacaccaccatgcttaggtaattgtttcttattttttgtagtgacagggtcttactatgttgcccaggctggtctcaaactcctgacctcaggtgatcctcccaccttagcctcccaaaatgctaggattataggcatgagccaccatgcccagcctacttttttttttttttttttttttgagatagagtcttgctctgcagcccaggctggagcgcagtggcttcatctcagtttactgcagcctcccgggttcaagcgattctcctgcgtcaacccccagttaactgggtctacaggcacctaccaccacactcagctaattattgtgggtttttttttgtttttttttgttgttgttgtttgtttgttttttgttttgagacggagtctcactctgtcgcccaggctggagtgcaatggcacaatctyggctcactgctacctctgtttcctgggctcaaacaattctcctgcctcagcctcctgagtagctgggaccacaggcaccagccaccacatctggctaacttttgtatttcgagtagagatggggtttcaccatgttggccaggctggtctcgaactcctgaccttgtaatacgaccgcctcggcttcccaaagtgctggaattactggcatgagccaccgtgcccggcccaccagcctacttttaatggtaattttgaaaatgacagttgacctggtagcctttggggatgtttgtgttcctcctcccagcaaatcgccttccatgggcaacaggcactgctcctctctcatgtgtcagaaaatcagtctgaaactagctatcaaagcgtacaatagtctat

SEQ ID NO: 693621 - DNA, 612 bp, Homo sapiens
cctcaaatattccttactttgtgaaaacttccctggctactcaaatatttagtcagractctatttttttccccccaggctggagtgcagtggtgccatcatagctcactaacctctaactcaaggctcaaggaatcctcctgcctcagcctcccgagtagctgagagtgcaagtgtgcgccaccatgctcggctaatttctcattttttattttcagagatggggtcttactatgttgcacaggctggtgaggactgttgattacatatgacagaaacccaaccaactctagttccccaccacctttcaatctgctcctgcctgggtcttcccagtctcggtaaatggcagcttcacccttcaagttgcccaagccccaaatctcaatgttaaccttgatttctctcttttatctcataggcattctgaaggcaaatcctgtttagacccaggcaaaggttcctggtgacccaggctctcatgagcagattgtcccttatcattctcctgaggatgtctggagcttcagtgctgtgtgctcttggcctccacactgggggtgccaccaactcccactgtccagggcttctggtggactctccgaggcaccg

SEQ ID NO: 693622 - DNA, 612 bp, Homo sapiens
cctcaaatattccttactttgtgaaaacttccctggctactcaaatatttagtcagaactctatttttttccccccaggctggagtgcagtggtgccatcatagctcactaacctctaactcaaggctcaaggaatcctcctgcctcagcctcccgagtagctgagagtgcaagtgtgcgccaccatgctcggctaatttytcattttttattttcagagatggggtcttactatgttgcacaggctggtgaggactgttgattacatatgacagaaacccaaccaactctagttccccaccacctttcaatctgctcctgcctgggtcttcccagtctcggtaaatggcagcttcacccttcaagttgcccaagccccaaatctcaatgttaaccttgatttctctcttttatctcataggcattctgaaggcaaatcctgtttagacccaggcaaaggttcctggtgacccaggctctcatgagcagattgtcccttatcattctcctgaggatgtctggagcttcagtgctgtgtgctcttggcctccacactgggggtgccaccaactcccactgtccagggcttctggtggactctccgaggcaccg

SEQ ID NO: 693623 - DNA, 612 bp, Homo sapiens
cctcaaatattccttactttgtgaaaacttccctggctactcaaatatttagtcagaactctatttttttccccccaggctggagtgcagtggtgccatcatagctcactaacctctaactcaaggctcaaggaatcctcctgcctcagcctcccgagtagctgagagtgcaagtgtgcgccaccatgctcggctaatttctcattttttattttcagagatggggtcttactatgttgcacaggctggtgaggactgttgattacatatgacagaaacccaaccaactctagttccccaccacctttcaatctgctcctgcctgggtcttcccagtctcggtaaatggcagcttcacccttcaagttgcccaagccccaaatctcaatgttaaccttgatttctctcttttatctcataggcattctgaaggcaaatcctgtttagacccaggcaaargttcctggtgacccaggctctcatgagcagattgtcccttatcattctcctgaggatgtctggagcttcagtgctgtgtgctcttggcctccacactgggggtgccaccaactcccactgtccagggcttctggtggactctccgaggcaccg

SEQ ID NO: 693624 - DNA, 564 bp, Homo sapiens
caagacaagcaacttttgagtatctagaattctggctttcaaaatgagaaattgcygtctgtgagccgggaaaccaatttccgaacctagaaggaaccagggggcgatggtgtttctgtgagagcactttgcacacttgcctcctttctgtcacagggccaggcagccctcaagcgagtaaggtgaaaggttggaggtaggttcagtgctgacctcaagagaggcctggcgctgggcagtctaccctgtccctccccacagagctcactgcctcactttccacctggcctctttctcctcccgcagaccagttctctctgcactactcatcggcttacccgtggatccaggctcagaaaacattccacctgtgtgaaactgtgcaagacccacggatccaggctcagaaaacttgccacctgtgtgaaactgtgcaagacccgtggatccaggctcagaaaacattccacctgtgtgaaactgtgcaagacccacggatccaggctcagaaaacttgccacctgtgtgaaactgtgcaagacccgtggatccaggctcagaaaa

SEQ ID NO: 693625 - DNA, 564 bp, Homo sapiens
caagacaagcaacttttgagtatctagaattctggctttcaaaatgagaaattgctgtctgtgagccgggaaaccaatttccraacctagaaggaaccagggggcgatggtgtttctgtgagagcactttgcacacttgcctcctttctgtcacagggccaggcagccctcaagcgagtaaggtgaaaggttggaggtaggttcagtgctgacctcaagagaggcctggcgctgggcagtctaccctgtccctccccacagagctcactgcctcactttccacctggcctctttctcctcccgcagaccagttctctctgcactactcatcggcttacccgtggatccaggctcagaaaacattccacctgtgtgaaactgtgcaagacccacggatccaggctcagaaaacttgccacctgtgtgaaactgtgcaagacccgtggatccaggctcagaaaacattccacctgtgtgaaactgtgcaagacccacggatccaggctcagaaaacttgccacctgtgtgaaactgtgcaagacccgtggatccaggctcagaaaa

SEQ ID NO: 693626 - DNA, 564 bp, Homo sapiens
caagacaagcaacttttgagtatctagaattctggctttcaaaatgagaaattgctgtctgtgagccgggaaaccaatttccgaayctagaaggaaccagggggcgatggtgtttctgtgagagcactttgcacacttgcctcctttctgtcacagggccaggcagccctcaagcgagtaaggtgaaaggttggaggtaggttcagtgctgacctcaagagaggcctggcgctgggcagtctaccctgtccctccccacagagctcactgcctcactttccacctggcctctttctcctcccgcagaccagttctctctgcactactcatcggcttacccgtggatccaggctcagaaaacattccacctgtgtgaaactgtgcaagacccacggatccaggctcagaaaacttgccacctgtgtgaaactgtgcaagacccgtggatccaggctcagaaaacattccacctgtgtgaaactgtgcaagacccacggatccaggctcagaaaacttgccacctgtgtgaaactgtgcaagacccgtggatccaggctcagaaaa

SEQ ID NO: 693627 - DNA, 542 bp, Homo sapiens
aaaaaaaaaaaaaatcgagaggtgcagggcaatggagacagaaggccaaaggctgggtcagacccctaccagccaggttcttgscaccagctctgcagaccccaactaggggcatcagcatcaggggctaggcccaagggcctagaaaaggccctccaagctggtgcttttcatccctacacaaattgcacccccacctgtccctacagtaagggcgctacccctccagccctgtgtccagcccagctcagcctagcactggccaaccatgacccaacaaaacggagtccgcactgagccctccatccaggctgagtgctgacagagaggctcccagagcaccagggttatgcccttggagattccgatgtcctgacgggaacacagaggccccgagaggcaaaggtgtcagaggcgtgtgagccagaccaacaccatcttaaataggagctgagtaaaatgaggctgacacctactgggctgcattcccagacgggtaaggcattctaagtcacagggtgagataggagttcagcacaaaa

SEQ ID NO: 693628 - DNA, 678 bp, Homo sapiens
tgtaatcccagcactttggcaggccaaggcgggcggatcatgaggtcaggagatcgagaccatcctggccaacatggtgaaaccccgtctctactaaaaatacaaaaattagctgggcgtggcggcgtgcccctgtagtcccagctcctcgggaggctgaggcaggagaatcactcgaacctgggaggcagaggttgcagtgagctgagatcatgccactgcactccagtatggcgacagagcgagacttcatctcaaaaacaaacaaacaaaaaaaaacggaggctgttggctgggtgcagtggtttaagcctgtaatcccagcacttgggtggccgaggcatgcggatcacctaagctcgggtgttcaagaccagcctggccaacatggcaaaatcccatctctactaaaaatacaaaaattagccagatgtggtggtgcctgcctgtcatccctgctactcaggaggctgaggcagaattgctcgaacctgggaggcagagattgcagtgagccgagatcatgccactgcactccagcctaggtgagagygagaccccgtcccagaaaaaagaaaaatactgagcccaagatggaaattaacctaagctcacagaggctgaggcagtaggatcatttgaacccaggagttcaagaccagcctgggcaacataaaa

SEQ ID NO: 693629 - DNA, 1203 bp, Homo sapiens
ttgaccgtgcactgctctccacagtcagcttcacactagagttatgcattttgtctcaataagatagtgagtgctgaaggagagaaacctaggctttactctggggtcccctcaaagtacaatcatcttcctcattaataaatacacacacccatagagtttatttaatgcactattgtaccaactggagttttctgaagctggcattctgaagcayagaaatctgctgaagccctgagaaagagctgtgaaatattcccactgctggactaaacaacacataccttcaggattttgcagttttctccaatttcataatttaaataagcacatctctcctacctctaattttaactcacagttgctgattttattgccaaacattttaatattagccaacgttgttcttttacaaacgtttctctaatttttactccaaagaacagctctggctccagccagagcttttaaaaacagtgaagtaaattgatttgtaatttctcctaatgcaaataaactaataaatccatactagtcactgcttttcaaaatgacacttcaacgatgatttgtaatacagtaccttgagctggaagtaaaatatgaatcgtcactgtcatcattatacttttttcttggttttgccataatgggtgattcctgctctatggtctgcatatctgaagtcactgaatgtgaaataacacttgagaaaacagaaaaatatatatatcagtaagttcacaaacttttgtttcaccaaaataaacaaagctttaatttatgttttgaacaaagacaaatgtattcgaggggttaaaaacataagcaataaaacaatttttttttctggtgcaagctttcaaaaatgttaaaattttgtgaggactgtgtctacaccaaatgcagtcacaaatattggttatgtccatggtttcctctctggtaggtgcttcatgtaaagagccagacctttttccttcttttaaagagccaaatttgaaatttttcatgttatactgaataccagagcaaagcaaaaataattagagaagttaatgaataacaaaaaaaaatctctaaagttgaaactaacacagtccaagaaaaatccactgatgattgacacactgttttaaattctaactccaagaaagcagtctcacataccttctgcaatttccaaatcccatgccgagtctg

SEQ ID NO: 693630 - DNA, 608 bp, Homo sapiens
taaaggatttcaccctgtgggaggggagatatgaccacagatgtttctaagctgcctctcagtgtctcatcagacctgtctccgctgggttctttgcctgccccttgtgctctggggaggcaaggacaagttccaaaatatgtggacaggttcacatcagataagggcattttcagacccctctgcttctgagattgtctctgtactgtctagcagggtagccatgggctacatgtggctcttgggctcctgaaacatctccagggcagatggggatgtgctggaagtgtaagacacacactggattttgagactttgttaaaaaaaaaagtctcaataattttatattgattagatgttaaaatagtaacattttggatagactaggttagacaaaatatattgctggaattgatttcacctgttcttttaaccttttaatgtggctacaaaaatttttaaattatgccaggcccagtggcccacgcctgtaatcccagcactttgcggggccgaggcaggcagatcacgaggtcaggagattcgagaccatcctggctaacacggtgaaaccccatctctacwaaaaatacaaaaaactagccggg

SEQ ID NO: 693631 - DNA, 654 bp, Homo sapiens
gagatcacaccacaccacactccaccctgggcaacagagtgagaccttgtctcaaaagaaaaaaaaagaagaaagttattgatgggagtgtagtgaaatttgtgaactcactccrgctaacagttgacatggtgctcaacttagatggagtattcccacgcttccctcgaaatacccaaatactccacagtgcccctgcaaatcactatgacacgctggggtaccttggtacccagtttgggaaccatgtcttagttttagtgtttttcttttttttctttctactaaatggtttatttatgataaatgtctacgtttaggattatttggcttagaagtctgaccacattgtgtggctcttgataaaattatttttttctttggtttttttgtccctttctcctcttccttctccatctttcctccctctgttgcttcctccttttcatatctttcagcgtctactgtgtgcccagcactgctctcagtcattctgtttataggagaggggtggaaggacttcaccttttcatttttatttttatttttttttgagacggagtttcgctcttgttgcccaggctggagtgcagtggtgcaatctcggctcaccacaagctccgcctcctgggttcaagcgattcttctgcctca

SEQ ID NO: 693632 - DNA, 654 bp, Homo sapiens
gagatcacaccacaccacactccaccctgggcaacagagtgagaccttgtctcaaaagaaaaaaaaagaagaaagttattgatgggagtgtagtgaaatttgtgaactcactccagctaacagttgacatggtgctcaacttagatggagtattcccacgcttccctcgaaatacccaaatactccacagygcccctgcaaatcactatgacacgctggggtaccttggtacccagtttgggaaccatgtcttagttttagtgtttttcttttttttctttctactaaatggtttatttatgataaatgtctacgtttaggattatttggcttagaagtctgaccacattgtgtggctcttgataaaattatttttttctttggtttttttgtccctttctcctcttccttctccatctttcctccctctgttgcttcctccttttcatatctttcagcgtctactgtgtgcccagcactgctctcagtcattctgtttataggagaggggtggaaggacttcaccttttcatttttatttttatttttttttgagacggagtttcgctcttgttgcccaggctggagtgcagtggtgcaatctcggctcaccacaagctccgcctcctgggttcaagcgattcttctgcctca

SEQ ID NO: 693633 - DNA, 654 bp, Homo sapiens
gagatcacaccacaccacactccaccctgggcaacagagtgagaccttgtctcaaaagaaaaaaaaagaagaaagttattgatgggagtgtagtgaaatttgtgaactcactccagctaacagttgacatggtgctcaacttagatggagtattcccacgcttccctcgaaatacccaaatactccacagtgcccctgcaaatcactatgacacgctggggtaccttggtacccagtttgggaaccatgtcttagttttagtgtttttcttttttttctttctactaaatggtttatttatgataaatgtctacgtttaggattatttggcttagaagtctgaccacattgtgtggctcttgataaaattatttttttctttggtttttttgtccctttctcytcttccttctccatctttcctccctctgttgcttcctccttttcatatctttcagcgtctactgtgtgcccagcactgctctcagtcattctgtttataggagaggggtggaaggacttcaccttttcatttttatttttatttttttttgagacggagtttcgctcttgttgcccaggctggagtgcagtggtgcaatctcggctcaccacaagctccgcctcctgggttcaagcgattcttctgcctca

SEQ ID NO: 693634 - DNA, 1179 bp, Homo sapiens
ataggctgcccaaatccagggcattgaatcagagttatataacttctctgctagcttctctatttataacagtgaagtgttggcatgtatgtgaaaatttaaagtaaagcctgcttcctcatgatcttgtgatctttaatttttacctttagtttaacaaatatttcatcatgataactttttagtggataaggagggagcattcttttcaagactgcaaaattttaatttgctttaataaaaaattctggttagtataaacatttaactgtaaatatgatgctaaaggtcaacaatactgtgcaactagttgctggaaatatgtaaaacattatatagacatcatatattaagcattatatagatttttttatttagtatgtatatttatgtatctaaaatatgggtgaaattagtatgttacaaatatattttttaaatttcaaaaatggctttaaaaccaaagattataagaggtggctcatgaagaagacttaggtgacagtttatgctcactgttaaatgtaatcattaaaaaaattattttacaaagaaaacaatcagaatcccagtatgttccgattctctatccttccttctgtggcaatggatgtctgtgttctacccacattcccccaatctcacacttctgataacatgcctatggcttcttactggaaagctgtgactctcagcagcagggctttctcttgccataagaatgttggcctttgcgtgtgagtggggttggcrgataaatatttcagcttactttcccgtatataggaggctttggagttgtgttctgtactgcccccagagtcctctgtaggattcaatcccagctgccaacagcagtcacttgctcctatctatgtgccctgtagggaagtgttccatcctttgtcccctgtctcccttccttactcctttcaatatgattcctgggatcacctttcattcaaatccttgtcttggggtctgctcctgaggaaattcaaccccagacagtttccaggaatgaatttgtttggtgtccattttttttgcttctatttctctttccctctctttctccctcacttcttcactcatatatatatatatacatatatacatatgtatacacacccatatatacatatacatatgtgtgtgtgtgtgtgtgtgtgtgtgtgt

SEQ ID NO: 693635 - DNA, 1750 bp, Homo sapiens
ttaaattatgctaatatatgaatgcagagagaagagaaagagcaggtgcaatgaggcagtgaaagcctgaaattagccgcaagaagggtaaaaagtgcagtaattcagtagaggctgagagtaactgagtcatcacaaagccaggagcacgggagagcacagagcatgccggctttggagacacaggtcccagagccattacagcatccacagggctcctgttggataagttgcatctcctttgatcaggggtgtgaggcaacttctatttccttccttacctttgtattcttacaataaactcgaatacctccggtaacacaagcacatacctgtgcctcctaccaagaaaataaatacctcgatgacgtcgggttgtattatataattgtggggaagaasagaagggaaaaaggagagacattagctcactttttggggaaaatccttgctttgctgaggtgggtaaaacatttaaaagttaatctgttaaaggaactggaattctctgggcacatgccaacccgcagctgagacgtggtctggaattgtgtgactaagtaaaatggttcataggaaaaggtttgcctctgtgtcaacaggcagatgattcgtaattcatcaagatttagccaagacaataagagaaatatatgagcattgcaaaggactcatctcaggcatcaccttctcaggggaagactcttctaacacccttcttccctgcgcaagacctagtgtcatcccattcctccagggcccgtaacactcctgatgcacttctctctttgatcatactgcatcggatggtactcatctatttactcatttctcttcactgggctatgggatccctggaggcagggactatgtttaatacgtcttgatatccccagccactaaccaatggcctccatatagtaggcactcaataaattgttgagtgagtaaatgagcaaattcactcctacagtttacctcacgtactttttaaggaggggaaaagaatccattttaactcgagtataggttttctttcctgaagagcatatggataaaggacagctactgatttcttcagagggagaaaaatgatagaacaggcctccatgctatatttcaaactcatgtcaagttttcttttaaaaaaatgtctgtccaccagcagtcatatcatttttcaaatttcatgtcgtccattttctgaggctgcccatctgtcattttacgcagagagtatccatcatgatagaagctaaataattttcaaagccgtcaaggaatggacacaaaaaaggtccccatttcatctgaacaaagttgtccaaggctggcggtgaggatatgactgggaaaggacagatggcaccctgggagtgcctctcaaattggttccaaatggaacaaagaaaaaattcatttgagaaactagacttcagtccttcatgttttatgttacacatgcacctatcagtaccataattaggtaagagtttatttagagcaagtgtgtctgtaaaaataaaattcattttttctaatgattatgtttttctttaaacatagttatgtatatagttttttctaattttaatcttaagagtgaatcatatttatttgccgaatacagaaaagtgtaaggtggaaagtaaaaatcacatattattgcattacacagaagtaaccattaatactgttatttttgatgcattttttagtcacatacacatgtttgtacacacacacaatg

SEQ ID NO: 693636 - DNA, 1216 bp, Homo sapiens
cgttggaattttttccaggtgattctaacatgcagctaggcatgagagtcattgcttgttctcactgcaaatcagtatcatgtcattttctatctccagaatgaggtggagctagctggcctatactggtttgtgagagcccattattgaaatctcaggaactttacaaaccagttattaagaatggtcattattaaaaaaaaattatrtgaactttcaattaaataaatttgattagcagcaaagataataaagtctcaaaactaagtaattcctaattattttgcattttactgttacctacactttacgttatttgcatctattgcatctctgttacatagtatgacaatactatataatcatgtactatggtgaatcatttcccacttccacgttcagtgacatcatgttagtagcttgaaatagttcatggtgggaatatttacaccacagacattggcaaacgatacaagtcaaggctttatttattgttttgctgattgtctaggcttgagaaaatgacagaagtcctgttaataatgcagattaaacttgaatacgtttcatgtctatagctgttgtgaagagcaaaagaactgaggtcatattctttgagtatttgaaagctatgacatgattcagcaataaagcagctcatatcatcagtgagtaagtataatttccatatttttgtattttcactttaattttactctttactgtagacaaaaatgttagccaataatcatgtctccgctatactcatttatcaattgtaaccataggttgactgtggggacaagggctgagaaggaaatcaatgaaagtattatgtgagaatcaattaactctatggaatttataataaatactgaatatcttattattatttgcaaattgtgtgcaacatatcctttatatcagtaaaatttgtagcaaacatctatgtgtatatatacatccttttttttttcctcgagaaccagttgttaaacttacactagcatgctaccacctacctccacacctttcttcaaaagatctttatcccctgactcactctcttttctccatattcctgataaggctgttcttccagaagccagaggaaagccctttgttatagtctttacaggttagccttccacacctcttggagaagaatgggagggatctggaggggcaaacagaagatatacgacataattagctg

SEQ ID NO: 693637 - DNA, 587 bp, Homo sapiens
tggagagccgaggtgggcgggtcacctgaggtcaggagttcaagaccagcctggcgaatgtggtgaaaccctgtctctacaaaaattagccaggcatgatggcaggtgcctgtaatcctagctactcaagaggccaaggtaagagaatcgcttgaacccgggaggcggaggttgtagtaagccaagatcgcgccattgcactgcagcctggggtgagagagtgagaactctgtctcaaaaaaaaaaaaaagaagaaaaaaaaaaaagaattaaaaaaattttccagcctattttgacaaaatcaggagctatggcagcaatgactgtttattactgaatggcaacaaatggctggagctgggttgctaccacatctgttctagtttgccacagtcctctcygcttcttaatatttcaaatctagattgcttcacttatttgtaagacctgaatgacctctgtaagcttttggtttgtaatcctgtaaatcagcaacctaatggtaacaaagctaccatttcactgggttcctagcctgccactttacagagactgtctcagttatttcttaccatatcttttgaagg

SEQ ID NO: 693638 - DNA, 662 bp, Homo sapiens
ggtttgttacatatgtatacatacgccatgttggtgtgctgtacccattaactcgtcatttacattaggtatatcgcctaatgctatccctccccccttcccccaccctatgacaggccccggtgtgtgatgttccccttcctgtgtccaggtgttctcattgttcaattcccacctatgagtgagaacatgcggtgtttgattttttgtccttgcaatagtttactgagaatgatggtttccagattcatccatatccctacaaaggacatkaactcatccttttttatggctgcgtcttagtttcctttttgtgttaatataatgagttttgtcattttccaaagaataaaattaagagacagaagttttctgactcaatgaaaaaggtaagaattaatttttaagcaatctctaaagtagtgattttcaattaggagagtacaaattcagggcaaggctggagagagtgtctttgtagtttgaaaagaaatattcagttgccgggcacggtggctcacgcctgtaatcccggaactttgggaggctgaggcgggcggatcacgaggtcatgagatcaagaccatcctggctaacacggtgaaaccctgtctccactaaaaataccaaaaaaaaaaacagccaggtgtggtggcgggcac

SEQ ID NO: 693639 - DNA, 570 bp, Homo sapiens
caggctggagtgcagtggaaatggagcaagagtgagtggccatttgttacttagtaaaataggattttgttgtctgtctagccctgttgactagctcaaattgagcagtttttctccagtattttaaactaacaatttgagtaatacagaacagtaatcctaagatttctatctgttgtgctaacttcactcctatctgaactgataatactctcgcagacattaacttatcagttctctgatttcactagtgtaggactcactcatcttcttgtttaattttaaatctccagacctcactaattgaaggtctaacttgtgctaggcaatattctacacagagaaaattaaaaagatttgatccctttcccttcaaagtttactctctgaaatagaagttgactatgctataattgccaagggcatgtgacactgtgcagtgtcccagctttgttttgttttgagatggggtcttgctttgttgtcgaggccgctcttgaactcctggcctcaagcaatcctcccacttcagcctcccaaagtgctggrattataggaatgagccaccat

SEQ ID NO: 693640 - DNA, 579 bp, Homo sapiens
ggctgagggtaaaaagctgggattggtaggctgggtccagaacactgaccggggcacagtgcaaggacaattgcaaggtcccatctccaaggtgcgtcatatgcaggaatggcttgaaacaagaggaagtcctaaatcacacatcgacaaagcaaacttcaacaatgaaaaagtcatcttgaagttggattactcagacttccaaattgtaaaataatggcctgaatttaagttttctaagataaactcagtggtttggtttttattattaatagagatagaactattgtgtgttaatrttagcattagtcaataagttattttaatgtcagatttttgaatgttattatatattacctgtatgatggaaggattaccactgtacacaaatctaatcaataaaaacgttagaaccttctgcttagagtacttttaaaaaatcttcagtgaacttccttttgggcgaaatgagaggtctttattcagtaaacatttgtaggaagaggattttgaggtaatttaaagaggtctgaaagaaaaaaagtctgagtcatttctttaaatggtttctatgaaatg

SEQ ID NO: 693641 - DNA, 617 bp, Homo sapiens
tcgatatgacacaatgtatttttatgtatttgagacaggttctcactctgttgcccaggctcgagtgcagtggcatgatcttggctcaccgcaacctccgcctccccagttcaagcaattcttgtgcctcagcgtcccaagtagctgggattacaggtgtgtgcacgcctggctaatttttgtatttttagtggacacggggtttcaccatgttggccaggctgaactcgaactccaggcttcaagtgatcggccctcccaaagtgctgggattacaagtgtgagycaccacgcccggctaggcacatggctttctcttagccccatcacatcctgctttttcagattgctgggttcaacttcccagctccctcttactaggtctgtcacattaagcaggttacttaggtacctctgtttctgtaaaatgggaatgttaggataatacataatacataatacataggataatacataataatgtgagataatacgtaaaaaacctttagcatagtacccagaacataacactcaataaatgttagctgttatgtctgtgatgtagaccacattctcacaacaaaacaagcttggagatgagaagttgcccaaggtca

SEQ ID NO: 693642 - DNA, 602 bp, Homo sapiens
tcactacccctgccttaaaagaaatgcttaagggaattcttcaggtagaaaaaaaaggataataattagtgtcataaatacatgtaaagtataaaactcactggtagagataaatagtcaaacccagaatactccaatactgtaatggttatgtgtaaatcatacatactgctagtatkaagtttaaaattaaaaatggtcaaacacatactggttaaagaaagtattttaagcttttggaaatcatgagatgaaatacttagagccatagttcactgcaggaagccaaagtttaacttttcatgaccccaccaaaagtcccatggaggatataggaagtgcctgccattgccaagaaaattctgcctctaacatcagattatgggaatctcagaaaaacagggatttccactggttgcttacaagtcagaagaagaccaaggaaattatgtaacaggataaggtgactttaaacatacattgaaaaagacccattcagttgggaataacacaaaacaatcagcattcacaatattgttttatgcctgatgcatgctcttttaaaacctcatccttcttcaactgggtagcagcaattttat

SEQ ID NO: 693643 - DNA, 2260 bp, Homo sapiens
attatcataagatctactgcaacagttttgcaaatgatgacgatacatttagcaattttccaaattatgatacctgcaactttctttatttgtgctgtattgtttagatgtatgagaattcccagcaattggaagaagccaaagtgctacccatctaatctcttcatccacaccyacaaaatctgccaaactcctaaacctgagacatttatttgagagacatgagtgtttttcataataacccatcttcaacttatttttgttgagcccacagaggtattttgaaaatatgcttctgtatttttttggctctactataaaacaaaataaaaagaagaagaaaactcccaacaaacagaagttatacagttctatggtgctatactagaaagctatttttgtgtgaaggaatatgacttagttaagaaacaatatcaagtttgggttatggggggaaataaactgtagtccttttatcatgatctccatgattaattcataattcaatctcaggaaattattccttagattcaatttcttaatttcataaattgaaaggattagatgcaataatttctgatgtccattttagtcaacttaattaaatggtattacaggagtccccccttatttgcagttcccatttcatagtttcagtcacctgccgtcaactgtggtccaagaaaaaataaatggaaaatttcagaaacgaacaattcataaattgtaaattacatgccgatttgagtagtgtaatgaaatctcaaactctctccctccctcccacctgggacataaatcatcactttgtccatcatatccatgctgtgtatgttacctacctattagtcacttagtagccctagagctgtctcagttatcagatctactgttgtggtatggcagtgcatgtgttcaagttactgttattttacttcataaaggttgtacaacataacagtagttatgctgacaaattgttataattgttttattttagtattaattattgttaatctcttgctgtgcctaatttataaattaaactttgtcataggtatgtatgtatagaaaaaaatagtatatatagagttcagtactatccaccaattcagttatccactgggagtctcgaaacatatttcccatgtataatgggagactactatagttacgctgctgtttctaggcaaagttgtcatgaacttggaggctattagctcaattgatgcagatttaaggtcctttaataaaacaggagatgaaagctaaaactaacatttgagtggcacagccattttcttgcaacctgcagtggcatgaccatagccattggttgccactgttcgctgctctccccgctgtttcagttccagtgcaaatctgtgagggcagcactcctttgaaagacttaatgaatcacatataattataacagccgatagattttaaggggtagccatttttatctttcagatagacttaatctagcatttttatattacagtatcagctgtttgtcatattgataaaaaataagagaagaatgatttaaagtttattatttcaggtgtaatgtgaattgctcacattttcattgtgctgagaaactagagcagaaggacacatggtagcagcaggaagcttctacaactatcttgatgacttgttactttgacagtttctatgagaaccccagctgtgaccaaggtaagtgggatggtgtcactttgacactgcagctgctctgttggcaagtagagttctgtgtgatccttgggaagacaaaatatataacatttcaaagaggggccactttactgttatatcaatacctgcaagtcttgaatgagttgagtggtggaaacaaagtcttaattcattgtttgaaaaaactagaatctctgtcttaccagaagttgagagaagactaaaactgaaagacagatgtgtggccaattaggtatgtcaggctatttccttcatttttatgtcatacgtgagttcatagttttctaaacccattcaaaattaatggacaaagaagacaatgtacactcgactattgaaaactgttgttagagcagagctgagcagttactttaggctagttgggaaagcataacaatctacaattatttgaagctataaatattgaggcaggagagaaggcatttaatagagtagaaaagaattcaataatgagaagtgaagtaatgcttacagcctggccattttattaggaatcactacatgacat

SEQ ID NO: 693644 - DNA, 1571 bp, Homo sapiens
ttattattaaatagagtaagttggtcattttaatgatatcttttttctaatagacattgctttttttattttcttatatgaaacattcttttctttttctttttttttttttctttttgagatggagtcttgctctgttgcccaggctggagagcaatggcacgatcttggctcactgcaacctctgcttcctgggttcaagcaattctcctgcttcagcctccaaagtagctcggattacaggcacccgccagcacacccagctactttttattttgtgttttttgtagagatggggtttcaccatgttggtcaggctggtctcgaactcctgacytcaggtgatgcacccgcctcggcctcccaaagtgctggaattacagatgtgagccactgcacccggccttattttcttcttttaaaaaattaggcattactaaagtatgaagttaacttacacttctttgtgacaaaatatgggatgtataacataaagattgagactaaagggaactgtattttatgatttttactttgtgtacaaatctctctgttgcatcgtttcaggtgcctgtggtagccatattgggttcaggtgggggtttccgagccatggtgggattctctggtgtgatgaaggcattatacgaatcaggaattctggattgtgctacctacgttgctggtctttctggctccacctggttagtatacatttttaattttagttttataactttaaatatttaggatttatctaactcaagcactagaagagaaaaggggatttagaaaattgatcattaatttaaattactgaaactttccagtttgatgccacaatctgctttaaaagattttttaaagacaaatccatacttaataataactttttgttgcaaatttacttcttttaagccactttgtaacttaaaatgtagttaaaacatgaaataaaaaagactaattgaaaatagttctagataaaaatagaagtggaacaacatactccacccataattaatttaatcttcttataatttgctgatttgtagtccttcagtgaacatgtctaagtctacatgattcactacatattcattttcttctttagggcaaatagaataagatgcaagataccatagtatacagaacaaagaaaacaatttttttgaatatagaaatataatatatttcattgattttcatctaactaaatatgaaatttgtcttttaaatttaggtggagacttaaagcatccatatgtataatacttgtaccctgtaggttttcacaaatatatttataaaacattttccaagaagatattacatactttttggtttgcttacctcacataagcacattgaaaatcaaatgaaaagtccttgctcacatgtctcaaataagagtatcatcttattactaaagatctgccttggacttacaaggcctttttagtcattcagccatggcaaactcatctatcagaatatcgtattatatatgtctagcattttaaagtttctgtgtcattttatcttgtgagatgggtatgaatttattcatt

SEQ ID NO: 693645 - DNA, 681 bp, Homo sapiens
aatcactggaaaaaataaaggaatattcttcatcacagttattcaaatggaaaattaaaatggagtcaccccctcctcttgttatttcacaataaattacagtttgatcaaatatttaaatgtaaaaaagtcaaatatattaaaagaaaacaaatgaaattttttttttttttgagatggtgcctcactctgttgcccaggctggatggagtgcaatggtgcgatctcacggcaacctccgcctccctggttctagctgttctcctgcctcagcctcagcctcccaagtagctgggactaccggcatgcgccaccacgctcagctaatttttgtgtctttagtagagacagggtttcaccatgttggccaggctggtctcgaactcctgacctcaggtgatcctcctgcctcggcctgccaaagtgccgggattacaggtgtgagccaccacgcccggcccaaaatgaatattttttaaaatgctgcagtgaggaagacattttccagcatggcacaaactctagaagcttggggaaaacaaatggatacattcraatatttaaaatgtcaaattttttgtttttaatttctttacattaacacagttatgagcattttcccgtgttacaaactatctcttaaaacctgaatttttcatgattattaatgctctatcatgt

SEQ ID NO: 693646 - DNA, 596 bp, Homo sapiens
atcccaagaaaagaaggtctcggctgctctttattcgggctatttctcagggtttgaaggtagtaacactaagagatgaagtaatatttctgtttagtacaaagaacagtcttgtgtaacatctatatggatcatatcgtgccactcctgtgggacttgggggcaagggaaactgacatgaatgtgttgatgytcatgtcgctcactgtgctgtgagcaagaaagtcccttgtttctgtcctggaagtctcatgtcttcttccagcatcaatgaaagggtaatggattaagttaatagcttgtgagataaagttaaatccaagatctgacattaatgttgaccttttaactgatagacttttttttttggtcagctccccatcctcattgttttggaaatttttcactctatttctcacttccatttcactataatggaattttaattctattatatggtaattttgtataaattttgttatggtttcccatggtaatttcccatgtaaattcaatcccagagtcttatgagaacagttttttggttacaaattctctgaggaaagcattatcattatcttttttccaccttgagc

SEQ ID NO: 693647 - DNA, 884 bp, Homo sapiens
taaccatgcatctaacggttttttattgagtgtcttgcgaacccttctagtgagtctttgaatctgagggtattcttgtggactccttacacatttatgtatgaacattcccaaggtttgtcaaaatgtcaattatagtgtattcctatatatatttcaaaatgtggttgtgaaaaatatcgtcatgggaaagctgtgcttcaagttattgcatatagtctaataactttggtttcccaaaccatagctgtataaaatttgccagatatggatgcaaccaaaattgactaatttttgaataggaagtttactttcactttgcagggtaggtttatcagagttagaatgaaagagtttgagggaagggtggagatttatttaggattagagaacaacagatcactgtcattacttttattttggaaaatactgtatctccttttttgacactttacataaaaatataacaatttttatgttaaaaataaagtttcatctagtttatcatacatttttaatcaaggtgatattggacactttacaatgctattcgtatgttacacagagtagctaaagaacattttaaaatgttggatcacccttcaattactggtataatcatacttgattataatgytatgctttttacgtctgattatttgctcacaatatatttgagatttttacaagtagagtcaaaataaaagtaatctttcttataaatttttcctggaaaaatttacctaatggaatttactcatacatatatatttatgtatttagtattcattaatttccaactatgtactattagagtggctacaattgagaagatggacaataacaacatttgacaggaaaatgaaaaaattgaaattttcatg

SEQ ID NO: 693648 - DNA, 1497 bp, Homo sapiens
tggaaaatatagtgttcaagaacaaaaattacagatttgatgtaaatatatctaacagaaaatttaaagcatgttttgggaagcaattgttttgattttaatcagataaatagagggtgtccatagatccaggaatatgagactgatagtcaaaagtaaggagtggcaataaactataaaaattgccatgggcaagtcctatgaaatctaagaacactctgctgaatgtattcaactcttgcacagtcatactaaaaaatgtaagtctcaaggcatgctgggccatgctataggctggttcttagcttgaggcttcacccagagtttgcaagtatctgccttaacctagcttaactcaatgaatcacagagatgaaagaaatgaaccaattgtcatcaacatagttctccgatttctttgaatatcgtgtgttatttgtctatatggttttaattgggtgttatatatggtatttcctctgatttgaactctttgcacattactatcatttttacctattattcatatttcagatctcattttaaatatcacttcctctgataagactttctgaccttattaagagtactttcaaataatcattattcactctcttagcaatctgtacttccttgatcagacaatttatcatgctttgctgtaattacttaattttctgtctcatttgcttgactcttgtctcttgcaaaaaaagaacagtgtctactatgcttagtgttatgtcccaaataattaagatactgttttacataaaattataatagatgctcacttaatatgtaataatattaaatatatactaagatccactgtcttatatgttttgcttttatgagtcattgatttcttaaccatgtcctctatttcaaaaaatttgtctttttaatatcctatcttatatttactccttccattgtgctttttaaacaaaaaatagtcaatcatgttttccttttacaataatttgtatacatttttatgactgcttttaacctattcaatcccattaaatatcctttccaattttattaaagatataagttgaaatttttaagttttcatgtttcttacaggaacattgtttcaaatggccgtgattttgtctaatacagaaattgttccctttgtgtctcatgctaattttttataagttatgtgaattttattcatatggtattcataagatcttacatggcctttcaccagaaatccacattaacctgagtcctgacttgactgtcacactatatcccaagaggactcaaacagaggaaacacagaaagaagtaaaggaatcaaaatagcatgttaattataacttgacttttggtcccaaaccattatgcaatacactaatgatgtgaacaatctgacagggaacatatggaatactcttttgcctcatttgctatagaatagtactcaaagacaaagmaaagaaatgacctatttctcctacatcatgcaaatatcaaa

SEQ ID NO: 693649 - DNA, 965 bp, Homo sapiens
tagaaatatgtcttggaaaaatagagcctagttaagaaaagttgagcctaggaacagatcagacctaggcaaacttaagggataaaacaataagacaagagcaaaggtcagaatttacaattcaaggaatctgataggcagttatctcttctttttcctaaaaatatcattggactgtcagaaggaaaataaaagtacaaacacatccatagccctaaaaaagagctgagacataagtcattagcaagtataacacagaagaatttctggaaatataaggtagatagaagagaattaaaagaaacccatgaaaacgtaggaacttaaatccactcagtgatcaaaaggactttctaaatagtgagttattaaacaaaaatcttataatctttttaggaacagagtaatcaggatacaaaagtacaagcagaatttgattttgtcagtagggtggctgtgaaaaaactgcaaaccagttgtatcagatttcatcatagctgccaatagcttttgcccttgggcagtaaggtggcaaatggacatgaagtttgccaaacaggttgtttgggctggagataaaatcaagcagaggcccagattaattctggacacaatggtatatgcacagcctgcaccaataaagtaaactgcctcaacatcctatagaaaattgacaattagaaaatctcatgcaaccctctccttcccaataatcagaatgaagatttctacgattataatctgaattcattactgtaggaagaaattatacttatgctgatgatacttcagctgtcaatagtattcattctaagtcctcattaataaagacagacaatgaagattctacaatatataaggaaaccaatggatgcaatgtaaatatccagttaaaagaacagaagaatgaacccttgaagaagtagttaatatggaaaataaarcataattgtataatcattata

SEQ ID NO: 693650 - DNA, 2399 bp, Homo sapiens
tcaggaaaaaacaatacttttgaagttactggaaaaagataaggtatttccaacattgaatgtctgcacagagaagctaaaagaaaagttaaatatttttgctgtttctcctgagcaatgctgattttgaagaaaggtacccttctaaaccacaatcattttcaaatagtaagtacaaaaatgtagtctagaaagtaattgtggagttttctcatgtttgaattaatgtgtctcttctatttccacttagaagaagaaagaagtgaaggtctgaaaataatgcttgagaattataataagaaaattggtggcaaaattcaaatcttttaagtacttgattcattttttatatcaagatagtcaataaatgtattacatattaggttttttctctcttgctattagcaatacttagtttaaacacataaatgaggcatcttttaaaatccaagtgtttgctatcaaagttgttttttaaaaaaaatctagtgattattcctctagcttgtaattaagcaaaactttgatgtattaaaataaccttctccaggccaggcgcggtggttcatgcctgtaatcccagtactttgggaggccaaggcgggcggatcgcgatgtcaagagatcgagaccatcctggccaacaaggtaaaaccccgcctctactaaaaatacaaagagtagctgggtgtggtggtgcacgcctgtaatcccagctacttgggtggccaaggtaggagaatcacttgaacgtgggagacggaggttgcagtgagccaagattgcaccactgcattgcagcctggcgacagagcgagactctgtctcaaaaaataataataataacaataataataacaaccttctccaatatagctcagtaaacacactttgttctacctaccacacaacatgctgatattaaatgaggattgcatgaatgtatttactaggaaaaacataaatgacgtcagctattaccttaaaatatttttacacttattttacttcctaatggggtttttaaccatgtacagatagagaatggttttctcttagttatggctgaattattattagcacaatgtaccacttccaaagtttaggccctaacattttgcacactgaatattataggcaataaagtttagtatcttcattaaattgtgctcaatatagagctataattcaggatgagtagctttattctttctaattactttctaattactaatttctaattactgactaattactaattctagtaattagtcagataacactatatggacatacwgagagttaaatcttcctaaatctagaataccaaattaaacaacgggaatgtttaaaactgaatacataaatttttaaaaattgactaaagggaaagaaattggatttccaaatcaattaaatgtttcaactttaaatccagacaaattccaaaaatcaaaatccaccaaaagccatatatattaaatagtttagtcaccaaatttaagtaaattggtacaaaataccttgatattattcaaaaccacttccccttgctctccgtttaactgccaccatatatttatacacacattccacatataatatttaataataacccatcattaagggctagatttcctcccacccggtatttctttatcaccttaccccattctgtgccatcccccgaactccgtgcttctccagctccttcaccatcttcagcagtcactaaaaaatcaaattctttcagtgcttcctcagtatcaggatcgtcagttaggtcagcagctaaaccttcattacctatctgtaaatagaatataaaccaagaattacttttatcctaaatggaaaagggatgctttaatattgtcacataactacatttacacacccattttaaaattacttggatcaaaaattttagatctcctatgtaattcacaaatcccaaattatacttcagataaatggttcaacagtgctgtgccaagattgatctaagtaatgtggcactaaaaatggtttaaatgctaatcatcaagaacagttaacttcttaaattacagtacattcacagttagtcctccattaaagaaccagtcacttatttgcattctgatgttatcttgaattgacctcataaatgggaactgcatgattcgtccttcactcatagagatatggcatagtaactaatttaaattcatagctgtgataattataatagtgctttaccttccagaacaaaaaaattaaaaggatcaaaatctctattcacccaaatagactacgttatacatatagaatgtgtcaaaaaagactgaaaactgattttgtagaccagagacttttgtggaacactgtcatttttttcttatgttaccgtaaaatct

SEQ ID NO: 693651 - DNA, 657 bp, Homo sapiens
cactgcacttcagcctgggtgacagagcgagactccatctcaaaaaaataaaaaataaaaaaaaacataaaataaaatttaagctgaggctagagaaatacgtcacaaccaggccatgtaggaccttgaggttcatattagaaatttggaggagccatggtagcttaaaaagtaaaacaataaaataatcaatatttgcattccagaaagattattctgactactcgctgtgattctgcccacaatattttcttacattcaatcagttgaatataattttttttttttttgagacagactctcgttctgttgcccaggctggagtgcagtggcgcgcggtcttggtactgcaacctctgcctcccgggttcaagcaattctcctgcctcagcctcccaagtagctgggattacaggtgtgtgccaccatgcccagctaatttttgtatttttagtagagacggggtttcaccatgttggtcaggctggtcttgaactcctgaccttgtgaatcgcccgcctaggcctcccaacgtgctgggactacaggcrtaagccaccgcgtccagctgtttttctcacttcttgcagtgctttcttccaaatgtcttgtatattaaagcaagttttacattccttcactggactgtgagccctg

SEQ ID NO: 693652 - DNA, 1178 bp, Homo sapiens
ccactggtgtccaaggcagaggtgccacagggtgggcgacagtgcaaggcgaggcccctgggagggctcctctcacctgccggagtccccttgaacctgtagagcgattttgggacttccagggcctctccttacgtgtaaagasttcccaggcctgatccctttgcaagacaggcttaccaaagggaagtggggtctggcaccgtgtcctccaaatagcaggggctcatcctgcttcttggccttgtagaatgaactgctttttaagtgccaagtcccctgggctgagtgctgtgggtcataaggttaccccaccttatactaaccctacaaagtggggctgtcatcatccatgttttctggaatgctcagagagagcaagtctctggtccagggtcacactgccagaaagttggtggagcagggagggaatcccagaagtgcagggaagaccagcggattattcaacgtcagccagcacatcagtaatgggcaagcactttgatttcctggttcccagccaggacttgatctactagtccttccttctgtaagggccagagagtaaacaccaggctttgcggcagggccacgtcttgacttttgtgggtccttggcacttttaccttcttgagtccctttcttggtaagaaaatataaaaaatattacaacatattatacaatttttacaatattttgtctatttacaataaagacaaagatagcctaggttggatttcttattattatattcatgtttttcttcctattttaaagtaaattagaattaaaacatttttgtgagcccctaaaagtaactgaggcctgaggcactgtgtctggtgggcccagtggagtgctaggccctgcttgtctggcaacctgctctccccttttcctacccatctctgccgctatatggcaacagctgtcctggatggtataggaatgaacatgtggactgtgttcccgtcagaccttattgatggacacagcaataggaatttcctataattttcaggggtcacaaaggcttcttctgagttcttttccacccatgtacaaatcattctttgctcaaggaccttggaactatgccatgtaggtttcctgggcaaagcctcccctgacgttggacttggtaacatgagaaacaagttctaggcatatctgctga

SEQ ID NO: 693653 - DNA, 615 bp, Homo sapiens
atgtgagcttggaggcagtccccaacagagagctgcacgcagtggctcctggacgtctaccttgaatcccatcctgaagctgaatggctggaggatgtgcaggtgaagaggatctgcatctgcttcatcacgtagcctgtctagcctcagtttcctcttcttccaaatgggctggtaatccttgtctggccatcttttcaatgatcatttggttctgcaaacttcctttgagcacccactgagagtcagacaacagggacgttacaaaatcatgtctgctctcaaggagatgtgagtgtgtggggcggagtgaaggagtggtgtcaactcaggatgtgtttcctactcagaaattctgtgttttttcccccctgagagatgaaggtgaccttgcagccccagcaaccagataccggactcccaggctcccaaagggacattgtccataggagcttaaaargtgaagtcatcagtttcctagcttcaaaattcaaaagcctcattccaggcacagatgggctggaagaagttacactcagagcccaggtaaagatcctcagagctggggagctggggagaggggcataagaaagttagacattggggcatttttca

SEQ ID NO: 693654 - DNA, 1483 bp, Homo sapiens
attatgaaatatgcttctgttgaaaatcaatgaaattgaacaaatttatttaccagttcttaggtgtatatagaatttatcaatcagaaacccttatgctttgactcaaatgtttaagtcaatgtgaaacattcttttaaatgtgataaaactgttacattcaaggagcatggtacatgtcattaacatgttgttaatttcaaaagaaactgtatttaagctccagacctctgcttcccattccacagcagcttgccacaaatggatatatacacaacaaattaatttctatagttcaacacaatctactatcataatgaaacaacttatgaaaggaatgttgcaacttagggtgggttatggttgtccttccctgaaaaaaacaattgttaatgtttaaaaaaacggcaataaaaaagtcacaaacatacatacaagaaaaatacacacacacacacacacacacacacacacacacacaccamaaaaaaaaaaaaaaaaaaaaaaaaggaaaaataattccaaatgttagttattctcttttggcccagattgttcaactagttttaaacatactagaaggaaaaagctagtctgaagataatattcttatattcttttactcagaagtcttatttaagtacaattctggaccaaatgggaaataaatcaatgactgcttaaagaaaataatacagggaagaagacacaagaatgaggaaaagaaaagagagagaggtttgagggtgtaaatctaaacaatggaaaataaagtatggaattacagaaggggacaatatgtaaatgcagaatgttctgctatttctcattaaaaattcataccaagagggtaagaatgactaatgaacttgctgcaaaataaataagcaagttgctatactatggaatgaacataagtgtaactataccactacagccttaaagaaaagaaacacacactaacagacaatagacaagcttaataaagagagaaactacatttcaaaaagtgattcaaagaacacaagagaaagctagaagagtgagagaaaaatctgggagagagaaggaaaagaaagggggaaatgttaaaagacaaaaacagagttcaaagaagtcaaatggaagtcaagaaagtcttcattcaacaagatgtagaaacagaaggagcccaaacccatagcgcaaagcaatgtttgcgaatggaaagtggctcctttgatcagtaatagttactcttaagtcgtagcctctattcctccagagttcatctttaagcccttccaatctagagtggagctagtgtatggatagaaacaagagatttacaatgaacagagcagttcagatgagtagttcaaattgtctcataaaatgttccaacagatttatataatgcctcttatatacattttctaatgtatataatggaaatggtggtgaagaactagttggctttaccaaaaaaacccaaaccaaacca

SEQ ID NO: 693655 - DNA, 1483 bp, Homo sapiens
attatgaaatatgcttctgttgaaaatcaatgaaattgaacaaatttatttaccagttcttaggtgtatatagaatttatcaatcagaaacccttatgctttgactcaaatgtttaagtcaatgtgaaacattcttttaaatgtgataaaactgttacattcaaggagcatggtacatgtcattaacatgttgttaatttcaaaagaaactgtatttaagctccagacctctgcttcccattccacagcagcttgccacaaatggatatatacacaacaaattaatttctatagttcaacacaatctactatcataatgaaacaacttatgaaaggaatgttgcaacttagggtgggttatggttgtccttccctgaaaaaaacaattgttaatgtttaaaaaaacggcaataaaaaagtcacaaacatacatacaagaaaaatacacacacacacacacacacacacacacacacacacaccaamaaaaaaaaaaaaaaaaaaaaaaaggaaaaataattccaaatgttagttattctcttttggcccagattgttcaactagttttaaacatactagaaggaaaaagctagtctgaagataatattcttatattcttttactcagaagtcttatttaagtacaattctggaccaaatgggaaataaatcaatgactgcttaaagaaaataatacagggaagaagacacaagaatgaggaaaagaaaagagagagaggtttgagggtgtaaatctaaacaatggaaaataaagtatggaattacagaaggggacaatatgtaaatgcagaatgttctgctatttctcattaaaaattcataccaagagggtaagaatgactaatgaacttgctgcaaaataaataagcaagttgctatactatggaatgaacataagtgtaactataccactacagccttaaagaaaagaaacacacactaacagacaatagacaagcttaataaagagagaaactacatttcaaaaagtgattcaaagaacacaagagaaagctagaagagtgagagaaaaatctgggagagagaaggaaaagaaagggggaaatgttaaaagacaaaaacagagttcaaagaagtcaaatggaagtcaagaaagtcttcattcaacaagatgtagaaacagaaggagcccaaacccatagcgcaaagcaatgtttgcgaatggaaagtggctcctttgatcagtaatagttactcttaagtcgtagcctctattcctccagagttcatctttaagcccttccaatctagagtggagctagtgtatggatagaaacaagagatttacaatgaacagagcagttcagatgagtagttcaaattgtctcataaaatgttccaacagatttatataatgcctcttatatacattttctaatgtatataatggaaatggtggtgaagaactagttggctttaccaaaaaaacccaaaccaaacca

SEQ ID NO: 693656 - DNA, 1089 bp, Homo sapiens
cggaaacttttatccagaagttcaacttggtgataattttttagagggagtgccaccataggaaaccaagatgggatttctcccaacttaagaagagctgctgaatcayagaatcataaaatttgagcacagaacagatcttagaggttattctctcagctctgcttcattcccaaagaaaatcattctgcagtacttcatatctatagtatctttatcaaatgagttccaaattattcatattcaccaaccaaccaatcaaccaacttacatatactgtttgatcttcttctgataccttcaaaatgctatgatatacttgttcctttacaaagcccatagtttaatgaaaggaaataaaagctcttagcaaataaagttgtattagttatgtcccatgagatgcacagtgaagagatgctttaggaggagaaagggaaccattgagacaaggtgatcagtgagggcttcatacagctagaagaaatcttggagatgagcagtcccaggtcttccttcatactaaggaaactgaggtgcaaggggttaggcatgtggccaaggtcataatgcaagcctcgggctgaagtagagtcagaaaccaggtcctgactaattccttctaccatgccacacaacccctcatcagtgttggctctctaaggcaaagcttgctagttgtccattgaaacccattctcccctttttctgtaacaacaaaaccctaatctggtcatgggttgcctacctgccctagttttctagtcttttgcagttagatatggccctgtgactatgtttttgccaatgaaatgttagtggaagtgatgtgcaactcagggcccacacctgaagagagtaagtttgcctccttcacactctccttccttcccaccaaccataccccagacatcaacaatgccctactaggtggcagagcacaacttcagaaggaccctggatccctgaatgatttgtggagcagagcacctaccaatttggaatgcttacctcacacttttatctgagaaaaaaaataaacttctctcttctttaaggatctcaaaccaatatagtatataacctatg

SEQ ID NO: 693657 - DNA, 622 bp, Homo sapiens
gcttggagcagtgggctccgtgggagctcccggactcccctagctcccacctcatcagtgagggaagaagtgctccttctgccctcggcagaggggagtcagggacccaggctgcccctctcaactgcaatggtacctcctcccggctctggcccagcaatgctactctccaaaccttcctagacataaggtttccttttaaaccaggacacccatgctgtgactgttacccagagcttcatttcttgtttgtttgtttgtttaggtagatcakagctgctcagttttttcctccggaggttacggactacatagacttcttttcttggctccagactgatggtggtgggtgggtggggcggggggtatgaaatacagaatgtggcccgtctacatcgccatcactttattgtactgtcacccttaatttaactataaatactacggtgggggctagtcgcgggcggcctcgggctgctgggctgtgcgcgccctgaccccagacgccgaccctcccggctctgtacactatttacagctcctcgttcctctttctcgaccccctcccgcaaggcagcgcgtgtgcaagaaagtagcatcgtctgtctgtgcaagtccttcg

SEQ ID NO: 693658 - DNA, 622 bp, Homo sapiens
gcttggagcagtgggctccgtgggagctcccggactcccctagctcccacctcatcagtgagggaagaagtgctccttctgccctcggcagaggggagtcagggacccaggctgcccctctcaactgcaatggtacctcctcccggctctggcccagcaatgctactctccaaaccttcctagacataaggtttccttttaaaccaggacacccatgctgtgactgttacccagagcttcatttcttgtttgtttgtttgtttaggtagatcatagctgctcarttttttcctccggaggttacggactacatagacttcttttcttggctccagactgatggtggtgggtgggtggggcggggggtatgaaatacagaatgtggcccgtctacatcgccatcactttattgtactgtcacccttaatttaactataaatactacggtgggggctagtcgcgggcggcctcgggctgctgggctgtgcgcgccctgaccccagacgccgaccctcccggctctgtacactatttacagctcctcgttcctctttctcgaccccctcccgcaaggcagcgcgtgtgcaagaaagtagcatcgtctgtctgtgcaagtccttcg

SEQ ID NO: 693659 - DNA, 1524 bp, Homo sapiens
tgcaggtttatttactctgaggacactgaggcccggcatggatgcctcaccacaactcggctacagccagccaagtggaggggctgcccctacaaacagcgctctgtcctcattgatcaaagtccacacatcgttggtttggtcttgacctcacaatggtgctgtgtgatggacttggacctctagtgtagtccatgggtggtgcccctgccaagcagagggcaagctgttcatggagagtctgtttctcaaccagtgcattaaaagtgttggggcttccttgcaataagactttctttatgactgaggttgacacatttccctgaaacacacagcatcaggaatccctgtcctgatgtattgaaacattccttcgtttatgaaaacagtactgttactctctggccatcaggcctgtgtttcgagcccctttttcgggattgtggtggatttgtgctcatctttgtttgcttcattttctcttgcctggcccccaggagggacagcgacacatctgttgcccccactggggagcttgggtcttgttatgaactccgaaagagaagagcatcaccagcmcttgtgagccacaagcccccactcagatcccttacggccgtgtctcagcagccacataaagtgtggggttggcatgaacccctaactgcaggttgctctgctaagctgttatttatagtttgaaccaccctgtggtaggagtagatatttgtctgtttccagtgggaggtaattagcacagccagctacttctctgctgacttcctttgagaaactccccaaggtgagaaatgtctcctgtgtcccgtccttgttggtgtctgctgtgctgcctcaaggggttgcagcaaggagatgccttcacgaagccctggtcctagcctctgctgtggatgaaagtcatggacacggggaacctgtgctcaccttcagagtcggggcagcagctcagcccagaggtggagctgggctgtgaagcctcctggcagggactctaatcccttgctgttggctgtcctggttctgtgtcacacagatggccacagtaaacccagagtgaccagctcatggacagtgtcagacctcgacgtcgggcctaattatggctcctcgcggccctctgcaagcccatttgtaaaccgtatgttggctgacaagcttagtgggaagctgcgtcctctttaatatgtacaaaatcacctgtcacttgtttttccaaactgacaaaggtctgctcatcacatctagatttgaaaaagatgccacacaaacgtaatttgtccctttcttcaacagacaggtatggagtctgggtggggccacgtgtaccctcccatccttagaaagagtgtgacaccaagggacagatgctggcgtagcgcgggttttgttttggagggttttttgtttgtttttacaaaattaagatatttctgagtttattatgaggcttttagttttacaatcatactaaaagataattgttcctctataaaatgattttcc

SEQ ID NO: 693660 - DNA, 1524 bp, Homo sapiens
tgcaggtttatttactctgaggacactgaggcccggcatggatgcctcaccacaactcggctacagccagccaagtggaggggctgcccctacaaacagcgctctgtcctcattgatcaaagtccacacatcgttggtttggtcttgacctcacaatggtgctgtgtgatggacttggacctctagtgtagtccatgggtggtgcccctgccaagcagagggcaagctgttcatggagagtctgtttctcaaccagtgcattaaaagtgttggggcttccttgcaataagactttctttatgactgaggttgacacatttccctgaaacacacagcatcaggaatccctgtcctgatgtattgaaacattccttcgtttatgaaaacagtactgttactctctggccatcaggcctgtgtttcgagcccctttttcgggattgtggtggatttgtgctcatctttgtttgcttcattttctcttgcctggcccccaggagggacagcgacacatctgttgcccccactggggagcttgggtcttgttatgaactccgaaagagaagagcatcaccagcacttgtgagccacaagcccccactcagatcccttacggccgtgtctcagcagccacataaagtgtggggttggcatgaacccctaactgcaggttgctctgctaagctgttatttatagtttgaaccaccctgtggtaggagtagatatttgtctgtttccagtgggaggtaattagcacagccagctacttctctgctgacttcctttgagaaactccccaaggtgagaaatgtctcctgtgtcccgtccttgttggtgtctgctgtgctgcctcaaggggttgcagcaaggagatgccttcacgaagccctggtcctagcctctgctgtggatgaaagtcatggacacggggaacctgtgctcaccttcagagtsggggcagcagctcagcccagaggtggagctgggctgtgaagcctcctggcagggactctaatcccttgctgttggctgtcctggttctgtgtcacacagatggccacagtaaacccagagtgaccagctcatggacagtgtcagacctcgacgtcgggcctaattatggctcctcgcggccctctgcaagcccatttgtaaaccgtatgttggctgacaagcttagtgggaagctgcgtcctctttaatatgtacaaaatcacctgtcacttgtttttccaaactgacaaaggtctgctcatcacatctagatttgaaaaagatgccacacaaacgtaatttgtccctttcttcaacagacaggtatggagtctgggtggggccacgtgtaccctcccatccttagaaagagtgtgacaccaagggacagatgctggcgtagcgcgggttttgttttggagggttttttgtttgtttttacaaaattaagatatttctgagtttattatgaggcttttagttttacaatcatactaaaagataattgttcctctataaaatgattttcc

SEQ ID NO: 693661 - DNA, 659 bp, Homo sapiens
tgcccaggctgatctcgagctcctgagctcgagcagcctgcccacctcaacctcccaaagtgctggcatacaggtgtgagccgccacacccaacctattctagagtattctttaagttttagtggatagaataaatgtggtcagctgtatcacctctatatcctgtagtcatgacacatcttggtattatggaaagctgtatgaatttcacatttctacaaggtttaagataggttctctcaaaatgcgttatgcttttaaatactgaagggactatatactaagtaaataatgcaaatagaagctaaggtgtctattttgtattcccaggaatactgtataatgtaatttaaaatgtgaaattattaasgcaagtaaaacagtgattagaactcaacagaattgataaggttattgagatctattgtagtggctatttaactttgagtagatgctactcagatatttaaatatgtctaggctgagcatggtggctcatgcctgtaatcccagcactttgggaggccaaggcgggaggataattgagcccaggagttagagaccagcctgggcatagaccccatctctacaaaaaataaaaaaaattagctgtggtgcgcttttacagtctcagctacttgaaagttgaggcgagggag

SEQ ID NO: 693662 - DNA, 619 bp, Homo sapiens
catacaataacataacaaaatgtggcaacttcatttgtaatgatcacaaattgaaaacaatgaacattgctatcaactgctgcagtgatcataaattgtggtatacctgaacaatggattattactcagcacctaagaagagtgaactattgacacatgcratgcattaatgaatctcaaaagcgttatgctaagtaaaagaatccaggcacgaaaatgtatatgcagtttaatttcatttagagagtagtctaataaagaaaaaatgtagtggcagagcagtgattgtgaagggtcacggtgtagaaagggcatcaaaaaaagagcacaaaagaatgttttggaagtaacggaaatgttctatatcaaaattatggtggcagtagtggtatgactttatgctcttgtcaaaactcataaatcatacatttgaaattggtaaaattgtattgcatgtccatttaaaattcaataaagattatttaaaaatttaaacacagatgccttgtatactgtattttctccctgtgtctctctattaaattaatagagtatgttatgtcttgtgagtttgattatcaatacaaacctgaaaacactgtgtggtgattctaggaga

SEQ ID NO: 693663 - DNA, 619 bp, Homo sapiens
catacaataacataacaaaatgtggcaacttcatttgtaatgatcacaaattgaaaacaatgaacattgctatcaactgctgcagtgatcataaattgtggtatacctgaacaatggattattactcagcacctaagaagagtgaactattgacacatgcgatgcattaatgaatctcaaaagcgttatgctaagtaaaagaakccaggcacgaaaatgtatatgcagtttaatttcatttagagagtagtctaataaagaaaaaatgtagtggcagagcagtgattgtgaagggtcacggtgtagaaagggcatcaaaaaaagagcacaaaagaatgttttggaagtaacggaaatgttctatatcaaaattatggtggcagtagtggtatgactttatgctcttgtcaaaactcataaatcatacatttgaaattggtaaaattgtattgcatgtccatttaaaattcaataaagattatttaaaaatttaaacacagatgccttgtatactgtattttctccctgtgtctctctattaaattaatagagtatgttatgtcttgtgagtttgattatcaatacaaacctgaaaacactgtgtggtgattctaggaga

SEQ ID NO: 693664 - DNA, 661 bp, Homo sapiens
tgtcagaatcagaagacgtcatgcccaagaaaggactttgtaaagtattgatttcactcattatttcattactataatagtggtaattttctaatatttatcactttcatttcataactaaagatgataggaaaaatctagaagtatcagagttagcataaaaaatgataggaatgataaaaagcacttgtgaaaagatttgagtgatttgtagtgattatgcatgagaaagagaaggctagtaggtaatccaataattgtcttaaagcacttgaaaactactccagtgagctaatactgatgaccagactaggaragttcagcatgagttatttaggctaactaaaccaaataactttccagtagtgaggttactacaaagtagaattggcctctggggaggctgtggaatcccatttgtgacagctgtcccattgcctggggatagctaacctccagtcttgcctggagtcaaggactgttaactccatagactcagggctcccaccccttcagctttgtgctctgtgcctccgtatggatctagggtgttgggttagtgggcaagggaacttcttattttcctggtcataattgtttacttacagaagaagaagcaagcagttgaaagacacaccctaaatatataatgcatcaagtg

SEQ ID NO: 693665 - DNA, 635 bp, Homo sapiens
tataataaactttataataaacttttttattttactatattaatataattctatattggcacaagcactattgktttttttttttgcattttaagaaagaaactgcttttgtccattcctgctggtagaactctaatttttatggttgtattatctccataatttaaatgaatatataaaatgaatcagtgtaaaaatgtgggaagcaaaactggtattcttgggttacttactatgtgtgagtcactgtattaagtaattagcctatattaattcaatgaacatcaaaataccacccaggggttatcgccatcattcccatgtcacagatgaagaaaatgcagcttagactagataagtaactaattcacagtcacaaactggcaccatacttccttgcatgacaaaggtttgctatttgaatgttacaacatagttgagactcgcaagagtctgaatatttttataatttgtgtattaactttgtggaaatgataataacaaagtacgtataaaaatagatttttgtaaacttttggaacataatttagcttcagatgtgatggatttgtaattacttattgtagaaactggcattttttttcctgtgaagggtcaggtagcaaatatttcag

SEQ ID NO: 693666 - DNA, 1725 bp, Homo sapiens
tatagttttttttaactatatagaaatgatgttaacaatattgtccttcatataatcttgtgttaacatataattaaaacaaaaatttaataaattacttaatgtacttaactgtcccaaaatgtggagaggaatctatgtttcttttaaagaaataatgtcaatttaatgacttttatttatttctcttgtctgattgctttgactatgacttccagtactatgctgaataaaagcagtgaaagtgggcatccttgtcttgttacaattttcaggggaaatgcttcatcttttcccgattcaatataatgttggctgtgggtttgtcatagatggttttcattaccctaagctgtgtcccttctatgctgattttgctgagggttttaatcctaaagggatgctggattttgtcaaaatattttttctgtgtttattgagataatcatataatttttgtttttacttatgtttgtgtggtatagtggtatatcacatttattgacttgcttatgttaaaccggcactgcatccttgatgagacttgatcatggtgtattatcattttgatatactgttgaattcagttcgctagtattttgttggggatttccgcatctatgttcatcagggatattggtgtgtagttttttgttgttgttgttatatccttttctggttttggtattagaacaatattcacttccttgaaggatttagggagcattccctcttattatgcagatatctttagggtaaaaataacttataagcttttctttattacattaatttatgtaagattaaaataaratacagtcagggtaaaatcacttataaaacacaaagtaaaatgtgattttaaaaataatataatatatgtagtaatgcttacctactagtttttaaacatatttttacatttccattaagaattgcctacttaaaattctgcttgtgttttcctggaagatttctgagtaatcttttcatactgtgatattaatcctttgtgtatgttatagatcacaagcagttatttggagtataattaatttgtcatctgatttgtttgttcttccatacagaaaaatataattaataatatattattttatggcttttgtgttttctgttttccttaatcagaccttttccactagaaccatttacgttcatttttcttaatttttctaatattttatagttttattttcaataactatatctaaaaatgaacagaaattatttattttatatacagtgtatctgggcgtacacctttgatttttctttcccataatttcatcaattatagctaaataaattaatcattattcctcattgatgtactaacttttctcagttctatttgtttactactattataatgctagttgatttcattatactaattttattttgagtcttcaataatttgtggatattttttaaaaatccaattaaaattctaagatgtgtatttctttttttgatcttatgagtcacttataacaatttcaagaaaccactcttgaattatcattgtcatttcagtaaattcctatatttatttaacagaattgatattttgaaattgccttcaaaaccacaaaaactgcacacctctcactataactcaggtacatttatttactttaataattttgttgccctattcgtacagggcctcgatattttctgtataattttttaggaattttt

SEQ ID NO: 693667 - DNA, 2054 bp, Homo sapiens
ttggaactccgctgatgctgaatcaaattgggtttgccttctttcttcctttcttcccctctacttarcaatgcctgtgtcagcctatttggaaccaaatttctctgtctcataatggaaagaaaaagcatttcttccaataatttccccttacgataaatatgcatctctgttttttatttttcaaaagccccagaaaagcgtgatgtgggaccagcctttaccaactccagcaggaactgatcataagtccaatgaatatattcttaggaaggacttgtcctaattatccactgcaggttcatcttactgtgtctctacaaccaagccatgtgctagatggcaagggaggaagctgtatttctatgttaagtaacactgatgtatccagatacttggtttttaagtagtaatttttttttaactttcaggcaagtaaaagaaacaaagtatcactgaggctacttgaaggaatcttgggacctgagtatgtttattaagtatttttcttctttcttcttccaaaaagaatttgaggagatttttcaataaaagagataaaatcataaaagtaacatggtggagggacaaataggggctcataatgaaggagcagatcagttgtgccagaaaacctaagctaagaagtgctactctaagtgactgcaaaatgaaactcagaggttcctggctgcaaaggcaaaaagagaaacaggatgagtcacagagcctttgttctctaacaagaaagcagatacattcatcaggaaagaaaaactatttcctagcactagactctaagagaaatttatcgtggagtcccttacataaggtacatgagtatgtatatttaacacagatctccggtgttaaccgtgggatttatctgtcttttagggaagtaaatttcagagctcagcaggttgacagtgtctcttcaaatttacagtgtcaacgtgcagtaaactagctgcttcccatgccacgttttactggaccgtctatcaatatttgatcaaattgggccaaagtttcaaactgcccttaaatttacccagagaaagtgcttgtacatgcagaatgcctgagtgggcttcaaaattgagtccttgtgaacgggaagcatcttttaaaaatatatctgcaccgtttgctcaagtctgaatccttcctaagaatgcttataatgtaaatctatctgcaaatccatagttgcccataaaaatgccaagcacatggcttgtttctcccaggtatacagacaataatttacgtgtaatcgtgtctctaattgtatatacatctaattgtacatacatctaacatgaataatgttattcacagaacatatgtggttgactaaaataggagttcctttgtgtgaacctaaaggattgattgagatgataaaatatcatcgctgctctgactacgtctttgatatttgtatggaataattacatgaataggtccaatggttttattaccatggcgatgcattgtgtgttattgcttctcttcttgtctaaactggttttccaggactctgctggaaaatgcacctctataatcctcagactacccccccacccagatctgctcctgactccatataaaagtaaattcttatcacctgggaatgtttttccttcagcctaaaacagtctctgttccatattcttgaaatcccaggatggaagtcttgcttgaattatagaagtcttgctggttgaagcattgctacattttttgggtgtattgtttcaccttaatatataagatccttttactgtccaacatgagacacttggaggtggtgttcatggcctttcaaggctggttcctatcccatagtcagagatataatctatagagcctttaactcaatgggaaatgacagaaattgcagcgggaagcagaattttatccaaatgttcttcctctgaattgttaagcattaaacctcaacattaacctaaatgttcagagatagttctttcctaggtatgtggaatattaaccaaatggttttggcaatttacatttttagcctc

SEQ ID NO: 693668 - DNA, 961 bp, Homo sapiens
cagctggcgctgaccttcctctccgctcaacattctgcatcattctccatcttgtgcaaaggaggaactgagagccacagtgtcacaacatggactccagagccccagggtagagccgatcaaagacagcccaggacccattctgacttctggcctttcccgttgttctttgatctttgttttcataagttacaaattcctccacctacttacatttttaaaagaaggggaggagagagagagagagagagcaaaataataacttcttagccggaactgcttttcttcaaaatcacgaataattgttttcctgctctgtctgggaaggcattcccctctcatcttttgcccaggacttggcaatccactttccatctcccyttcgcttgtctttctttagcatccacgttccgtgcaatccatcatcagagccattaccctcctcctgatcaagggtggaatggaaaagctccctctcccttcaacacctaccaccagctctttgatttgccgggcgtgggcagcaggaaagtttccggcggatgacctcagaccctctccatagagagccccaccagcagctcatcaccatcagtctgcaaagtgagaactcaagtcaggctctttggaaacagtcagcaaatggcttctagttcactcagtgcagaaaagcttttcttttttccccttttgtatgggattttgtgagtggggggttctaatagctgctcactacacacctccagccacccactgggcttgccagtgttctgtgcaacacgccctgcgtcacaggtttcaataacaacaaactctgcacatttttaaaataaaaataaaataggtcagagattcacccagctggccagtaaaccagggcaggatttctctcattcattctttattctaccgaaactgtctgaaactcagtcttcatgcctatgaaatggacagaataatc

SEQ ID NO: 693669 - DNA, 614 bp, Homo sapiens
aataaggatattttcttatataatctcagtgttcattatcagtcctctaacaagatgaacatgtttggaattatctagyagtcaacctgtagtcacaccttttgaattgtttcagaaattccttttacagttggtttgttggatcagcggccaagcagggtccacataagtgacttactgtcctgtctccaccgcctgttcatccagagtgcctccgccctattactgcactgccactgacaacatcagttgtcccatggcatgtcccacatgtgggttgtctgttgcgtccttgtggtgtccttcatggggcaggactgactggacaaggtgaggagtggacctatgcttgtctctttagcggagggtggggacagctgactccctgccccactccattccctgcttgggtgttggggcagggccatttcccaggggtgggcttgatggcccctgtgtgtggggcagctgtcggttttgatctgcctttctctctggcccttctgagctagccctgtagtaaacccttagctagtcctctagaagtgaatctccacagtgccaggcttggggctgggttgcggaagagccatgttttggtggattaaagtcaa

SEQ ID NO: 693670 - DNA, 614 bp, Homo sapiens
aataaggatattttcttatataatctcagtgttcattatcagtcctctaacaagatgaacatgtttggaattatctagcagtcaacctgtagtcacaccttttgaattgtttcagaaattccttttacagttggtttgttggatcagyggccaagcagggtccacataagtgacttactgtcctgtctccaccgcctgttcatccagagtgcctccgccctattactgcactgccactgacaacatcagttgtcccatggcatgtcccacatgtgggttgtctgttgcgtccttgtggtgtccttcatggggcaggactgactggacaaggtgaggagtggacctatgcttgtctctttagcggagggtggggacagctgactccctgccccactccattccctgcttgggtgttggggcagggccatttcccaggggtgggcttgatggcccctgtgtgtggggcagctgtcggttttgatctgcctttctctctggcccttctgagctagccctgtagtaaacccttagctagtcctctagaagtgaatctccacagtgccaggcttggggctgggttgcggaagagccatgttttggtggattaaagtcaa

SEQ ID NO: 693671 - DNA, 616 bp, Homo sapiens
ggtcaagttaaaagccatgggccctgctattcctactaaagttcaggagttcctcttgatcaaatgctcctcaggttgttgccacctttggtgaatctctagaattctgaaaaagttgatattgaaatattttctcagaattgttgttgctttcatgaaagggaatatttacagatgtcctcacaaaggggtgtccaattttttggcttccccaggccacattggaggaagaagaattgtcttgggccacacataaaatacactaacactaatgatagctgatgtgccaaaaaaaattgcagaaaaatcttacaatgtttttaaaaagtttacaaatttgtgttgggctrcattcaaaactgtcctgggccacataaggcccctgggcggtgggttagacaagcttgctctactatttctgaagtcctgccccccaggctgtcttggaggagagagtttccctagaaggcatacagtccttaaaagcacatttcttctctccctgttttatagatttaactgtatgtttccatcaccccaaaattcctatgttgaagtctcaacctccaatgtgaccttgtttggtgataggacttttaggaggtaattaagatta

SEQ ID NO: 693672 - DNA, 616 bp, Homo sapiens
ggtcaagttaaaagccatgggccctgctattcctactaaagttcaggagttcctcttgatcaaatgctcctcaggttgttgccacctttggtgaatctctagaattctgaaaaagttgatattgaaatattttctcagaattgttgttgctttcatgaaagggaatatttacagatgtcctcacaaaggggtgtccaattttttggcttccccaggccacattggaggaagaagaattgtcttgggccacacataaaatacactaacactaatgatagctgatgtgccaaaaaaaattgcagaaaaatcttacaatgtttttaaaaagtttacaaatttgtgttgggctgcattcaaaacygtcctgggccacataaggcccctgggcggtgggttagacaagcttgctctactatttctgaagtcctgccccccaggctgtcttggaggagagagtttccctagaaggcatacagtccttaaaagcacatttcttctctccctgttttatagatttaactgtatgtttccatcaccccaaaattcctatgttgaagtctcaacctccaatgtgaccttgtttggtgataggacttttaggaggtaattaagatta

SEQ ID NO: 693673 - DNA, 596 bp, Homo sapiens
gagaatgtggcccttttcaagctaagaagaaagccctcaccaagaactaagtaagctggtagcttggtttgtcttggacttccagcctccaggagaaataagtttctgtgtttagcccacccagtctataatattttgttataacagttccagtggactaagacacccaggtaatacctgtgcctgatctgttactccatgtgaaatgatctaagcttcatggtcaggacatgaattgatatatattatatgtaagggaatcatgtaatatccatttaagttttggttaaaaaaagttatagccycctatgaccaagaatattcatttctattcattttatagatattaaaacattgcacaaagttatgttacgatatgtttattatggaattatttatagatatttattcccattattcttaaattagagaactgtcattgataaaacagctgagtatgaagaatagagtatgtaggttgtagacatgagtagagtttaacaatatccacttaaagaaaaataattaaaaactccgttatgtcgatgtgcttttgtctatgaatgcatgttcattgagaaagttatgtaaggata

SEQ ID NO: 693674 - DNA, 596 bp, Homo sapiens
gagaatgtggcccttttcaagctaagaagaaagccctcaccaagaactaagtaagctggtagcttggtttgtcttggacttccagcctccaggagaaataagtttctgtgtttagcccacccagtctataatattttgttataacagttccagtggactaagacacccaggtaatacctgtgcctgatctgttactccatgtgaaatgatctaagcttcatggtcaggacatgaattgatatatattatatgtaagggaatcatgtaatatccatttaagttttggttaaaaaaagttatagccccctatgaccaagaatattcatttctattcattttatagatattaaaacattgcacaaarttatgttacgatatgtttattatggaattatttatagatatttattcccattattcttaaattagagaactgtcattgataaaacagctgagtatgaagaatagagtatgtaggttgtagacatgagtagagtttaacaatatccacttaaagaaaaataattaaaaactccgttatgtcgatgtgcttttgtctatgaatgcatgttcattgagaaagttatgtaaggata

SEQ ID NO: 693675 - DNA, 596 bp, Homo sapiens
gagaatgtggcccttttcaagctaagaagaaagccctcaccaagaactaagtaagctggtagcttggtttgtcttggacttccagcctccaggagaaataagtttctgtgtttagcccacccagtctataatattttgttataacagttccagtggactaagacacccaggtaatacctgtgcctgatctgttactccatgtgaaatgatctaagcttcatggtcaggacatgaattgatatatattatatgtaagggaatcatgtaatatccatttaagttttggttaaaaaaagttatagccccctatgaccaagaatattcatttctattcattttatagatattaaaacattgcacaaagttatgttacgatatgtttattatggaattatttatagatatttattcccattattcttaaattagagaactgtcattgataaaacagctgagtatgaagaatagagtatgtaggttgtagacatgagtagagtttaacaatatycacttaaagaaaaataattaaaaactccgttatgtcgatgtgcttttgtctatgaatgcatgttcattgagaaagttatgtaaggata

SEQ ID NO: 693676 - DNA, 596 bp, Homo sapiens
tgtctcaagaattttgtgagaactaaatatggcaatggcttaaattctaagacaaggctagcaaacagtggtaatttaatacttggcaaatattatgtttgtttttatttaggtatgttagccaggagatagtcccaaaaattctaaaggtcactctcaaggttttatatttctacccttcaatgatattaatatagtcacattaatctaaagtggattccttctggcctgtccttgatcttatcagaaattgtcaaaaaaattttttgtaccactctggaatgactgtcacctgacttagagaaattgaaaaatgtcagagattgtaaaatactgtaggttattaattgcattacagagatgctccaattttaaaaacgtctatcttaggataaatgaaataagtattcytaaccattcttgatcctttgtgtctgggaatttggtcccaattcctctttccaggcctttcttccactagctcattaactttcctgcctccacataatttcccactcttcaaatgctctccttaaaagtccttctcctgaagtcttcctccatctttctcccttcagaacatcggtaatccttta

SEQ ID NO: 693677 - DNA, 654 bp, Homo sapiens
tggggaaacctcgtctctactataaatacaaaaattagctgggtgaggtggcgcatgcctataatcccagctactcaggaggctgaggcaggagaatcacttgaatccgggagatgaagattgcactgagccgaggttgcgtcactgcactactgcctgggcgacagagcgagagtctgtctcaaaaaaaaaaaaaaaaaaaaaaragagagatataagacctcatatgaggtaagagccataatttggaaacacagataagaaaaaaggtaggtacagttattcaaaaaagaaaagaggttgggcgcggtggctcatgcctgtaataccagcactttggaaggccaagacaggtggatcatgaggtcaggagttcaagaccagcctggctaagatggtgaaaccctgtctctactaaaaataaaaataaaaaaatagccgggcatggtggtggttgcctgtaatcccagctactgaggcagagaattgcttgaacccaggaggcagaggttgctgtgagccgagattgtgccatgcactccagcctgggtgacagagtgagactctgtcagaaagaaagaaagaaaggaaagaaagaaagagagaaagagagaaagagagaaagagagaaagagagaaagaaagaaagaaaga

SEQ ID NO: 693678 - DNA, 593 bp, Homo sapiens
tgaaaaatatgcattttggtttagatccttgtcttagtcaaattaaaaaagaaaacaaaacctattagagtctactagatcaatgcactctttgtggcttaaatttgtttgtgtaagttctactactagctatttactgctaaactcactttctcactaatggtttgctcataaattttttcttctaacaaaaaacgtatcagttcaaataaaaagatgagaagttttcttttctcagatgtttggttattcttcttgaaagcagacaattcactataaattactttcaagggctttggtttcctatatttttactgcatttctcctcaacttccaagttaaaactaagatacaacttgacatttatttttctgaagcatcatgtgcattacggcttttatattctaaaggtgtgagaaaggaaaaatggarcacacattgggaatgttgacgctggattgtgcttttatctgtagttattcatgtttcaggcagttcattcctactttctgagaaattgatgagttgttgtgtttgtccttgctatctgtctttctggataatgggaaaattctcaaggattctgaataaga

SEQ ID NO: 693679 - DNA, 637 bp, Homo sapiens
caacaatatctaataacccccttcttcagggatgattagctagttaagtgcctggaatgtctctgtagacaagacttgagggaaaaagctttaatattatgttgcttcattgccagatctattcataaagggattattctacctctcagatgagaaaatctgaatctgcaaactggcttaatatggaaactgggtaaaaagccatgaatccctattatattgtttcaagttatgtttctgtctccacacctagaattttttctgctaatatactccagctaacatcttagtaggtatcttagtccatttgggttgctataacaaaataccataaactgggtagctaataaacaaaaaaaatttacttatcatagttctagaagttaggaagtctgacattaaggttctggcagattggtgtctggtgaaggcccctttatggttcacagatggtgtcttctcactgtgtcttcacatggtggaagagacaaagcagctctctgaggcctcttctataaaggcatgaattccattcaagaaggctgtgccctcatgatttaatcacctcccaagkgcctacctgctaacaccatcacactggtgattaggttttaacatgttttgggggacacagaca

SEQ ID NO: 693680 - DNA, 886 bp, Homo sapiens
tgagcatcctcctctctatcctttacccaagacaaccacccgccatggacaacagtttgaaccaagagggttcatstaattttaagccctagtgtgtcaccaatttattttggtccatgaactattgctcgcacctgttggcatcttggaatgcaaactccttctaattttaagcaccagcaggggcaggtctaattttgggtggcccttgtgccgggggctcccaagggaattcaagctctgttgtttggagcacctggggtgaagtgggtgccttccagaatagattagggttgtgatatgttcaagagggacccacacagtttgtatccacacaacattaactacaattttcttcaggacttttattgtggcaggtcttgttccaagtcaagtgcttttcatgtattattggattacttttactttgaagtgtaaatcagccaacacggagtgcttactatgtgctaggagctggagatgcaaaaatgaatctgacatagtcccacctgcagagaactcatgatctagtgctcacaggcacgtaaaaaaaaaaaaaaacagttatagtgcagtgagatcagagagccgtacagtgcctggcacccagctgcctttgagggaatgtccagcaaatgaatggaagcaatgtttgtgatagagacaagataaagttgctgcaagaaagcaaattcccattctccttgggagattagcagaaggtttcacagaggaaattatactctgagctaagtcttgaagaagataaagtgtttctccaggtggagaagggaggaggatgtggcatgtattttagtgcttcacccacattgctctcagcacaaaatgtttctatgtgcacctggcccattccaatggccaacac

SEQ ID NO: 693681 - DNA, 886 bp, Homo sapiens
tgagcatcctcctctctatcctttacccaagacaaccacccgccatggacaacagtttgaaccaagagggttcatctaattttaagccctagtgtgtcaccaatttattttggtccatgaactattgctcgcacctgttggcatcttggaatgcaaactccttctaattttaagcaccagcaggggcaggtctaattttgggtggcccttgtgccgggggctcccaagggaattcaagctctgttgtttggagcacctggggtgaagtgggtgccttccagaatagattagggttgtgatatgttcaagagggacccacacagtttgtatccacacaacattaactacaattttcttcaggacttttattgtggcaggtcttgttccaagtcaagtgcttttcatgtattattggattacttttactttgaagtgtaaatcagccaacacggagtgcttactatgtgctaggagctggagatgcaaaaatgaatctgacatagtcmcacctgcagagaactcatgatctagtgctcacaggcacgtaaaaaaaaaaaaaaacagttatagtgcagtgagatcagagagccgtacagtgcctggcacccagctgcctttgagggaatgtccagcaaatgaatggaagcaatgtttgtgatagagacaagataaagttgctgcaagaaagcaaattcccattctccttgggagattagcagaaggtttcacagaggaaattatactctgagctaagtcttgaagaagataaagtgtttctccaggtggagaagggaggaggatgtggcatgtattttagtgcttcacccacattgctctcagcacaaaatgtttctatgtgcacctggcccattccaatggccaacac

SEQ ID NO: 693682 - DNA, 989 bp, Homo sapiens
taggtcctccctgggtgggttcctttggttttggttctgtctgaatgcacaagatggtcaaggaactttaagacttgcattgcactcctgtattcactgttgtcgttgtcttgctcatattcctttggccataccaggaagtcacttgcagataggccaagtatgtgctgatggctttctgcatccttaagcccaaatgcatatgatcctccgaggatgcttcacctatgcatggagcagtctggaagacactgttgcatagtcccagtcccagagatagctctcaacaatgagggatagarttggtaataaattccccagctcccttcagcctcatagggacagttctgtagtatgtggtatgttctgcacagtcacttcaagggtcccaagtaagactgtgcccagtttcctgcagaagtaaactgctcataaacacagtctaatggcctcccttccttccctacctctacggaggtttcagctcccacgtatgttacttgtacccaaatgctgctctcagagtctgcttctgagggagcccaagctaagacaatatctgacctcctcactgaaggaattgcttaggctaggcatggaatctgctaaccttttattttcttggctcttgactagaataattatttagcacttgctatgttccaggcatagttccaaatgtgtgtgttctctctgtctctctctctctctctatatatatatatatatttatctatatataatgtatatatacatatatacattaaaaattcaactctatgaggtatgtacaaaagctattcacattttacagataagaaagtagagacatggggtgggaggtaggtgacttgatcaatgtcacaaagccaggaaggctttgagccaggattcaagcgcaggcatctggaaccagcattcctaactactaagtcatcctgcctattcatctgaaaatcaactaaaataatggatttgaaaaaataaaa

SEQ ID NO: 693683 - DNA, 634 bp, Homo sapiens
cccacaaaaacaaatattatttggggtttagtcatgtagactctttctactctttatcaatatccatacagttttaaggaatctgctgaaatatcatgctaggaaggtataacatgatcttttccacaatctggttctaatctacctttatggtcccatytacttttacttttcagtgtttgtatggaaatgtgcttcatattactaggcagacatgcccactcagtcatgggggcactggatagtaagatttatggtatgaaaagcagaagagagacagcatgcttcctgtagaaaattcattcctaagagtggcacatagtaagcccttcctgactcaccagtcaggtaaatcattcacttctagtgtggaatatgtcaagggtggagagaggccaagagcaatcccataatggaatacccttcacatggaatgaaacatcaggaatggggatgagcttatgcactgtatgaaaggctgagacatacagatgaacaggtcacagacccagttttccaagattacagtttagtggaggaaactgacagaaaaatagataattatattacaataagaactagcagggcaccatgccaaacattttacatttattatctaatctcaaacttctat

SEQ ID NO: 693684 - DNA, 1744 bp, Homo sapiens
tgtctgacttgtcaaagaggttaatagtaggtcagagaaacaaaaacaagagaaatagaacaccagtttggagtctctgaaartatctctgtgtaaatcacagtgaccatgactcttaactcctggaacatcgccttttccactttccagctgagggttgattcaggcccctaagacaagtttggacttgcccaccgactcaccagctagctctgtttcaatctgtccacaaccacactggatcccttccccacttcctagatctactctacaggacagcttagggggaagtgcttttcttgtcctgtgagtacaccctgaggtctaccaggaagcccagaggacagagacagtaagaaagcaatatccccacccctgatccaggaaaaaaaagaggctctgttaatagataccacctgctagtgtggtttatttgtgatatgacaccatgagcatctcccctccctcacaactggccaaaaagaagaagaggaagaggaagaaggaaaaggaaggaagaacaggaggtggagaaggagaaggaaaaggaggagaaaaagaaagaagaaagagaatgaagaaggaaaaagaagaaaggaagcagaaagaagaagatgcctcccttgttaccatcttcaaagaatccatacaggcattaagggaaattctaactactctcactcttaggcgtacagctccaagacagaacagttgttctatccagggaaaaatgtgctgccttaggcgctgctgctgctgctcctacaaagacaaacaatggtccccaagaaggcagctatgctggccccagtccccgttcatgcacacaaggggcaggaaacaatgggccactgaataccagcactcctgggccatgtgcccaggctgaaggcccctctgaatcctggcctatcaacaaacaaaagggcagaaagaagaaagaggcaatttaaaaacatagaggaactcctcacagttccctcatgtgcttaggcgatcatgcatgtgcacatcatgtgtacacactcaaagactcacaccactcataccacttacaccatgcttcacgataccaactcaagaagactttacacatctggtttacagttggatgagaatacttgggagctatggagatggtggggtccttgccagttccttccctagaaatacatggaaagaagtcaagctctcactttctagaagcagctatatcttaggggtacaaaagaattccctggctattcacaaagccaaagtactaaggtcgccatgagtcacctggagtgatatatacatccaaacagcctcccctgagcgcccagtagagcccatttattcagcaaatcttactgagcctttcctgtatggaggcactgtgctaggtgatggtgacaaaggaggaaaagacaggtctaagctctgtctaaagaggcatggcttgacaaagaagagaaaggacaagagaacacaaaaagtcttattgtttctgctttaaatattctttattataacaaagctgtggtaataagccccaacctgaagatctaagatttaaaaatcatcaatagcggaaagaaatcacataacagggctaagaaaaatccaatgtcctctatcattttttcttattatgtttttttaaaaatgacacttgaataaaaattgcagcttcccttgcaagaggaacccaatttttttaaaaggttcctgagaatcagagttgacctctggttgatatttc

SEQ ID NO: 693685 - DNA, 1744 bp, Homo sapiens
tgtctgacttgtcaaagaggttaatagtaggtcagagaaacaaaaacaagagaaatagaacaccagtttggagtctctgaaagtatctctgtgtaaatcacagtgaccatgactcttaactcctggaacatcgccttttccactttccagctgagggttgattcaggcccctaagacaagtttggacttgcccaccgactcaccagctagctctgtttcaatctgtccacaaccacactggatcccttccccacttcctagatctactctacaggacagcttagggggaagtgcttttcttgtcctgtgagtacaccctgaggtctaccaggaagcccagaggacagagacagtragaaagcaatatccccacccctgatccaggaaaaaaaagaggctctgttaatagataccacctgctagtgtggtttatttgtgatatgacaccatgagcatctcccctccctcacaactggccaaaaagaagaagaggaagaggaagaaggaaaaggaaggaagaacaggaggtggagaaggagaaggaaaaggaggagaaaaagaaagaagaaagagaatgaagaaggaaaaagaagaaaggaagcagaaagaagaagatgcctcccttgttaccatcttcaaagaatccatacaggcattaagggaaattctaactactctcactcttaggcgtacagctccaagacagaacagttgttctatccagggaaaaatgtgctgccttaggcgctgctgctgctgctcctacaaagacaaacaatggtccccaagaaggcagctatgctggccccagtccccgttcatgcacacaaggggcaggaaacaatgggccactgaataccagcactcctgggccatgtgcccaggctgaaggcccctctgaatcctggcctatcaacaaacaaaagggcagaaagaagaaagaggcaatttaaaaacatagaggaactcctcacagttccctcatgtgcttaggcgatcatgcatgtgcacatcatgtgtacacactcaaagactcacaccactcataccacttacaccatgcttcacgataccaactcaagaagactttacacatctggtttacagttggatgagaatacttgggagctatggagatggtggggtccttgccagttccttccctagaaatacatggaaagaagtcaagctctcactttctagaagcagctatatcttaggggtacaaaagaattccctggctattcacaaagccaaagtactaaggtcgccatgagtcacctggagtgatatatacatccaaacagcctcccctgagcgcccagtagagcccatttattcagcaaatcttactgagcctttcctgtatggaggcactgtgctaggtgatggtgacaaaggaggaaaagacaggtctaagctctgtctaaagaggcatggcttgacaaagaagagaaaggacaagagaacacaaaaagtcttattgtttctgctttaaatattctttattataacaaagctgtggtaataagccccaacctgaagatctaagatttaaaaatcatcaatagcggaaagaaatcacataacagggctaagaaaaatccaatgtcctctatcattttttcttattatgtttttttaaaaatgacacttgaataaaaattgcagcttcccttgcaagaggaacccaatttttttaaaaggttcctgagaatcagagttgacctctggttgatatttc

SEQ ID NO: 693686 - DNA, 1045 bp, Homo sapiens
ttatttttttaccaaagtaatacatgcgaacaaaagcaatcaactggtggcagcatttaggcccactaagacacaaccacccattaccaaagaaggcctgcacatcattctgactcatgtttggaactttctctagagcacatctcttggtatttcctgcagatatacagcaagmaagatttcattcctgccagacaagctttttttttttttaatctccaccagtcagtctcttacagagataacctccagtcacaactctctctccaaatgaattcccaagttgccatggcaactaacaccttcctccaatactgtcaatatgcttcccaaccctaaaggcagccctcgatttactgccagaagtaccaatctcctcatgtaaaagagagtgccttcctttgctccaaaactatcatgagattctttagaagaccctctgttaataatattaatagtatcagctaccacctattgagggccaactttatttctattatctcatttaatcatttcaaaaaaaaaaaaaaacaaaaacactgcatggtagatatcactctctttactttacagatttaaataattataaatcggaggttatataacttgaccaagaggcagaaccaggatttgaacacagaatcttctggcccagattatctctgaggcttcctcctttgacacaagatcttttccagctcagaggagtaacttcatctgtcttgttctctcagcctaaccttgcttctttttctaaaagtgctttctacacttcaagacaatttagtttgctttaataacaacactgctctaaatccaatggcacttaaaggtgtgttaatgctgattaaacattaagagagaaaagacttcattctcctgctcttcatctccaagggctttggtggggaagaatgagataatgggtgctaagggttttgtactgagaatgaaggtatacaagatcaatacccagcagatattgaggtgtccacagtgtgaccaagtgccaaggaatgtccataagggtagaactgcagccaag

SEQ ID NO: 693687 - DNA, 688 bp, Homo sapiens
taataagttttattgagaacttgtaaggtgtggctcacgcctgcaatcccagcactttgggaggccaaggcaggtggatcacttgagaccaagagttcaagaccagcctggccagcatggcaaaaccccatctctactaaaaatacaaaattacctcagtgtggatggtgcacacctgtaatcccagctacttgggaggctgaggcaggagaatcacttgaaccccggaggcagaggttgcagtgagctgagatcatgccactgcactccagcctgggtgagagcaagactccatctcaaaacaaaagaaaaaaaagaaaaaagaacttgcaaggtgctataagtacttttcacatgtatttatttccatccttacagcattttgtgcgatagttacagtattagtattggtttcagagagcaggagcttttaaactgtgttctgagatactctggaattagcagaaaatcacatttcaatttaaaaaacggtgacacatccattcaaatgagcaaccctcactgacatgagcaagagacccaggacccagtttccctgcrttagataccactgcaatgtctcgcaggctgctagcattgttttatgtaaaccctggaagaaagaatcactgtatgccttggaacttctgaacaatatgctattaattagaatacatgtagctttgca

SEQ ID NO: 693688 - DNA, 688 bp, Homo sapiens
taataagttttattgagaacttgtaaggtgtggctcacgcctgcaatcccagcactttgggaggccaaggcaggtggatcacttgagaccaagagttcaagaccagcctggccagcatggcaaaaccccatctctactaaaaatacaaaattacctcagtgtggatggtgcacacctgtaatcccagctacttgggaggctgaggcaggagaatcacttgaaccccggaggcagaggttgcagtgagctgagatcatgccactgcactccagcctgggtgagagcaagactccatctcaaaacaaaagaaaaaaaagaaaaaagaacttgcaaggtgctataagtacttttcacatgtatttatttccatccttacagcattttgtgcgatagttacagtattagtattggtttcagagagcaggagcttttaaactgtgttctgagatactctggaattagcagaaaatcacatttcaatttaaaaaacggtgacacatccattcaaatgagcaaccctcactgacatgagcaagagacccaggacccagtttccctgcattagataccactgcaatgtctygcaggctgctagcattgttttatgtaaaccctggaagaaagaatcactgtatgccttggaacttctgaacaatatgctattaattagaatacatgtagctttgca

SEQ ID NO: 693689 - DNA, 871 bp, Homo sapiens
tattctagacatcattctaccatatgttgtccaagaaaaaccacattttaccttactgtttatcatttgaaataaaatattatgttaagatattttaaatttttaccagttccacaaaggaactgggaagtagaaactgaagaacactttgttaaacaagtccttggggattaaagaagtaatagctacgaagtatacaacagtgtgacgagtgaatccttctgatattggggttaaaatggtcattatagctactgcgtaccacaaatccaatcaagttaggtattttgtacacattatcatttaattctcattacaacccatcacaatagatgttaattagtatgtcccctatttttcggataaggaaattcaagatcaaagagattaaatggccaaggtcatacaactaagaagtgaaagtgctgagactcaaacctaagttcatgtcttaaatcccatgctgtttgatattaaggaycacttgtgtttaacaaatattaaacacctgctacacacacacactgtgccagatgtataagatagagccatgacccaagaaacacagtcactattctcaaaaaacttagaatctctgccaggagcagcggctcacgcctgtaatcccagcactttgggaggctgaggcagatggatcacgaggtcaggagttcaagaccagcctggctaagatggtgaaaccccatctctactaaaactacaaaaattagccaggcgtggtggcaggcgcctgtaatcccagctacttgggaggctgaggcagagaattgcttgaaccagggaggcggaggctgcagtgagccaagatcgcaccactgcactccagcctgggcgacagagtgagattgtc

SEQ ID NO: 693690 - DNA, 871 bp, Homo sapiens
tattctagacatcattctaccatatgttgtccaagaaaaaccacattttaccttactgtttatcatttgaaataaaatattatgttaagatattttaaatttttaccagttccacaaaggaactgggaagtagaaactgaagaacactttgttaaacaagtccttggggattaaagaagtaatagctacgaagtatacaacagtgtgacgagtgaatccttctgatattggggttaaaatggtcattatagctactgcgtaccacaaatccaatcaagttaggtattttgtacacattatcatttaattctcattacaacccatcacaatagatgttaattagtatgtcccctatttttcggataaggaaattcaagatcaaagagattaaatggccaaggtcatacaactaagaagtgaaagtgctgagactcaaacctaagttcatgtcttaaatcccatgctgtttgatattaaggaccacttgtgtttaacaaatattaaacacctgctacacacacacactgtgccagatgtataagatagagccaygacccaagaaacacagtcactattctcaaaaaacttagaatctctgccaggagcagcggctcacgcctgtaatcccagcactttgggaggctgaggcagatggatcacgaggtcaggagttcaagaccagcctggctaagatggtgaaaccccatctctactaaaactacaaaaattagccaggcgtggtggcaggcgcctgtaatcccagctacttgggaggctgaggcagagaattgcttgaaccagggaggcggaggctgcagtgagccaagatcgcaccactgcactccagcctgggcgacagagtgagattgtc

SEQ ID NO: 693691 - DNA, 871 bp, Homo sapiens
tattctagacatcattctaccatatgttgtccaagaaaaaccacattttaccttactgtttatcatttgaaataaaatattatgttaagatattttaaatttttaccagttccacaaaggaactgggaagtagaaactgaagaacactttgttaaacaagtccttggggattaaagaagtaatagctacgaagtatacaacagtgtgacgagtgaatccttctgatattggggttaaaatggtcattatagctactgcgtaccacaaatccaatcaagttaggtattttgtacacattatcatttaattctcattacaacccatcacaatagatgttaattagtatgtcccctatttttcggataaggaaattcaagatcaaagagattaaatggccaaggtcatacaactaagaagtgaaagtgctgagactcaaacctaagttcatgtcttaaatcccatgctgtttgatattaaggaccacttgtgtttaacaaatattaaacacctgctacacacacacactgtgccagatgtataagatagagccatgacccaagaaacacagtcactattctcaaaaaacttagaatctctgccaggagcagcggctcacgcctgtaatccsagcactttgggaggctgaggcagatggatcacgaggtcaggagttcaagaccagcctggctaagatggtgaaaccccatctctactaaaactacaaaaattagccaggcgtggtggcaggcgcctgtaatcccagctacttgggaggctgaggcagagaattgcttgaaccagggaggcggaggctgcagtgagccaagatcgcaccactgcactccagcctgggcgacagagtgagattgtc

SEQ ID NO: 693692 - DNA, 596 bp, Homo sapiens
tgtgggttttgttttaaaagaaatgactactattttatcttctcctgtagctatttctggaccctttgtggtttaagaaggaatacagggaggagaaagagaaaaaaaatgaaatcatccaggcaaggaagtttagaaagcagaggtttaggagaagaaaaagaagagacagtttctggcagcttcctgattttagaagctgattttgctacttttctttaattctgaggtagtttcaaatattttgttgttacctttctggaaagaaataagtttatcatttctacttttggatgtttttaggtgccagctaaaatacaaccctcatttattttccttgatgcagaaacctaacttctctaatttagcatacgagaagaccagtttgggaatatttaaagttcttcactttgggaaccttagatgttggtcgtccttagtaaaatccyccctttacataaatgtttgtaagaagaggtgctataattatcacacataaaaccagctggggtgcccaaagggggacactctccttgcctgtcctcgattttagagatatgttttctcatttttctttaaaaggagtagttgaactg

SEQ ID NO: 693693 - DNA, 602 bp, Homo sapiens
tgctgtgttgttagcttggtgttccaaaggggtaggtattttttaggtttaacactatggttctctggctacttttaaaactgaaagtactcttcttataatataaagtaaacttctaataatttgtccaagagatatcaaaatacagtacctatgtttccatttatgaaattttcttgaaatatttactgcaggctgggcgtggtggctcacccctgtaatcccagcacttagggaggacaaggcggrtggatcacctgaggtcaggatttcaagaccagcctaaccaatatggcgaaacaccatctctactaaaaatataaaaaaaattagccaggtgtgttgacgtgcgcctgtagtccccgctactcaggaagctgagacaggagaactgcttgagccaggcaggcagaggctgcagtgagcgaggtcgtgccacaactccagcctgggtgacagagcaagactcaatctcaaagaaataaataaaaataaaataaagaaatatctactgcaaataatacgtttcataaaatgcttaataaaaactttcaataccaccatgaaagcaattagaacatgagggtgtctgaagtagatca

SEQ ID NO: 693694 - DNA, 602 bp, Homo sapiens
tgctgtgttgttagcttggtgttccaaaggggtaggtattttttaggtttaacactatggttctctggctacttttaaaactgaaagtactcttcttataatataaagtaaacttctaataatttgtccaagagatatcaaaatacagtacctatgtttccatttatgaaattttcttgaaatatttactgcaggctgggcgtggtggctcacccctgtaatcccagcacttagggaggacaaggcgggtggatcacctgaggycaggatttcaagaccagcctaaccaatatggcgaaacaccatctctactaaaaatataaaaaaaattagccaggtgtgttgacgtgcgcctgtagtccccgctactcaggaagctgagacaggagaactgcttgagccaggcaggcagaggctgcagtgagcgaggtcgtgccacaactccagcctgggtgacagagcaagactcaatctcaaagaaataaataaaaataaaataaagaaatatctactgcaaataatacgtttcataaaatgcttaataaaaactttcaataccaccatgaaagcaattagaacatgagggtgtctgaagtagatca

SEQ ID NO: 693695 - DNA, 602 bp, Homo sapiens
tgctgtgttgttagcttggtgttccaaaggggtaggtattttttaggtttaacactatggttctctggctacttttaaaactgaaagtactcttcttataatataaagtaaacttctaataatttgtccaagagatatcaaaatacagtacctatgtttccatttatgaaattttcttgaaatatttactgcaggctgggcgtggtggctcacccctgtaatcccagcacttagggaggacaaggcgggtggatcacctgaggtcaggatttcragaccagcctaaccaatatggcgaaacaccatctctactaaaaatataaaaaaaattagccaggtgtgttgacgtgcgcctgtagtccccgctactcaggaagctgagacaggagaactgcttgagccaggcaggcagaggctgcagtgagcgaggtcgtgccacaactccagcctgggtgacagagcaagactcaatctcaaagaaataaataaaaataaaataaagaaatatctactgcaaataatacgtttcataaaatgcttaataaaaactttcaataccaccatgaaagcaattagaacatgagggtgtctgaagtagatca

SEQ ID NO: 693696 - DNA, 602 bp, Homo sapiens
tgctgtgttgttagcttggtgttccaaaggggtaggtattttttaggtttaacactatggttctctggctacttttaaaactgaaagtactcttcttataatataaagtaaacttctaataatttgtccaagagatatcaaaatacagtacctatgtttccatttatgaaattttcttgaaatatttactgcaggctgggcgtggtggctcacccctgtaatcccagcacttagggaggacaaggcgggtggatcacctgaggtcaggatttcaagaccagcctaaccaatatggcgaaacaccatctctactaaaaatataaaaaaaattagccaggtgtgttgacgtgcrcctgtagtccccgctactcaggaagctgagacaggagaactgcttgagccaggcaggcagaggctgcagtgagcgaggtcgtgccacaactccagcctgggtgacagagcaagactcaatctcaaagaaataaataaaaataaaataaagaaatatctactgcaaataatacgtttcataaaatgcttaataaaaactttcaataccaccatgaaagcaattagaacatgagggtgtctgaagtagatca

SEQ ID NO: 693697 - DNA, 602 bp, Homo sapiens
tgctgtgttgttagcttggtgttccaaaggggtaggtattttttaggtttaacactatggttctctggctacttttaaaactgaaagtactcttcttataatataaagtaaacttctaataatttgtccaagagatatcaaaatacagtacctatgtttccatttatgaaattttcttgaaatatttactgcaggctgggcgtggtggctcacccctgtaatcccagcacttagggaggacaaggcgggtggatcacctgaggtcaggatttcaagaccagcctaaccaatatggcgaaacaccatctctactaaaaatataaaaaaaattagccaggtgtgttgacgtgcgcctgtagtccccgctactcaggaagctgagacaggagaactgcttgagccaggcaggcagaggctgcagtgagcgaggtcgtgccacaactccagcctgggtgacagagcaagactcaatctcaaagaaataaataaaaataaaataaagaaatatctactgcaaataatacgtttcataaaatgcttaataaaaactttcaataccaccatgaaagcaattagaacatgagggtgyctgaagtagatca

SEQ ID NO: 693698 - DNA, 747 bp, Homo sapiens
cacactttgcactcaggacattgccaacctgcacgttttaatggagtaaccgctatatccaggcacattccatgatagtgctgaccacaagtagtacaaaagaactgatctaagaggtctcccgggctgtcgcacactgcacagtttgcatcttccttcgctataattaacagtaaaacaatgaaattgttgtataagaatttaaattttttctgactacacagtaaaatcatttgaaaggatttgcatcatgaacctttcagacatttgaagttattcacattgaattgtcatctaatcagaaagaggtatcaataaaaacactgtagggtatttaatctaaatgtaaccacattaaatttaatcrtatagttttgcaattatttgtggctatatctacttaagaccgtaagcaggtcttctttaattttctattcctaatgccaatgataatgctggatacctaattaatgctcaatatatgctcactgcaaagaaccaaacaaggaaaacaccaactaagaaatgctttgcagtgtaacataaacattttctttgaatgctaaatatattttgaaattacaaaatcagacaagagacaaaattaagaaacgttaataccaattagactaagatgcttcttaagcataaacagactattcaaatcacataagggcttttttttaattactggaaaatgtcttatgtggaagaacattaaagacagaagctacatattcatacaca

SEQ ID NO: 693699 - DNA, 747 bp, Homo sapiens
cacactttgcactcaggacattgccaacctgcacgttttaatggagtaaccgctatatccaggcacattccatgatagtgctgaccacaagtagtacaaaagaactgatctaagaggtctcccgggctgtcgcacactgcacagtttgcatcttccttcgctataattaacagtaaaacaatgaaattgttgtataagaatttaaattttttctgactacacagtaaaatcatttgaaaggatttgcatcatgaacctttcagacatttgaagttattcacattgaattgtcatctaatcagaaagaggtatcaataaaaacactgtagggtatttaatctaaatgtaaccacattaaatttaatcatatagttttgcaattatttgtggctatatctacttaagaccrtaagcaggtcttctttaattttctattcctaatgccaatgataatgctggatacctaattaatgctcaatatatgctcactgcaaagaaccaaacaaggaaaacaccaactaagaaatgctttgcagtgtaacataaacattttctttgaatgctaaatatattttgaaattacaaaatcagacaagagacaaaattaagaaacgttaataccaattagactaagatgcttcttaagcataaacagactattcaaatcacataagggcttttttttaattactggaaaatgtcttatgtggaagaacattaaagacagaagctacatattcatacaca

SEQ ID NO: 693700 - DNA, 747 bp, Homo sapiens
cacactttgcactcaggacattgccaacctgcacgttttaatggagtaaccgctatatccaggcacattccatgatagtgctgaccacaagtagtacaaaagaactgatctaagaggtctcccgggctgtcgcacactgcacagtttgcatcttccttcgctataattaacagtaaaacaatgaaattgttgtataagaatttaaattttttctgactacacagtaaaatcatttgaaaggatttgcatcatgaacctttcagacatttgaagttattcacattgaattgtcatctaatcagaaagaggtatcaataaaaacactgtagggtatttaatctaaatgtaaccacattaaatttaatcatatagttttgcaattatttgtggctatatctacttaagaccgtaagcaggtcttctttaattttctattcctaatgccaatgataatgctggatacctaattaatgctcaatatatgctcactgcaaagaaccaaacaaggaaaayaccaactaagaaatgctttgcagtgtaacataaacattttctttgaatgctaaatatattttgaaattacaaaatcagacaagagacaaaattaagaaacgttaataccaattagactaagatgcttcttaagcataaacagactattcaaatcacataagggcttttttttaattactggaaaatgtcttatgtggaagaacattaaagacagaagctacatattcatacaca

SEQ ID NO: 693701 - DNA, 747 bp, Homo sapiens
cacactttgcactcaggacattgccaacctgcacgttttaatggagtaaccgctatatccaggcacattccatgatagtgctgaccacaagtagtacaaaagaactgatctaagaggtctcccgggctgtcgcacactgcacagtttgcatcttccttcgctataattaacagtaaaacaatgaaattgttgtataagaatttaaattttttctgactacacagtaaaatcatttgaaaggatttgcatcatgaacctttcagacatttgaagttattcacattgaattgtcatctaatcagaaagaggtatcaataaaaacactgtagggtatttaatctaaatgtaaccacattaaatttaatcatatagttttgcaattatttgtggctatatctacttaagaccgtaagcaggtcttctttaattttctattcctaatgccaatgataatgctggatacctaattaatgctcaatatatgctcactgcaaagaaccaaacaaggaaaacaccaactaagaaatgctttgcagtgtaacataaacattttctttgaatgctaaatatattttgaaattacaaaatcagacaagagacaaaattaagaaacgttaataycaattagactaagatgcttcttaagcataaacagactattcaaatcacataagggcttttttttaattactggaaaatgtcttatgtggaagaacattaaagacagaagctacatattcatacaca

SEQ ID NO: 693702 - DNA, 747 bp, Homo sapiens
cacactttgcactcaggacattgccaacctgcacgttttaatggagtaaccgctatatccaggcacattccatgatagtgctgaccacaagtagtacaaaagaactgatctaagaggtctcccgggctgtcgcacactgcacagtttgcatcttccttcgctataattaacagtaaaacaatgaaattgttgtataagaatttaaattttttctgactacacagtaaaatcatttgaaaggatttgcatcatgaacctttcagacatttgaagttattcacattgaattgtcatctaatcagaaagaggtatcaataaaaacactgtagggtatttaatctaaatgtaaccacattaaatttaatcatatagttttgcaattatttgtggctatatctacttaagaccgtaagcaggtcttctttaattttctattcctaatgccaatgataatgctggatacctaattaatgctcaatatatgctcactgcaaagaaccaaacaaggaaaacaccaactaagaaatgctttgcagtgtaacataaacattttctttgaatgctaaatatattttgaaattacaaaatcagacaagagacaaaattaagaaacgttaataccaattagactaagatgcttcttaagcataaacagactattcaaatcacataagggcttttttttrattactggaaaatgtcttatgtggaagaacattaaagacagaagctacatattcatacaca

SEQ ID NO: 693703 - DNA, 593 bp, Homo sapiens
tggatgataacagaataaagaagctccatgccgcggatgtgtaccccagaaggtgacaatgcagccggttgcagtggggggtctgagcccgtcttatttcagtgtgaggtgctgtagcctctgttaccatgacatgaggttcctgggacgcatgtaccattcagactgtcacgtcagcctcactgccaacactaagaaggaggtgcactgctgcctattcttagagatgtgttgaaaatgcagcagaatctcttggtttattatgtttctgagagcaagacacaagcccctccccatgcaggtatcccatctgcgcccgggctcagagagtcctgctcacagaattagattttagattcatgttgtcaggagccaaattgcattattttttagtgcttgagggaaaaaaacaaacatgaagaaaacacacgaaaaaacacttcatttcctgttatgggtcgaattwtgtcccccaaaaagataatgttgaagtgctaatccccaacacccatgaatgtgcctttatttggaaatagagtctgtgcaggtgtaatcagggtaagataaggtcatactggatttggtgggtcaaa

SEQ ID NO: 693704 - DNA, 626 bp, Homo sapiens
agacacctgttgttgcagcataattattaatagcaccacctttcactcagaggtgttgcaatcacacagtcaccctaaagaaaaggactatgagaggtcaaaggaagaaggctgtgattggagtagtcaatgaagatttcattcatgtgcctattctaagattacaggtaaatggaaaggaaaagggactatttaccagacaaaaagactaggaagactgtgagctccmtgaaggcacagagggtctgttttgcttgttcctatatccttgggacttgcatgctgcctacccaatggtaggtatcaactattaactaactgcctgtgaacctagatttaagatctagactgaaggtaggaaagttagggacagtcaaaaggcatgtcttgcaaggaaggtcagataagaacaattgtgaaacaaggctactattaatgatgatgatactagaacaaggttggccaatgaccataccgaaaaccaaccttatgtactgaaaaacaacagtgtcttttaattctttcttgtatttgcctcttcacttttgggtttaatgctattggcctttacctctacccctggaagtgatctcttccttctcaaacaaattgttttggatgttaaa

SEQ ID NO: 693705 - DNA, 1871 bp, Homo sapiens
tgagcctaggctgtcctattgaagaatgagagatatggatgacaaaccaattgcctcagctgtaatctgtctaggtcagtctacatgcatccagctgcattccaaataggtggaaaaacctgactgcagatgtatgagtgaatacagctaagagaataaaaccctcatgatctttccatctacttaagaaaataacaaatcttattattttaagccactgagatttgggtaggattggtacacagtcattactaattgatacatataacaatttatgttgtgattgtacagcccactgtcatttttgaaacagaaacttctagtgcatcttaacttccagtgttttatataacacgaatggaaagaataacataaactgcaggatggttttctgtcttcctttgtattatgttatatatgctgacctatttaattcatcaggctcatgcccctgactacatccatattcaagctcacatgaaatcttccactcttgtttacaaatataaacccagaatcaagtaaaattggtatatcagtaatgaagcttcatcttcttcatttttctatatccaggaaaaaataatggcatttaagaaaaataattttgtattagattatattgctgttctcaattattcatgcctccttggcctgtaagaatatgtaccatcatctgttgctatgtgatttctgtgcttttccaagggaggaatgtgctttgctgcccccttcattttgaaccttgtcatgacttgctttgttcaatggaatataaaccgtcttgatgtgtaaatagaagcattagaggatactgcacaaatggctttcatcttttttccttttccaagagaatagcaaagccaaaagagcacttctccttgaccgtcagtgccggaatgagaagaaatacaatgggacagtcccaagttagttgacatgaaatgtgagcaaggcataaatatttgtgatttaagccactaaaatatgaggatcatttgatatctcagcgatgctgactaatacaacttctcatttatctataaaatggtaaatgattgagaacagttcacaaatccaaagtactaaattaatctacattcaactgaactgtactattatctattaaagttatagagaaagtcagtgaattgtattaaagatgctgtgtttgtgtgtatttattgtattatataatttatattgcttctttggaccactgaaaattctgttttttgagatttatttgttgacttatttacttaattatttgcttgtttaaattatatacaggtttcatcacagtggaaaacaagaagtaaaaagacagtggtgaaattacttatactttgtaaaaaataaagtacaattaaattgctttgatttagtagtgtattagtcctttttcatgctgctgataaacacatacccaaggctgggcaatttacaaaagaaagaagtttaatggacttacagttccacgttgctggggagacctcacaacgtggcagaaggcaaggaggagcaagtcatgtcttacatggatggcagcaggcaaagagagagcttgtgcagggaaactccttcttataaagccatcagatcttgtgagacttattcactatcacgagaacagtatgagtgaaaccaccctgatgattcaattatctcccactgggctcctcccacaacatgtgggaattatgggagctacaattcaagatgaaatttgggtggggggcatggccaaaccatatcaagtagtgattttcagatartacagggtaagaaaaaaatagctttcccattttaagagccctagatagttcttgaacaatcaatgttcatatgcaagtggcagccagatttgc

SEQ ID NO: 693706 - DNA, 632 bp, Homo sapiens
tgaggacagttcattttgatgccgttacagaacttgagacgatctgctttagatcaaatttgagattctgtcatcatgtctatttttgttgtatgatgctgcctgtcactcataggttgacaacmagtctgacattttccttctttctttcttgcttgctttcttgctttctttctctccttccttccttcttctctctctctcttcctccctctttctcttctctttcccattctttctctctccctttctttctccctgtctttctttctttctctctctctctcttccctcccttccttccctcccttcccctcccctctccttccttcattccttccttccttctttttctttctttctttcacagggtctcactctgtcacccaggttggagtaaagtggtatgatcatggctcactgcagcctcgaactcctgggctcaagcaatcctcctgcctcagcctcctgagtagctgggactacaggtgcacgccaccatgcactgctaattttaaaaatgttttagagacagagcctcactatgttacccaggctggtctcaaactccaggcctcaagtaaggctcccaccttggcctcccaaagtgctgggattacaagcaaaaacca

SEQ ID NO: 693707 - DNA, 2220 bp, Homo sapiens
acaatactttaaaaatgctgaaaatattcttagcttacatctacaaaaaagcaggcagtgggctgatttgactcacaggtggtatagcttgctaattcctgctttagattttaagaatgaggcagatgttgccagaatttgctctaatttactatgaggtttgcaaataaaagtgctcttgacatgaaaacttgctatttttaatggaaagacatgtacagccctttctcaggaagtggagattaatgcataaaattttattttcctaacataaagcatgttttttcaaaaaatggcttctccatcttgtggccctttgattatgatagctctgaaagctttgaaaagcttgcaaatactcaacttcaggaataaaaccacctatgagaccctcacctgaaggcaggatctttcctgcagccttgagtcttcctaatcagaaccattgtttcgtaaactggactccgaagacaacacttaaagtcactcaagttcgctacaaaattcttgttttgtgttttcatttctaaagacaataaaaataattgatatgatcaagtttgggattatctagatgatctagacaactattgcggtcaaaataggcctgatcacaggcattttcagtacccatggaattctagagctttggatacttgtctagtctgtttgggtcactataacaaaatgccataaactgggtgcttataaagaacagaattttatttcccacagttctgcaggctgggaagtccaaaatcgaggcagatttgatgtcctcaagtgatggaagaatcaagaggtctctctgggggctcttttataagggcactaaccccattcatgagagcagagcctaattacctccctaaggccccaactcctaatactatcaccttgagggtgaggagggaaacataaaaataccatagtaatactaataggtacatcagtgaagaacaatatcacagtatcgtgtagacaggaagattttgctgcaatttggttgttaaaacaaaaagtcgtgggtggatacaatcatcagacagttcagaagtggcatccacgtactcacccaaaggaggtgcactgcagttgtgggagccctgtgcttgctactagcagtgacttaatttctgcaaagctatgtgatcacattcaactatgctagttaactttaattttactgaatttggtttaggtaggtagtttgtaaatttaactttctacttgtataagaagtataattataaaaacagcaggtcagcacgacaggtctgagagaatctgtattctgtaaaaaaatacctatttcttacttggcgaaaaacattagtcaatgttgcaccaaaaaccccccaaaagctatagatcagatattgactaaaatgaatatacaaaaatcttgactggaaatattttaagtcaaaactaacagcctatttcaggtattgacagaacaaattccagaagcagaataactgaaacaatcatgttgaaattaattataatgggcagaatttgactgaaacttgttaccaccttcaccaaaatatagcctttcttatactatcaaatgtattgaataaattgtgagcactttcttgtacaacttctaaaaatttagctttgcttttgttatctgaatattgtacaggaatatgagcatgcaaataagatctttgtttagtttcaagtctttttataactaaatctgctggcattagacaataaatacattttcaaaataygaatagtctctcatttgattcaaattagatgagttgttttgcatgtttcttatcaattatgcaattattgtcttagtttaaatataatctaatagctgacgctgcattcatatgctatgctggattcctagctaaaatgaaatcagtatgctagtaaaatatttttcatacatgttatttggaactttgcttctcaattctataacaagaattccctttggtatctgtattttttttcccttgtgtgttaatatgcatataatctttctttgtttacctacctttttaaggtaggttaaagggataaaagcagtaactcatatgttttggtctcaggccacctttacacttttaagaattgttgtctgggtgcggtggctcacgcctgtaatcccagcactttgggaggccaaggtggatggatcacctgaggtcaggtgttcgagaccagcctggccaacatggcaaa

SEQ ID NO: 693708 - DNA, 689 bp, Homo sapiens
agtgctgggattacaggtgtgagccaccgtgcccatcctgtttggagaatcgttaagggaagagatgtggagaagacaaatggagatgtgtttccctggggtttgaatactgttagtcatgagagtggatgtttgggattgagttgactcttctaatgctaagcatcaggtcctgaatgacagaggaaccatgtgttcttcaaccatttgtgtgtgtgtgtgtgtgtgtgtgcaagtatttgtgaaatgccattccctctatagccccacacccaggggcaggttccttcttgtctaaatctacaggaaatattgaaaagaaagttgagggattccatcacagctgtggaagcaggaaagggaatggggggtgggtaatttgaaaaatatttacacaaggcaaactatgtgggatttataatagggagtaagaaggaggacggagtcaagagtaattctctgaggtctttcttggatgattaggtaacgagtaatatcttcaactaagggagagaatcttgagaagctaggttaagggaaaagaggagcttcatttggggcaggcaaattccccaagcaaattccagcaattgygactcctcaagctcacgttcctatcatatatagagcctggttaaattgtgccagtagcagaacttgatttttataaacaatgacagtaattggta

SEQ ID NO: 693709 - DNA, 622 bp, Homo sapiens
ttgcttacctgaaaactgtgtcagcaatgtctgtaccattcttatgagtgttaatcatccttcctgctggctctgatattttcccaatttcaaacattagtgtttgttatattatctttcaaaatatttggaattctacaggaaggcactgttggaaacaatttcctctgtgaaaaatctaaagacctgctaaaataaatcatagcctaggccttgtaaattattgccccacatttacccatgacttattctttttgtaaatatttttagggasctttttgtggcctaagtacagtataggggcaccaccaggaataaaatcaacttgctccctgtcctcatgggactcctaatctagtggtgagaagtattattttttcttgcttctcagagaggtagtcttttttttaacctactcacttaataacaacaacaattaaaaatcatttttatggtttctgaaaacattggtgaattgcaactggctattctgaggttctgttacgggctttttcccatcattctagaacatgttcaatgtttcttcagaccagtattgaaaatctaaataaaaattatattagaaaaggattttggaataagctagttggtttgatggtgc

SEQ ID NO: 693710 - DNA, 1801 bp, Homo sapiens
ccagatctctctccttcactgcaatagtcttgagtaaaatcttcctactgtttgaacaaatgttagaattttaacatcggcacctcaaagaaagcctatagctattatgcactttagaatttctaggaatagatgtctagactcagggtgccctggaggatacctcagaacagtcgggccacaaccactggtgccagctgatgtcacaggggaagtgggagaataatgggtagagttttgttgataaaacgaaaagttccagaataaaatgcaacagtccagattctaactgccacttagtaacagtgaaattgtggtacaattttatttataattgtattataaatttgttcatcaaacatgtttatcaattgcctaaagtttagtaaaatcagcccaatatgtcaaaattcttaaattatcacaaattttaaaacaaagacataaattttagggaggttttattgtatttataatttttataagctagattactttttaatattgggaaatatattaatttgtaaaaaaatctgatcaaaaaacgaaccatttgcagaaaattcagagaaaacacaagaaaaaatttttaaacattttacatatttcagcctttttctactattcactgcttctaaaaattgagattatacttttataatctgtttgtgtctaatttgttataaatatattcccaactcatgatgtcactgttctcctacagtgtcatgtataacagatgtacaacgtggacgtaagttctttaactctgctggagaacacctggattatttctgatattgcacgccataactaagaatatgaaacgcatccttgtatataagtcttagacctctgatcatttccttagtatgttaggaagctgctgagtcacggcataggcacatattggtagtttttctccaaaagcattgcatcaagaacagacccacttgtaactcatgaatattcagctctcttcaacaataccaggtaattttatttgaaaataaatttggcttactcattcagcaagcacctttatgttagacattggagtagtcactgagctatgaacaagacagatgagatccctgccctccagcagacaacagtctcttggacacgagtgtaggacagagaaggtaagagtgctggggaattttcagcagggaaagccaacctagtttagggctctaagacaaaccctgaggagagggtactcaaggcaaggcctgaagacaggcaggtgtggccagaggaaggcatgagcaacacggaggaaatcttttaaaggtctgcaargtatcttttttcaaattattaggtgctcaaaacatctgctctattaagtagtttaatctaacttgcaattgtatttataaatttgttcatcaagtgtagaaatggggaaaaaaaactcaccttcagtatgtctagaacctattttaagggaagatgaagagatgagatactgctggaggagttggggccagatgaatgaaaggcctggcaaaccatgctaaaatgtctacgcttcacccaaagggaaacaagatgtcactaaggactcaagcaagtgcatttcagaaacactgctctgcgtatgttctggggatgggtggaggcagacaagactggagtcagatggtccatcgtgaaccaggtgctatggctgttcagcatccactctccctccctattctgggagaatcccaaggctagagggatgcagggccacttcctatcacagaagaaaaagaagggcagagagaccctcttctatccccccagaaataca

SEQ ID NO: 693711 - DNA, 1397 bp, Homo sapiens
cagacaaacgtcctgtcttcccccttggtgttgaattgcgtgttgatctgcttgtgtttgaagagcatttctggagccagtgccctggcctcaccactggatattctatcttgggcagctgttgcctctttaaacaccagtttcctcacttctaaaatagggtaaaatgataatacctactttgttatgccactggaaagattaaaggagagaatrtatgtgtcatttacataagataaatactcagtagacacccactcattcacttagtaaatgtttattgcaggtcatcatgtgccgagcgctggaagtactctgaaaaacgtgtccttactcatgtgacactttccttttaattgggacgaaagccaggaaacatgtgagtcttttaatgatgagatgtgaaaaaaaaaaataaagcctcatatctggaaaggtggcactggcaatagcagcatagttttagcattttccccacatcctacacaaaattagagtaattagatttttttttttaatggaaggaggcttcgaatattgaagaaggcacatctgggagcagagacccagggacagcctggcccgggcctgggcaccccaccagcactgaattcttaaagagaacttggaaaactctaaggtaggcacaccccaaagccagccttgcctgccgagatctgagggttgaacaggcctagaacctcctgacagcccagagagtgaggaagccatcaaagactcaggagccaactcgaagggaccccactggccgatgatgatgtgatttatgccccaaccaggatgaggactgcagttgattgaaacccatcatgtctgcttgaatcattcaaatcatggcattagaacaaaatgcacagagcacctggtggatacagaaaaagattcattatcttaaaaattagatacctcaagtgaatcatccagcactgatctgcagagaaccaactctgtggcctgtatcacagaataactgcatgtggctgcaaggaagagtctccttataaaactttttcgggccggacatggtggcttatgcctgtaatgctagcactttgggaggccaaggtaggtgagttgcttgagcccatgaggttgagaccagagtgggcaacatggcaaaaccctgtctctatcaaaaataaaaaaaattagggccgggcacggtggctcacgcctgtaatcccagcactctgaggctgaggtgggcagatcacgagatcaggagatcgagaccatcctggctaactcggtgaaatcccgtctctactggggaaaaaaaaaaaaaaaaaaaaaaaaaattagccgggcgtgttggcaggcgcctgtaatccagcctgggcaacaaagtgagactctgtctcaaaaacaaaaatgta

SEQ ID NO: 693712 - DNA, 1044 bp, Homo sapiens
gcctcgtgcagttctgggcactgagctcccctgaccacggctcccttgagactcaaaagacaggctgtgcagtgatgcagcactgtggtcaaagctccgcctcccgagtctgcgctgacctcccgtccgtgggtcccatcgtcactgctctgcccggctccacactgcagagtccctgggaggggcctctccaggcagatgccctaccgggagccttggcctgtccccgggagacactgtcaggccagtgttgcaagagcagagactgkggggtgaagtgtcgcctgtaaagaagtctcaaccaggaccccagcaattcttatacccataacctttgctgaggaggtgggcaattgccagcctaagcctctcccctgagcccagagcaggggtgatgcccgtgaggagcagatgtgaaggctgcgggtgtcaatgagctgcctccgggacgggcatcgtctgcggcctctgcgacctgtgctggctcctccgcgaccatccgcggagagtcttgccctcccctgcaggtgcctttctggccatttgtcagtgtggccatcagtgaccatctgcaatgcgagagttaaatcaccactgatggccacagtggccgttgcagaggcatttagactacacttacgggcttgttttaggaaatggttcattggaaaaatattttctgctcagctgaaagttttactgcagggaacacagcacatgaatttgaaacacaaattcagggtattcgtgtgtaaagtctgacctttccttgaaatgcatttcacagaacatcctgtaactggtcctcccagggagcgtcaagagcaggttctcagggagacactgctaatgttggggccattcctccatgccggctgcctatgcccatgaccgttgcctgaaaatttgctggaaaatttcctggaaaatttgctggaattctgcattgcagtgggtggaataatgtccccccaaattcacgcacacctggaacctgtgaatgggaccccagctggaaatactgcctttgccaatgtctctgaa

SEQ ID NO: 693713 - DNA, 1044 bp, Homo sapiens
gcctcgtgcagttctgggcactgagctcccctgaccacggctcccttgagactcaaaagacaggctgtgcagtgatgcagcactgtggtcaaagctccgcctcccgagtctgcgctgacctcccgtccgtgggtcccatcgtcactgctctgcccggctccacactgcagagtccctgggaggggcctctccaggcagatgccctaccgggagccttggcctgtccccgggagacactgtcaggccagtgttgcaagagcagagactgtggggtgaagtgtcgcctgtaaagaagtctcaaccaggaccccagcaattcttatacccataacctttgctgaggaggtgggcaattgccagcctaagcctctcccctgagcccagagcaggggtgatgcccgtgaggagcagatgtgaaggcygcgggtgtcaatgagctgcctccgggacgggcatcgtctgcggcctctgcgacctgtgctggctcctccgcgaccatccgcggagagtcttgccctcccctgcaggtgcctttctggccatttgtcagtgtggccatcagtgaccatctgcaatgcgagagttaaatcaccactgatggccacagtggccgttgcagaggcatttagactacacttacgggcttgttttaggaaatggttcattggaaaaatattttctgctcagctgaaagttttactgcagggaacacagcacatgaatttgaaacacaaattcagggtattcgtgtgtaaagtctgacctttccttgaaatgcatttcacagaacatcctgtaactggtcctcccagggagcgtcaagagcaggttctcagggagacactgctaatgttggggccattcctccatgccggctgcctatgcccatgaccgttgcctgaaaatttgctggaaaatttcctggaaaatttgctggaattctgcattgcagtgggtggaataatgtccccccaaattcacgcacacctggaacctgtgaatgggaccccagctggaaatactgcctttgccaatgtctctgaa

SEQ ID NO: 693714 - DNA, 1044 bp, Homo sapiens
gcctcgtgcagttctgggcactgagctcccctgaccacggctcccttgagactcaaaagacaggctgtgcagtgatgcagcactgtggtcaaagctccgcctcccgagtctgcgctgacctcccgtccgtgggtcccatcgtcactgctctgcccggctccacactgcagagtccctgggaggggcctctccaggcagatgccctaccgggagccttggcctgtccccgggagacactgtcaggccagtgttgcaagagcagagactgtggggtgaagtgtcgcctgtaaagaagtctcaaccaggaccccagcaattcttatacccataacctttgctgaggaggtgggcaattgccagcctaagcctctcccctgagcccagagcaggggtgatgcccgtgaggagcagatgtgaaggctgcgggtgtcaatgagctgcctccgggacgggcatcgtctgcggcctctgcgacctgtgctggctcctccgcgaccatccgcggagagtcttgccctcccctgcaggtgcctttctggccatttgtcagtgtggccatcagtgaccatctgcaatgcgagagttaaatcaccacygatggccacagtggccgttgcagaggcatttagactacacttacgggcttgttttaggaaatggttcattggaaaaatattttctgctcagctgaaagttttactgcagggaacacagcacatgaatttgaaacacaaattcagggtattcgtgtgtaaagtctgacctttccttgaaatgcatttcacagaacatcctgtaactggtcctcccagggagcgtcaagagcaggttctcagggagacactgctaatgttggggccattcctccatgccggctgcctatgcccatgaccgttgcctgaaaatttgctggaaaatttcctggaaaatttgctggaattctgcattgcagtgggtggaataatgtccccccaaattcacgcacacctggaacctgtgaatgggaccccagctggaaatactgcctttgccaatgtctctgaa

SEQ ID NO: 693715 - DNA, 673 bp, Homo sapiens
ccccacaaccaggctcagaataccaagggccacctgctgtagctaacggaggggccttgcagggccaaggcttccccagccctggacccccttgcactggacacacggctgccgtgacccacagcagctcctagggctgctgcagatcaagtctcaaggacagaaaggttatgctggggagccgggaccccttctcctccccttctgctcaggcgttgcccccaacctctcaaggggcctccagggccatttagtgtggtggccgtgaagccacgtggctgcgttgtttaatgtggggtggagggttctgctcctgcgtggcagagcacttgggccagggycccgaaggttgggtgttgagttccttgctctgccatctgtaaataaacttggacagaattttcattgatctcatctgcgaaatgggcatgataaataacagcagcaccctctccacctccgtcaaaagacaaaaggggaactttgtaaactctcaatttgtggacagatgatggtcagcattccttcctcctccctttcttggcccagcctgttccacagaggagcacttccgccccataataatgcagtgaggggcacatgtccatgagaacatccagcagcagcccaggctgagctcagcggcagcgtcacacccaggcttcagcagttt

SEQ ID NO: 693716 - DNA, 630 bp, Homo sapiens
tacgatgcccctgagaagaccattttgttgtctatgataagaaatcattttggataaaaagtgactgcttcagatctacaagccacaaatcgaattagacgttttgcttttgggtctgaacctctgcaaataagacacgtcatctgaagacagaggggcgctggggtcatcagccatccagataggaataagccaggtttcctccaggggtgcccagcggagcaggtaccagtcaacagggctctgtgccgccagcgaggtcccagcacgcaagcggacacatttccgaacggagcttctcagaatcctgtttgggttactttactctatttttgcttctaagtgattagataaacagatggaccccccccccccatgcccagagcatttccagagaggatcagcttcatmtttccaatcaattaaaaaaaaaaaaaaaaaagacgaaggctgctgtcgtggaaagattactagctgtgttttaagaaaagatagctccggctgggggcggagctcacacttgtaatgtcagcactttgggaggccgaggcgggcggatcacgaggtcaggagatcaagaccatcctggctaacacggtgaaaccccgtctctactaaaaatagaaaaaa

SEQ ID NO: 693717 - DNA, 630 bp, Homo sapiens
tacgatgcccctgagaagaccattttgttgtctatgataagaaatcattttggataaaaagtgactgcttcagatctacaagccacaaatcgaattagacgttttgcttttgggtctgaacctctgcaaataagacacgtcatctgaagacagaggggcgctggggtcatcagccatccagataggaataagccaggtttcctccaggggtgcccagcggagcaggtaccagtcaacagggctctgtgccgccagcgaggtcccagcacgcaagcggacacatttccgaacggagcttctcagaatcctgtttgggttactttactctatttttgcttctaagtgattagataaacagatggaccccccccccccatgcccagagcatttccagagaggatcagcttcatatttccaatcaattaaaaaaaaaaaaaaaaaagacgaaggctgctgtcgtggaaagattactagctgtgttttaagaaaagatagctccggctgggggcggagctcacacttgtaatgtcagcactttgggaggccgaggcgggcggatcacgaggtcaggagatcragaccatcctggctaacacggtgaaaccccgtctctactaaaaatagaaaaaa

SEQ ID NO: 693718 - DNA, 1164 bp, Homo sapiens
tgctgctgttgcwaccaccacaacaaacaaataagtgaaaaaaaaaaaaaaaaaagaattgtccataccggaaagtgtgctgttttggaggaggctggggcaagtgtggatggctcgagtgggtcctgttggattgaagtctgacagtggtgattcccttcaacaaatggtcggggtgggagggtacacagacacacacacacacacacacacaccccacacgcagcgcccggcctccgatttcagcgctggcaggagataaccattcttagctcgcctttccagggttgtttttggctgaggctgttcgctgatggcaaaaggtttcagccccctcgcaaatccctcccagtccttgttctaaagagaaactggtgcgtgtaggctgcgcactcccagggagacaggggacgggcctggcgccggagaggagcccgcactctgcccgaagtctcgccgcccgccggctgttttctggcggagggtgcgccccggagggcggcgagcgcgggtggaggctgcggccaggcgcgggtggaggcgtcgccggggtcgggctagcaggctctgggatcgggcttgtgggacaccccgaaagtgagtccaacttggggagaaactgagggcagctcgggcggtctggcagcggagaaggtgggcgggagaaaacttggcagcgaggcagaagcgatccctgccgagggagtcagcgagcggccgcgcggagaggaggggcgggcggtccccaggcgggcgggtgcagggcgcggggcgccgacctgctggagaggggcccgggcgcgaggcggagtcccggcgcgcagccaggctggcggaggcccccggccggctgcagattccctccggccccgggagccgcagcaggaccggccgggaggcgccgcggaggggagtcgcatcccggtgcggacagtgcccaccgcgccctgcgaggaccggcgacccaccggcctcttccagggccagcgcagctacccgcccaacttcatccggagcgcgctgtcgtccgtcgacctgcgcgaccgtcagggccgcaccacgggggtgggcagcgacggcaggtacttcggcaggacggccgtcgaggtcggggggccgatggccgcggccaacggggcgagtgtccggatgcccctcgcttcc

SEQ ID NO: 693719 - DNA, 1164 bp, Homo sapiens
tgctgctgttgcaaccaccacaacaaacaaataagtgaaaaaaaaaaaaaaaaaagaattgtccataccggaaagtgtgctgttttggaggaggctggggcaagtgtggatggctcgagtgggtcctgttggattgaagtctgacagtggtgattcccttcaacaaatggtcggggtgggagggtacacasacacacacacacacacacacacaccccacacgcagcgcccggcctccgatttcagcgctggcaggagataaccattcttagctcgcctttccagggttgtttttggctgaggctgttcgctgatggcaaaaggtttcagccccctcgcaaatccctcccagtccttgttctaaagagaaactggtgcgtgtaggctgcgcactcccagggagacaggggacgggcctggcgccggagaggagcccgcactctgcccgaagtctcgccgcccgccggctgttttctggcggagggtgcgccccggagggcggcgagcgcgggtggaggctgcggccaggcgcgggtggaggcgtcgccggggtcgggctagcaggctctgggatcgggcttgtgggacaccccgaaagtgagtccaacttggggagaaactgagggcagctcgggcggtctggcagcggagaaggtgggcgggagaaaacttggcagcgaggcagaagcgatccctgccgagggagtcagcgagcggccgcgcggagaggaggggcgggcggtccccaggcgggcgggtgcagggcgcggggcgccgacctgctggagaggggcccgggcgcgaggcggagtcccggcgcgcagccaggctggcggaggcccccggccggctgcagattccctccggccccgggagccgcagcaggaccggccgggaggcgccgcggaggggagtcgcatcccggtgcggacagtgcccaccgcgccctgcgaggaccggcgacccaccggcctcttccagggccagcgcagctacccgcccaacttcatccggagcgcgctgtcgtccgtcgacctgcgcgaccgtcagggccgcaccacgggggtgggcagcgacggcaggtacttcggcaggacggccgtcgaggtcggggggccgatggccgcggccaacggggcgagtgtccggatgcccctcgcttcc

SEQ ID NO: 693720 - DNA, 1164 bp, Homo sapiens
tgctgctgttgcaaccaccacaacaaacaaataagtgaaaaaaaaaaaaaaaaaagaattgtccataccggaaagtgtgctgttttggaggaggctggggcaagtgtggatggctcgagtgggtcctgttggattgaagtctgacagtggtgattcccttcaacaaatggtcggggtgggagggtacacagacacacacacacacacacacacacmccacacgcagcgcccggcctccgatttcagcgctggcaggagataaccattcttagctcgcctttccagggttgtttttggctgaggctgttcgctgatggcaaaaggtttcagccccctcgcaaatccctcccagtccttgttctaaagagaaactggtgcgtgtaggctgcgcactcccagggagacaggggacgggcctggcgccggagaggagcccgcactctgcccgaagtctcgccgcccgccggctgttttctggcggagggtgcgccccggagggcggcgagcgcgggtggaggctgcggccaggcgcgggtggaggcgtcgccggggtcgggctagcaggctctgggatcgggcttgtgggacaccccgaaagtgagtccaacttggggagaaactgagggcagctcgggcggtctggcagcggagaaggtgggcgggagaaaacttggcagcgaggcagaagcgatccctgccgagggagtcagcgagcggccgcgcggagaggaggggcgggcggtccccaggcgggcgggtgcagggcgcggggcgccgacctgctggagaggggcccgggcgcgaggcggagtcccggcgcgcagccaggctggcggaggcccccggccggctgcagattccctccggccccgggagccgcagcaggaccggccgggaggcgccgcggaggggagtcgcatcccggtgcggacagtgcccaccgcgccctgcgaggaccggcgacccaccggcctcttccagggccagcgcagctacccgcccaacttcatccggagcgcgctgtcgtccgtcgacctgcgcgaccgtcagggccgcaccacgggggtgggcagcgacggcaggtacttcggcaggacggccgtcgaggtcggggggccgatggccgcggccaacggggcgagtgtccggatgcccctcgcttcc

SEQ ID NO: 693721 - DNA, 1164 bp, Homo sapiens
tgctgctgttgcaaccaccacaacaaacaaataagtgaaaaaaaaaaaaaaaaaagaattgtccataccggaaagtgtgctgttttggaggaggctggggcaagtgtggatggctcgagtgggtcctgttggattgaagtctgacagtggtgattcccttcaacaaatggtcggggtgggagggtacacagacacacacacacacacacacacaccccacacgcagcgcccggcctccgatttcagcgctggcaggagataaccattcytagctcgcctttccagggttgtttttggctgaggctgttcgctgatggcaaaaggtttcagccccctcgcaaatccctcccagtccttgttctaaagagaaactggtgcgtgtaggctgcgcactcccagggagacaggggacgggcctggcgccggagaggagcccgcactctgcccgaagtctcgccgcccgccggctgttttctggcggagggtgcgccccggagggcggcgagcgcgggtggaggctgcggccaggcgcgggtggaggcgtcgccggggtcgggctagcaggctctgggatcgggcttgtgggacaccccgaaagtgagtccaacttggggagaaactgagggcagctcgggcggtctggcagcggagaaggtgggcgggagaaaacttggcagcgaggcagaagcgatccctgccgagggagtcagcgagcggccgcgcggagaggaggggcgggcggtccccaggcgggcgggtgcagggcgcggggcgccgacctgctggagaggggcccgggcgcgaggcggagtcccggcgcgcagccaggctggcggaggcccccggccggctgcagattccctccggccccgggagccgcagcaggaccggccgggaggcgccgcggaggggagtcgcatcccggtgcggacagtgcccaccgcgccctgcgaggaccggcgacccaccggcctcttccagggccagcgcagctacccgcccaacttcatccggagcgcgctgtcgtccgtcgacctgcgcgaccgtcagggccgcaccacgggggtgggcagcgacggcaggtacttcggcaggacggccgtcgaggtcggggggccgatggccgcggccaacggggcgagtgtccggatgcccctcgcttcc

SEQ ID NO: 693722 - DNA, 1164 bp, Homo sapiens
tgctgctgttgcaaccaccacaacaaacaaataagtgaaaaaaaaaaaaaaaaaagaattgtccataccggaaagtgtgctgttttggaggaggctggggcaagtgtggatggctcgagtgggtcctgttggattgaagtctgacagtggtgattcccttcaacaaatggtcggggtgggagggtacacagacacacacacacacacacacacaccccacacgcagcgcccggcctccgatttcagcgctggcaggagataaccattcttagctcgcctttccagggttgtttttggctgaggctgttcgctgatggcaaaaggtttcagccccctcgcaaatccctcccmgtccttgttctaaagagaaactggtgcgtgtaggctgcgcactcccagggagacaggggacgggcctggcgccggagaggagcccgcactctgcccgaagtctcgccgcccgccggctgttttctggcggagggtgcgccccggagggcggcgagcgcgggtggaggctgcggccaggcgcgggtggaggcgtcgccggggtcgggctagcaggctctgggatcgggcttgtgggacaccccgaaagtgagtccaacttggggagaaactgagggcagctcgggcggtctggcagcggagaaggtgggcgggagaaaacttggcagcgaggcagaagcgatccctgccgagggagtcagcgagcggccgcgcggagaggaggggcgggcggtccccaggcgggcgggtgcagggcgcggggcgccgacctgctggagaggggcccgggcgcgaggcggagtcccggcgcgcagccaggctggcggaggcccccggccggctgcagattccctccggccccgggagccgcagcaggaccggccgggaggcgccgcggaggggagtcgcatcccggtgcggacagtgcccaccgcgccctgcgaggaccggcgacccaccggcctcttccagggccagcgcagctacccgcccaacttcatccggagcgcgctgtcgtccgtcgacctgcgcgaccgtcagggccgcaccacgggggtgggcagcgacggcaggtacttcggcaggacggccgtcgaggtcggggggccgatggccgcggccaacggggcgagtgtccggatgcccctcgcttcc

SEQ ID NO: 693723 - DNA, 639 bp, Homo sapiens
actgtatgcatttgtcaaaactcacagaactacactctaaaacatataaattttactgcatgtaaatcttaccttaattaaaaattaaaaaaattgaagatgtggatttaggtaagattcacgaagggataaagatagagttgagttacaagagaattgttatctccatcttgcatgggagaaaaatgaagctcagagaagtgwagtggcttcccaagatcacacagctactaagtagcacagctggggctcaaaaccagagccatgtgatcagatggcccatattctttttgttccctcccatcaaccaagcccaggcccatggctgagcatgatggccaagcagggaggagggtcagctcctcttcaaggaagaaaacagcatgctgttctttatatatgtaaatgatgttctgttcctcacccatcaccaatcacacaggtacttaggttgcaaggtgtggggactgccatggtgatgatggctctccccaccagtcctcaatgggaatatcagcaagacgccagtccacagtaagggattctgtctgggccctccagacacccagagggccacgatgagatccactccagaggagtaattgtaccctgccccaaactaccagggatcttgacact

SEQ ID NO: 693724 - DNA, 639 bp, Homo sapiens
actgtatgcatttgtcaaaactcacagaactacactctaaaacatataaattttactgcatgtaaatcttaccttaattaaaaattaaaaaaattgaagatgtggatttaggtaagattcacgaagggataaagatagagttgagttacaagagaattgttatctccatcttgcatgggagaaaaatgaagctcagagaagtgaagtggcttcccaagatcacacagctactaagtagcacagctggggctcaaaaccagagccatgtgatcagayggcccatattctttttgttccctcccatcaaccaagcccaggcccatggctgagcatgatggccaagcagggaggagggtcagctcctcttcaaggaagaaaacagcatgctgttctttatatatgtaaatgatgttctgttcctcacccatcaccaatcacacaggtacttaggttgcaaggtgtggggactgccatggtgatgatggctctccccaccagtcctcaatgggaatatcagcaagacgccagtccacagtaagggattctgtctgggccctccagacacccagagggccacgatgagatccactccagaggagtaattgtaccctgccccaaactaccagggatcttgacact

SEQ ID NO: 693725 - DNA, 639 bp, Homo sapiens
actgtatgcatttgtcaaaactcacagaactacactctaaaacatataaattttactgcatgtaaatcttaccttaattaaaaattaaaaaaattgaagatgtggatttaggtaagattcacgaagggataaagatagagttgagttacaagagaattgttatctccatcttgcatgggagaaaaatgaagctcagagaagtgaagtggcttcccaagatcacacagctactaagtagcacagctggggctcaaaaccagagccatgtgatcagatggcccatattctttttgttccctcccatcaaccaagcccaggcccatggctgagcatgatggccaagcagggaggagggtcagctcctcttcaaggaagaaaacagcatgctgttctttatatatgtaaatgatgttctgttcctcacccatcaccaatcacacaggtactwaggttgcaaggtgtggggactgccatggtgatgatggctctccccaccagtcctcaatgggaatatcagcaagacgccagtccacagtaagggattctgtctgggccctccagacacccagagggccacgatgagatccactccagaggagtaattgtaccctgccccaaactaccagggatcttgacact

SEQ ID NO: 693726 - DNA, 639 bp, Homo sapiens
actgtatgcatttgtcaaaactcacagaactacactctaaaacatataaattttactgcatgtaaatcttaccttaattaaaaattaaaaaaattgaagatgtggatttaggtaagattcacgaagggataaagatagagttgagttacaagagaattgttatctccatcttgcatgggagaaaaatgaagctcagagaagtgaagtggcttcccaagatcacacagctactaagtagcacagctggggctcaaaaccagagccatgtgatcagatggcccatattctttttgttccctcccatcaaccaagcccaggcccatggctgagcatgatggccaagcagggaggagggtcagctcctcttcaaggaagaaaacagcatgctgttctttatatatgtaaatgatgttctgttcctcacccatcaccaatcacacaggtacttaggttgcaaggtgtggggactgccatggtgatgatggctctccccaccagtcctcaatgggaataycagcaagacgccagtccacagtaagggattctgtctgggccctccagacacccagagggccacgatgagatccactccagaggagtaattgtaccctgccccaaactaccagggatcttgacact

SEQ ID NO: 693727 - DNA, 639 bp, Homo sapiens
actgtatgcatttgtcaaaactcacagaactacactctaaaacatataaattttactgcatgtaaatcttaccttaattaaaaattaaaaaaattgaagatgtggatttaggtaagattcacgaagggataaagatagagttgagttacaagagaattgttatctccatcttgcatgggagaaaaatgaagctcagagaagtgaagtggcttcccaagatcacacagctactaagtagcacagctggggctcaaaaccagagccatgtgatcagatggcccatattctttttgttccctcccatcaaccaagcccaggcccatggctgagcatgatggccaagcagggaggagggtcagctcctcttcaaggaagaaaacagcatgctgttctttatatatgtaaatgatgttctgttcctcacccatcaccaatcacacaggtacttaggttgcaaggtgtggggactgccatggtgatgatggctctccccaccagtcctcaatgggaatatcagcaagacgccagtccacartaagggattctgtctgggccctccagacacccagagggccacgatgagatccactccagaggagtaattgtaccctgccccaaactaccagggatcttgacact

SEQ ID NO: 693728 - DNA, 588 bp, Homo sapiens
tgagtagcatatataccaattagacaggcttatagaagtctttgaaggaatggattttcctttccccaattaacttcctcccagtatccaatagaaccagcttactgatattccaaaatgatcctaaatgaaattgcaagggtcccttgacatattttaggatgataatataatcatatatgatttaatcaagttcatttcaagtttattgctaagggatatgaggactggccgtgctccccacatacattctaaagatgtcttggttttggtttgaggaaaaggaaagcaaaatgcaaagactgcctgagatgtcatctctgggaaagtaaaaataaaaacrtgccttaatttggattcctctctttcaacatcctatttgggatcatcatttttcaccaccaagaggttctgtaagtgaaaagcaacagtacttgtttaaatgaggcccagaagcattttccctttgaatgattctaggttgtgttgctaaaactgttaaatctgcagagcttcagaataaggacagttgtaagaacactgctctgcaagagaacatggggacttgtatccccatgcttccttatt

SEQ ID NO: 693729 - DNA, 1839 bp, Homo sapiens
tattgttcaagtacaatgaacagtttgagtgatttattttaaaaagaagtatataaacatgttaccactatatttttacctttttcaggacatctcatgaaactataagagattgtgggaggaaaggtttttctggttaggaatttttggctttcttttttataagatacaattcttcatcttgacagtgctttacatccaaggtgtttggagaaggtaaatcgaatgtggagctgraaggaggaacatttgtaactaagaaagtccataatgacctagcacatcttcccttttgctgacaatgttttaaatcttcccgaagtaacagctatgttccttttgatatgctaagtatgttattaattgtttttagcagaaaaaggggcacattttggactccttgggacatgagcattttcttctggttttgtaaccttacaattaaggaagccctttggccatcgacaagaaatctatgaactaggggctgaggggccaaaagcccagttatttgaagccaggagggtggctgtggccctgtggccctctgcctaagtaacggttccctttcttggggctggtaaagtcagacggttagatataaagaaggcacttcatcctgtctcccagctttcagattaagggatgtcattatctatgtttttttttttttttgaaaaatcattttttaaaactcattgcctgtcaatatttaaacaatggaaatactttaggaaatttctctttttggggttttaaatatgctgcaatggaatgccctaccttaatgaattaatatgtaatgtcttccctgttcccaagtgttcaaaagttgtctggtttttttttttttccaaccctcaggagctgtttcacaaacatggtaccaaatgcttgagattgtggttatcagccaagatacacattctctgggtgtaggcaaactagtcagctgtgctagttgtcctgatgaaccttaaatgcatgttacctggtagaataactctcattttgtttactaattaagtgacagaatagtgacagaaagtttaaaagtttaaatagtgacagaaagtttatagcatacccaaccttgggttttaaattgcaccaaattcttatgtcgttcttgtgtatgtaagtctggaggctctaataactgtggctaaatgggaccaattatttataccttttagatgatttttgaattcaggaaattgcattttgtattgcattaggttaatagattcatgaaagcagagaagaatcagtccatgagacagagaagtcctcatagaaaatcagtgttgccctgaaacgggctcagtatgggcaaaatagaagctaggataattggatccaaatccatttttagtgactatccatatactgagaggacatttcaaggacaaaaacaatgtatactcttgacattgaagactttctgtctgcaaaattatgtagattcaatttctttagcctttggcctttcaagtcgaaaaccaggtttggggtgtggagggggatcaggtcacttgccatattacacagccatcgattcccttcaccagctgctgctcagtgggccgcacaagcccgccagtcttttctcagggcagggatggaaaatgagagggtaggatgagaggaaagtaatccaactggattggcttcttaaaatacagaagatttgagtgagagtgaaactgaacattttgtgcttttgatgaccaccaaatgactacctactacttcaccacagctggagaaactaaaaacacatgctcttttgctgccgggtcagaaatgctttttttcccatatgaaagaggggctgtg

SEQ ID NO: 693730 - DNA, 1446 bp, Homo sapiens
aggagacagacattcaaaccataacgcagctccatgacagaattttcacatgctccagaatgtgaatgacagctactcattttaagggaaaacagcttagtttagtgtaaaaaacatggatattggagtctggagcttggacgctagctgtgtgactttggacatgccacatgtcatctttgagcttctgctttttcaaatacaaggatgttgtaaggccaaaatatgatcaggttgtaaagggtttgccacatactgagtgctcacatcaaaacatattagttccatttccttgaccttactccctttctcctttgataatgcttcattcaagggtagatcgaagacctcaggaccaaggaggaaatgaaatgttaagaagatttgactgtaacaaaagggttagtgttaacacatccattctgtacctatacaatagaagtgcaatagtaatcttagaagctgtgaaagagcactgctgcttcctctctctgggcctctgaattaatcaatgatgtaatatatataacacatataatatatatactatattatatatttattatatatactatattatatatttattatatataaatatatatttatcacataataaatatatatactatataatatatttattatatataataaatctataataaatatacatactatataatatatttattatataataaatatatatttaattaaatatataattaaatatataacatatttatcatatataataaaatatattatatatatttgtatatgtatagattagtgtataagtatatatatttgtatatattatatatatatttgtactaatatacatacacaaatacatattagtataggacctagttactgcctctaaggcttcatgtctttctgatggtcatataatggaatgaatgggacttgagttggatgatgagattccatagatagaaaggaaagagggagcattccaactagaaggaatggtgtgaggagaggtacaaatgtgattttggtcaggagccaataagtaaactagtctttccagagaacctttcttggggaaggtgccttgtagtgcccacaaatgcaggaagcaagaattaggacaaggtcaccgatggtcagttcagaaggcttattgagtaagcacaacacagcagaggtactgtttgggraataaaaagctggtggctatgagggtggacttggttatggcaaagttagtcaggaaactattttaacagtctggggccagatcatggagggcctcataggccccaattgctccttcatctacatttgcttcagcttttacatctttctagaccagtcctgttgttttacagctgtcttccatttcagtcttagattctgtcttctatttgcaagtggcaattctaaaatcccatttgatttccatagcatcta

SEQ ID NO: 693731 - DNA, 871 bp, Homo sapiens
ccagaggacatcccacatatgaaccatattccataaaatcctggagttcaacaatgaaaaaaatataaggaaaagatcacattcgtataagccagtattgtcaaaaacttcaatagaaaagttggtcataacaggttgcacagagatgtgtcagaggaaatggatttactcctccacctgccttagcactcttctttatttcctacctctcagataaggctatttggaactctcaagccctccctgtatatatctgtctcttacaaatgcattaattttgcgtgattttgaattttacaggcatggatcctattgcaggtattcttcagtaatttggcatttttgctcaatactatgtaagattcacctccactagggcacataactgtattttactatgattgccatttagtattctcttataaactataaacatgtcaaataaattacttatctgtcctattttcctgttaatggataattgaattgtttccacttaatggtttttgtgctcacaccatgctgcctacgaacattcttttagatttgagataccatgttttacatatgagattagcaaaaatgaaaacaccatgaataggcaaaaagatgagtcaatagatactctcacacctaatagtaggaatataagtatattgggatgctgttatggaaagtaatttggcagtactatcaaaatattgaatgcatataccttcctgtaacttcacatctctatctagacaaaraagcatgtgcgaagattttcaaaacagtgttgtttgccttagtgaaaaactaggaaaaaaaacctcagtttccattaataataaggtaatagtgttatcaattattgcaaaatttcaacatc

SEQ ID NO: 693732 - DNA, 675 bp, Homo sapiens
tgtgccaggcactgttctacacactgggaatacaacagactgctgacgaggatcctgatctcagggagcttctgtttggggtcggggaggagacagacaacaaacaaacatataacaatcaacggtaagaactaaaatcagtgacaagtgaagacaaagcagaatgaaggtaggagtgatgagggagtgctggtttagctaggaaagttaagggagaggtcgcccttgagaagaaatattcaagagtagaacaaaccatatgggtaccagtgggaagacattttgggcagggagaaaagcagaagggtcctgagcaggagggtcttaggcatgttaagagaacagcaaagaggccagtgtcattagaatgaaatacaraaagaaaaggatggcaggagatgagactagagagacagccaggttcctgatcatgcagggtcacaggattttattcagagactgaaggggagcaactgtaaggtataagcacaggaatgacaaaatcagacttgcattttaaatgattcactctggcaatgacctctaatgaattagtttcctgaatttaatcattctaatagtaatagagaaacatttaagagtctggggaatagacacaatacattgtgatggcagaatgcagcatttctcactgcctagaagaggttgaacact

SEQ ID NO: 693733 - DNA, 1799 bp, Homo sapiens
gcagtgagccgagatcgcaccagtgtactctggcctgggcaacaagagcgaaactttgtctcaaaaaagaaaataaaatagaaccaacatgcatgcaacgtgagagaaactgttcagttcactgtggcatgtttccacaacaaaatggcatatggtcattgaaaacagttttgacatgggaaaaggttcccgtctatcctgggggtggagggagcacagggaggcagaaccgaagaaaaagtcaagttccaagtggactgaacgatgcccagcatttttgggctttcaactgatgggaattacatctaatcactaacggtgactgcctctcatggagaatatgataaatttctgtttttctattactttatcctttacgatactttccacatctcctatgatgaatatgtttacagttgaaaaagagaagrgtataagagtctgattccaagattctatcatttttgaagagctataattatgagcctcctctaaataaccccagaggttcagagaccctggcagccctcagtgacgtgaatggggtgctaggcgcagattctcagtgacagagagctctcaggacaaaaggcaggattcagcccctgtgtcgggcaccctcctagccctcggttgccctcgggactgctgagccctgtgtgctgggctgccctgtgccctgctgacctagctcctccccattccgcagacccctgggtctcttctatagcagccagggggacagaagtgggctggggtgggccaggcatcaggatcccaactgctacgatggcttcagtcctgagcagccccttcctctctctgaggcccagggtgcccatgaacactgagccagaaggagaaggtccccacaggactcttctctcggacactgaggcccgcagctggggcagaaatggctctcacaggtctgactcccaagccctgggcaggatgcactagcgagttggggtacaatttcccagtttgttttaagcagaaactcaacccatttgacgcatcacactggaaattagaactcacagcaattcctgtctttgaagctcccgtgagtgcccctccctacccctccctgcaagtcttatgcaaaccaaccagccacaggttccatcgggcttttgtggtgtgatcaccgctaattttccacgttccctttcgttttatttttcctgctctaatttattaattagcttctctgcttgcaacaccatctctgcttgcagccccagagtggatctttcaacgctgtgaactcctctaaatgttttctctgctaatgtgtctcagtgggggactggagagggagcttcctgctaaaatggagattccccaggggaggccccagccctccttcctgagacctgcagcttccaggtgtgtgggtgagcagaattttgaagaatgcattggactttgtcagacccaaatgcacccattagtatcacaagcaagcatggcttataaaataatacctaacatcttatggatttttaggcactaaatactattttaagcattaattaatcctcaaaacaactctatgtaaaggcatgatcatgcccatccaacagctgtgccaactgaggcacagaacagtgaagcaacttgcccaagcccaccccgccaggagaggtgaagccaggctcggccctgaaaggcagctcagcgtgcccttggcctgaaccaccaccccaccgggctcttcctaaggagcctctcccggctcagagcagacccccagtggggtgtggcccaccgtgattcctctggccctgaga

SEQ ID NO: 693734 - DNA, 888 bp, Homo sapiens
ttttttttttagacggagttttattcttgttgcccaggctggagtgcagtggcacgatctcggctcactgcagcctccgcctcctggttctgggctccttccagcgaytctcctgcctcagcctcccaaatagctgggctttcaggcacccaccaccatgtccggctaatttttggatttttagtagagatggggtttcaccatgttggccaagctggtctcgaactcctgacctcaggtgatccgcccgcctccgcctcccaaagtgctgggattacaggcatgagccaccacacccggccatattttcatgtcatttttcttaccatgtcacagatgctttatgctagaagagaacaaagctaatattttatatggtttagatgcttgttaagggagaatgggagcatgacatgaagaaagtacgtagaagtaaaaataaaaaataaaagagaaaaaaaggaaggtgaaattcacagaaaagctgacatagggcagtgacaggacagcttcttggagttactgccaagagctgagacacaggggtgagaaagagctgcagcttcaggtaaaagcaggtaaccaaggcagttcttaagggcgcctccaacgttcacactgggatgttcagcttcacagataccctcagaggagatccagggtgggcactgagcacccagattcagcctcagggctgcgggtaggggaggtctctctggtcgtgggagcggctatgcagcctaagaacggttaaacagatacacccgtgtgataaacggcagagtcagacacacacgcgcatcccctcactagcttcctcgtgcccctttcctgggagagggtgcttgggacccctgtgctatccttacaactctccatgaatcatga

SEQ ID NO: 693735 - DNA, 888 bp, Homo sapiens
ttttttttttagacggagttttattcttgttgcccaggctggagtgcagtggcacgatctcggctcactgcagcctccgcctcctggttctgggctccttccagcgattctcctgcctcagcctcccraatagctgggctttcaggcacccaccaccatgtccggctaatttttggatttttagtagagatggggtttcaccatgttggccaagctggtctcgaactcctgacctcaggtgatccgcccgcctccgcctcccaaagtgctgggattacaggcatgagccaccacacccggccatattttcatgtcatttttcttaccatgtcacagatgctttatgctagaagagaacaaagctaatattttatatggtttagatgcttgttaagggagaatgggagcatgacatgaagaaagtacgtagaagtaaaaataaaaaataaaagagaaaaaaaggaaggtgaaattcacagaaaagctgacatagggcagtgacaggacagcttcttggagttactgccaagagctgagacacaggggtgagaaagagctgcagcttcaggtaaaagcaggtaaccaaggcagttcttaagggcgcctccaacgttcacactgggatgttcagcttcacagataccctcagaggagatccagggtgggcactgagcacccagattcagcctcagggctgcgggtaggggaggtctctctggtcgtgggagcggctatgcagcctaagaacggttaaacagatacacccgtgtgataaacggcagagtcagacacacacgcgcatcccctcactagcttcctcgtgcccctttcctgggagagggtgcttgggacccctgtgctatccttacaactctccatgaatcatga

SEQ ID NO: 693736 - DNA, 888 bp, Homo sapiens
ttttttttttagacggagttttattcttgttgcccaggctggagtgcagtggcacgatctcggctcactgcagcctccgcctcctggttctgggctccttccagcgattctcctgcctcagcctcccaaatagctgggctttcaggcacccaccaccatgtccggctaatttttggatttttagtagagatggggtttcaccatgttggccaagctggtctcgaactcctgacctcaggtgatccgccygcctccgcctcccaaagtgctgggattacaggcatgagccaccacacccggccatattttcatgtcatttttcttaccatgtcacagatgctttatgctagaagagaacaaagctaatattttatatggtttagatgcttgttaagggagaatgggagcatgacatgaagaaagtacgtagaagtaaaaataaaaaataaaagagaaaaaaaggaaggtgaaattcacagaaaagctgacatagggcagtgacaggacagcttcttggagttactgccaagagctgagacacaggggtgagaaagagctgcagcttcaggtaaaagcaggtaaccaaggcagttcttaagggcgcctccaacgttcacactgggatgttcagcttcacagataccctcagaggagatccagggtgggcactgagcacccagattcagcctcagggctgcgggtaggggaggtctctctggtcgtgggagcggctatgcagcctaagaacggttaaacagatacacccgtgtgataaacggcagagtcagacacacacgcgcatcccctcactagcttcctcgtgcccctttcctgggagagggtgcttgggacccctgtgctatccttacaactctccatgaatcatga

SEQ ID NO: 693737 - DNA, 888 bp, Homo sapiens
ttttttttttagacggagttttattcttgttgcccaggctggagtgcagtggcacgatctcggctcactgcagcctccgcctcctggttctgggctccttccagcgattctcctgcctcagcctcccaaatagctgggctttcaggcacccaccaccatgtccggctaatttttggatttttagtagagatggggtttcaccatgttggccaagctggtctcgaactcctgacctcaggtgatccgcccgcctccgcctcccaaagygctgggattacaggcatgagccaccacacccggccatattttcatgtcatttttcttaccatgtcacagatgctttatgctagaagagaacaaagctaatattttatatggtttagatgcttgttaagggagaatgggagcatgacatgaagaaagtacgtagaagtaaaaataaaaaataaaagagaaaaaaaggaaggtgaaattcacagaaaagctgacatagggcagtgacaggacagcttcttggagttactgccaagagctgagacacaggggtgagaaagagctgcagcttcaggtaaaagcaggtaaccaaggcagttcttaagggcgcctccaacgttcacactgggatgttcagcttcacagataccctcagaggagatccagggtgggcactgagcacccagattcagcctcagggctgcgggtaggggaggtctctctggtcgtgggagcggctatgcagcctaagaacggttaaacagatacacccgtgtgataaacggcagagtcagacacacacgcgcatcccctcactagcttcctcgtgcccctttcctgggagagggtgcttgggacccctgtgctatccttacaactctccatgaatcatga

SEQ ID NO: 693738 - DNA, 888 bp, Homo sapiens
ttttttttttagacggagttttattcttgttgcccaggctggagtgcagtggcacgatctcggctcactgcagcctccgcctcctggttctgggctccttccagcgattctcctgcctcagcctcccaaatagctgggctttcaggcacccaccaccatgtccggctaatttttggatttttagtagagatggggtttcaccatgttggccaagctggtctcgaactcctgacctcaggtgatccgcccgcctccgcctcccaaagtgctgggattacaggcatgagccaccacacccggccatattttcatgtcatttttcttaccatgtcacagatgctttatgctagaagagaacaaagctaatattttatatggtttagatgcttgttaagggagaaygggagcatgacatgaagaaagtacgtagaagtaaaaataaaaaataaaagagaaaaaaaggaaggtgaaattcacagaaaagctgacatagggcagtgacaggacagcttcttggagttactgccaagagctgagacacaggggtgagaaagagctgcagcttcaggtaaaagcaggtaaccaaggcagttcttaagggcgcctccaacgttcacactgggatgttcagcttcacagataccctcagaggagatccagggtgggcactgagcacccagattcagcctcagggctgcgggtaggggaggtctctctggtcgtgggagcggctatgcagcctaagaacggttaaacagatacacccgtgtgataaacggcagagtcagacacacacgcgcatcccctcactagcttcctcgtgcccctttcctgggagagggtgcttgggacccctgtgctatccttacaactctccatgaatcatga

SEQ ID NO: 693739 - DNA, 888 bp, Homo sapiens
ttttttttttagacggagttttattcttgttgcccaggctggagtgcagtggcacgatctcggctcactgcagcctccgcctcctggttctgggctccttccagcgattctcctgcctcagcctcccaaatagctgggctttcaggcacccaccaccatgtccggctaatttttggatttttagtagagatggggtttcaccatgttggccaagctggtctcgaactcctgacctcaggtgatccgcccgcctccgcctcccaaagtgctgggattacaggcatgagccaccacacccggccatattttcatgtcatttttcttaccatgtcacagatgctttatgctagaagagaacaaagctaatattttatatggtttagatgcttgttaagggagaatgggagcatgacatgaagaaagtacgtagaagtaaaaataaaaaataaaagagaaaaaaaggaaggtgaaattcacagaaaagctgacatagggcagtgacaggacagcttcttggagttactgccaagagctgagacacaggggtgagaaagagctgcagcttcaggtaaaagcaggtaaccaaggcagttcttaagggcrcctccaacgttcacactgggatgttcagcttcacagataccctcagaggagatccagggtgggcactgagcacccagattcagcctcagggctgcgggtaggggaggtctctctggtcgtgggagcggctatgcagcctaagaacggttaaacagatacacccgtgtgataaacggcagagtcagacacacacgcgcatcccctcactagcttcctcgtgcccctttcctgggagagggtgcttgggacccctgtgctatccttacaactctccatgaatcatga

SEQ ID NO: 693740 - DNA, 636 bp, Homo sapiens
tgtgatgattttaaagtgtgttataggttaaatgctaagtatttttattaatttaggaagtactttggcatrtggcctttaaaattacattattatattatcgtaaatcttgactaaggcaacaaaacatgtttactgtggccaacttcacagatggggtgaaacggtgaaatattttatagcatgtataatgagctactagatgatgatgattttctcttcacatctgaaaaatgtgagttgggaaatgaattagaagctttaaaggtctacttaattgtgagaattaatttcaagaaatagtgtcatgtacccagtgagtacttaataattgaggaggagaaggacaaaagggaaattatgaagctttcaaacctaagtccattttggaaaaaggttagaataaaaatataatactaatgtaactatgaaaactgccttacaacatgatacaaaaagaaacaaaattagcaaatactagacatttcaagattaactattctcctaaattggagtccatgtattctaggtacactaattcttgaaaccagttcttattagacatggaatctcccctcataggacatgatgaaaatttataggagtatctttgtcttctaatgtaattttatgaga

SEQ ID NO: 693741 - DNA, 1644 bp, Homo sapiens
atgaaatacaagaagccaagaaacatgaaaaaaatttttctcacttgctaatgagatacaaattaaagtacatgctggtagctgcactccacatcaaattggcaaagattaaaaaaattatatttctgagagctcctaggggactttgccctgcattacctgggaggggtgtcagttcagttctgggttgaacaaggcccttgcacatggcatgttgggggaccagcctaaagttcttgtcacctcctcatgcgaagccagccagcactatcctggatggagccccccagcattgaggtggcccttggccacccctcctcagggcctccaggataacttgagtacccctcccggtggcttccccttcctctccctggggctgccaggggcacgttgctctgtgccatggactgaaaccagctcctggtgacagaatgacctgtttgttggaaatgccttgttgccagagaaaggaatcttggaacaaaactattttaattgtgaactggccatagaacacctgtttttttttaaatcaacttattaagttggagcactataatagctcttgctgatttagctacgatatgtttgttgaacacataatgctatgttttatgaggaaaagggatcgtaaggaagagtaatgttgcacctaacattaggtgggtaaaagtggccttgtgtttgtgtctgtttctacacagagcctttgggttttgttctcttcatcaggtaaatgtttgttgcataccctgctgcacagagaacctccctgcgtctgtttctctgctcctctgtggctgactcaataaacttttccttcttggaaaaaaaaattataatgtctgttagtgtcaaggattggataaaatgggtgcattcatacacttttgagtgttaattggtatagtctctacagagggctatgtggagagagaacatggtggtatttctcaagatccttaaaagtgtttctcttgactcatcaagactacgaacttattttaaggaagtagtcagagatggacataaagagttatgtgaaaggaatttcaccacagcttcccttggtaacaaaaaaacaacctggaaacaacaatcatcaatggtcagtaaaatcattaagtaaaatacaaaatggaaaamtttataacagaagaaatgagcagccaccacttgaacccacttatgttagtaccactaaaagtgggacagccaaacattatgtgcttgctgatgtggtatgaaagaaaatacacagtaccatctataaaatattcttacctaaagtcttaaaagtgaatctaattatgtctctggatttaactatcaatttacaagacatatgggagataagagaacaagctaattgaaaccatgaggatgcaatcagataaatccagaatgtggaacatttcatagaacagtggctaggcttttccatcatattgattgcatttaaaagagcgaatcagggacacttgagatacctaacaaaaaatgcagtttgtaggtattgttggatcctggtttgaaacattaactttatcccagtactttgggaggccgaggcgggtggatcacaaggtcaggagatcaagaccatcctgactaacatggtgaaaccctgtttctaataaa

SEQ ID NO: 693742 - DNA, 1644 bp, Homo sapiens
atgaaatacaagaagccaagaaacatgaaaaaaatttttctcacttgctaatgagatacaaattaaagtacatgctggtagctgcactccacatcaaattggcaaagattaaaaaaattatatttctgagagctcctaggggactttgccctgcattacctgggaggggtgtcagttcagttctgggttgaacaaggcccttgcacatggcatgttgggggaccagcctaaagttcttgtcacctcctcatgcgaagccagccagcactatcctggatggagccccccagcattgaggtggcccttggccacccctcctcagggcctccaggataacttgagtacccctcccggtggcttccccttcctctccctggggctgccaggggcacgttgctctgtgccatggactgaaaccagctcctggtgacagaatgacctgtttgttggaaatgccttgttgccagagaaaggaatcttggaacaaaactattttaattgtgaactggccatagaacacctgtttttttttaaatcaacttattaagttggagcactataatagctcttgctgatttagctacgatatgtttgttgaacacataatgctatgttttatgaggaaaagggatcgtaaggaagagtaatgttgcacctaacattaggtgggtaaaagtggccttgtgtttgtgtctgtttctacacagagcctttgggttttgttctcttcatcaggtaaatgtttgttgcataccctgctgcacagagaacctccctgcgtctgtttctctgctcctctgtggctgactcaataaacttttccttcttggaaaaaaaaattataatgtctgttagtgtcaaggattggataaaatgggtgcattcatacacttttgagtgttaattggtatagtctctacagagggctatgtggagagagaacatggtggtatttctcaagatccttaaaagtgtttctcttgactcatcaagactacgaacttattttaaggaagtagtcagagatggacataaagagttatgtgaaaggaatttcaccacagcttcccttggtaacaaaaaaacaacctggaaacaacaatcatcaatggtcagtaaaatcattaagtaaaatacaaaatggaaaactttataacagaagaaatgagcagccaccacttgaacccacttatgttagtaccactaaaagtgggacagccaaacattatgtgcttgctgatgtggtatgaaagaaaatacacagtaccatctataaaatattcttacctaaagtcttaaaagtgaatctaattatgtctctggatttaactatcaatttacaagacatatgggagataagagaacaagctaattgaaaccatgaggatgcaatcagataaatccagaatgtggaacatttcatagaacagtggctaggcttttccatcatattgattgcatttaaaagagcgaatcagggacacttgagatacctaacaaaaaatgcagtttgtaggtattgttggatcctggtttgaaacattaactttatcccagtactttgggaggccgaggcgggtggatcacraggtcaggagatcaagaccatcctgactaacatggtgaaaccctgtttctaataaa

SEQ ID NO: 693743 - DNA, 1073 bp, Homo sapiens
cgtgttggccaggctggtctcgaactcctgacctcagtctgcccacctcggcctcccaaagtgctggtattagaggcgagagccacagtgcctggccaattaagcataattttttctatttttcattttcttacatggatctttttttttttttttgagacggagtctagctctgtcacccaggctagagtgcagtgacacgatctcggctcactgccagctccgcctcctgggttcatgccattctcctgcctcagcctccctagtggctgggactacaggcacccgccaccatgcccggctaattttttgtatttttagtagagatggggtttcaccatgttaggcaggatggtctcgatctgctgacttcataatctacccttctcggcctcccaaagtgctgggattacaggggtaagccaccgtgcccagccacctgggtcttaaagaataaattttcttgagatggagtcttgctgtgttgcccaggctgaagttatcctcytgcttcggcctcctgagtagctgggattgcagatgtgagccactatgcctgcctctaagaaactttcttataaaggaggaagaagaaaagtagcagtgcagtgctccaaagaatttttttacaacacttaaggaagaactacctttaacttgtagcactagagactctgtttcaaagaatgcacaagaatacttacccttattacttgtaatatactctcatattttctgttgcttttttttcttttctttttttttttttttttagtactggttgcagcctactatattgatttttatgacccactgttggcttttgagccataatttgaagaatactggcgtagaagagttgacaagatggcagttattctgtattaggccaacattttctgtatgccaggaacttatcctctgtacattgttccttctttccttcctggagtttatagataagggaagaagactggcattcacggagtctggtgtgatcagcattgtatttgggaagtacgtatatagtgggaggaacaggagaacctaacccagtagttatcctggtggct

SEQ ID NO: 693744 - DNA, 606 bp, Homo sapiens
tcgaggctgcagtgagctgagatcatgccactgcactccagccagggcaatagagcaagaccctgtttctaaaaataaataaatagataaacaaaataaaagatagtgaatgatgatggttggaagaagcctcagggctggttccagagggtcaaggtgtgaggaagaaggagcagcctccccgggggaggggtgctgggaagtgggaaccccagaagagcacgtgatttctgttaaaacataggctccaaactggtagccaataagccaaacactagtttgctttgcctgctcaaaaattaagccrataaagtccgaacctggtggctcccacctgtaatcccagcactttgagaggccgaggctggcggatcacttgaggtcaggagtacaagagcagcctggccaatatggagaagctctgtctctattaaaaatacaaaaattggcccaatgcagtggctcacgcctgtaatcccagcactttgggaggatgaggcaggcagatgacctgaggtcaggagttcaagaccagtttggtcaacatggtgaaaccccatctctactaaaaatacaaaattagctggatgtggtggtaggcgcctg

SEQ ID NO: 693745 - DNA, 612 bp, Homo sapiens
ctggccacagacatctaagttctagtgggtcctatggatcataaggcccaagtagctgagtagcttagatgagagccagaacttgatcagtagtggattttttttcttcaacttttaarttctggggtacatgtgcaggatgtgcagatttgggcttgttgcataggtaaacatgtgccatggtagtttgctgcacagatcaacccatcacctaggtattaaacccagcctccattagctattcttcctgatgctctccctccccctgtaccccctacagcagattttattctttaaacctcctgaaggagtattttgcaggcctctcaagggtagagtgagagagtagaaggttaagggaccaaacatcacagttttcaagggactatcctggagttgccactgaaaatctcatgtcccaggaaacccctcagtctttcttaggcatataatcttgttggctgccctaggaaaagagcaagttgcacataacaaatcttcatcaacactcccatctacctgaggtcttagatttctttaggatgccaaggatgttatagcatttcaacctcattttgttcgaactacaggtggctgacttatcagaatgtg

SEQ ID NO: 693746 - DNA, 656 bp, Homo sapiens
ttcaaatacactaaactaaaatctagaaatgaagggagaaattgacagaaacaaaaattatagatggaaacttgatttgtctgctaatgggaaataagtagagaaaacaagtaaatcatagataagatctgaatatggataaagtcgattcattaaagacacataaaagtttataccctgaactatcaaactagcaatgcacataaagaaaagataaaaaagaagttatatatttatgaaaggrggactaaatttggtattactctccagtcataagattatttgcctaggaaacatagaaaaataaatgaaaaactatttttaaatataaaaaaatcattagcatttttagaataatttacagattaatgttaaaagaacagccaggaaaatattcacagaaaaaacataccatttacaatagaaagaagaataataagaaaggtgacataactagaaatgattactagatatctattaaagctatcaaaataaaactttaaaatttaaaattcttctagtctatattctttgttatgtgtgtccattgaagtctctgctcagttatcttaatggtcgtttaatgattggacagagatttccttaactacctgaaactaatgtcttccacagtctttgttgaggggttttgtgtg

SEQ ID NO: 693747 - DNA, 656 bp, Homo sapiens
ttcaaatacactaaactaaaatctagaaatgaagggagaaattgacagaaacaaaaattatagatggaaacttgatttgtctgctaatgggaaataagtagagaaaacaagtaaatcatagataagatctgaatatggataaagtcgattcattaaagacacataaaagtttataccctgaactatcaaactagcaatgcacataaagaaaagataaaaaagaagttatatatttatgaaagggggactaaatttggtattactctccagtcataagattatttgcctaggaaacatagaaaaataaatgaaaaactatttttaaatataaaaaaatcattagcatttttagaataatttacagattaatgttaaaagaacagccaggaaaatattcacagaaaaaacataccatttacaatagaaagaagaataataagaaaggtgacataactagaaatgattactagatatctattaaagctatcaaaataaaactttaaaatttaaaattcttctagtctatattctttgttatgtgtgtccattgaagtctctgctcagttatcttaatggtcrtttaatgattggacagagatttccttaactacctgaaactaatgtcttccacagtctttgttgaggggttttgtgtg

SEQ ID NO: 693748 - DNA, 658 bp, Homo sapiens
taaggattaaatgaattattacacataaagtaccaaaaacattacatagtaatgttatcaataagtttcagtattaattattattaatatataatatttcatttacttaaacttgcaatgttttaagttgaagtacctgggattatgtggtctaaagttttgcgagtttagaaataatgagttttcatgtaaatgtgtttatgccacgtctgtccttgcaatagtgaaaattgaattaracacattttaaatatagaaaaataataagcctagttcaaatattttataaacgataaaatcaaactgaaaaaatctaattatttccatctgcacttatttcaaatattatttgtaatatatgctatagatttttaaactctgatcaaatattgccagacctcacaagagcctaagtgctgacctttaattttaaatgtgtttttttcacgtgtgtgggaagaattgggcagaaaaatgaactttcagctcttgtggagggcagtggggtccaccaactttatttttactgttaaaatctgtgtaaaaataacattattatgacacagtgaaatcccctacaatatgttgaaatgactaagaaaagaaaataaaagtaggaaaactttaagtgggtttgattttggaagccaaatatttt

SEQ ID NO: 693749 - DNA, 616 bp, Homo sapiens
aaaaaaaacgtgcaagaagcatgaatactttagttttcagagactcaaaagacagtattattcctgggactacctcatgagaacttgcttttatgagtgagcatgaatgttcatgctgaaaagccatttatctcaataaagtcaaggaagtttttagttttcacaaaagaaatctgggagtaaaaaactacaatgttgagttattcttttctatgtgttmtttgagctttctattcaatatttgttgataatcaactatatgttaagcattcaaataatgagatcaagcctccaccctcaaagagaatacgtagggcagattgaacaggaaaaggtaagcaacactacaaataagaaactataatacaggacagacataatcaaatgtaataaagaaacacaacaagaaaatgaagattaaaaaataatgatgaatgctcatgtagggcaattttggtttcttcctagcagaggtgacatatttttaagaagaaattatgaataggatgtcatttgcttttaaaaaaatcattcttaatgggtaccattttccttagaagagccataaaaagtagctcctggaccactaggaactttagataagcccctcccagtg

SEQ ID NO: 693750 - DNA, 640 bp, Homo sapiens
aaatgttttaaaatcgtatactctttcaaaaaaaaaagggcactggatttaacatagcattttaacttatctggaaatgtctcaagttacagttttctcatcccctcatgggatgtagcttaaagtgtcatatacgtcatatgttagtttttgagggctgccataacaaaactaccagaaacaacagaaatttactttctcataattctggagactcaaagcccaagggtgaggkgtcagtaggtttggtttcttctggtgcctctctctttggcttgcagatggctcctttctcactcgccctcacatggccatccctctgcgagtgcacgtgtctgctgtctctccctgtgtcctaattttctcttgttaataaaacacccagtcatattggagtagggcctaatgatctaatgattacattttaacgtaattacttctttaaggtcctatctccaaatagtcacatcctgaggtactgggggttaggattttccacatttgaattttggagggacacaattcagcccctaacagctggccaccacagaatattaaaattagacaagggaggaccgtgtttcaacctctgacagcttttgatcacaaaagctatcagacataactgtccaccgtggca

SEQ ID NO: 693751 - DNA, 1428 bp, Homo sapiens
cagtgttatcggagttcagagaggcaaatgacttctgactggcaagatcttgatattttcaatttagatttactgaaatattatgtaattccacggtaacagaaggaatgtgaagtttcttttcctccctatccaatacttccctctagtggcgccatggctccttaacaatacagccctactccccagcgggtaagagaaagggtggtgggaactttcactccatcaacaaatcactgtcaaatctgaattgatctgtgaacattagttttgagttgagccatttcaaatgaaacccttgtttctcttagagagaactggtgtccccagccagaaaaagtgtcctaccataaaagtatcatgttacagggcccagccttttagcataagatgcactgggaaaaagcagtaatccctgagaaacaagatatcaaaagaaaaaatagacctcccatwactttcatgaaaaagtcaatttccctgctcccagtcaaaagctgaggctctagaatcccgtgaaatgctgtcaatgcgacaggcaattacgtcttcgaatacttttgttccactaacaaaagaaaaatgtggattgttttctaagtatgggttgagacactgtgtgcctaaaaatgctttcttctttctgtgacacatgcgagttttattagagaggtgctaataaaagcccaaagctgaaacagtcatctttaccggaaactttgcaatacagttgtctttcagtatctgcaggggattggttccaggaccctcagggataccaaaatctgcagatgctcaagtcctgcagttggccctgtggaacccacagctacgaaaagcaggccgtcatatccttgagttcttcattcctcaaaaactgcattttaaaacagggattgtttgaatccgtggatgctgaacttgcagacagggagaactggctgtactgtggcctccagaattgctgcttcagggcctctctgaggaagcatggctcagtatgtaactccctaaaagcagagacattttctgtcttcttcatgggtgtacattccagggcctagaaccttgccaggttcagagtagacttttcaatatttcctgaatgaatacatgaaggaaaactgcacatttctccatacaaaccagctctgccccaggacacaaggaagggtagctttgggagcatgtgaagacagagctttgggcacagcagcacctggatgggttgacttcttctcctggagtggacaagaaggggtgggcggggatatggaaaatcatgttcctgggcatgtgaggtgtcaatgactcaaaaaaaattaacttcaaagggtagcaatgttcctgaatggacaggtgggggctcagaataatggttatttgggaactagtgtagatgtaacctcagctgactcccaagctggc

SEQ ID NO: 693752 - DNA, 1399 bp, Homo sapiens
tataagggggggtttcccctttgctaggcactcattctctcccctgccgccctgtgaagaggtgccttctgccatgactataagtttcctgaggcctcctcagccatgtggaacggtgagtcaacgaaacctctttcctttataaattacccagtctcaggcatttctttttttttgagacggggtcttgctatgttgcccaagctagctgtgaactcctgggctcaagcaatcctcccacctcagcctcccaaagtgctggggattacaggtgtgagccaccacgcccagcctcaggcaattctttatagcaccatgagaacagactaacagatgggaaaggaagggaaatcacttcctgtgagcaaatgggagcatgccctgtccacctctgctccccatttcagcagaaaatggggcttaagctccttgagggcaggggctatacttactggccccaccgtcttgcacagagcaggcctttggcaagtatctattgaatcaacaaagggcagggtggtggtgggacttgcatgaggttagatatgtaaggcatctggcacataggtgtgctaatagtcactggatggatggatggatggatggatggacggacggacggacagatggacggacagagagacaggttgggagcatgacacatggccgagttgcagccttgggaattcccctccaaggatgccatagctgaatcccctgggaggatgggcgggtacctgtctgcggagcctttgatgagccggcggcaggtctccatctgcacgtccaggcctcgcttcatgctgcacatctccatgtactcgtgcaggtgtcggttcatgtcacttttggctgtggccagctcgagctgggaggaaccaatgaggaataagggtgagggcaagtcatcctcgtgacagaagcctcggcaacctctcctcctggattcctcagggatggtgccatcaaggccaccattggacaccatgccatcaggaccctgcctccrgacatcaacctccctcaccctctgctctctgcacatgggtccacttcccctagaactccttctggccaaaggggaatggttgcttagcaaccccagcagcagcctggctctgatgcaccccacccggttctgagaactcaacatctttgggttcctttatccagacctgattacaaaaatcctgaaggctttttcatgtttctgactcttgtcctctatcaagtgatacttcctctagggaaggagctgggcttccctttctcctgcataatagcaatgactatcgtttatagaagtgatcacatgcacagcctctggagccagagagaattatacttcaatgctgcttcctggccgcaaggccttgggcaagtcacttggtcctttcca

SEQ ID NO: 693753 - DNA, 1399 bp, Homo sapiens
tataagggggggtttcccctttgctaggcactcattctctcccctgccgccctgtgaagaggtgccttctgccatgactataagtttcctgaggcctcctcagccatgtggaacggtgagtcaacgaaacctctttcctttataaattacccagtctcaggcatttctttttttttgagacggggtcttgctatgttgcccaagctagctgtgaactcctgggctcaagcaatcctcccacctcagcctcccaaagtgctggggattacaggtgtgagccaccacgcccagcctcaggcaattctttatagcaccatgagaacagactaacagatgggaaaggaagggaaatcacttcctgtgagcaaatgggagcatgccctgtccacctctgctccccatttcagcagaaaatggggcttaagctccttgagggcaggggctatacttactggccccaccgtcttgcacagagcaggcctttggcaagtatctattgaatcaacaaagggcagggtggtggtgggacttgcatgaggttagatatgtaaggcatctggcacataggtgtgctaatagtcactggatggatggatggatggatggatggacggacggacggacagatggacggacagagagacaggttgggagcatgacacatggccgagttgcagccttgggaattcccctccaaggatgccatagctgaatcccctgggaggatgggcgggtacctgtctgcggagcctttgatgagccggcggcaggtctccatctgcacgtccaggcctcgcttcatgctgcacatctccatgtactcgtgcaggtgtcggttcatgtcacttttggctgtggccagctcgagctgggaggaaccaatgaggaataagggtgagggcaagtcatcctcgtgacagaagcctcggcaacctctcctcctggattcctcagggatggtgccatcaaggccaccattggacaccatgccatcaggaccctgcctccggacatcaacctccctcaccctctgctctctgcacatgggtccacttcccctagaactccttctggccaaaggggaatggttgcttagcaaccccagcagcagcctggctctgatgcaccccacccggttctgagaactcaacatctttgggttcctttatccagaccygattacaaaaatcctgaaggctttttcatgtttctgactcttgtcctctatcaagtgatacttcctctagggaaggagctgggcttccctttctcctgcataatagcaatgactatcgtttatagaagtgatcacatgcacagcctctggagccagagagaattatacttcaatgctgcttcctggccgcaaggccttgggcaagtcacttggtcctttcca

SEQ ID NO: 693754 - DNA, 723 bp, Homo sapiens
tccagagcaacaatgagtgttcccaatggactgggttggggactgggccggtcccaagaaggccgtctggtaaaaagctgcctcgagcgccccctggagtcaggccgggccggctcccctccaaaagccattcccacaggagcccataggtggctccccgagtccagggtcctgagctggtagggggtgggtgctggagagggccgtgtggcccggagccgccagggtccagtggtcactgcatcacacactcaattcctgacttcacttccttcccagcrtctgggatctgaaggaaaccccagccgagggacaggaagctggaaaggacagaaagacgggcaagagaagggactcggaagaggcctccacttcacaaatctgcggagtggggctgaggaggagccttggccccagcgggggagacccacacgttccccctcttctccttggtctgaagcccaaacaaccgacttggatcaaaacaaaacacaactgtaacacggctgcattattcaaacacttcatcagatctggccaggggcagcctggctagggtcctgcccacagctggtggagatgtccatgggaaaggcccagggccccgcctggggtggggtcagggcggcccacacagaactgcagaatgggggtggggggtgatcaaagtgatcagaggtttcgttgtttgttgttgttgttgtttttttgtttgtttgtttg

SEQ ID NO: 693755 - DNA, 686 bp, Homo sapiens
gtttccatcctgcagtgccaccaccgggtttaaatgagaccgcgtggaaatcaccagacgggtcataatatgtgttccctgttccccaactcctcccctgccagccctgccagcccccattgagaccttctccaaagagcaggggcctggacaggcctgctacagtggcccgggagcctcatctgcctgctactgccagtgattcatttgcttctcaagaaataatttctgtaaagtgacagcagggagtcttcccagcgcagcagccgcctcctattctgccacccgccatggcaatattgtgacaggtgctggggagaccccgtgcctcctgcctgcctcctcaccctgagccagcctttggcaacctccaggggcatgggacaaggccacctcctgggaggagcactgaccttggggtccagagacccagacggactcgtggcgagatctgggacagaagtcttcacctctytgaacctctcatttgtaaaatgagcataatcacttcccactgcttgggactgctcccataattatcacatatttaaagaagtcatcactgcacctagcacaaagtaggtgctcaataaacggaagcattaagccatattgatttattttcaaatccttttgcaaaatgttttcctactgcactgttttaattgacttttacctcaaccctg

SEQ ID NO: 693756 - DNA, 686 bp, Homo sapiens
gtttccatcctgcagtgccaccaccgggtttaaatgagaccgcgtggaaatcaccagacgggtcataatatgtgttccctgttccccaactcctcccctgccagccctgccagcccccattgagaccttctccaaagagcaggggcctggacaggcctgctacagtggcccgggagcctcatctgcctgctactgccagtgattcatttgcttctcaagaaataatttctgtaaagtgacagcagggagtcttcccagcgcagcagccgcctcctattctgccacccgccatggcaatattgtgacaggtgctggggagaccccgtgcctcctgcctgcctcctcaccctgagccagcctttggcaacctccaggggcatgggacaaggccacctcctgggaggagcactgaccttggggtccagagacccagacggactcgtggcgagatctgggacagaagtcttcacctctctgaacctctcatttgtaaaatgagcataatcacttcccactgcttgggactgctcccataattatcacatatttaaagaagtcatcactgcacctagcacaaagtaggtgctcaataaacggaagcattaagccatattgatttattttcaaayccttttgcaaaatgttttcctactgcactgttttaattgacttttacctcaaccctg

SEQ ID NO: 693757 - DNA, 1086 bp, Homo sapiens
cctcacttaatcttcataacaatcctatgtggtcagagttagtactgttactatctccattttatggatgagaaaactgcaacagaaagttttgtgtcttatatgttaataaatggtagagccaggtatggtaaagatgatgtcatgtttaactaaattgtttaattttccttccagttgccacaggaagattttatttccagctgcccttcatcagtcacgtgactgattctggccartggaatgtggccagaagtgatgaaggtcacttatctggcctaatcactgctttctgaagcatggttttttattcactctctctctttctccctctttctctctctctctctagaagcaaatggccccgagatggcaaagccataccatgaaaagcgactggacctctgagtcacctctttgagcagagagagccagaagatcctcttcactcacactgaacagtggcacgtgggtgaaatcacactgtgctgagtttctggaacctcaggaatctttggtacagcaaagatgatactttgattaatacgccaaactccaagcttagaaaatctggatgtacagcctgtgttcttaattgcaatgttattttttctcttccttcttccttttctgaataataatacttctaagattgctgaataaatccgatattgattgagataatataagtgtggtaactataatgcgtttgtagcatacctggtattgtggtgactcagacacttgcattcttagtctaggaggctggggtctaggtgtcattttcgtttccaccttctgctatactcagtgcattgtttaacatacaggaagtaaacacttgctgaattcaacgtagaaaattggaattttcaaataaattagttataaaaatctatttcaagaaaagtattcagtgtactaaaagaaaaaaggtaacctctttcaaacattaagaacgcaacctattgacactgaacgtacacacgctgaagggttcttacctgactgttgacacatgtcaggtggtaactccttgtaacaagtttattaggaaaaaactatgttacattagaaatatcaaaa

SEQ ID NO: 693758 - DNA, 1086 bp, Homo sapiens
cctcacttaatcttcataacaatcctatgtggtcagagttagtactgttactatctccattttatggatgagaaaactgcaacagaaagttttgtgtcttatatgttaataaatggtagagccaggtatggtaaagatgatgtcatgtttaactaaattgtttaattttccttccagttgccacaggaagattttatttccagctgcccttcatcagtcacgtgactgattctggccaatggaatgtggccagaagtgatgaaggtcacttatctggcctaatcactgctttctgaagcatggttttttattcactctctctctttctccctctttctctctctctctctagaagcaaatggccccgagatggcaaagccataccatgaaaagcgactggacctctgartcacctctttgagcagagagagccagaagatcctcttcactcacactgaacagtggcacgtgggtgaaatcacactgtgctgagtttctggaacctcaggaatctttggtacagcaaagatgatactttgattaatacgccaaactccaagcttagaaaatctggatgtacagcctgtgttcttaattgcaatgttattttttctcttccttcttccttttctgaataataatacttctaagattgctgaataaatccgatattgattgagataatataagtgtggtaactataatgcgtttgtagcatacctggtattgtggtgactcagacacttgcattcttagtctaggaggctggggtctaggtgtcattttcgtttccaccttctgctatactcagtgcattgtttaacatacaggaagtaaacacttgctgaattcaacgtagaaaattggaattttcaaataaattagttataaaaatctatttcaagaaaagtattcagtgtactaaaagaaaaaaggtaacctctttcaaacattaagaacgcaacctattgacactgaacgtacacacgctgaagggttcttacctgactgttgacacatgtcaggtggtaactccttgtaacaagtttattaggaaaaaactatgttacattagaaatatcaaaa

SEQ ID NO: 693759 - DNA, 635 bp, Homo sapiens
ttttgtcttcagtgacaacaaagatttaaaagaatacttgaatcctcagatctcatctttcctttcagtttatgaccaaatgttagtttataccatcatgaaagacctcctccaagtgaagcttcctgattactgagcaggaggctctgagctgcctcaaaattagaaaatttcctaattctatgtagactaaacccggctgttccagacatagtgctagggatgtaggcagcactcatatttaacgcaatactgtaccaaaggctacagcagaatggtgaaaggagaaagcagtaaacttggagttagtagaccrgagacatgctcatttatttattcaacgtattttcatataacacattcatgtgctttgggatagacaccatgaaagacacaaaaatgtctaccatataaggcagtatctaagcagaaaatgatttgatgataaatactatagcagtggagatgacagaaatatttttctggctcaggtcatcaatgaagggatcatataacacgcgcatatatgtgcatgcacatatatgggtggggccctgaagccccacttctgttattataagcagagacacggagggtaaagattagggtttacatagaggggttacaacaacaag

SEQ ID NO: 693760 - DNA, 611 bp, Homo sapiens
ttgctgctgctcactctttgggtccatgccatctttaagagctataacactcactgcgaaggtccacggctccattcttgaagtcagcgagaccacgaatgaacccatgggaaggaaccaactccagacacacagacacttttctgtgaagcagttgtgctgcactggggatccatgccagttcctaatcaccgtgcaccctccagcacctgagggcaaaagcagcaagggctgtgagacagcaaaaacggcagccatcttctccttctgggagctctgtcccaggggagtgcaaagctggtaccagccctagagccctggtagggggtggctggagtcccaggtcaggaggccccgaccagtgacgagaagcggtaytggggacccatgtggaaaacagtccggccacttttccatgtggtggctgcactgtgctagagtccgtgctagtccctaatcaccaagcactttccagagcctgaaggcaagagcagcaagggctgtgagacagccaagatggcagcctgccttgcccccttggagcttcctcccaggaagtgcagaagattatatttcaaatgactacacaatagtgataatgcaaggtgggg

SEQ ID NO: 693761 - DNA, 573 bp, Homo sapiens
cattcctattatctgtgcttacaacagaattgtgaaaacctaatcacacatctacaaagcatcataaaatatcatgttgttaggctgggcgcggtggctcacacctgtaatcccagtactttgggaggccgagccaggtggattacctgaggtccggagttcaggacctgcctggccaacatggtgaaaccccgtctctactaaaaaatacaaaaattagccgggcgtggtggcaggcgcctgtaatcccagctgctctactcgtgatgctgagacaggagaatcgcttgaacccaggaggcagaggttgcagtgagccaagatcgcgccattgcactccagcctgggcaacaagagtgaaactccatctcaaaaaaaaaaaaaaaaaagttgttgaagataaaaagttatgtttaaayggccaaaattttaaatatttaacacattttggtattatattattgtcatcaccatcttactttttcccctttgtccccaactatgccggtgatgcctcgcaaaccctgggctccctggaaatgtgaaaaagagaagtgaattattttagttgaa

SEQ ID NO: 693762 - DNA, 1104 bp, Homo sapiens
tttatataatcacaaagatgctgggtaagtttgggtcctctagcaaacagatatcaagaaagaattcaagggcaagagattgattggggggataggaagtagaagtaatcagggaaagccttcaggccaagatgcaaagctgatacctgcaaaaggagagaggggaggaagggggactcattaggaagcatctcagatacagtagggctttgagaaagtttgagccaacccaatgggaaacaccagtgcaaagatcacacatatagaagccccatattgggcagaaatttccaggccctatgctcaagcatcagctgggagcagctcatgggagtatggtctcaaagtgaaagctgaagcagatcccaacagtgtggcagatggaggttgtcagctcctaacactcctcataacagattcttaacctaagtcagttttgtctctctgctgtctctcctactccactacttttgtatgccagaattcaaatatcattatcactagtgatctaatttaaattttcattcaagtgtattagagaccgtgtgaatgaataatgatgaaaaagtaatgtaagctgataccgacttctccagtatgtttagattttgcacataacaatattattttttctctattaaaaaaatgaagatagcctttaaaaataaacaacttgtattgccatggactatttttcctaatcttatttaaagatgaagatgttaacaagattacactcagccagcagcactcacatgatggatgcataagctgcgatcactcagggctatataaccttctccaggacctgtcattactttgyagtctacagaacactgcactaggtcacccatctctacttgttaacatgttgtcatactgcctgctggcatcacttacccagcttctggtctgtcacagttattctttagccatcacctgtgtgtacccacctaaacatacacacacaaacacacactactgtgtgtctgctcactatgccatcaacaccctcatgcactcttacctgactgtacctgggaccctccccttgcctgcactgcccctcttctcatgtaaaactactgcctatctttcaaggtt

SEQ ID NO: 693763 - DNA, 349 bp, Homo sapiens
aggggtattctaagggaaactattataaataacactcctatgcataaacactgttaaacaaataaaaatcatctctcagggaaatagtgctggtccccaatattaatttagtcccctctgcctgcatataaggttatttccttctctttaaggtattcaaattattgctccctctgcyacctttggtaatatattctacttgtcagaagtaggctgatgcagcaatgagacagagagatagggaaagcctggggtttgagcttaggaacaaggtcccaggctaattactcttagaaaggagttgcaggaatttgagtcataaggtgagatcatcaccagagggccatca

SEQ ID NO: 693764 - DNA, 1454 bp, Homo sapiens
taaaagagaaaaagcagactaaaaaatggataattgaaagttccagttaactgggtctcagttaatctagatttttattatttctaaaccattccactacaaactctgattggtataattgatttagagcctgttccatatgatgccttctattctctaagctgagttgaccccaaaaagaagaaccctttgaattcaatctgagaactatactcagttctgagaatgaagatggcattttagactcctgtgtttgtgagctggtgccttttcctatatttttatttttaaaaatccaatttgagttttttgcctcatgtcctcatcttaggcaccataaaaaaaagtgagtgaaagaaaatctttcccatagaaattctcacacataatgatgccaacaggcctttcattttactggttgcctggctgactagtatattggaaataagtgaagatgggaaaataacaaggaactagtttctgctgaggggaacaaattctacagttatgaagttgtaaggaaaagcacaatgaaaaataatctcagtatcgcagaataaagcaattctcagcagtaaagtagtaacaaaagaaatggaaatcttaggaaacactcaaaatgggcagtaatagcacaaaagcattacaatgtttcaaattgcaaggtgaatcgaatgactgagagactgtcttgagcacacttgagattagttctcagatgtattttattyggttttccttttttcttttctgagagattatctcatctatttaggccttcttcctttaggtcacagaaacagggaaaggcacttaagatattcattaattaagacaccatttgtagctctactgtgaaggataatcacttgttggcttaagatggtaacttacaacttaaagtatttacatggcaatttctctactgtgaagttaaaggctctaattcaaactgatgacaggaactagttagggattttaaaagaagcaaatacttttcaaatttaagcagaaggataagaaaaatatttgattaattaatggactgccacaaggggcaattcttcctgacttcatatattctacattagttgttctttataaaacaaagagtatattgtagttcatgtgattttcaaagaattatagagtcaagtatagacctaacataaattcttcctatatacacaaaaactcaatagcaacaacataacagtaatagagactttttcctagatttttaagatatcaaaaacgttcttcaataacacattaatcaaaggtactctaatggcatctcatgagctaagtaggtgtcaaggatcatctttcttttatcatgagaaaataaagcagaactggttctgtgatttagccaagatcaaatgtcagtaagcaaacaatctcaaaatcagagcctttcaagtctcaattgaccgtctcaacccagaggg

SEQ ID NO: 693765 - DNA, 1454 bp, Homo sapiens
taaaagagaaaaagcagactaaaaaatggataattgaaagttccagttaactgggtctcagttaatctagatttttattatttctaaaccattccactacaaactctgattggtataattgatttagagcctgttccatatgatgccttctattctctaagctgagttgaccccaaaaagaagaaccctttgaattcaatctgagaactatactcagttctgagaatgaagatggcattttagactcctgtgtttgtgagctggtgccttttcctatatttttatttttaaaaatccaatttgagttttttgcctcatgtcctcatcttaggcaccataaaaaaaagtgagtgaaagaaaatctttcccatagaaattctcacacataatgatgccaacaggcctttcattttactggttgcctggctgactagtatattggaaataagtgaagatgggaaaataacaaggaactagtttctgctgaggggaacaaattctacagttatgaagttgtaaggaaaagcacaatgaaaaataatctcagtatcgcagaataaagcaattctcagcagtaaagtagtaacaaaagaaatggaaatcttaggaaacactcaaaatgggcagtaatagcacaaaagcattacaatgtttcaaattgcaaggtgaatcgaatgactgagagactgtcttgagcacacttgagattagttctcagatgtattttattcggttttccttttttcttttctgagagattatctcatctatttaggccttcttcctttaggtcacagaaacagggaaaggcacttaagatattcattaattaagacaccatttgtagctctactgtgaaggataatcacttgttggcttaagatggtaacttacaacttaaagtatttacatggcaatttctctactgtgaagttaaaggctctaattcaaactgatgacaggaactagttagggattttaaaagaagcaaatacttttcaaatttaagcagaaggataagaaaaatatttgattaattaatggactgccacaaggggcaattcttcctgacttcatatrttctacattagttgttctttataaaacaaagagtatattgtagttcatgtgattttcaaagaattatagagtcaagtatagacctaacataaattcttcctatatacacaaaaactcaatagcaacaacataacagtaatagagactttttcctagatttttaagatatcaaaaacgttcttcaataacacattaatcaaaggtactctaatggcatctcatgagctaagtaggtgtcaaggatcatctttcttttatcatgagaaaataaagcagaactggttctgtgatttagccaagatcaaatgtcagtaagcaaacaatctcaaaatcagagcctttcaagtctcaattgaccgtctcaacccagaggg

SEQ ID NO: 693766 - DNA, 1454 bp, Homo sapiens
taaaagagaaaaagcagactaaaaaatggataattgaaagttccagttaactgggtctcagttaatctagatttttattatttctaaaccattccactacaaactctgattggtataattgatttagagcctgttccatatgatgccttctattctctaagctgagttgaccccaaaaagaagaaccctttgaattcaatctgagaactatactcagttctgagaatgaagatggcattttagactcctgtgtttgtgagctggtgccttttcctatatttttatttttaaaaatccaatttgagttttttgcctcatgtcctcatcttaggcaccataaaaaaaagtgagtgaaagaaaatctttcccatagaaattctcacacataatgatgccaacaggcctttcattttactggttgcctggctgactagtatattggaaataagtgaagatgggaaaataacaaggaactagtttctgctgaggggaacaaattctacagttatgaagttgtaaggaaaagcacaatgaaaaataatctcagtatcgcagaataaagcaattctcagcagtaaagtagtaacaaaagaaatggaaatcttaggaaacactcaaaatgggcagtaatagcacaaaagcattacaatgtttcaaattgcaaggtgaatcgaatgactgagagactgtcttgagcacacttgagattagttctcagatgtattttattcggttttccttttttcttttctgagagattatctcatctatttaggccttcttcctttaggtcacagaaacagggaaaggcacttaagatattcattaattaagacaccatttgtagctctactgtgaaggataatcacttgttggcttaagatggtaacttacaacttaaagtatttacatggcaatttctctactgtgaagttaaaggctctaattcaaactgatgacaggaactagttagggattttaaaagaagcaaatacttttcaaatttaagcagaaggataagaaaaatatttgattaattaatggactgccacaaggggcaattcttcctgacttcatatattctacattagttgttctttataaaacaaagagtatattgtagttcatgtgattttcaaagaattatagagtcaagtatagacctaacataaattcttcctatatacacaaaaactcaatagcaacaacataacrgtaatagagactttttcctagatttttaagatatcaaaaacgttcttcaataacacattaatcaaaggtactctaatggcatctcatgagctaagtaggtgtcaaggatcatctttcttttatcatgagaaaataaagcagaactggttctgtgatttagccaagatcaaatgtcagtaagcaaacaatctcaaaatcagagcctttcaagtctcaattgaccgtctcaacccagaggg

SEQ ID NO: 693767 - DNA, 1506 bp, Homo sapiens
tttaatttttttctaaacaactaaatttacagcaatttttagtcaaccatatggtgacttttttcaagctgtgcagttaattatttttttaactaattcaccttatccactaaaattttaatttgaactctctcttaactggttagagtttcttccatatcatagctaaaaatttaaaaggctgtattagttcgctttcatgctgctgataaagacataccccaaagtgggaacaaaaagaggtttaattggacttatagttccatatggctggggaggcctcagaaccaggacaggaggcaaaaggtacttcttacatggcagtggcaagagaaaaatgaggaagaagcaacagcggaaacccctgataaacccatcagatctcatgagatttattcactatcatgagaacaccacgggaaagaccagcccccatgattcaattatctcccgttgggtccctcccacaacacgtgggaattctaggagatacaattcaagttgagatttaggtgcagacacagccaaaccatatcagatgcatatatgaatgctatagtttctgtcacattaaatatctgaaaataactactatttgcattcagaaaaaaaatttaggtgagtataaaattggtaaaaatataatattatggatagactaacatatacacatcaggtataaatataaaaacataagtttatatttaaagagttatgatagtattactgataagtaatttaacagatacaggtttcgccaaatcaaaaatgtcactatttataaatgtacatttactatgttctactaggagaggtaaacatgctgccaattaaactatcatttgtaaggcaaatctttattgaagagattaaaatgtgaaaacaaaatatgtattagaatcaaaatatggtatacgtatatacatcaacattcgtattctatatgtaaaacaaattatacactgtgctctacagtctgcattytcttcccaggtatggaggatacatttactattctgagtaaagtaaggtaataaattattaagaaaaagaaaaactaataagtgaggaacagaaaatagtagaattaacactaaatacaggaaatgcttctttgtaaagacttgtataataagcaaaatgctgataagactaggcaaaagagagaaagatgagcatatgatattgtatatgaaaagagtataacatctaaaatatgagatatgtacaaaactgaattaaaaaatatattttaatgattaattcaaacatgaatagatcccccaaaaatgaaataaagtgagaacttgtcaaagaaataaattgaaactgaaataaaaaatgaaataaattgagaacattgtcaaagaaatattctatccaccactttcccatcactttccaaccccagaggtcctagatttaaaaaaagaaatttccaaagcttctgtttcaagttttctacaaacaaatcagcatttaaattcaattaatattcaattaaat

SEQ ID NO: 693768 - DNA, 681 bp, Homo sapiens
aatattctttgtatttataccaggaatacataggtaacatatgggaatttattaatcaaataaatatcatgactaagttaaataagaaaatctcaaataattttaatacattgaaaaaaaaacattaaataaatttaacacccactcccaatggcaaatctcttaaaaacatgaatagaaagacttgatatattaaaatcaatcacaacccttctagccaacttcctatttaaacattgcatacatgaccattaataccaggtagtggcatcaatgccaaaaataataatcatgtttcccacaaataatgcacacatgattattctgaatcagatagccaatgcaattagagaagaaaatacaatatgaacaatgaaaaatacaaaaatataggaaaaatctaaatatttacatacctacaaaaaagatgaagaaaccaactaagaagctattaaaaatagaaaataaaataattgaaatggacatataagccaaaaaattaatgttttcaaaattaraaaacttaaagcaacatacaatagtaacaagaaacataaaaataaggaattaacttcacagaaaattagatcacctatatgaagaaaattataatattttactcagaagcatataagcaaaatgaatatgtagaaaacacacagattatgagagagaaaggca

SEQ ID NO: 693769 - DNA, 641 bp, Homo sapiens
gtgtctattataaatggaattgtgttcttgatttgcctctcacttcgaatgttattgatgtgtagaaatgctactaatttttatacattgattttgtaaccaggacctactgaagttgtttatcagtttcaggagccttttggtgacatctttaggcttttgtagatatagaaatatatcatctgcaaagaaaaatagtttgacttcttctatttctatctggatactttttatttctttttcttgtctgagtgctctggctagtacttccagtactatgttggatatgagtagcgagagtaggcatctttttcttgctcttgttcttaaggggagtgcttacagtttttgccaattcagcatgatgctgsctgtgggttttttcaaagatggctcttaacttgaggtagtataatattttgaaagtggttgtcattggcagtatgatgatgatgatgataattctatgagaaacagttaatcagctcaattattctttaatgttaatactgagttgaacatcttctaaagtaaaagtaagaaaatcattttttaatacttagatctgattatctcatctttctgatagaataaatccagcataaaagaccatgggaattgtatgggggagcagggtaatt

SEQ ID NO: 693770 - DNA, 1553 bp, Homo sapiens
ttttcaaaattatcatactatgtcccaggtagccctgcagctagttgcttctctccacagttcatcatgaaagaatggccagtagatagtttatcatatgctatttttcatcattcattccctgtttcaattacctatctgctcatctgctccggtctttttttttttttttttgaacctrggtttttttgttttggtttttattttttgagacagggtctcactctgtcacccaggctggagtacaatggcacaatcatagctcacggctcactttgaactcccgggctcaagcaattctcccacttcagcctcctgagtagacaggactacaggcatgtatcatcacacccagcaaatttttgtattttgttgtggggtagagatggagtttcaccatgttgcccaggctggtcttgaactactgtgctcaagcagtccatctgccttggcctccctaagtgctggtattacagatgtgagtcactgtacttggcctgaacctaggttcagagttaccaataaatgttaagtcctgtgaattccaaaatttctatgtatttaaatatatttatttaagaatttatgaatctataacctgtaagaatgcacatgacaaagagttgttttctggaagcatgaattaaggttacttcattacttcagtaatttttaaaaaaactttctgtggatttgaatgggtatcatactactgtatctgtagcttatctgtgttctttttaaccttttctctcttttgaaagagcagcaaactttattctgatattcaatagctgtcttttacattttctatagatattgcataacaattaacaaaattaagaaatgtattattgaaataaaattatcattataaaaaagatccatgcagtctcagtgagctataacataaacattatttcctcaacatactggcatccctcatgagaacttactaaaatacacagcaacagacactacggacaactcataacttggaatctcaaaaagttcagagtccactgggtaaaatagacactcaatgcagtagacattgataaaagttataataaagaaatgcaccagggctcagagagcaaaagggaaggaccaattaacactgcccaccaaggttgtcaaaaaaaaaaaaaaaaaggtaacatttggaatatgttctaaaggatcaggaagaagtctccaaaggaaagagaagtaaagactgttcccagcagaaaaaaaaattcacaacgaacactgacatttattatgtttcgaacagtgatctgtgctctggaaatagaatggtaaacaaggcacataaggtctagagttttggttccagtaagggacaaatactgaacaaagggaaaaatattagttatgagttctgtgcatgtaattaaaacaagagaacatgatagaacatgactggggactatttgagtgctagtggtcagggatggccccactggagaggtgccatttatgacaagcagcatgagccatcagagaaagggatgaaaagaaaatgtccatagcaagatgatggaatt

SEQ ID NO: 693771 - DNA, 1553 bp, Homo sapiens
ttttcaaaattatcatactatgtcccaggtagccctgcagctagttgcttctctccacagttcatcatgaaagaatggccagtagatagtttatcatatgctatttttcatcattcattccctgtttcaattacctatctgctcatctgctccggtctttttttttttttttttgaacctaggtttttttgttttggtttttattttttgagacagggtctcactctgtcacccaggctggagtacaatggcacaatcatagctcacggctcactttgaactcccgggctcaagcaattctcccacttcagcctcctgagtagacaggactacaggcatgtatcatcacacccagcaaatttttgtattttgttgtggggtagagatggagtttcaccatgttgcccaggctggtcttgaactactgtgctcaagcagtccatctgccttggcctccctaagtgctggtattacagatgtgagtcactgtacttggcctgaacctaggttcagagttaccaataaatgttaagtcctgtgaattccaaaatttctatgtatttaaatatatttatttaagaatttatgaatctataacctgtaagaatgcacatgacaaagagttgttttctggaagcatgaattaaggttacttcattacttcagtaatttttaaaaaaactttctgtggatttgaatgggtatcatactactgtatctgtagcttatctgtgttctttttaaccttttctctcttttgaaagagsagcaaactttattctgatattcaatagctgtcttttacattttctatagatattgcataacaattaacaaaattaagaaatgtattattgaaataaaattatcattataaaaaagatccatgcagtctcagtgagctataacataaacattatttcctcaacatactggcatccctcatgagaacttactaaaatacacagcaacagacactacggacaactcataacttggaatctcaaaaagttcagagtccactgggtaaaatagacactcaatgcagtagacattgataaaagttataataaagaaatgcaccagggctcagagagcaaaagggaaggaccaattaacactgcccaccaaggttgtcaaaaaaaaaaaaaaaaaggtaacatttggaatatgttctaaaggatcaggaagaagtctccaaaggaaagagaagtaaagactgttcccagcagaaaaaaaaattcacaacgaacactgacatttattatgtttcgaacagtgatctgtgctctggaaatagaatggtaaacaaggcacataaggtctagagttttggttccagtaagggacaaatactgaacaaagggaaaaatattagttatgagttctgtgcatgtaattaaaacaagagaacatgatagaacatgactggggactatttgagtgctagtggtcagggatggccccactggagaggtgccatttatgacaagcagcatgagccatcagagaaagggatgaaaagaaaatgtccatagcaagatgatggaatt

SEQ ID NO: 693772 - DNA, 447 bp, Homo sapiens
gcctagaattgcctgtggtcgccccagagaattctcagaaaggtcctgtccccaacaaagaggtctctgtggacataaactccctcagtgtgggtcactgtgctgcagtctgaagatggggcctctctaaactacgacgtgccaggacctcggcacccaggagaacgcaagggagcacaggcagcgtgcgtaggaagaccccaaatattccagtggcagcagccgcagcctggggctggaggaaaggtggatgctgcttcaaaaacagcccaccccgagtaacatgggatcctatcagattctggctgtagcgtgcagattccagaccaagggtcccagcccaagtctcagaggctgcccgggcaccctcctctcaggtggggcagctaggccgggactccacgmctcaccccaccatgggagccccacagaccacaccgagtttgc

SEQ ID NO: 693773 - DNA, 1901 bp, Homo sapiens
atgtgagctgaatttggccctaaactaagtcctggtggctaatgagccatgagccaaggctgagaagtggggtggcttgtgccctgcagtcgtgagaaaaggcacagggcagctctacgtggacttgggcttagcatctctgggttgctcagagggcaaagtgtcctgagggaggtaaattgtggtaaaacagtttaaaaagtgagaggaatgggagaggtgaagcttaattcctgctggttccacggtgatgctataatgcttaggagttgaaaaacgatttctctagcccataggaactcaaactcactgaaagagaaaaaacttggcattgctttagcaaaattcaagtagatgctacattccactggaataatctagaatgcatgtgctagtttcttctatactgcaggtcgcattctctggcaggcctgcttcacttggcagcaacacttttaaagagaaacggctacatctccaggttctgtgccccgggcttgcagagaaaaggaataaaattaaaacagtatttgaacttttaaaaatatttaaattgctggctcatttcagactggcgtttcttaaaataatggtctctactcaccaagccactgccaagggacccacggtggctgtcctgtatccttgggttcaattagaagaactctccttgctcatcaaggcttttcatagctgtctttcccatttatcctccacacctgtgaacttctgtcataagttctagtccagcccatcatctcgctggttccactggacaccaggcactatacttacyttttcttttcttttctttccttttcttttctttctttattttctttctttctttctctctctttttctttctctctctcccttccttccctccttctttccttctttttttttttttttgagatgggccctcactctgttgcacaggctggtctcaaacttctgggctcaagtgatccttctgcctcagtctcttatgtagctgggaccacaggtccaaaggcatatgccatcacatctggctaactttttgcttttgtgtagagacggactctcactttgttgcccaggctggtctcgaactttcaagccatcctcccacctcggcttcccaaagtgctgggattgtaggcgtgagccaccatgctctacctgtacttgcttctatttttgcattctgttagattgtgtccttcatgacgtaaagaatgcacacccagtagaatgcatttctattcttgcatgctactttgcattcttgtttacaaagcttcccctaacttcctccctccttctccacctgctcaaatatgtcaatattcagacttggacccagcccttctgttgctgactgttctggtggcaggcccttctccctgccaaacaggacctcagtgctgtttaggggtccagctctctccagctaaggggaaggtgacctggccacagctcaagataatttccaacttctaagtcaattatcatggtcccatcccctgaccatgactagctggggtgggcaggctggttggtttgtagaacatccttcaatttccaacttccaattcaatttgcctggttgtttcctcattcctcgtgattagattcagcttaaacaatttgaggtcggaatatgaataatctcttgattaaccgagagggtaactggtatttataattcctgaatcctttaaagtgtgaggagagccatagaatccatgtccttggggacatcttgtttatttttatttttacttttattttaggttggagggtacacatgcaggcttgttacatacgtaaactcgtgtcacgagggtttgcgctactggttgtttcgtcacccaagtatggagcctagtacccaatagttatcttttctgatc

SEQ ID NO: 693774 - DNA, 1901 bp, Homo sapiens
atgtgagctgaatttggccctaaactaagtcctggtggctaatgagccatgagccaaggctgagaagtggggtggcttgtgccctgcagtcgtgagaaaaggcacagggcagctctacgtggacttgggcttagcatctctgggttgctcagagggcaaagtgtcctgagggaggtaaattgtggtaaaacagtttaaaaagtgagaggaatgggagaggtgaagcttaattcctgctggttccacggtgatgctataatgcttaggagttgaaaaacgatttctctagcccataggaactcaaactcactgaaagagaaaaaacttggcattgctttagcaaaattcaagtagatgctacattccactggaataatctagaatgcatgtgctagtttcttctatactgcaggtcgcattctctggcaggcctgcttcacttggcagcaacacttttaaagagaaacggctacatctccaggttctgtgccccgggcttgcagagaaaaggaataaaattaaaacagtatttgaacttttaaaaatatttaaattgctggctcatttcagactggcgtttcttaaaataatggtctctactcaccaagccactgccaagggacccacggtggctgtcctgtatccttgggttcaattagaagaactctccttgctcatcaaggcttttcatagctgtctttcccatttatcctccacacctgtgaacttctgtcataagttctagtccagcccatcatctcgctggttccactggacaccaggcactatacttaccttttcttttcttttctttccttttcttttctttctttattttctttctttctttctctctctttttctttctctctctcccttccttccctccttctttccttctttttttttttttttgagatgggccctcactctgttgcacaggctggtctcaaacttctgggctcaagtgatccttctgcctcagtctcttatgtagctgggaccacaggtccaaaggcatatgccatcacatctggctaactttttgcttttgtgtagagacggactctcactttgttgcccaggctggtctcgaactttcaagccatcctcccacctcggcttcccaaagtgctgggattgtaggcgtgagccaccatgctctacctgtacttgcttctatttttgcattctgttagattgtgtccttcatgacgtaaagaatgcacacccagtagaatgcatttctattcttgcatgctactttgcattcttgtttacaaagcttcccctaacttcctccctccttctccacctgctcaaatatgtcaatattcagacttggacccagcccttctgttgctgactgttctggtggcaggcccttctccctgccaaacaggacctcagtgctgtttaggggtccagctctctccagctaaggggaaggtgacctggccacagctcaagataatttccaacttctaagtcaattatcatggtcccatcccctgaccatgactagctggggtgggcaggctggttggtttgtagaacatccttcaatttccaacttccaattcaatttgcctggttgtttcctcattcctcgtgattagattcagcttaaacaatttgaggtcggaatatgaataatctcttgattaaccgagagggtaactggtatttatmattcctgaatcctttaaagtgtgaggagagccatagaatccatgtccttggggacatcttgtttatttttatttttacttttattttaggttggagggtacacatgcaggcttgttacatacgtaaactcgtgtcacgagggtttgcgctactggttgtttcgtcacccaagtatggagcctagtacccaatagttatcttttctgatc

SEQ ID NO: 693775 - DNA, 1901 bp, Homo sapiens
atgtgagctgaatttggccctaaactaagtcctggtggctaatgagccatgagccaaggctgagaagtggggtggcttgtgccctgcagtcgtgagaaaaggcacagggcagctctacgtggacttgggcttagcatctctgggttgctcagagggcaaagtgtcctgagggaggtaaattgtggtaaaacagtttaaaaagtgagaggaatgggagaggtgaagcttaattcctgctggttccacggtgatgctataatgcttaggagttgaaaaacgatttctctagcccataggaactcaaactcactgaaagagaaaaaacttggcattgctttagcaaaattcaagtagatgctacattccactggaataatctagaatgcatgtgctagtttcttctatactgcaggtcgcattctctggcaggcctgcttcacttggcagcaacacttttaaagagaaacggctacatctccaggttctgtgccccgggcttgcagagaaaaggaataaaattaaaacagtatttgaacttttaaaaatatttaaattgctggctcatttcagactggcgtttcttaaaataatggtctctactcaccaagccactgccaagggacccacggtggctgtcctgtatccttgggttcaattagaagaactctccttgctcatcaaggcttttcatagctgtctttcccatttatcctccacacctgtgaacttctgtcataagttctagtccagcccatcatctcgctggttccactggacaccaggcactatacttaccttttcttttcttttctttccttttcttttctttctttattttctttctttctttctctctctttttctttctctctctcccttccttccctccttctttccttctttttttttttttttgagatgggccctcactctgttgcacaggctggtctcaaacttctgggctcaagtgatccttctgcctcagtctcttatgtagctgggaccacaggtccaaaggcatatgccatcacatctggctaactttttgcttttgtgtagagacggactctcactttgttgcccaggctggtctcgaactttcaagccatcctcccacctcggcttcccaaagtgctgggattgtaggcgtgagccaccatgctctacctgtacttgcttctatttttgcattctgttagattgtgtccttcatgacgtaaagaatgcacacccagtagaatgcatttctattcttgcatgctactttgcattcttgtttacaaagcttcccctaacttcctccctccttctccacctgctcaaatatgtcaatattcagacttggacccagcccttctgttgctgactgttctggtggcaggcccttctccctgccaaacaggacctcagtgctgtttaggggtccagctctctccagctaaggggaaggtgacctggccacagctcaagataatttccaacttctaagtcaattatcatggtcccatcccctgaccatgactagctggggtgggcaggctggttggtttgtagaacatccttcaatttccaacttccaattcaatttgcctggttgtttcctcattcctcgtgattagattcagcttaaacaatttgaggtcggaatatgaataatctcttgattaaccgagagggtaactggtatttataattcctgaatcctttaaagtgtgaggrgagccatagaatccatgtccttggggacatcttgtttatttttatttttacttttattttaggttggagggtacacatgcaggcttgttacatacgtaaactcgtgtcacgagggtttgcgctactggttgtttcgtcacccaagtatggagcctagtacccaatagttatcttttctgatc

SEQ ID NO: 693776 - DNA, 1901 bp, Homo sapiens
atgtgagctgaatttggccctaaactaagtcctggtggctaatgagccatgagccaaggctgagaagtggggtggcttgtgccctgcagtcgtgagaaaaggcacagggcagctctacgtggacttgggcttagcatctctgggttgctcagagggcaaagtgtcctgagggaggtaaattgtggtaaaacagtttaaaaagtgagaggaatgggagaggtgaagcttaattcctgctggttccacggtgatgctataatgcttaggagttgaaaaacgatttctctagcccataggaactcaaactcactgaaagagaaaaaacttggcattgctttagcaaaattcaagtagatgctacattccactggaataatctagaatgcatgtgctagtttcttctatactgcaggtcgcattctctggcaggcctgcttcacttggcagcaacacttttaaagagaaacggctacatctccaggttctgtgccccgggcttgcagagaaaaggaataaaattaaaacagtatttgaacttttaaaaatatttaaattgctggctcatttcagactggcgtttcttaaaataatggtctctactcaccaagccactgccaagggacccacggtggctgtcctgtatccttgggttcaattagaagaactctccttgctcatcaaggcttttcatagctgtctttcccatttatcctccacacctgtgaacttctgtcataagttctagtccagcccatcatctcgctggttccactggacaccaggcactatacttaccttttcttttcttttctttccttttcttttctttctttattttctttctttctttctctctctttttctttctctctctcccttccttccctccttctttccttctttttttttttttttgagatgggccctcactctgttgcacaggctggtctcaaacttctgggctcaagtgatccttctgcctcagtctcttatgtagctgggaccacaggtccaaaggcatatgccatcacatctggctaactttttgcttttgtgtagagacggactctcactttgttgcccaggctggtctcgaactttcaagccatcctcccacctcggcttcccaaagtgctgggattgtaggcgtgagccaccatgctctacctgtacttgcttctatttttgcattctgttagattgtgtccttcatgacgtaaagaatgcacacccagtagaatgcatttctattcttgcatgctactttgcattcttgtttacaaagcttcccctaacttcctccctccttctccacctgctcaaatatgtcaatattcagacttggacccagcccttctgttgctgactgttctggtggcaggcccttctccctgccaaacaggacctcagtgctgtttaggggtccagctctctccagctaaggggaaggtgacctggccacagctcaagataatttccaacttctaagtcaattatcatggtcccatcccctgaccatgactagctggggtgggcaggctggttggtttgtagaacatccttcaatttccaacttccaattcaatttgcctggttgtttcctcattcctcgtgattagattcagcttaaacaatttgaggtcggaatatgaataatctcttgattaaccgagagggtaactggtatttataattcctgaatcctttaaagtgtgaggagagccmtagaatccatgtccttggggacatcttgtttatttttatttttacttttattttaggttggagggtacacatgcaggcttgttacatacgtaaactcgtgtcacgagggtttgcgctactggttgtttcgtcacccaagtatggagcctagtacccaatagttatcttttctgatc

SEQ ID NO: 693777 - DNA, 1635 bp, Homo sapiens
aaataaaataaaataaaataaaatatgtaaaagactaccaaaaaaaagaacaaatattattctaaatggcaaaaggaggctggtaagagattgttctagagaagtagcagcccctgcatcatgaagaaacttttcctgtgaagttaagaaatttaggccatatccttcctatatttccaaaaatgtgaaggaccacttgcattagaagcacttggagtccccaaaattgacattttaaacagaaccccaggtaattccattttggggtaattttgagaatgccaacttataccaacagtaattaccagaagggtttgaactaaggagcaataaatcagatttccagagacccttcctttccattctgcctccagcccacccttccccgagtcagtccaatgcaggaccagcagggttgtttcataagtcaactgcaccatttcctatggaaaagttaggccacttggcctctcaatgctggaaaggttactggaagtggccctggttcctggagcatcatgctccatctgattcacagaacatagcaagataacatcatcctgggacagggaaaggaataaattctgggtcttgtctgaaaacctgaagctggttttgaaagtttattgtttgttgtttttgtttaaattccataataacaacaatcaaaatagttctccaaggtgatcaggaccatttttgcaaatgctggaggaagtaaccagggtagaggaaatcctctgggtgggtctcagagcctacctggagttgttttcattcagaatttggtgacatcaatctagggagggagatgggctgtctctagagatcctggtgagtaacaaccatacagagccagagagcatctcargaaacttaaaataacagcaataagaacaaagtgtccttctcataacgtggttctcaaatgggcgcactggttccatagaacttatgtttatggtttcttttgaataaacacagaaattgatcctcccaatcttaaaacttgagaaacttacatttgtctaacctgagttcttttttctcaggacaccagccatcaggcctcccagatagagtcaaggaatggaaacttacccagtcaccacatctgggaaacaccagaccccttgcccatcatgattgcctaactgctgcctgtggatcagctcttcttccttatcccctccctcattcctgttttcccacacttagttgcatttcttccctgctatatagactccgaattttagtcagctgaggagacaaatttgaaactgatcttccattctccatcgctgcagcacctgaataaagccttcttccctggcaatactcagtgattggctttctgtgcagcgagcaacaggacctagaccaaatccctggcgtttcagtaactactccatagagggcaaaggaaatgactgagtgacataatgaagcttccccctgcctttgagaacagagaaactctaggcagtcgttcttaaagtttagcacacgtcagaatcacccagtgttttaaacactgatagccaagccccattccagagtttctgattctgtagatctgggtgcagcttgagaatctgcatttctaacaagttcccaggtgatgctgatgctgat

SEQ ID NO: 693778 - DNA, 602 bp, Homo sapiens
tgtaaatacaccartcagcaccctgtgtttagctcaaggtttgtgaatgcaccaattgacactctgtatctagctgctctggtggggccctggagaaactgtgtgtggaaactctgtatccaactaatctgatggggaggtggagaacctttgtatctagctcagggattgtaaatgcaccaatcagcgccctgacaaaacaggccactcagctctaccaatcagcaggatgtgggtggggccagataagagaataaaagcaggctgtccaagccagcattggcaacccgggtccccttccacactgtggaagctttgttttttcggtctttgcaataaaagttgctactgctcactctttgggcccacgctgcttttatgagctgtaacactcaccgcgaagatctgcagcttcactcctgagcccagcaagaccacgagcccaccgggatggaacaaacaactccagacgcgccaccttaagagctgtaacactcaccgcgagggtccgcggcttcattcttgaagtcagtgagaccaagaacccaccaattccggacacacttccatggtgtagctcattgcaaggacttttctcccag

SEQ ID NO: 693779 - DNA, 2453 bp, Homo sapiens
taagatgcaaagcagatgtgactatctgaattacagttttgtctttaggagaacattgtgttaaaaagcttccctgaattcctagtgctgtcactttctcagttaatgatttattaaatacatcagagcaattagaaaaatgagatttttaaaaaatgttttccactacagctcaagtaatttaaatcactcttctaagagatgtatgttgggagaagtcataagtggaatgcacatgacatagtaaggataatgatcaatgtaagcagataacttctaatgggaaatatatacatagctttggaattacattccaaatcacttgttttcccagcatttattgtatgcaacaaacacatagaaagtggttagctgaaacaggtagtttggaaatattttaacatttttatctaaacaaatgacagattttttttaaatgaaaaatgctaagtataataaaagtgtatatttatgttctcggcagccaaatgtgctttttaatggaatttaaataaatggaatttttatgacaaaaaaagcaacagtaaaagcagtgattatgtttttcatagttcatttgccttctttgccctgcagaccttgtgtggaggaaaatgagatcccgagtgaagtctacaatgtcattgactctgaagaaggactcagagacccattggtgtttaatgacccttactggcctatgcaatggaaactggtatgatcttcagaaatagatggttctttggcagtgttaagaaatattatttttgtcatgttctaatgcagtagataggcacttttatgcactgcctgcttttatctattggttttgcagagagagacttagcaaacttttgatgaaatattactgccatcttattaatgaacactaatccttttaatttgattacatccttagggtttgatttaatctataaaagacaccagtaaaaaccccaagatatttaaatttggtgtgtgtaaacagactcattacatagaaatgttgttgccattcaggcttgaagtttttgttcttgcataacttagaatatattctatattacatcaatactgagagaacttgtctttatggattaagtggatgttagaacattgcccaacagactttttttcataatgcttattttgttggaccttttagtatcacattgccctcccatttatataagacggtaataatgaaaaggtttgagaaaagcacccttaattttgaatgcaaataagtttaaaaaaatgatgtacataccatggaaaattttataaggaaacatttaaaatgtgaagataacttggtgataatattggagagaaattacaaccttattatatgcataattagttcttcataggtctgcagattatattgtgttgtagagggtccaatgttgcaaaatgaggaaaaggttaggtgcattttatcattttaagggccatgatgagataaaacatggtaagctgttgtgctggctctttttrtgttgatcattggcagttaccaagctgactatctgacatgagctgaaaacctatgttgaaaaaatgtccagttccattttatgtagcttcaactcatctttaaaaaatgaagtgatttagaacacatgtcacgcactcctgggccagccagcttccctttctctcctcgtatgtaatatctttttttcccctttctagcaagtactttcaaaagaactctgtacattttaacataaaaaataaattatgttgggccattttggaaaaaaaatacttatttggctaaatttaacatttcaaacaaataaaaaattcaagcagaaaataattgaggactgcttcagtttcctggaggtggtataatcagtaacaatttagtgaactagagtcaatcaggattatgaaagtcaaagagaaaaagagtgatattaagaaaaaggactgaggaaaggtaactagataaggaagaagggcatgaaatatgaaaaaaaaaacctttcttttttttctttacctgaagaaacagcaaaaattaagatgagtacttgaagattacacatatgacacattgtaatttgtcacctcagaaagaatactttcttgtattggcaataaaatgtcaagcccctctataatgaggtcaagaatttcagcagacacaatagggaaaggagatggagggcaagtaatacaggaaagaagagaagaattgagtagcaagcagtcaataaagtgacagggattagaaatggagagaagtcttagagaccattaagcaatagatcctcttaaaagcagcatagaagagatcatgaaaggaaaaagcagaaaaaagaagttgtatgatgaccctatatcattttctagggcaggagttgataaacctttcctgtaaaagttcagatagtatatattcagggtttgtgggccacataattggctgtggcatattc

SEQ ID NO: 693780 - DNA, 603 bp, Homo sapiens
caagaaaaaggatatatttttggtgggatcaaaaatcacttacttgagctctgctgtcattggattgttctgattttgccagtaatcagttaatgtatttgtatcctcataatccacattttggctatcatattcactttctctgtaatatttgtatttacatataagaatcttttagatcccaacawcaaaaaaaaaactaaaaaaaggcaaatttttgttgtctcaaagatatgcaaataatgatgcaaaaatttaagtaaccaaaattttttaattgagacaaagttaacaattatctaactgaaatctaggaaaaagactggctcttccactgatctttaaaaatgtttagtatagttacctttgcttgtgttaacagtactcttctaagagtgtcagtattacttcctttcttattactcaacttctgtgtttttggttctgtagaaagaaatttaatatttaacatgtatatcaaaattacctgcttctggtttttaaaaaaccttttgttgttccaaacacttaagtaccacttgtgggtgctgtcctatgaattccccccagaatttcataatttaaaaatgaaattcaaacctc

SEQ ID NO: 693781 - DNA, 653 bp, Homo sapiens
cattccaatactacttactactacctgacataacataggaagtttcgttacctgtcatcagtgaagctccgtgatgtcagagtgtctgctgggttaagtctggcaacacatttcaaatataaatcatttaactataaatattcagaggacattcaggagacaagcgtatgtctaaagtacaatatcagcatataaattaatagratcaagttcatgaatcaagatagcatacatatattatataaaccaattaaacacgacagagttcaaacacataagccaacatattccaccagctaagagaacaatcaagtcccctgagaaacaagttggggttcttgcccacttgggcatacaggacattcctgtaccacattcaccccacctaacccatcatgtacaataaacaggaaaattacatacattcattctcaagcttgacttagataatctatccagccctgaccaagatttctatagtcacagcacagaacacaccacctcaacgtgggaaagtgtataaacatgaaaataatgagcaggctatgccaattaaaatacttcaatgtaaatataaagggatttccactccaactaaaagtgaaaactatctccagaaaaagagaaaaattccatttctaacagatcttgtg

SEQ ID NO: 693782 - DNA, 1254 bp, Homo sapiens
gacatctgtattgtactgagttctccattttgcctataaaattattagatttactcctatatttgatatttgtgatgccatttgaaaatagtatataaatatatataactattttttccttattgctagtttatagaaatatagagttgaccctcatttatttggttttctctcttcctggtcagtttcactggctgtcaactgtattagtctttttaaggaaccagcttttctctttgatcttctctgttatgtttgtcgtccctttgtggctgctgttcttagaaaataactgcttacaaggctgacccttggctggtgtctggaaacttagatttcagaagggttcccaccattcyctaactgatgaatagttaactggacctacactgttgtgtgttcatgcaatgttgtttatgctgaatactagcactccctctaggagtctggaattttggtatgtgttaggcagagggtacctgtctgaccagccctcagtaaaaacttgggtactgagtctctaataagcttcattgatacacaacacttctcacgtgttatcacaattcattgccggaggaattaagagtgtcctttgtgattccgctgggagaggattcttggaagcttgcgcttgatttcttccagactatgccctgtgcccctcttccctttgttgatttgctttgcatccttttgcataaagattgaagaaaaaatcgtaatggaagttagcaaatacgttgtaatgctcataaaaatactacatatcaatatatgaaatacaactacagtcatgcttagaggaatgtatgatgggtttaatgcatttaatgtatagcattaaatgcatgtattataaaggaattaagactgaaaaccagcgaactatgcatctatcattttttcttttattttccatttttttttttttttgatacagggtcttgctctgtcgctcaggctggtgtgcagtggcatgatcatagctcactgcagccttgaactcctgggttcaagtgatcttcctatgtcagtctcccatgtagctgggagtagaggcatgcatcatcacatctggctaatttttttttttttttccgagacacagtcttgctctcccgcccaggctggagtgcagtggcatgatcttggctcactgcaacatctgcctcgtgggttcaagcaattctcctgcctcagccccccgagtagctgggattacaggcgtgtgccaccacgcccagctaattt

SEQ ID NO: 693783 - DNA, 661 bp, Homo sapiens
ttagctaagcagtgacccatagagaacattcaaatatgatcccttagtatccctggataaaacccagaaacagaccttaatgaatagatttccacacaatctggaattcgcactcttgaggtagagctttgcccatgaaaacatgattcttaacatttaaaaacatgaataaatatgctcaggcttaaaaaataaatgcttattttcactacctccagaatctcagcaacagaaactttctgagaatcaagcctgctcattgaaagacacaccttaaaccaaatttcttatttttgataaaatcaaccttgcctttccttctctgagcactagaaaacactgtctaggtggtgttctctcttactgtgrtaagcaataaacttagtatgctctatcaacacgtcatgctgatgtttagggagctgatattccaccaaaagtagtgctcagatgatttttttggatttgaccccaaaagcacaggcaacaaaagcaaaaatagccaaactggattgcatcaaactaaaaagtctctgtacagcaaacaacaaaacaaaaaagcaatttatagaatgggaaaaaaaatttgcaaaccatacatctgataaggggttaatatctgaaatataaaaggcactcagacaactcgatagtaagaaaa

SEQ ID NO: 693784 - DNA, 2829 bp, Homo sapiens
gatgggaattgcttttctagattttgaatatatatttacagatactaaaagtagatgaagacaagtaattaacagcactctgatagctttaatgatagaaacagatgttcacatttaaggcatcaaatctgagtggttatcattgaactgctgtttgtgacggtgttatggtcgtctttttcataggagagaatattgtaatgcagattattgtgattgtctgaaattatctccacggctgacaatagttattttttttcctttttctactctcttatttgacagttaaatggagactgcatttaacaagcacaattatgtcctctcttgtctattatgcagcatttaatcagaattgcttaaagaaagcctacagaggcatattcaagctcaagttcctcatttccaccaaaaccaaagaaaaacattctaccaattatgtttcttaacatttcatgactaaaagctgagctgtatgatcactctataaaatgaaattaggattaagttttgtaaaaatagaatgtaggaacttaatctgaacattctgactcaggcctagtttgattttttttttccaaagaaaacccaaaactccactccatagcatagctttcttacttttaggaaataataatttggttatatccaatcttacacattttcaattttcactgggccagagtatccctcctataagtgacctaagcatagcatttctttccattcctgagttcatgtttctagcagcaatggattttagttcgattttagttgttaagctttgaatacacatgtagatatatgtttttggaaatgcagaaaagaaaagcatataataaatttaccaaaatttacattttgaagtattttttcatattattcaacaacctattacttaaagtttcatattatatctgtataaacattgtaaagtttgtttagacacttccccccttgctagacattcaatttgtttctaatttttctctattattaattacactgatttaattttatgtagaatttttctctagctttgaatattctttcagaggggagttttaccattgctttactgtattaaagattaataagtctaaaatcttataatatatactaaaaattgttcttgaagaagtttttgaaatctagtcttccaaattgtggggaggggtgcagaatcagcaatttaaaacagaggagatatctcgttatttgaatgtacatttccattcagtatactcaatatattaattagctatttaagtttttctctcagttattgttttctctctttttttcttttgacaattgattatttcccattataggtaaaaggacatattttataaaaaacattgacactactaattatgagatatttataaatatttctcactggtaagtttgtctttttattgtgccttaatatgtgtatttgtatttatggatattttccattgttagtcaattctactaaatttgtattatgtacttattccatgttttccattattaagtattcatgcttcactgtgtttttgtagaaacattaaaaattttacacttcattcattaaaaaattttaaactgagacaagtatttctgcctactcttccaacctattaaaaacaagctttttatcataagaataaaaatattgtcactcaatctgactttggtagtttcagaaaacacccctgacaatatttctaatggtagatatttttaaaatttcgccattcgatattgtctgtcacagatttaaccatccatattataagtctataagccccaatgtttctattataatagtaaaatacattcttgttccctacttagttacctacgtttagaaacagatgccactttgtgtgaaaaacaaatgcaccaaacaaatagattttattcaggctattgcaataatgtaaatgttcattaatgagaaatatctgaaagaaaagaaaagggagcctggagattaatcgaagcagatatataagggaggcattcagcaatcttatagaaggcatgagataagatggaaacaggttttatcttggacaatattaggtcatggtggtcctttgcagtgattagctggtttctaagcacgaaaggtttgggtaatgggaagtatttttaactgttgctgttttccaagaacatggaactcaggtgaagcccaacactggcagttactatataatgtcatgtgtataaaagatactttcaagttttgactgctgaattctgtaatcatttgttttgttgaggtagagacatagacaaacctgatgattaattacaaacaacccattttgatattttcataattaaaagattcactattttttctacccacaaggtgatagcctgaagragttgtttttcaatgaactatagctattcagaaaacatctaaaaatcttcaaacaccgggaaattatttccattgcactagtccaagaaattccctaggggatgctaagtactttgttgaagtactcaagtgaagaaagtatgttcagaagacaggctcattagtaggcaaatcgtaaaaggagcagctaactcacattttttgtttgtttgtttctcatcataatgaaatcgtgcctgaaaaatatagccaagtgactaattgtggctgaaattgggcaattactcttcaaattagccaaatgtaggtataattattattttaataatactaattctcagtggtaatttgcaaaggagggcctacatttgctggagacacaagaactccagctacttagagcaaatataatttgatgtgtatacacgtgtatatgtatagac

SEQ ID NO: 693785 - DNA, 1864 bp, Homo sapiens
gaatttttttgctattcatcaaaaatctatttatcatctagtaataaatgataaattaattatttaaataccatggtagttagtattatataaaaagacaaataatccctctaaaaatgttttatctttacctgtcacattgcacttaaaatataactctgacaaaaggcaaagacctaacttaggtatatttagcacactgaagagaaacatctaccttaaaatatgacttgctaacatttacaacatccatgtaattgtggtaagatataaataatactttgagggatttgaaatatgaatgaaatatgccagaatttcagttttytgactctcaggccagaagcctaatcattgttcatgaggaatgctgttgaaattaagaacttagaaaaaaaaaaaaaaagtatgccaaaagtgacaacatataaacacagtcatgagccacatacgacaggtcacatataaaatgttggtcccataagattacaatgccttatttttcctgtcgttttctatgtttagatacacaaaaaccactgtgtcacaattgcctacagtagtcagtacagtaacatgctgtagaggtttgtagcctaggagcaacaggtatatcatatagcctaggtgtgcagtaaaggatgccatctaggtctgtgtaagtacactccttgttgtttgcaaaacacaaaatcacctaacaatgcatttctcagaatgtaactccatcattaagtgatgcatgactgtactacaaatattattatgtatttacatgatgatttttatatggctaattcatactattatatatttatgtgactaacacataaataaatatataaataaaaatctcaacatgtcagtggtgtaagagtatgataaggcttttgggatagcatcagaatgatacccttaaagttgtgattattttatagttgtgtcaactatgaataaagacatctctagagacaaagaaaggaaataatcctttgtagccttagcaaagtcatattttctaaacacttgttatatattaaagtcatagtttttgaaatatattttgtcatctttgttttgatacttgccttgagaaactccaaacgtttctttacatactcagaatcttgaacattcacaatctcaatatccttcacagatttgctcttctctgatacccaatctgagaatgacttaagtttatgcagaaattcttcatgggaaactgctagtttagactagaaaaaaaaattgtgcattcagttatctttccccaaaatgtcaaattcttacaaataatgactgtggtttaagagttagcactctaaaactaaaatactccagcttatgactaaatcctcaaataataaaattttcttcataaatcaaaattttgacattttatgcctaccatttcagagtcgatcgcaagcatgatctgtttcgttctttctgaagacacgttgctgagggaagagaaggcggtcttcaaactctggtggctaatactcaattcttcaacatggcctctgggaaagtcactgggaagagactttaaaaactcttctgccaacttcatatcttttcttaaaataacagcaattggagctaatcccaattcaaatgtctgcaaagaaatatatcccggacctatttactatttagtgaaaaacccaaatataaacatgaaacatagaagtgttctgcttctttttcccagtcatacatcagctgactaccatccataaagaggcagtagacaattcttacctccaactgtctaagttgattcttcaaagcttccaagttgttatccagagattcctggttgtctaaggggggtttcatatcttgaagcaatgtc

SEQ ID NO: 693786 - DNA, 1137 bp, Homo sapiens
tgccttttcccagatgcaggaacaccatttcacagagaaagagcacatagaacacaatctataactagtgaacatttttctccatatctattaggacacctttctttagaatttacctgtgagacaggaagcaaggacatgaatatcttaccaagtgttttctggatatcattcttggctggaagtaaagatcccctggcatctaaaagcacttcagccgttttcttcagtttctctacagcaacctgctgacttgatatctgtccttgcaaagcctgtaggattaaacgcttttcaattatactcagcaggactaaataatagatttctaatgtggaaaaaatgatttctaataagataaagtaaaattggacagaataaacttttcatcataccaactttcatcatcaacttactccagagttcttcgaataaggccagttataaagcagcattagcaaaagcatcagccagtctggataacacaaattaagttttgaaataaacctttgagcatatgttcataataatttccctggttcctgatcatacaaccctctaactttatacccttaacccctacttctaggctttgtacaataccccaactactactaaaacaaacaacaaccaaaatttgagaccacttctgactccaggaaaggagataaataagctcgcccaaatcagtagatcctgactcaatamtgagtcatgtttatttctgttaattcaataaaagttactgaacatctaacaaattcaaaaagccttgctacattttgtgaatatacaaaaataaaaacagacacaaagcttactttcagggattttatggttcgaggcaggaagtggtaagtgccacaggtgagtctgaaaaaatgctgctggaagttaacaggaaaaaaatgggagggaaatgagggccacctcaatggtaatgacactgagatggctccttaagaaagtgtggatttgggagaaccactccctgcagaacaaacagaagacacaaagatgaggacagaagaatcacaggagaaggggagagtcccatccagtttgacaatgcttatgggtgagtaaatagaaataggcctggaaaggcttcaaacatcaggctaaggagtttacatt

SEQ ID NO: 693787 - DNA, 588 bp, Homo sapiens
tgtatataggcacgcacatgcaaatcacctgtgcacacgtgcatgcacacatacacatccatgtacataggcacacacatacaaaacacctgtacatatgggcatgcatgcatacacatccatgtacataggcacacacatgcaaaacacctgtgcacacgtgtacatatgcatacacatccatatacataggcacactcatgcaaaacacctgtgcacatctatgtcacacacccatgtacacatgcatacatacacatccatgtacataggcacacctatacccaggacctgcacacatgtatgtcatacacacccatgtacacacatgcacacatattcacatctatgtacgtagacacagtcatacacatctgtcatatctgtcacatccatgtgcacatgtgcaagcatgtatacacatctatacacaggcacatacatgcaaaacatttcatatttgtcacagccatgtacacgtgtgtgcttatgtatatatctatgtacataagcacrcacttgtaaagcacctatatacacatacttatttacctacaaacacccatgtacacatgtgcatgcacatgt

SEQ ID NO: 693788 - DNA, 660 bp, Homo sapiens
cattaacatctatgaaatcagtttgcattttttttttttgaggcggagtctcactctgtcacctaggctggagtgcagtggcacaatctcagctcactgcagcctctgcctcccgggttcaagcgattctcctgcctcagccttcagagtagctgaactacaggcgcgtgccaccacacccggctaatttttgtatttttagtagagacggggtttcaccatgttggctaggctggcctaraacccctgacctcaagtgacccgctcgcctcggcctcccaaagtgctgggattacaggcgtgagccaccacgcccagcccagtttgcatattataatcaatggtgagtgatttaataggtagcattttccttcactatttggtaaacgatgcatcttacaatcaacggggtcttagatttgatgaaatatactagttcatttaaactagataatataaaggccactttctgtgggagttttactcttctttctgaacggtgggccacctctacaggacagatacgctgaagaaggtagacaagtccaggtctggtcagggacatatgagccattctgaatcttcagaatggaagtggtttaatacagaatcagaagcttatatggctcctggaaggcaggggctaaggtgagggaggaa

SEQ ID NO: 693789 - DNA, 613 bp, Homo sapiens
cacccacccacctatccattcacctacccatccatccatccakccatccatccatccatccatccatccatctttccacccacccacccacccacctatccatctacctacccatccatccatccatccatccatccacccatccacccatttacccacccacccacccacccagccagccaagtccttggtgctgggacacagcagtgatgggctaggaacctgccaaacacaccctcacatccttcccaggaacacatccatgctgtgatagccaccgaccccttccacccacccctctgtcctctgcaacaggtcctcccccagcttgctcctaacttggaacaaggctcagacctacctaacccgttggcagcccacactgacccctccacacagacagggggcagtgtgggcccatggcaggtgtcactggagccgggccatggaggaggcggaggggcctcccaggggcttctgagtgctcaaaaaggccaaccttgtgggagaccacccaccctcggcccacaggctctatgcctaaaccaacaacttgcctgttttgcgtatatttcaccatttagtgtcaataaaggtgcctacatatacctct

SEQ ID NO: 693790 - DNA, 2967 bp, Homo sapiens
catgattagaactatgtgacattttggaaaaggcaaaactacggacatagtgaaaagatgagtggttgccaaggggtcagagagcctgcaggaatgaaaaggcagagaatagaagattttagattcatgaaactattatgtattacaccataatggtggttagatgtcattatccactggtccaaacccatagaatgtacaacactctgaatgaactctaaagtatggactttgggtaatgatgtgtgaatgtaggtttaattgattttaacaagtgtttcactttggtgcaggatattgatggtgagggaaggtgtacatttatgggtacagttggtatatcagaactctgtgttttctgctcagtttttctgtgaacctaaaactgctccaaaaactaaagtctactttcaaaaaaattcttaatataatttttttcttatccctatacatgacagaaggattccaaaataatccggaaaagtaaataaatgagaaagtattttaaatagtaaaaaacaaattaggaagataattttcctaccaaatactaaaacatatttttagtaaatatcaacaaaatgatgcaatatgtttttaataatggacaggcagatcaactaactcaaatgtctactcaaggtctgtatgctttgtggtctaaaatgttctacaaaattcatgctttagaaacgtaatccctactacaacagtgtttggaagtggggcctaatgggagatgcttaggtcacgagaacactgtcttaatgaacggattaatgccactataaaaagggcttgcaggagtaggttttaccccttccatcttctgccatgtggggctgcagtaagaagaccctcaccagatgcaggttttttacctttgacttaccaggctccggaactgtaagaaatagatttctgttcctcataaggtattctcaggtattctattagcacaaaatggactaagacactcataaaatagcaccgttaataaatacatgcataatatacaaaatgtcataaaaaacaattactgaaaaaacagaagaatttcactctttaaaaaagacgcaaattatacaccaaagtaaattctagatgtataactattttcttcagaaaaacaaaagaaacaatttaaagaaagtagaaattaaaaataaaagaatgtaataaaatagtttatgttcttatcaatttattctacttctagggatccagatatgggacataaatagagatgtggatattttgcatgtataatattgtcaattttaacaacatagactataaagggtaatggtcctgtaatagggaaatggttaaataaatgttggcacactcacagtatgtaatattatactatcattaaaaatactgtataggcacacacagggctgaaagaaaattaactatcataatacctgtcccttaattcttgactgtgaaaatgaattattttatttccctcttttctatgttgtacaaatgttctcagaagtatacacttttttttataatgaaccacaataaaaatatcgttttaaatttttttgaaataaggaatacctcaattatagcagtagcaatgaaataaataagagaaaaatattgtacaaattaatgcagactagaattgtggggtcatgaagctcatttggcttgggggccaagaaagagaaaaaagtaaaacataattccaactttctcagtctgggtaattgaaaggatattgacatcttaaataaacatatagattcacaaacatattgttttatttatttttagaagtaatgatatgttcacagtgaagattgttaattttacttcaaacttgaacttgcaatgccagtggaacattcaggtaaaatattgcataggcctttaaaaattctgtttaaaattctgttatttttcataataccagatatataacacagccttttgtaatatgatttctataaagaattaaaatttagttttatatcatattgttctcttcaggatattacagaaaatttgactatcattttatgtcatgttcattgattatattctggctaagacatcctccgactattcagatatttgagagaagaatttcccttgaaatctttcagagaaggacccatgaaatttattcctctgacccctgcatgcttttcaaatatgtacctaagaaaaagagatacttcacagcagttttgcgcttttagaaacttatatagaattcaaaacataaatagaatatcaataacgttcagaaatgtgtttcacattaaaatagaaatttgaaagactcaagtcagcttgaaatgagtagctaatggacttcattttgtattcagaaagaagttytgcttcaactatctttaatgcaagatacatagttaaattagagtgtttccttttcctgaaggaggcacatctttggtaaccaaaacaatgcctctgggatctcctccaaaatggcagccattatgtaacaaattccaaaagagacaaaaagcagctggtatcttctgaagaggttaccttagagatttcatcgaaatccagggatgcctagaagcagttagttgcgaacgaggacaatttattgttccatgtaaagcaagagatttttttttcccggagaacatttttgttaataattttatacactttgggtttctgagggatcttcagagtgaatattgcagcaaatcaagtagagattttctttttaattgtggcaagaacactttacgaggtacgtacccaattagcagattttaaaagtacaatatagtattatctatagaaacaatgttctacagaaaatctctagaacttatcttgtataactaaaattttatacccagtaattagtacctctacataccaccatcctggccactggctaccactagtctactattttcttttatgagattgactattttagataacttcatataa

SEQ ID NO: 693791 - DNA, 2967 bp, Homo sapiens
catgattagaactatgtgacattttggaaaaggcaaaactacggacatagtgaaaagatgagtggttgccaaggggtcagagagcctgcaggaatgaaaaggcagagaatagaagattttagattcatgaaactattatgtattacaccataatggtggttagatgtcattatccactggtccaaacccatagaatgtacaacactctgaatgaactctaaagtatggactttgggtaatgatgtgtgaatgtaggtttaattgattttaacaagtgtttcactttggtgcaggatattgatggtgagggaaggtgtacatttatgggtacagttggtatatcagaactctgtgttttctgctcagtttttctgtgaacctaaaactgctccaaaaactaaagtctactttcaaaaaaattcttaatataatttttttcttatccctatacatgacagaaggattccaaaataatccggaaaagtaaataaatgagaaagtattttaaatagtaaaaaacaaattaggaagataattttcctaccaaatactaaaacatatttttagtaaatatcaacaaaatgatgcaatatgtttttaataatggacaggcagatcaactaactcaaatgtctactcaaggtctgtatgctttgtggtctaaaatgttctacaaaattcatgctttagaaacgtaatccctactacaacagtgtttggaagtggggcctaatgggagatgcttaggtcacgagaacactgtcttaatgaacggattaatgccactataaaaagggcttgcaggagtaggttttaccccttccatcttctgccatgtggggctgcagtaagaagaccctcaccagatgcaggttttttacctttgacttaccaggctccggaactgtaagaaatagatttctgttcctcataaggtattctcaggtattctattagcacaaaatggactaagacactcataaaatagcaccgttaataaatacatgcataatatacaaaatgtcataaaaaacaattactgaaaaaacagaagaatttcactctttaaaaaagacgcaaattatacaccaaagtaaattctagatgtataactattttcttcagaaaaacaaaagaaacaatttaaagaaagtagaaattaaaaataaaagaatgtaataaaatagtttatgttcttatcaatttattctacttctagggatccagatatgggacataaatagagatgtggatattttgcatgtataatattgtcaattttaacaacatagactataaagggtaatggtcctgtaatagggaaatggttaaataaatgttggcacactcacagtatgtaatattatactatcattaaaaatactgtataggcacacacagggctgaaagaaaattaactatcataatacctgtcccttaattcttgactgtgaaaatgaattattttatttccctcttttctatgttgtacaaatgttctcagaagtatacacttttttttataatgaaccacaataaaaatatcgttttaaatttttttgaaataaggaatacctcaattatagcagtagcaatgaaataaataagagaaaaatattgtacaaattaatgcagactagaattgtggggtcatgaagctcatttggcttgggggccaagaaagagaaaaaagtaaaacataattccaactttctcagtctgggtaattgaaaggatattgacatcttaaataaacatatagattcacaaacatattgttttatttatttttagaagtaatgatatgttcacagtgaagattgttaattttacttcaaacttgaacttgcaatgccagtggaacattcaggtaaaatattgcataggcctttaaaaattctgtttaaaattctgttatttttcataataccagatatataacacagccttttgtaatatgatttctataaagaattaaaatttagttttatatcatattgttctcttcaggatattacagaaaatttgactatcattttatgtcatgttcattgattatattctggctaagacatcctccgactattcagatatttgagagaagaatttcccttgaaatctttcagagaaggacccatgaaatttattcctctgacccctgcatgcttttcaaatatgtacctaagaaaaagagatacttcacagcagttttgcgcttttagaaacttatatagaattcaaaacataaatagaatatcaataacgttcagaaatgtgtttcacattaaaatagaaatttgaaagactcaagtcagcttgaaatgagtagctaatggacttcattttgtattcagaaagaagttctgcttcaactatctttaatgcaagatacatagttaaattagagtgtttccttttcctgaaggaggcacatytttggtaaccaaaacaatgcctctgggatctcctccaaaatggcagccattatgtaacaaattccaaaagagacaaaaagcagctggtatcttctgaagaggttaccttagagatttcatcgaaatccagggatgcctagaagcagttagttgcgaacgaggacaatttattgttccatgtaaagcaagagatttttttttcccggagaacatttttgttaataattttatacactttgggtttctgagggatcttcagagtgaatattgcagcaaatcaagtagagattttctttttaattgtggcaagaacactttacgaggtacgtacccaattagcagattttaaaagtacaatatagtattatctatagaaacaatgttctacagaaaatctctagaacttatcttgtataactaaaattttatacccagtaattagtacctctacataccaccatcctggccactggctaccactagtctactattttcttttatgagattgactattttagataacttcatataa

SEQ ID NO: 693792 - DNA, 2967 bp, Homo sapiens
catgattagaactatgtgacattttggaaaaggcaaaactacggacatagtgaaaagatgagtggttgccaaggggtcagagagcctgcaggaatgaaaaggcagagaatagaagattttagattcatgaaactattatgtattacaccataatggtggttagatgtcattatccactggtccaaacccatagaatgtacaacactctgaatgaactctaaagtatggactttgggtaatgatgtgtgaatgtaggtttaattgattttaacaagtgtttcactttggtgcaggatattgatggtgagggaaggtgtacatttatgggtacagttggtatatcagaactctgtgttttctgctcagtttttctgtgaacctaaaactgctccaaaaactaaagtctactttcaaaaaaattcttaatataatttttttcttatccctatacatgacagaaggattccaaaataatccggaaaagtaaataaatgagaaagtattttaaatagtaaaaaacaaattaggaagataattttcctaccaaatactaaaacatatttttagtaaatatcaacaaaatgatgcaatatgtttttaataatggacaggcagatcaactaactcaaatgtctactcaaggtctgtatgctttgtggtctaaaatgttctacaaaattcatgctttagaaacgtaatccctactacaacagtgtttggaagtggggcctaatgggagatgcttaggtcacgagaacactgtcttaatgaacggattaatgccactataaaaagggcttgcaggagtaggttttaccccttccatcttctgccatgtggggctgcagtaagaagaccctcaccagatgcaggttttttacctttgacttaccaggctccggaactgtaagaaatagatttctgttcctcataaggtattctcaggtattctattagcacaaaatggactaagacactcataaaatagcaccgttaataaatacatgcataatatacaaaatgtcataaaaaacaattactgaaaaaacagaagaatttcactctttaaaaaagacgcaaattatacaccaaagtaaattctagatgtataactattttcttcagaaaaacaaaagaaacaatttaaagaaagtagaaattaaaaataaaagaatgtaataaaatagtttatgttcttatcaatttattctacttctagggatccagatatgggacataaatagagatgtggatattttgcatgtataatattgtcaattttaacaacatagactataaagggtaatggtcctgtaatagggaaatggttaaataaatgttggcacactcacagtatgtaatattatactatcattaaaaatactgtataggcacacacagggctgaaagaaaattaactatcataatacctgtcccttaattcttgactgtgaaaatgaattattttatttccctcttttctatgttgtacaaatgttctcagaagtatacacttttttttataatgaaccacaataaaaatatcgttttaaatttttttgaaataaggaatacctcaattatagcagtagcaatgaaataaataagagaaaaatattgtacaaattaatgcagactagaattgtggggtcatgaagctcatttggcttgggggccaagaaagagaaaaaagtaaaacataattccaactttctcagtctgggtaattgaaaggatattgacatcttaaataaacatatagattcacaaacatattgttttatttatttttagaagtaatgatatgttcacagtgaagattgttaattttacttcaaacttgaacttgcaatgccagtggaacattcaggtaaaatattgcataggcctttaaaaattctgtttaaaattctgttatttttcataataccagatatataacacagccttttgtaatatgatttctataaagaattaaaatttagttttatatcatattgttctcttcaggatattacagaaaatttgactatcattttatgtcatgttcattgattatattctggctaagacatcctccgactattcagatatttgagagaagaatttcccttgaaatctttcagagaaggacccatgaaatttattcctctgacccctgcatgcttttcaaatatgtacctaagaaaaagagatacttcacagcagttttgcgcttttagaaacttatatagaattcaaaacataaatagaatatcaataacgttcagaaatgtgtttcacattaaaatagaaatttgaaagactcaagtcagcttgaaatgagtagctaatggacttcattttgtattcagaaagaagttctgcttcaactatctttaatgcaagatacatagttaaattagagtgtttccttttcctgaaggaggcacatctttggtaaccaaaacaatgcctctgggatctcctccaaaatggcagccattatgtaacaaattccaaaagagacaaaaagcagctggtatcttctgaagaggttaccttagagatttcatcgaaatccagggatgcctagaagcagttagttgcgaacgaggacaatttattgttccatgtaaagcaagagatttttttttcccggagaacatttttgttaataattttatacactttgggtttctgagggatcttcagagtgaatattgcagcaaatcaagtagagattttctttttaattgtggcaagaacactttacgaggtacgtacccaattagcagattttaaaagtacaatatagtattatctatagaaacaatgttctacagaaaatctctagaacttatcttgtataactaaaattttatacccagtaattagtacctctacayaccaccatcctggccactggctaccactagtctactattttcttttatgagattgactattttagataacttcatataa

SEQ ID NO: 693793 - DNA, 572 bp, Homo sapiens
cattttggctattgtgaataaatgctacaatgaacagtggagcacgaatatctctccaaggtcctgatttcaattcttttrgataaagacccagaagtgggatttctggatcctacggtggttctatttttaattttttgaggaatccccatataccgttcttcatagtggctgcaccattttgcattccaccaacagtacacaaaggttccaatttttccacatccttaccaacacttgtatttcacctcttcttttacagggagaataatagcagatctgttaggaaccttcttgtcttcccaatattaagcatacaaatctatccccgggtctatctgtgttagatgtgatcaatcaggactcagcatccattctttccagaatctaaaacgctaaaaatgtatttccgcctggcgtggtggctcacgcctgtaatcccagcactttgggaggccgaggcaggtggatcacctgaggtcgggagtttgagaccagcctgaccaacatggagaaacactgtctctactaaaaattaaaaattagctgagtgtggtggcgcatgcctgtaa

SEQ ID NO: 693794 - DNA, 572 bp, Homo sapiens
cattttggctattgtgaataaatgctacaatgaacagtggagcacgaatatctctccaaggtcctgatttcaattcttttggataaagacccagaagtgggatttctggatcctayggtggttctatttttaattttttgaggaatccccatataccgttcttcatagtggctgcaccattttgcattccaccaacagtacacaaaggttccaatttttccacatccttaccaacacttgtatttcacctcttcttttacagggagaataatagcagatctgttaggaaccttcttgtcttcccaatattaagcatacaaatctatccccgggtctatctgtgttagatgtgatcaatcaggactcagcatccattctttccagaatctaaaacgctaaaaatgtatttccgcctggcgtggtggctcacgcctgtaatcccagcactttgggaggccgaggcaggtggatcacctgaggtcgggagtttgagaccagcctgaccaacatggagaaacactgtctctactaaaaattaaaaattagctgagtgtggtggcgcatgcctgtaa

SEQ ID NO: 693795 - DNA, 2371 bp, Homo sapiens
agcagcctgggtgacagagtgataccctgtctcaaaaaaaaaaaaaaaaaactgtacacattttgttaaaaatctgtacatattttgtgcattttttcttttgtttttctgtgagacagtcttgctctgtcactcaggctggagtgtacccaggcaggagtaagtgcagtggcacaatgtacagattattattattattattttgagacagggtgtccctctgtcacccagcctggatgcagtggcatgatcatggcccattgcagcctcaacaccccagcctcaagtaagtctccacacttcatggctcactgcagcccaggctaattaccattattattattattattattattatttaattttttgtagagatggggtcttgctatgttgcccaggctcgtcttgaacaggggatccttacaccttgacctcccaaagtgctaggattacaggcatgagccactgtaccctgccaccttctgtatttaagtaagtctgggggaaattttttggtgagacactgggttgtcttatgcttgttggagacaactctttaagggcctcaattgctaatgtctcatcatgggaatttaagaactgctaagaaacatcttcatcagccccacgaaaccagatggccacacagactctaacatggcaaatctgaggcttcctggggtcataactgggatagtgagttacagattcagaccatgactgggtgttgtggcttacaactgtaatcctaatgatttgggaggcctagatgggagaatcccttgaggcggggagttcaagaccagcctgggtaacatagtgagaccctgtctctacaaaaaattaaaaaattagccagccatggtgacatgtgcctgtagtcccagctactctggaggctgaggtgggagaattattgcctgagcccaggaggtcaaggctgcagtgagccaaggtcacaccactgtgccccagcctgggcaacatagccagaccatgtctcttaaaaaaaaaaaaaaaaaaggccggcgcagtgcctcagcctgtaatcccagcactttgggaggctgaggcgggcggatcaggaggtcaagagattgagaccctcctgactaaccaacatggtgaaaccccgtctctactaaaaatacaaaaattagctgggtgtagtggcacatgcctgtagttccagctactcgggtggctgaggcaagagaattgcttgaacctgggaggcagaggttgcagtgagccaagatcgagccactgcactccagccactgcactccagagcgaaactcagtctcaaaaaaaaaaaaaactagattcaggccactacrtctgcaagacatcagcatttgagaaatcgcttgtctccatggcctggcactggttttcatcctggtattagaaatgcatcagtgctccctggggaaggggccagtttcaccagcacctgccccatgagctgtgaaaatgtgcattctaagaaggagccagacagggcccgagaccctccgtgacccatggcccgtgataaaggtgttggaacaatcgtgccaatatggccacaggaagcatgattgttctctccttgcgcattgcaggggctggaggttgaaggtgtgacctgtgctgttgtcccaggagccggggctttctcagaagcccttttcttgtgatgcccaaacaaccacgcagaaaatgctaattggttaccctccaaaacaacagtgaaaaatgatgctttaggcttcaatagccccatcacagctttcatctcaccaagaaaccctaggccaagcttgtgcaaccctcagcctgcaggtcgtatgtgacccagaacggctttgaatgtggcccaacactttcttaaaataaaacattatgagatgttttgtggtttttttttgttttttttgttttgttttttagctcatcagctatcattagtattagtgcattttacgtgtggcccaaaacaattcttcttccaatgtggcccagagaaaccctgcctgggcttttccgatttagccctcccacatttcccagagcaggacagtccctcacaccagtctcaaaggccagcagggcttttcctcacagactgagagctatggtcactaaagtgttcagaagtgatgataacataatcaagactcttccttagggcttgagggttccagcaaacatctctgccatctgtctgcctgctttttctgtcacttctgaaattctggtatcatgcccgtggtcaaagcaactaacttctgtggctactagaactttcttcctgcttttctcactctgcacttcctgctgctgtcaatgaaactcagcttcttattcccaggcactctcagagtga

SEQ ID NO: 693796 - DNA, 599 bp, Homo sapiens
ccttggatgcagaatacacttttttggctattttaagttgggtacagtggaaattgtctgtaacattaggtatgaccagaggcacatattataatacaattgtaaataggagcagcaggaaatggctacaaattatgattctagaacagtgcttcttcttctcgatcttaaatgggcattccaatcacctgatgatcttgctaaaatgcagatcctgattttccaggtctagattggagcctgagatcttttgtttctcacaagctcctaggtgactgcccgtgttgctggtccacagaccatacttagggtagtaaggctgyagagcagtggttctgaaagtggagtgcccagaagcaatctgctagtgaactctcaaataattctgatgcaccctgagtttgagaacctctattctaaatcatagaaatgtttatatctttggtaccataaaccaaatgttcacccttcattaaaagtgaaagaaggcaaagacgtgaggtctaatgaccacatcctcctgaacagttgtttaatgtatgtatcttcctgaaatagctgttttacaagacaagggagaagttaattttcctaactga

SEQ ID NO: 693797 - DNA, 1253 bp, Homo sapiens
tcccacctccaacactggggatcacatttcaatatgagatttggaggggacaaacatctgaactatattagaatatgttatcccagagagaacttgaattcaacagagaggtgacaggacacattgaaagcaagaaaggaaaaaataaagaggcagcctgcttggcagggattgcctgggtgctaaaagtgatttcccagcacgaggaaaggatgagtgagagacttctggcagctaacgttcccatagtggaatcatgtaatcctggtcacgggagaaccctttgaccctcccaacccctgaaattaacataggtagctgccaggagactgtgggatgggactgtactagggagagagcttgcaccgggttccacaccctatctgagacttaagtggttacagcaaagtgctattatcaaacctagcctttggcagactgcacactgccctgtggcccagtggtgccagaattgagatgttatggaaactcaggctactgctgctaaaactagagaatgagctgartgtgctcctggggctggagctaagaagcaagaaaagtgtgggctgcagctcctgatgccaggaaataagcactaccaggattgagactgggacacaagtggggcatgaattgctgctgggacgttgtcgtgtgctgggtgggggctcctgcagctgggatggaagagcgagctaggcatgggctgctgctaccagggctgggggaaagcaccaagtgtaagagtgatgcgtgttccccacatgctggttcaggctgtggccacgaacgatggccgcactctctctagtggcgttcctcagcatagctgttactgcctctcatcctagcactccacctgggacctgaagattgttatgcccctgcccaccacagctggtgcctgctgtcaccactgggtggcctgagcacaggcctgtctaccctggtttcagccctcccttcaggacagagaacatagcttggggtcctggagattgcccaattcaagctaccacttcgggcatctcagcactccttgtggagcctgcggttggacctaaactcccagctgctaccacttcagctggcacctacctgcaagtgccatctttaggcttggatattggcctgtctagtccatcgcagccactaccaatatcaaggcacactgcttgacccagagaattattctcccactcttattgtcattgcctaaaccacactagttgcccaggggcctgagaatc

SEQ ID NO: 693798 - DNA, 673 bp, Homo sapiens
ccagcatacacatttcatgagacagagtctccaattccaactataggcaaggcataacctacattttagtactttcattgtgcatacaatcttcaggattcatttaaagaactaatggaatagtaaaaacccaattgggaaaatatatgtatgattaaattgccttgccaaactgtttaccattagtattgatgaatctgagagctatccccttaaaaaaacatcacctagcctcttatgagatagttataggcatacctatgccatcacccttagttcgttctgactccatccttattaaagaaccagtacttcagtaatgcaaaggactaatcacccaagtgaattgtaactatcaacttgtaaatgatgctttatgaaagagcttctaggagatgatgacacactacatcatatcyaatcaggagactttgtttataagaagtactttatatccaaaccttctctggaaacttgatgagatgaagtttatcaagtgttgttaactaatctttgtatttccaaattacagaaaataaactcctggatccatatttcacaccttaagaaagcactccaacccccaagggcatcaacttcaacaggaaaactgacccttcaacttaccaaatctttgaagtgactagttgtatagtacaacaagcagaaaatt

SEQ ID NO: 693799 - DNA, 641 bp, Homo sapiens
gctttcaaagaggaggagcctgcggagctcgggacaaacctattcctgctgcaggaatagggaggcagagataccaggtgcccctgaaggctgggatgcagcacaggtggagcagaaaatagggctggccaaagtttgcataaggaacacttagcttctccgatgccctccgcaaggcagcagaacaggcatctcccggcatcagtcccctcctgaccctgattgaaggttcttctggagatttgggccrgagagccgctagtctctaggcacagcctcaggaagagacatgtgccattctataaatggagcgttaaaagaaagtctacatatggacagtgagaaaaccaccatgcgccttcccccaccccagctcattcccgtggctggctccttgaacactgatgaccaagcagaaggagagacctggtacagatgccagatggtctgaggccagccaaggctcatcaggcatttgaggaaaacctctaactcaaaagagagcctacagcaagccaagaggaaaacgcggattctatgctgttagggtcgcctcgaggggtctccacttccctccacactgcttaccatcttctcaaagaaaggcccacaggacagcctggccttgttgtgggctgctt

SEQ ID NO: 693800 - DNA, 995 bp, Homo sapiens
taaactgctccagagctcacgtttctgggattctcttttttttccattcttgggttcacctcaagttcaccagttttcccgatggaattagttaactccttcaaaagtaatctatttttattcctgctcatttgactgttgtatttctacacgtacatgcttaattgagcaaagtctgctggacattttctctacagaggtaacactgcacagcttcttgaccggaaagaacagcaaccatgtcgccaccattgcgtaccctgacatcagtggctgacatgtaaatagtcatggcaacaacacgggtgagtccaatgctggcccggccacacagcacatacagccggtcctcctactgggctgaggaggaaagtgatagcttctactcagcaagcagaaagtgttggttcttttcaatttgcagggctgtcatgtttaaatatgaaaatgttgcttatagtcaaatgttagtgacagcagcctgtggcatctatcatggtttgcactcttactcctgctaaaaataggcttgctttctctggattccttcaaattccacatctgcaggaagtttttgttgctgttgctggccttttcctttcttcctgaaagattactgttctttggctccaccggggccccctctttcttcccctctctgggagaaagccattcagaaggataataaacaccccaggctcaaacagtcccacaaagacctcatgtcggttctcagttattggcacaggcctccgcctctgaagcctttagtgaagagggaactggrgcagctacaaggggcagaaccatttgaccttcagaagtaaaggaacggaggctgatggggttggctggggagggtggaaagcacaactggacagcaagtcttctgggtttgggccccactgggcagcacctgctgagcaaacagcctgctctctccagcctgccagaatcattttgttttccaggtattaaattcatactctacaaat

SEQ ID NO: 693801 - DNA, 1089 bp, Homo sapiens
cacctcattcggacattaggcagatttacaccctcacccccacctccgcactggcagagcaagaaaacccgggcttcccctcatccacacactccttcccctccagggccgagactgctttcactacaaagtcaaaagtaccaggaagggtgttttccacagacaggtaggctggctcccaactcaccaatcaggtaaccgatggacggaaaggcaagccaggggtttaccttaaggagggccttctctgtggaaacacggggtgtaggaatcaagtgtctctgtctctgtctctctaacacacacacacacacacacaggccatggacctctcagcatcacctcttccccagcctcccagggcccaggtgttgtttctgtgtctctggagaccgaatgtaatggctaccaccactctcttatgaacagattgtgtgggatcctgccacgaattcgaagctccaaatcaaagtccagggtatgtgcatatgactggcagaattaagcaatgagcctgtcccaggactgcaagggatgctgtcgaagtaactgtatacgatagcttttatttctacagtggtgttcatgtggtcgttggggtggggctcagtaacagaagacatagaggaaagcatattgggcagacaaaactagcattctgtagaggagaaaaccgagtctcagagcagttaggtaacttgctaaagtcacacagcaagtaactaactctgcatttacaagatcaaatactttttaatcaagttctggtatctagagcctcaggaattctggttcttatacatgagagagaaaatttgggagaaaataaagaagcaacaacaagatgcaggcctcaaraaccaaggaaaaatgatgctttactctgaatctacaaggctttgtgtggtccaagcctacaccagggagatgctctcccgacttgttccagagggatgagttgtgcaatgttcgtttttgatggtgaggttagaattccctggaaagcagttttgtttttcttgtgaagccagcactttattggaataattgtcttgtttctattcaaagtcctctttacctctgttccca

SEQ ID NO: 693802 - DNA, 1089 bp, Homo sapiens
cacctcattcggacattaggcagatttacaccctcacccccacctccgcactggcagagcaagaaaacccgggcttcccctcatccacacactccttcccctccagggccgagactgctttcactacaaagtcaaaagtaccaggaagggtgttttccacagacaggtaggctggctcccaactcaccaatcaggtaaccgatggacggaaaggcaagccaggggtttaccttaaggagggccttctctgtggaaacacggggtgtaggaatcaagtgtctctgtctctgtctctctaacacacacacacacacacacaggccatggacctctcagcatcacctcttccccagcctcccagggcccaggtgttgtttctgtgtctctggagaccgaatgtaatggctaccaccactctcttatgaacagattgtgtgggatcctgccacgaattcgaagctccaaatcaaagtccagggtatgtgcatatgactggcagaattaagcaatgagcctgtcccaggactgcaagggatgctgtcgaagtaactgtatacgatagcttttatttctacagtggtgttcatgtggtcgttggggtggggctcagtaacagaagacatagaggaaagcatattgggcagacaaaactagcattctgtagaggagaaaaccgagtctcagagcagttaggtaacttgctaaagtcacacagcaagtaactaactctgcatttacaagatcaaatactttttaatcaagttctggtatctagagcctcaggaattctggttcttatacatgagagagaaaatttgggagaaaataaagaagcaacaacaagatgcaggcctcaaaaaccaaggaaaaatgatgcyttactctgaatctacaaggctttgtgtggtccaagcctacaccagggagatgctctcccgacttgttccagagggatgagttgtgcaatgttcgtttttgatggtgaggttagaattccctggaaagcagttttgtttttcttgtgaagccagcactttattggaataattgtcttgtttctattcaaagtcctctttacctctgttccca

SEQ ID NO: 693803 - DNA, 1089 bp, Homo sapiens
cacctcattcggacattaggcagatttacaccctcacccccacctccgcactggcagagcaagaaaacccgggcttcccctcatccacacactccttcccctccagggccgagactgctttcactacaaagtcaaaagtaccaggaagggtgttttccacagacaggtaggctggctcccaactcaccaatcaggtaaccgatggacggaaaggcaagccaggggtttaccttaaggagggccttctctgtggaaacacggggtgtaggaatcaagtgtctctgtctctgtctctctaacacacacacacacacacacaggccatggacctctcagcatcacctcttccccagcctcccagggcccaggtgttgtttctgtgtctctggagaccgaatgtaatggctaccaccactctcttatgaacagattgtgtgggatcctgccacgaattcgaagctccaaatcaaagtccagggtatgtgcatatgactggcagaattaagcaatgagcctgtcccaggactgcaagggatgctgtcgaagtaactgtatacgatagcttttatttctacagtggtgttcatgtggtcgttggggtggggctcagtaacagaagacatagaggaaagcatattgggcagacaaaactagcattctgtagaggagaaaaccgagtctcagagcagttaggtaacttgctaaagtcacacagcaagtaactaactctgcatttacaagatcaaatactttttaatcaagttctggtatctagagcctcaggaattctggttcttatacatgagagagaaaatttgggagaaaataaagaagcaacaacaagatgcaggcctcaaaaaccaaggaaaaatgatgctttactctgaatctacaaggctttgtgtggtccaagcctacaccagggagatgctctcccgacttgttccagagggatgagttgtgcaatgtycgtttttgatggtgaggttagaattccctggaaagcagttttgtttttcttgtgaagccagcactttattggaataattgtcttgtttctattcaaagtcctctttacctctgttccca

SEQ ID NO: 693804 - DNA, 645 bp, Homo sapiens
tccatacacatatacattttagtatcactttgttaatctaattcttctccctgggtttatctcctgggaatttttgcctcttgaactcttctagcttgtaatcagactcttccatatgttttctttaaggccaataaaccaaaaacaaggcacacagtattttctctttctcatagttactgtaatatagtttgcatattccattaatctccaaaaaatgaagctgtgactttcaaaccctgactagctaaaaagatctaacaatcgtgatttttctcaaccataacatctttttgaaccaaagagctttggaagggatgcccagtcccactccacaacaactgaatcagaataacttaggaggacctattttttttaaatcacaagtgaacctcttaagctgcttttagagttgagaattttcgttcttaaaaaaaaaatactccagtgaaagaagaatgcagaaacaacattgagaagccyagttccaaaaaatttctgataccccaaaggttttttgttttgttttttaaatattaatcaccacttgggatattaactggaagttgagaattatgccttaaggaaaattctcacaaaagcctacttttataccataatgatctaagagtaaaaaactaaaaa

SEQ ID NO: 693805 - DNA, 634 bp, Homo sapiens
gtgatccgcctgtcttggcctcccaaagtgctgggattacaagcgtgagccascgcgcccggcccaggcgcttcttttaactccagatgtgtgcacccgaaagttagccacagttacgtgatggagcaactccaggctgcagggaaacgtgagcgccggccgtggggatgcgcggggaggagggcgggccaccaatgcctcgcccacactgtgtggagtccacaggatggagacggatactgagggaagccatgagttgtggtctggtgactgaagtcacagagtaacggggctgccccaagctgggagccaaggtgcggactcctttctcacgggcctcctatggtgagatcacagcagaagccggcctgggcttacagctggtctccggccagagagggcatttctgtcctaccaaagactgcaacaattctggacagcgaggggcctggagggacaggattcagcccaaagtaccacaggccacacgtttcctccatgtcatcccctagcctggccatttaagacccaatgcagacagcaacctgcagagccagcctgtaacccaccagaagcccagagcacacttgggcttgcacctgagctaccacccagcccctccaaggaaacttct

SEQ ID NO: 693806 - DNA, 643 bp, Homo sapiens
tgggtgatggccttagcatagggcttggcacactgtcctggttgggaccctcccagtgaatcccaaagcaagctgacatctagctgtcagagaggagaccattccttatattgtcttatacttaatttcttgtttgctgaaaaagtagaagttagaattggcagaagtgaaaaatcacagacaactggggaccacatttcagacctggtgttaaaattcaacctctgacctcagggcttgtgctatctatggattcagacattgtgtaaaaaagcatcatgaaactccctgttcygttctgtttcgttctgatcattggtgcatgcagcccccagtcacataccccttgcttgctcaatagatcacgacccccgcccccacagcccctttagagttgtgagcccttaaaagggacaggaatcacttattcggagagctcggtttctaggacgtgagtctgccgacgatcccagctgaataaagctctttccttccacaatccagtgtctgaggaattttgtctatgactcctcctgctacagctggagggaaactctcttccttcctagccccagttgtctctttgtaactatgatagtttgctgccgatggacacggcaagtctgtatgctgagatgctggg

SEQ ID NO: 693807 - DNA, 643 bp, Homo sapiens
tgggtgatggccttagcatagggcttggcacactgtcctggttgggaccctcccagtgaatcccaaagcaagctgacatctagctgtcagagaggagaccattccttatattgtcttatacttaatttcttgtttgctgaaaaagtagaagttagaattggcagaagtgaaaaatcacagacaactggggaccacatttcagacctggtgttaaaattcaacctctgacctcagggcttgtgctatctatggattcagacattgtgtaaaaaagcatcatgaaactccctgttctgttctgtttcgttctgatcattggtgcatgcagcccccagtcacataccccttgcttgctcaatagatcacgacccccscccccacagcccctttagagttgtgagcccttaaaagggacaggaatcacttattcggagagctcggtttctaggacgtgagtctgccgacgatcccagctgaataaagctctttccttccacaatccagtgtctgaggaattttgtctatgactcctcctgctacagctggagggaaactctcttccttcctagccccagttgtctctttgtaactatgatagtttgctgccgatggacacggcaagtctgtatgctgagatgctggg

SEQ ID NO: 693808 - DNA, 640 bp, Homo sapiens
cgcctctctccaggcacctgtcccttagtacaggagctcacagctcaccatgctgcccagcacccaggctgtaccgcccrcagctgtgcaggcactcacagccaagtacggagccttgcggaaattcccccagatcctggcccttcacccacacagatcggaccctcaggggacatcggccaccaataaaggagccagcctagatgtcattgcagctgagcccccatggccagctcctcgggtcacggcagctccatagcaagggctcctctcatcccaatccactggggccactgccaagaggaggacacagccttggccatcgagggggatgctcaggtaccaggacccaggatgcggacagactccagggtctccaaggttcctgctcagaggttggcagggtgcttgtctccagaatgatgcccacctggcgataagtctcagcagagccccctgcagagtggccctggggctgggttcggccccagacgacctgaggaagctgccaggtaacaaagctgtcggcatccccagagcccagcgggcaaagatagccaagaatctaccaccaactggcagccaagattgcctgtgggtcatgcagcaggttcacgtccctgttttaacttttaagaaa

SEQ ID NO: 693809 - DNA, 3222 bp, Homo sapiens
accccgggaggtggggagtgggtcaggctggatatgagcaatgacactgagaagactcaggggcctcgccagacactagccccaggaggcccggcggtgtcccaaaaactggccatctgttagacaaaccaaaagaaactcaaaagaggtaaacagtacaaatctcactygatcaaaattaataaaaatagaaataaaaattccccaatttattttaagttacatgaccaagaaataagtaccccatgcctaggagagtgggtggggtttggccaggctgagctcagggaaaggtacgtggccttgaacttcatattccagatgaatattaagatgaatggaatgaatacagtcgcccaagtcattcaagaaaagtaacaaataaagagaagatggggaaaagtcaaagctgatgaattagggagaaaagctacggaatttgagtccaacaactggttctttggaaagttgtaagaagtgagtgttccaatcattttcctggtcaaaacattcggcctcactggtggcctgagaaatcgcttaaatgtcatcagagtagaacagaaatcagggcaggaaagagcatgggcagagagggaggggagccccagggcgtctccggtgcgctcagacacaggttcaatatgtaaaacagtgttattgagctgtcgctcacatggtataccagtcgcccatctacagcacacaactcgatggtctgagtgtgttccttcacagagttgtgcaaccatcaccacggtcaattttagaacattttcatcacctcaaaaagaaaccctgtccccattagcagtcactccccactgcccccaccacacccccaacccctggcaactgcaaatctgtttcctgtctctcctggtttgcctgttacagacatttcccatcagtggaatcacacaatatatgttgttttgtgtctagcttctttcatttaacaaaatgttttcacggctcacccgtgtggtagcatacatctgtgcctcattctttttgatggcggcataatattccattgcacagaggagccacattttgccagcccgttcatcagtagacgggcagtgccttgtttccacttcttgactatcatgaataatgttgctatgaacattcatgggaaggttttatgtgaaggtatgttttcatttctcttgggtacatacctagaattggaattgttagataacatggtaattccatgtttaaccattttgagaaacttccaaactgctttccaaagcagctgcaccatttcatatccccaccagcaatgcatagattctgaacttctctttccacaaacttttgttattaaaaataaattgtttaaagaagggaaaaaacagctctccataataaaacacactgctcttctgaaatctcccttggcgtgtgtctatgagttgatttacagtgtgggtgcaagtccacaagccagcagacacacagggccacagaagggacactgccatgctggcccactaccacgttcacaccgaaggtgactttgcctggctgtggactcagcgaagctgggacaccctcagaggcgactgtccacccaaccctcaccatgcagagacagagaccagcacacttggtctcctccacccagataagctcttggagaggtggccctggcacctgtgaaaatgtaaatggctgtcggcctttgacggtgctgctgacgggtgaccagagttctctcgcggctgcacgttttcccatgagcgccgaggcaggttcaatatggacagctcctccagcccctgcaggtaacccagcccgagctcccacttcctttgtaccaagcagaaacaagggcatggaaaagggaggggtgttttcacatctgaatggcaacattcccgtccaacaccccggactatatcttcaaacagatctgtctgagaagacagtgattgcattgagcccagcgtgctgtcagctgcttgaagccagtttcggcacacgggtattaggttatagaagaaaccttgttgtaaggatcgtcagggaggaagtcactgtatttacttgaagtttgcacagcttcatcagtttcagtggaaataactaaaaatagttaaagacattagttaaaattaaagaaaaggggacgagaaaacaagctacagcctgagagaaaacatttacaaaccacatgcccgacaaaagactcacagaatatattccttaaactctcaaaactcaacagtaaaaacaaacaatcaatccagtgagaaaatgggcagaagagacatttcaccagagaggctgtacacagggaaataaacacaggcaaagacatctaatgtcctctgccagggggaactgcacatttgactcacgatgaaatgtcactacgcacccatcagcatggcggaaataaaaaataacggcaacattaaatgctaacgaggtcatgaagaaacgagatcactcatacactgttggcgggaatctaaaacggggcagccacggtggagacggtgtagcagtgttttgcaaaaccaagcacgtgctcacctacaacccgcaactgcattcctgggcatgcatcccagagaaaggaagactttcattcacacaaaaccctatcacgattactcatagcaactttatttgtaaccacgaagaaccagaaacaaccacatgcccaacaatagatgaatggctatacacgctggggtgctgcacaccctgggactccactcagctgcagagaaagaaccggtgaagcacacaacagctctggcgggtctttggggaaagaccaccgtctaccgccacgcgagggaaagaagccggtctccaaaggtcacaccctgcgtgatttcatttctgtgacattctcaaaatgacgaatttggaggaggttggagtggggaaagagctggaggctgtgactaaaaaggatagcaggaggaagatctttgcagccgcagaggggccctatatcttgactatagtggtcacgcgtgtgataaatggcaaagagcagagacgttgtcggaggcacgtcctggttgcgaggccgtcctctagtggagggatctgggtgaaggatgcatgggctgtctctgtactactgtgtctgtctttgcaacttcctgtacatctacaatcattgcaacagctgcagtgggctccggtgggcctgtactccagcctacgacagagagagactctgtctct

SEQ ID NO: 693810 - DNA, 873 bp, Homo sapiens
tatttgcaatactcgtttctttctattgctcgaaagtactggactgctaaaaatggtcaccttactcttctgttcccttctttcaactgccttctttcctataagcccctttgagctccttaatttgcctttctcaaataattataatgcctccaatcttttcaaatttgggttcgtcatctggccttatatccctctaataaagattaatccagattaaaagattaaactaaatcttaactggagtctaagctcccccaaattagctaatgcttctgttatcttatagagcatcaaataaactcagaagttggggatttaaatgactaatgacaaaagttatgtagcttcaggtactatgcttattacctgggtgacaaaataatctgttcaccaatcccccatgacacacaatgtacctgtgtaacaaccctgcacatgtaccctgacctaaataaaagttaaaarataaataaataaagctatgcagcaccaggaagaattcttcaggtgcccaggaagggagtatttaggctagccctggggcagaggggaatctgatgtctagcaagaggaaagtgggtcctgactggcttcactaccagcttcctaaagtggccttggtccccagatacatttcagctgcatccaggccatagtaactgtggtcttcatgcaagctctcgtactacactgatcttagaatctgtgtgctaggggtacaacccagcatgaaaccagctttggcagccatgggagtgcctgtgttgccagcactcccaactctgggcaatgcagcacagagagacactccttccaactggggaagaaaagggaagagtacaagaaattttgtcttgcaaccaggtacca

SEQ ID NO: 693811 - DNA, 603 bp, Homo sapiens
caataaacactgaatgcatttaacatttaggaagcattggaagagtcctacaattgctggctgaataaaattaaaaggaaaataaaatgcttttacattttaactattttatctcacaaaatctctccaacatcctgataaccctatctctactgtttgcagaataagagttggcattttcaacttggtcagcaaacatgtttgaggttatcattcactgttaaactatggttattttaaattcattgtgtattattattgtaatttaccatagagtgacagttataatctgatttgcattggaataagcaaaatgagaaaattttatttgaagatgcagttgtactttttatcaagccatcattaatgtaatattttttgttataagaacacaattttgggagggagggaggaggtaraggagaagaaaagataactattgggttctgggcttaatactttggtgataaaataatatgtacaaaaaaaatcctgtgacacatgtatacttatgtaacaaactttcacatgtatctccaaacctgaaataaaagttaaaaaataaatttaaaaaattaaaagaaacacaattttaggatattt

SEQ ID NO: 693812 - DNA, 1551 bp, Homo sapiens
agatacagctggatgctggcacttccccaccatgtgtacttcttgtctttcaccttcagctcatattctgacagtttttctgtcagctgcatcaagctttgtctaaggtggtgtgttgctatctacctctttatatcttggacctaaaaagtacttttgccatttattctatattctgtaactcttgcatatagtaggctaatgccattgtctgcacctcagatcctacctgctcaaaaagaactttgttgtatttcttgctatagaaccctgatatttaaaagttacatacaatttaaaaatacttttgttgcaaagagggatttttaaataagcttttaagaagtttccttattttatcttggttttcatgttatagcctacttattagtactcttccctgttataaacttaaacaattttcaagtctcttaagatggcccaatacatttttttgtctcatttgtattattagtttaataataattatctgcatcctatttttatggaaatacgtgagatataagtagttctagtcaacagggtatttgggagtttgtttcattaccatggtacattgggtttttttaagctaaatatgatgataaattggcttattaaaataaaaatggggttgggcggtgagtgcggtggctcatgtctgtaattccagcgctttgggaggctgaggtgggggtccctttgagcccagggttttgagaacagaccgggcaacatagcaagacctcatctccaaaataaaataaaaatcaagcaggaatgttttttctggaattatcaaggacttaacagtgtagccatgatatggaaatgatatccaaccactggagaactccagagtaacagaccttctggaagaacccaaaggttgagctgcaggcagaagttactgaatgggctgtggctgaaggtttctgaaatgatacattctggctagacctacttgtaggcaagaaagcatttggaaagtatttagagcttttggcagcttgttttgctcacagctagttagaaaatagaaaaggacaagttggaagggaaatagtggtaacgctgactgcttgcttgtttttcttaaagaagcgcttgtgattaaaataacttgtggctgatttgattcctttacatacctcctaaaacagcttcttccatttcctgcataaacctatgagaacaatccatcttttagcttcgtttttccacataccattctcctaatgaagaaatgaagatgacttgtatgatgaagtcagcccacatgcaagcatttccctstcaccgcccctccctttcagcctgccacctctgcatgctttcatttctacttggaaagtcctctttttttttcctgctgctaggcctattatctccttctgtgtcttctcttgaagccgcctcattttggtacctccccttcacatttttgtactgtgtcttttgaagtgtcttatgttgatgaatacgggcatcggcctgttctggtgttttggtacagatgctgcctcgccagctggaggcttgtaagattct

SEQ ID NO: 693813 - DNA, 3429 bp, Homo sapiens
atgacaatgtgaaaaaacattctcttatttacagaatggcatatccctagcaaaaccactcaaatgttatatcatactcaagaaacctaattatactaggaataaaaatcagccatatcacgcagatatctacgtttcctcaaaagcaagctgcacagtagatttctaaatcaggaatggggactactttcttccctctgttaggaacttttgggactgtcagtatttaagtcatctagccgcctcggattctcctatttagaaactgggacagatgatcttgaaagtctcttctaactatagtgacctctcaagaaattaaaaaaaaagaaaaaagaaaaagaacaaaggggtgcttaaatgacatttggttaatcatcagaagaggtgcttagcctcatactcaacagcctacatacacatacacaacgatgcagactatcaatatatcagaaattgattccataaatatcattagctcttcagatttaatggtttmacattagtaatgatagagaggaattatttcatgtaactttaaaatacattaatattcctatacagccccatgggatatagcctaaggccaaaacaaataaaaacaacaacaacaaacaaagaacgaaagacaactggtttcagtaatcatattgtttgcagcagtgtgttgttatctgagctgctgtgtgtttattatgggattaaagtagatgagtaattatgatggtatgtcatgcaaccaactcagtaacattagcctcatttccctttacttttaattttttagaaattattcgtgtaaaactttttatagtcatgtaaaatattaacatgttccaaagtatactttataaaaaacaagtttatgcaaaaaagtttagcttcttcccatccctccatgtgctttaaaataaatacatggtctcagaaacagtgaagtacaaaaacacggcttctagattccaatcttgggggtatgaccttaaattgtgacttaatctctctcaacttatttccttatgtctaaaaaggtgataataatagaacctagaggccgggcgtggtggctcacgcctgtaatcccaacactttgggaggtcgaggtgggaggatcacaaggtcaggagattgagatcatcctggctaacatggtgaaaccccgtctctactaaaaatacaaaaaattagctgggcgtggtgggtgtctgtagtcccagctactccggaggctgaggtaggagaacggtgtgaagccgggaagcggagcttgcagtgagctgagatcgcgccactgccagagcgagactccatctcaaaaaaataaaaaataaataaaaataaaaatagaacctagaggtggttgtgaggattaagcaagatcttctatgcacagtacttggctttgtgaggcctcagttaagtatcaggtgctattattaggatctcatttgagagtcacctcaaacctgcagcacagacacagattaggaaatgaacctgcaggtgccacatcactggcctggagcccccatggcacccaacagccaagaccacaactcactcctgagtctacaggcgacttcatgctccgcactcatcacacattccctacagccagttcaggggaaaaagaagtgtcttcccactcagggtgacttcaaaagacttactgtgttcagtgcattcagagtggtgtcatcccgagaggctgcgacacagccgtcctctgtagagcctccatcacacattcctgcaaatgccgccatgctccttcagaagaaaaggtttttcctttattagtacatagtaatatcaggacagagacttagaccttcaattttcagaggacatttccagcccagaacaaattccattactacacgcatgatgaaccagttcccagctctgcctctgctcctatttttttttttttttcttttgagatggagtctcactctgtcatccaggctggagtacagtggcgcaatcttggctcactgcaacctccacctccaggattcaagggattctcctgcctcggcctcccgagtagctgagattacaggaacaccccatgcccagctaatttctgtatttttagtagagacaaggtttcacagtgttggtcgggctggtctcgaactcctgacctcaggtgatctgctcacctcagcctcctaaagtgctgggattacaggcgtgagccatcacgcccagaccaaaaataaatttaagttcctcttcactcacgcagaaagacatatgttacttttagtcagatccatttgtattgtttcttcccacgttttagcagtactaagattttagatttgagagcatgaagaatctaaatctatgagccacaatatttcagtagatgacaatcttctgaaagaaaagtctccagaaaacatgtgaaattaagtcatctaaaattttacttaattcctctcattctgcatatcaactacctttaggtgaattaaaagtaaaaaatcatggctgggtgtgatggctcatgcccgtaatcccagcactctgggagcctgacgccagaggactgcttgaggccagagagttcaaaatcagccctgacaacatagagagagaaaaaaaatatattagccaggtatggtggtgcatgcctgtagtcctagctactggggaggacgaggtgggaggatgacttgagcccaggaggttaaggctgtaatgagtcatgattatgccactgcactccagtgtgagaccctgtcttaaaaaaaaaaaaaaaaaaaggtgagaaaccagagataaaacctcttagtcattcactccacttacacattctcatctctactgaatgccaccatgcacaacaccgttgactagaaaacagccaggtaactggggcaacacagaaaggaccccatctcaaccaaaaacaaaattaaaaatagccgggcatggtgccacgggtctataaccctagctactcaggaggctgaggcaggaggatcgcttgagctcaggaagttaaggctgtagtgagctataattgtgccactgtactccagcctgggtgacacagcaagaccctgtttcaaaaaaacaaaacaagtaacaaccaaaaaaaaaagaaaaaaagaaaaaaaagaaacccacaaacccatccagggttaaaattcagatgccctaatccttgctttcatgtttttgttgtcgttgccaagacccagaatcactacatacaaagtctgcctgcctgctctgtgacacctgctctgtgacgaccgctctgtggtgcccgctctgtgccgtgtgaggagcgaattcacacttctctctgcatcgaaggcatttgtatgttctatgcaactgccacgagggtgatcacagataaatattctcatgtaggcaagccacaaaaatgtcaagttcaggacaggc

SEQ ID NO: 693814 - DNA, 645 bp, Homo sapiens
tgcctggtcaggcatagagcttcrctttgttttgtttttgtaaaaaatcttttgtatatctttattctcatattgattgatttttaggattcattttcctaaagcagagaaaaataaatattgggcgagaactctacattgcagatttttagccaaggaagtttcaattacgtcatgccactctgccatgtgttttccaccaaggcctcctcattacttctcttcactcagggatgccactcctgtttaggtctcattctacctctcgggcaattcctgcccagtctccttgtctctactgcctcatctcaccaacctctaatgcagtcttccagggctcattccaaggagagttttgctgctcatactcactccttatttgatctcatccagtccctttgcattttgatggttcccaaaattacatccccagtcccaacttcccgctaggctcattattccaaccacctgttaagtgcatccattttgagagctaaaaagacatcttaaagcaaacatagcaaaaattaaaccgtggatgtttcttccaaatctgtatctcctatagtcttttcagtaaatggcaagtccattttttcaggtgcttatatccagatcctggagttatccttgactttcactctg

SEQ ID NO: 693815 - DNA, 645 bp, Homo sapiens
tgcctggtcaggcatagagcttcactttgttttgtttttgtaaaaaatcttttgtatatctttattctcatattgattratttttaggattcattttcctaaagcagagaaaaataaatattgggcgagaactctacattgcagatttttagccaaggaagtttcaattacgtcatgccactctgccatgtgttttccaccaaggcctcctcattacttctcttcactcagggatgccactcctgtttaggtctcattctacctctcgggcaattcctgcccagtctccttgtctctactgcctcatctcaccaacctctaatgcagtcttccagggctcattccaaggagagttttgctgctcatactcactccttatttgatctcatccagtccctttgcattttgatggttcccaaaattacatccccagtcccaacttcccgctaggctcattattccaaccacctgttaagtgcatccattttgagagctaaaaagacatcttaaagcaaacatagcaaaaattaaaccgtggatgtttcttccaaatctgtatctcctatagtcttttcagtaaatggcaagtccattttttcaggtgcttatatccagatcctggagttatccttgactttcactctg

SEQ ID NO: 693816 - DNA, 645 bp, Homo sapiens
tgcctggtcaggcatagagcttcactttgttttgtttttgtaaaaaatcttttgtatatctttattctcatattgattgatttttaggattcattttcctaaagcagagaaaaataaatattgggcgagaactctacattgcagatttttagccaaggaagtttcaattacgtcatgccactctgccatgtgttttccaccaaggcctcctcattacttctcttcactcagggaygccactcctgtttaggtctcattctacctctcgggcaattcctgcccagtctccttgtctctactgcctcatctcaccaacctctaatgcagtcttccagggctcattccaaggagagttttgctgctcatactcactccttatttgatctcatccagtccctttgcattttgatggttcccaaaattacatccccagtcccaacttcccgctaggctcattattccaaccacctgttaagtgcatccattttgagagctaaaaagacatcttaaagcaaacatagcaaaaattaaaccgtggatgtttcttccaaatctgtatctcctatagtcttttcagtaaatggcaagtccattttttcaggtgcttatatccagatcctggagttatccttgactttcactctg

SEQ ID NO: 693817 - DNA, 645 bp, Homo sapiens
tgcctggtcaggcatagagcttcactttgttttgtttttgtaaaaaatcttttgtatatctttattctcatattgattgatttttaggattcattttcctaaagcagagaaaaataaatattgggcgagaactctacattgcagatttttagccaaggaagtttcaattacgtcatgccactctgccatgtgttttccaccaaggcctcctcattacttctcttcactcagggatrccactcctgtttaggtctcattctacctctcgggcaattcctgcccagtctccttgtctctactgcctcatctcaccaacctctaatgcagtcttccagggctcattccaaggagagttttgctgctcatactcactccttatttgatctcatccagtccctttgcattttgatggttcccaaaattacatccccagtcccaacttcccgctaggctcattattccaaccacctgttaagtgcatccattttgagagctaaaaagacatcttaaagcaaacatagcaaaaattaaaccgtggatgtttcttccaaatctgtatctcctatagtcttttcagtaaatggcaagtccattttttcaggtgcttatatccagatcctggagttatccttgactttcactctg

SEQ ID NO: 693818 - DNA, 645 bp, Homo sapiens
tgcctggtcaggcatagagcttcactttgttttgtttttgtaaaaaatcttttgtatatctttattctcatattgattgatttttaggattcattttcctaaagcagagaaaaataaatattgggcgagaactctacattgcagatttttagccaaggaagtttcaattacgtcatgccactctgccatgtgttttccaccaaggcctcctcattacttctcttcactcagggatgccactcctgtttaggtctcattctacctctcgggcaattcctgcccagtctccttgtctctactgcctcatctcaccaacctctaatgcagtcttccagggctcattccaaggasagttttgctgctcatactcactccttatttgatctcatccagtccctttgcattttgatggttcccaaaattacatccccagtcccaacttcccgctaggctcattattccaaccacctgttaagtgcatccattttgagagctaaaaagacatcttaaagcaaacatagcaaaaattaaaccgtggatgtttcttccaaatctgtatctcctatagtcttttcagtaaatggcaagtccattttttcaggtgcttatatccagatcctggagttatccttgactttcactctg

SEQ ID NO: 693819 - DNA, 645 bp, Homo sapiens
tgcctggtcaggcatagagcttcactttgttttgtttttgtaaaaaatcttttgtatatctttattctcatattgattgatttttaggattcattttcctaaagcagagaaaaataaatattgggcgagaactctacattgcagatttttagccaaggaagtttcaattacgtcatgccactctgccatgtgttttccaccaaggcctcctcattacttctcttcactcagggatgccactcctgtttaggtctcattctacctctcgggcaattcctgcccagtctccttgtctctactgcctcatctcaccaacctctaatgcagtcttccagggctcattccaaggagagttttgctgctcatactcactccttatttgatctcatccagtccctttgcattttgatggttcccaaaattacatccccagtcccaacttccygctaggctcattattccaaccacctgttaagtgcatccattttgagagctaaaaagacatcttaaagcaaacatagcaaaaattaaaccgtggatgtttcttccaaatctgtatctcctatagtcttttcagtaaatggcaagtccattttttcaggtgcttatatccagatcctggagttatccttgactttcactctg

SEQ ID NO: 693820 - DNA, 644 bp, Homo sapiens
cacagagaagaggaggagacaatgtcatgatgaaggcagagatcggagtgatgtagccacaagactaggaatgccaatagctaccagaagcaggaagaggcaagagacagactgttgcttcagtctttgccaacaacttgattttgaacttttggcctccaggactgccagagaataaatctctgttgttgtcagccaccaagtgcgtggtaatttgttatggcagccctagaaactaacacagtcattgtgagttatataaactccacaaaggcagggcataagtgataccctggtgtgtgcatcctacaaacagaaacgactgaattgrtgtgatttgatcaggtctgcttgagaatggagcaaagtcaaaaaagcatctgttacagaaattacagaaatagccatatttctagtatctgtgtagcatcttaagccaaacagggatagatatttatctttctctattagaagaaaagaaaatgacagattttttttgagagccgttcagttaggtgacaccagccatatcacaaggatttgaatgcaaaccaggaaattaaataagccggttaacacctatgtctttcctggaaatgttcctctcttccttcatagaaatgttcttatacataaaactcaat

SEQ ID NO: 693821 - DNA, 607 bp, Homo sapiens
atatgcaacatctcacaggtaataggtgctcacatgtggtgttgcttcgttattattgctttttcmctcctataattcacaatttactaaaagggaagacccaaatggttggtaaattctgatggattatcttaggaaaaataattatagcaataaggtattccaacagagggctgaattggccaacaagactgccaagttgcagacttacttaccacagatctggtggtattcatcactggacccccagttgaggtctcagggccttacatggaaaactccttaccccaaatccagactttaaaattctattcataataatagtgagaactcttctaattggattggaagtgatttataatagcactaaaaataaaatttcaaattaaaacccaaaaggaactatagaaagaagaggaagcaaatatagcagcctccttggttgatatgttaattatggttaagcattaaattagctctaagcttcctggcacccaggggaacaatggaaacacggcaggttatataattttcagtgactaataaaaatgacccagggagtcttcctggagattaagttctaagatttaaaaggtgtgaccatcaa

SEQ ID NO: 693822 - DNA, 599 bp, Homo sapiens
ctgattcatttactggagtgataaacccacactccgtatttaatgatgccaaatagctccttattacttgtggattcaagaaacttctgtagctgagcaccaaggatattttccaacattatttgatgccttgtgttttggcaaaaaaaaaaaaaamtaaagaagtgtgagctgactttaacaatttcaggagaaacttaaagaaataaggtcctaattgcccaacacccacctcatctcctttttggccactcaggaaaaccctgtatttttctgtaattgtgccatgatgaagaatctagcctctccaaggcagctgaccaaccacgagcagagcacatgcttttatactcaattctgaatatcaagcacaatccaacctacaacaagcacttgagggtctgaggatgggaaagcaaatagcctcaagtctgattaatgcttaaaatataaaaaagatctttttttagggaggagcagtacagcacacatcccagtgttgccacaaaaaccatatatttaatacctaatttccaaagagaatagtcccttaatgagaagcaaacttttaataagttataaattatcccaatgcaagc

SEQ ID NO: 693823 - DNA, 599 bp, Homo sapiens
ctgattcatttactggagtgataaacccacactccgtatttaatgatgccaaatagctccttattacttgtggattcaagaaacttctgtagctgagcaccaaggatattttccaacattatttgatgccttgtgttttggcaaaaaaaaaaaaaacwaaagaagtgtgagctgactttaacaatttcaggagaaacttaaagaaataaggtcctaattgcccaacacccacctcatctcctttttggccactcaggaaaaccctgtatttttctgtaattgtgccatgatgaagaatctagcctctccaaggcagctgaccaaccacgagcagagcacatgcttttatactcaattctgaatatcaagcacaatccaacctacaacaagcacttgagggtctgaggatgggaaagcaaatagcctcaagtctgattaatgcttaaaatataaaaaagatctttttttagggaggagcagtacagcacacatcccagtgttgccacaaaaaccatatatttaatacctaatttccaaagagaatagtcccttaatgagaagcaaacttttaataagttataaattatcccaatgcaagc

SEQ ID NO: 693824 - DNA, 2066 bp, Homo sapiens
cactatcttcaaaatatctttgaaatcagaactcctcacacccgctcctttgctcccactccaggccatgctaatagcatctttcaccaagaccactgtgataactttgcaaacgttctccttgcttccactcctgcctccatctcgtctattttctacacaagccaaccacactcctgctcagcagtttctaattttttcccatctctcacagaataaattcaaagttcttattgtaaccccaccctggctacttctcagacctcacgtggcaacatattcttgccagcccacttcgctccactctatgtcacattggacgccatgctgtttctgcacaggacaaacatactcccatggcatggtcactgcccatgctcttccccgtctcacctacatgccctgcagatagtttcttggctttctcagaaatttctcaaatgctacatccttagaaaggccttctccaagcactctatttaaaatagtattcacaacaatagcaattgaatgaaggaggagctcttcattgaaataacaattgtgattcaggacaaaatgagagcatctgggaaacgaacatttggctgcatactgtattgaagagcagggtctgttttttttctttgaaactgaaattttcgtttccaatgaacatgatgatgatgatgatgatgatgataagaacagcagtagtagccaacactccatgaacacatgcctggcactactctgggtgttctgtaacacccagttacgtgttaattgcaacagccattaaattcttacaaaaactttgtgaggtaagtacattacaacaaggtacccttttaataaagtcactaagacaaagaatacctagaagagtctccttgcccctaagacatattactctaatcccgaagtctttaaaaagaaacatgaccaaacaacattataaactgtagggctaaagaaatatttaaagtctatttacatttgtacagtgctgcttcctctaataaagatggcccaagagatttggaaacctcttaagaaggcaaattccaattatgcaaaaaacacaaacaataccagggtagagcagaatagaatgcatgcacagaatgcattcaatctagccatagtgtgagggctgattttcaaaggacatgaagaaaacacaaaaactgggcacagttaaactgcatgctgattgccagtaatggcctgtaaaaacagagtaggaaacggccttaacttccagaaggaaccaaaaattatgacaaaagtacaagactaatcagaggtccaggtctctcaagttatgttctattgaattgcccaagggtgtttttctgtctcctgctttggctatataaacgacactaaaagatataaaagaaaatattgtttttcaactcctctctgattctatggtctgtgggaaggccagaaaaaaatgcccggtaatagagaacttcccaactcaaccctgtaactcaggtctgtggtccaaaaaataacatatccaggtagccagaggctttgcaggttagaacacgttctacaaacctagaggaatgggaaacctggagagtgggaaaagctgccaaaaaactctgaagacatgaagaaggttgtgattttccacaaggggaagatgacagaatccatgaactaaggaaaaaaacgaagagtggtttgtaagtgtataaaaattggaaacagtgatcacttaaggcaaatgtggactcatgaaccatggatccagccaaatgaaagccctttccttttttgatacagttagatagcagagcatgatgctaaattcatgaattatatgaagccgggaggaggaggagactgcakgaaagggtcaggatggtcctgttctggacgcctggtatttagtactgggattaagaattaagagatactttggtaagagaagctcttatttttttcagcacttactgcttgctgggtactgtgtttcaactcactgcatctcttttcattctcacagcaaccctctgaggcaggtaccatgatatcctgattttacagaagaggaaacatgggct

SEQ ID NO: 693825 - DNA, 1239 bp, Homo sapiens
gggaccagtttcgtggaaggcattttttccacagacctgggttggtggggtggggacatggggcgtatggttttgggatgcaactgttacacctcacatcatcaggcattagattctcataaggagcgcagaacttagatccttcgcgtgtgcagytcactatagggtcggagaatctaatgctgctactgatctgacacgaggtagagctgaggtggtagtgttcgctcttgctgtgcagcctggttcccaacaggccacgaactggaactgggggttggggacccctgagctattataaatccgtctgaaaatgtaaagacttcattcatttagacactactgggatatcttaaatttcctgattagaacctggcatttagctgacaaaaagagcttatccttaaaattttttgttgttttcatgtgttttataagcttcctttaaaaggcatagtaatatgattatgaccacatcttagcagccagaaattatttttagaaattattatttgctttgaagttagttttcatccccctatttttccctctcatttctactctcaacatttagtctaaagcagtgttactcagcaagtttgtgactattattggtcttctgtgagaaagcagcttgagccaaaatgtaaaccaattccctgcttcctttgttgaaatagttttcttgtgataaaaggagaaattaaatggtgtgtattacaaattacctaatgtaattgatttacattctggtgcaaattccttgtattttattgtgtacttgaaacagtttttagactagcacctgttgggcagaccacatttaatctagaagattattatatacaaatgttttttgtttattcattcacaattaccaagtgggtgcctactgtgtactatgcaccattctaggctctggagatatagcagtgaataaaacaaacacaaaatccttaatctcagggctacattctaattgtattagaaatatcaattttatttctcatttctcagaaatacttttgtttttgtagtaaactgtattcttgcagtttatagttttgtgtataaaaactttagacttaattgtatgtatctttacatatagtggcaatactactttatatttttggctctagtaattttttttcctgtgactaataaaacctttgaaaacagtaattgcttatttgagtcacttcccaattttacttgaaattagcttttctgaagcaa

SEQ ID NO: 693826 - DNA, 1239 bp, Homo sapiens
gggaccagtttcgtggaaggcattttttccacagacctgggttggtggggtggggacatggggcgtatggttttgggatgcaactgttacacctcacatcatcaggcattagattctcataaggagcgcagaacttagatccttcgcgtgtgcagttcactatagggtcggagaatctaatgctgctactgatctgacacgaggtagagctgaggtggtagtgttcgctcttgctgtgcagcctggttcccaacaggccacgaactggaactgggggttggggacccctgagctattataaatccgtctgaaaatgtaaagacttcattcatttagacactactgggatatcttaaatttcctgattagaacctggcatttagctgacaaaaagagcttatccttaaaattttttgttgttttcatgtgttttataagcttcctttaaaaggcatagtaatatgattatgaccacatcttagcagccagaaattatttttagaaattattatttgctttgaagttagttttcatccccctatttttccctctcatttctactctcaacatttagtctaaagcagtgttactcagcaagtttgtgactattattggtcttctgtgagaaagcagcttgagccaaaatgtaaaccaattccctgcttcctttgttgaaatagttttcttgtgataaaaggagaaattaaatggtgtgtattacaaattacctaatgtaattgatttacattctggtgcaaattccttgtattttattgtgtacttgaaacagtttttagactagcacctgttgggcagaccacatttaatctagaagattattatatacaaatgttttttgtttattcattcacaawtaccaagtgggtgcctactgtgtactatgcaccattctaggctctggagatatagcagtgaataaaacaaacacaaaatccttaatctcagggctacattctaattgtattagaaatatcaattttatttctcatttctcagaaatacttttgtttttgtagtaaactgtattcttgcagtttatagttttgtgtataaaaactttagacttaattgtatgtatctttacatatagtggcaatactactttatatttttggctctagtaattttttttcctgtgactaataaaacctttgaaaacagtaattgcttatttgagtcacttcccaattttacttgaaattagcttttctgaagcaa

SEQ ID NO: 693827 - DNA, 649 bp, Homo sapiens
aagtaagataaatgaaaacactagtttgaatctgtaatgtaaaattaagcatggcacccaatcctttaaaaactaaaattcattactctagttaaaaaaaaaaagtattattacataagaagaaagatgcaattcagagcatacaggtaaatcatcatgttcacatttttcttgattctaactagaaaaaaaggaaaactttaattgcatagtggacctgcataagtaaatgagaaaaaggaagaatgaatacacacacacacatactccaaacctaatcagtcaatagtgatataggatgtgtctttttttcttctttttatgaaagttaactaaacctgatgcagagataactcccttagttttgattctaccggaggctgtgagcctcwttttatttcaaacaacatgtcagtgacagtatctcattagcatgaatcattttttttaagttaaaaagtacaacttcttggccctgttcctagaaagtaaactaacactactcatcggaaacagccttgcttgaatttcccttatcaagtttttacaatggtaataatttgacatctgatccaaactaaagagcaattattagacatggtttaaaaagtggtgctcctcatttcctattcaaacctgggttgcaatg

SEQ ID NO: 693828 - DNA, 1240 bp, Homo sapiens
gtggagatgctttcagcttgtctttggaaaaaatatgactgaagaagaagatattaagatattaaaatattcatgccaacgtcagttgaggtttctttatttttttgagatggagtctggctctgtcgcccaggctggagtgcagtggcaggaacacagcttactgaagccttgacctcttgagctcaaatgattcttgtatttcaacttcctgagtagctgggactacagacacgtgccatcatgcccttctaatttttaaaattatttgtggagatgaggtctccctatgttgcccaggctggtctcaaactcctaggctcaagtgatcctcccactttggcctcccaaagtgctgggattacaggcgtgagccaccacactcagccagttgatgtttctttaagataaaaataatattaataaaattccccaaatctgacaaactagaaaatgtgagttcacattggtttgttttgaaagcaggcagttagtttcaaggtttagttcaaatttagcaatcactaaaatacatgtaatcacagaaaggcagaaaagggagaaaatttagccagatttcttccgtgtaaagggtaaacctgaaaggggagctgctctttgaacaaacacccctccatatacccacagggtgcccagaaggaggctaagtggctggtttcacctgaggctgacctacttgagtgacagccagctcctctggccgcagctaggaggaaaatgtgaggcaccttggcagaaaagatacggcaggrtgagctttgaggttctgaatttacttccagatgcaggaagcgatgaggtaccctaaaccctggcagcctggcctacaaaccgacatgaagtttgaagagaaactggtcttctgttttatcaaatactccaaatatacggaagtagcaaacattcaccccctcttcattcccttaaactcgatctaccaagtctagcttccgcagtgcatcatagagacattttaatagattcattttttttctctctctccaagagatatttcaacacttgctacgtgccaggctctgtactgagcactatggaggatgcaaaggcgagtgagacacgctgctatccccaacatgttacagcctaatggggagagataagtacagaggatggaaacatgagtgcctaaaaagtaatataaataaaactctgcagggtgtaaaggacagaaaagtgacactggcaggaggaacaggac

SEQ ID NO: 693829 - DNA, 2591 bp, Homo sapiens
tttttgcatttatatgtaagcgaatcgaaaataatcagtaataaactatgactccaaaggaatattgactaaaaatagtctatacaggaaaggcatattttttctaatatatttttcatcttttctctttatgtaatagtaaattgtcaccaaggttgcaacattcttggatgcttttaacaaaaatacttccccacattttggtcttacacttttctggaatgaccagccaaaacactctttagacttttctaactttatctgatcctgacagcttctactcatctgtattttggaattctgttttgaactttggtgagaacaaagtcatctttctaagctgtccattcccagtttcttataacatgaaatgtgtggtttctctttactctgaatcacctctccatcttgcatacaccttaactgaatatttgtccaaccttgtaatttaaggcaggcccatagtttttatgaataaagttttacgggagcatagccatggcctttcatttctatattgtctatgactgctgccacattacaccatcagagacgagtagctgcaacagagaccatatggcccacaaagcctaacatatttattagctggcctcttataaaatgattttctgacctttgatttaattttgattatttgtgattttcagaaatgacccttgtgtgagactgattccttgcattttctgtctttgaatctttagatacctttttgacagtagtttaatacatgttttccaatggacaaataacaagtaccaattctataaaacaactccgtaaaattagtggtgtaaattattagtgcaaataatctttttgaaaggttatgtcaaagcaggaacaatagatactgtactgaggcactggtttgagagctaagcccacatgatttgatactggaataaataaattacaggttagtatccatcagaagaaataacaataagggttatcatgaaccagggacatttgtacatccaatgaatgcttactgagagcctgctactgscaagaactatgatgagtgaggaaggcacttagatgaaagacatggtccctacccttaaacggaaaagaaagtctgacagattaattttttaaaagtctgcgaagtcatctgatagagctacaggtgctcaacttacaatgaggctatgtcctgataaactcatcataagttaaaaatatcatcagcttaaaatgcacttaatatgcctattttataataaagtgttgaatatctcatgtaactgattgaatattgtactgaaagtgaaaaacagaataagtgtatggctacttgaagtatgacttctactgaacacatgtcactttcccaccatcgtaaagctgaaaattttaagtggaatcattgtaaattggggaccatctgcattcctaaattgaagtggctgcaaagaagtgggttatctaacccaacctggggataagaagttcaagggaatggcctcagaaaacgtgaagcctggaaacaatgttaaaaggaaaggaggaattatgcaactgaaagggatggaggacttctaggtagaggaaacagcatcaagagagcagaaaatgtttactggatttctgatagcttggtatgatgacatagtgtagaatacacgggaaagaggaaggatggttaaggtgaggttatgaaggatctggcaggtttttctttctttgttttagagacaagagctcactttgccacacaggctaagtgcagatgcagaggtgtgatcatagcttactgtagcctccagctcctgcgctcaagcaatcttcccgcctcagcctccggaatagctgggaccacaggtatgctacgccacacccggctaattttttaaaaatttcttttgtagagatgggtccttaccataatgcccaggctggtattgaacttccagtctaaagcgatcctcctgcctttgcctcccaaagcactgggattacaagcatgagccaacatgtgcccggtgggatctggcaggtttatttaaggaacataaatttgaattcagcagattcccaagtttataagctattaaagcatctacctcaccccactataactggggattatactgtcagcatctaatatagtccctgacaccaggaggcagtcagtaaacactggtcaatggaatgggttgctgcattgagttgtattcaatagtcaaagaaggaccagcaaagtatgggaatgctatcatcaaatttgcatttatcacctagaaagatcagtctgtcatgagggtaggcatggaggtgaaagggtggggggcgcctgaagaatataataggcaaaccagagagtccactggggcatttatgcaaggtatagtggggatggggactaaactcaaaggatggaaaggaggagcctgatgtaagttattcaggagttagaatcaagatgtactgactggctgggcacacgtgtggtggctcacgcctataatcacagcactttgggaagctgaggtgggaggattgcttgagaccaaaagttcaagaccagcctgagcaacatagtgagactatgtctccacagaaaa

SEQ ID NO: 693830 - DNA, 651 bp, Homo sapiens
atcaaatcattgattatttggctgcttctgaaacagaaagtgtttgctttttttttttttagcagccattttacctatattagcaatagcgctatgaaccattttcctaacattgaagaatgttcctataagaagcttctggccagatctcatttgcactaatctgaccatattttctctctctctctaatgtatttcttcacattatccaagagtcttagtttggcctgcactacagcagtaagtttcaaaatcccaaaccagaatttgatcccatatccagaaaatttgcattctttctgtgttacccccttatggtaggcattgctaattatataatccttcacttagacaataccrgtcctgcctccctaagatcagtcggggaatggctcaagaacagttctctctttatgaacaatagtttgacagggcctctgaggatgctaggaattatctctaggggcactgtggggtacatggacatgagggagtggggtggagagggttagtaggggaatcatccatcagtactgctctttttttttttttttttaaatagagacgggggtctcgccatgttgctcaggctggtctcaaactcttgggctcaggcaatcctctcgcctcggcctcccaaggtgctgggac

SEQ ID NO: 693831 - DNA, 574 bp, Homo sapiens
tgcctttgggcagcagcctgtagacaagggacattttctttattcactcccataaagccctggyagtctcctccaaagtaccactcttcaacacagctaaggtcccagcacctggtaagaggtaatctacctgctcatatgacagaggctcctgtttcaggaatcctaggaatagaccaagagagccctgctcgcatagagcaaaaagccgcacaatccatgttgagcctaaatttgtctccaagattcaattaagaccaatccagttcctgattaaagaatctgacatccatccaagcataaatatttatgcctgataggctttctccttaacagcaaaacaatctacagtgacaacattagaaatatgaatacattcctggtgatgactctattatcagcactaataataacttaacagtttcagcatgtggcatgctgagatgtatgcaaatggggggcacctctgtcagaagcacttgggagtggaccggagggtctgtcacatgccttagttgcagctggtgagacctcatttcgagtacaccggtgccttgtactcatttgccggtat

SEQ ID NO: 693832 - DNA, 1291 bp, Homo sapiens
cattttgaaatataaattatttctactttcacctttattttctcaattcatattaagttacaatctcattatattggccattgtttcaacatatgtgctgttaccagaaggacagtttctcaacactgaaagtatagtgctcragctgataccttagtaacactttcagccattcagttaatagtttttaaaaactgatcctaggctatttcacatggcacaaccagtgaatccaatagtcgtgagcctattgaaccaactcctttgccataaaatgagcttcttaatttcagacaatgttgtatggattatcatgttgatggatgtgttactttgtaacccttaactaaagctgtttagggaggtcccatgtgtggaaaatcaaacccatatctacacagtttatcatgtctactatggatgaatgactttcattttgtgtcaatgcatttgattgtaataggtgtatgcccggtctccctgagtaacagtgtgatagcaaagacagcgtccaattatactggcaagtcagacatagactagtggaaataactagatcattttggatgagaaggcatctgtattattgggcctgtgcataaccttttgtgccaccatgacatttatgacttttctgtgctaacactggggtgacctgaagagaaactggatgacttttaaaaggtatgtcatctgttctgttgaaaggtgtgatcaatttagtgctcagagatctatcctctgaaaggatttctgttctccatcatgttactgggctgtcctgtgtgggcctataatgaagaagatgtgcagttttcaatagtgctaccataaaccaacccatacgtgagtcataccccagtatatttctctaccattaattagtcataaggaaactccttttgtgaatatagtgtgagttagggaggtgatataggtgtctgtaatttataatgctttctagagttacttggggttaaccagaatatactactcctaggccacaagaggttgttgctgagattgactaacctttatgtacctaaggacatgcacctcattgaaagtcattctgtcccatggactgacacttagtttttactatggtccagtaacagacatggaaatttttaagtgatgagaaggagaaaattgcttaacctttctccagaaacctagggactcatccctttgggctacccaaaactccacacactcctgttccaacaccgattcctatagctttataaaatatactgaattatttgggttgagttttagagaagcttat

SEQ ID NO: 693833 - DNA, 915 bp, Homo sapiens
tctgtctcaaaaaaaaaaaaaaagaaaagaaaagaactgagtacacatgaaagggtgtgatcagaaagtgaggcaaatcatttcatttcgcctccctatgcctcagttttctcatctgtataatggggctgataattcttagtgtggctttgagtacaaatcacaaaatggatgaaaaatctttagcattaagctgacacatagtaaatgctttaaaaatgctagctaaaaagctagtagaaaacttttggggtaatgaatacattaattatcatgattgtggtgacaatttcacargtatatgtatgcacatgtcaaaacttaccaaactctgttttttaaatatgtacagttccttgtatgtccattatacttccacaaagagataaaaacaaactactataagctcctttaaaccaacttctatttaccccatgctctccagtcccctgtaaaacacagcaacagggaccgtgcccttctgagcatctggtgcactgtggcatgtgcaggagcccctgccccacccagacaactccaagttcaccaagagtcagctgtgcttgttcacaaacctatttatggccgttgatcgaatcattgtaaccacccaatttaatttaatatgcaggccgggcatggtgcttacggctgtaatcccagcacttttggaggccaaggcaagtggatcacctgaggtcaggagtttgggaccagcctggccaacatggtgaaaccccatctctactaaaaatacaaacgttagccaggcgtcatggtgcgtgcccataatcccagctactcgggaggctgaggcaggagaattgcttgaacctgggaaggccaaggttgtagtgagccaagattgcaccactgtactccagcctgggcaacagagtaagactctgtctcaaa

SEQ ID NO: 693834 - DNA, 915 bp, Homo sapiens
tctgtctcaaaaaaaaaaaaaaagaaaagaaaagaactgagtacacatgaaagggtgtgatcagaaagtgaggcaaatcatttcatttcgcctccctatgcctcagttttctcatctgtataatggggctgataattcttagtgtggctttgagtacaaatcacaaaatggatgaaaaatctttagcattaagctgacacatagtaaatgctttaaaaatgctagctaaaaagctagtagaaaacttttggggtaatgaatacattaattatcatgattgtggtgacaatttcacaagtatatgtatgcacatgtcaaaacttaccaaactctgttttttaaatatgtacagttccttgtatgtccattatacttccacaaagagataaaaacaaactactataagctcctttaaaccaacttctatttaccccatgctctccagtcccctgtaaaacacagcaacagggaccgtgcccttctgagcatctggtgcactgtggcatgtgcaggagcccctgccccacccagacaactccaagttcaccaagagtcagctgtgcttgttcacaaacctatttatggccgttgatcgaatcattgtaaccacccaatttaatttaataygcaggccgggcatggtgcttacggctgtaatcccagcacttttggaggccaaggcaagtggatcacctgaggtcaggagtttgggaccagcctggccaacatggtgaaaccccatctctactaaaaatacaaacgttagccaggcgtcatggtgcgtgcccataatcccagctactcgggaggctgaggcaggagaattgcttgaacctgggaaggccaaggttgtagtgagccaagattgcaccactgtactccagcctgggcaacagagtaagactctgtctcaaa

SEQ ID NO: 693835 - DNA, 915 bp, Homo sapiens
tctgtctcaaaaaaaaaaaaaaagaaaagaaaagaactgagtacacatgaaagggtgtgatcagaaagtgaggcaaatcatttcatttcgcctccctatgcctcagttttctcatctgtataatggggctgataattcttagtgtggctttgagtacaaatcacaaaatggatgaaaaatctttagcattaagctgacacatagtaaatgctttaaaaatgctagctaaaaagctagtagaaaacttttggggtaatgaatacattaattatcatgattgtggtgacaatttcacaagtatatgtatgcacatgtcaaaacttaccaaactctgttttttaaatatgtacagttccttgtatgtccattatacttccacaaagagataaaaacaaactactataagctcctttaaaccaacttctatttaccccatgctctccagtcccctgtaaaacacagcaacagggaccgtgcccttctgagcatctggtgcactgtggcatgtgcaggagcccctgccccacccagacaactccaagttcaccaagagtcagctgtgcttgttcacaaacctatttatggccgttgatcgaatcattgtaaccacccaatttaatttaatatgcaggccgggcatggtgcttacggctgtaatcccagcacttttggaggcyaaggcaagtggatcacctgaggtcaggagtttgggaccagcctggccaacatggtgaaaccccatctctactaaaaatacaaacgttagccaggcgtcatggtgcgtgcccataatcccagctactcgggaggctgaggcaggagaattgcttgaacctgggaaggccaaggttgtagtgagccaagattgcaccactgtactccagcctgggcaacagagtaagactctgtctcaaa

SEQ ID NO: 693836 - DNA, 1415 bp, Homo sapiens
tttccactcaatataatactgatgtgacctctttgaaggaagacagagggctgacatttgacatactctgtaataaaagaacagtatatctaaaattgaatttgacacctcttattttatggaattcacatctggagatgaaagcatggcatgagatgtcagaacacacgacttggtcttctcttcaacaatatgggtaaatcaacacaatgtggagtccagtagtgttacttggtgaacccagaaatcatttatggccgaagctcctataataaacagagctttgggagagtagcagcaaggctgagctgagagttgaatgttgcttcctgacatggtctccttggcaaaaacagaggcacatgtgaaagtccccactgagcatattcttgttcctaactttttctaaacttctgccagtgaactagatctctgaatttaaagaacatatttctagcaagtgtaatttttccttttcccctcacttgtaccattaaaatttgtcagaatcccagtctatttcacaagatatccatttcaaatcaactttattgatagtaaaagaatatttggaatgcctagacatttctctataagaatgcaaaattaaaggaaaatcagtagacccaaaggcatgtgttgcaattcaaaaagctcccctgaaaaattagaacaacagtcttcacctgaaagagatgtactgtaagaaacaaaacaaaatccagacattaaatctacgacgttagaccaagcagccacaatgaaagaataatcaatgagcataaaacattgaggaaggtgaaaactattattgtcaaaaactaaaataatagaagtcatagctaaagtcttttagtaagcctcttgaagtaatagtagtgggctattagttatttgtctctcatatttcaaaacacggatcaatgaaatttaaagattttgtcataagtattgagtgaatgcataaatatgatttttgatagcactgtaagcgtacacaggaatttcatttactggttgtttggtgccttttatccctgtttgaatgttttcagtgtagttaacagtgtattatagacattcacattaaaaaaaatgacatgaattaacagctcctgatacaaaccaaaccaayaaaaaagtaaaaactgacaatttcactggaaagtaatcctttgggaaaacaatttgacaaatacgagaaaagtttccagttactataaagctgataggaatctattgagaaaaattactttgaattcactttatgatctactcatacattgctttatgaaatatacaatctgattttaaaatggccaacgtgttttgtttatttcgtgctacctgattctcattcataaagtgtttcattttgaaaactggttagttgtcattctatttcacaagcacct

SEQ ID NO: 693837 - DNA, 644 bp, Homo sapiens
tactgctgataggtgtaggtaagaataaaagactccttctacccccatatctcagtctagggctccactggagggggaggatgccagcatttcttattccccaaaacttcatgttgcagacttcatgttgcagaagctctcttccggaaaagatggtctataagtagctatactgaaaaagaatgaatatctcaaataaacaacctaatttyccatcttaatttattgtaaaaggaagagaaaagtaagcccaatgcaaatattttaaaaagttgtttcctcggaaagattaataaaagtagcaaaactttagctagtatgaccacaagaatgagagaaaaaattctaattgctaaaatcagaagtaaaagaggggactgtactaaaatctttacagaaataaaaggaattatgaagaaatacaatactaggaacaatgtatgccaacacataagacaactttgataaaatgaacaaattcctcgaaagacgcaaattgccaaactgactcaggataaaatagaaaatctgaataaacatatagtaagtaaagggattgatttagtaatcaaaatataaccacaaataaaagaccaatccagatatctttgcttctgaattctatgaaaaatttaaagaataat

SEQ ID NO: 693838 - DNA, 773 bp, Homo sapiens
ccagggtctcagagctaataaatggcagagctgagaacctgatttgggcagtttgccctcatggtcattattcaaaatctcttcattaactgactcaactggggggcacaaggccaaatttttctgagttttcaggtagctggtgattgtttttgtttaagtctcctaggattttttttttttttttacaaattacatgtttttgtaatttgttacatgctgtaataagaactttaaaaaaagtagatttacaacagctgaatttcctaaaatacagggtgcttgatcataagactcttcaagaaaaagatattttagaacactaataaatacaatgcgaaaaaactgtattcttatctgggtccttctatcagtgaagccaaaagagctattacaagacaacttaaaactcattccaaagatgaaggcagttgtctgtacaatgcagtgcatcccaggcatctccaaaagacagtaatgagaatccaacccgacagtgaagggagccatgcccatcagggaagttggtgcaattggaaggaaggaaggaaagaagaggtgatccaatcagcatattttttctttgagaacatgaataacaatattcatcaatttctcatacccacaaaaatgttytaaaaaaaacagagaaagcaagttagaaaatccgcaaccatagcaagcagtatcctaaagaaacataattatgtgctcacatacctgaaaaatgaacaggttatattatatagattttaccaactcatcaaagattg

SEQ ID NO: 693839 - DNA, 2543 bp, Homo sapiens
aaaacagctttcctaagtcatttcgcctaaactttcacatctatagcacccttgaaaggaagttttttggcttttacttaaaaactttagagttgcagtggtcattcctcatactacataagtaaaagtcttaaaagtaggtttgtggtttcccccaggattgaaccataaaccacacccagttaaaagtcatgcatctctgtataggaaatgactgaggcctgctgggaagtactacccattgactcagtctaaccttctcattcagacctggtccacacacccaggcctgaacgctctggtcagaaaatagctcctcttcactgctggaaacactcatgtagcgataattgaagctggcccttacctgggggctgtgcctctggacactgaactgggggttgcctgcgaaatggtcacaatgtcttcatcccctccgtcctcataaaagctcgctagcgcgatctgaaacagagaggtagtaccttgggacccttaaacaggccttcacctaacgcacatctcctttgagcacaaaggaatacagacatggccaacacttacaaggtagcttgcatccatgggccaaagaaaattagaccagaaggttaacagctcagctgttagtcttcgtgtcaactgaaacaaattccacccactaaggtgaaaagaaggcagtaagaatggctggggtggaagacactctttattctcattttatgaagaaacgtgatctagtaaaagtagcacacatttagtgagcatttacatgccaggttgttctgagcattctacatacgttaatttgtttaatcctcaagaactctatgctattagtactcttatcatctcattttatagttgatacagaagcactgaggattaaaaaaaaatttgttcaagtttacacaactggtaaagagaggagccaggttccatccctgctagtgtgcttaggccctcactcttaagcgcttccagtacagcccggagtcaggaactgtggagtcagtccaggttgctacttttcctttctttcaagttgtttcctaatctgtgaaatgggggtacctgtctcaccaacctgcacactggatgagataatccattaagatttatgcatactcgcatcttaggtttacacatacagaaggaatatgggaatcctttggtcatttgtgacatctctgtcaccaactcaacggacaggcattyactaatcacttgctttgcacaaacacaagaaagcattgaggtcacagagatgaaatagacatggcctctgtcctcagggtcaccaacttcacaggagacagtgagctgtcaagggataaaagtaatctgctgggaggcagtgtgctgtctcaggccatgtagtgaactggcattctcagggagcctacattcaagtcctgttcctgccaggcaagtcacatgcatgatcctcagtttccccactacaatgtgaggggaacgagacagaagatctgttggtcacaacactgtgtgcttttaggtctttcaggtagaaactttttatttctgcccagcataggggcttcccattgtgtctaggtgtgatctaggtgtgatgctttaccgaattcttatgtttggggagtaatttacgtttggcagcagactcagttcaaattccaaccccgctacttactggctatgtgaccctgagcaaattctttgccctctgtgcttccaattcctcatccataaaatgggtctagtctttacctcatagtgttgctaggatccaacgaatcatattatgtaaagtgcttggcacatggtggtttaaagcttgggctctgtctgcttgcaatcagacagaactgggttccacttctacctcttctgcctggtagctagtgaggccttgagcaagttacttaacctctttaatctcagctgcaaaatgcgaaggttaaatgacaaaagacatgtaaagcagtcagaacagcgcttggctcatggtaggtactcaataaatattagtcatcaccgtcatcatctacctaagacgaagctggccaagaatatttatgcaattctttctacagttaattaccgaatgcttattatgtgccaggcattgttccaggcactgggaattcatcagtgtacaaaaatccctgcctcgtgaagcttaagtcttcttagcaagtatttagtgaatactcagtacgtgccaatgaactacacagcaatttccacgagactcccattttacagataagttaactacgcaaggtgaagaagctccaaccttgcgccaccaccccagaggtattctcccagcaattaggaaggctgggcggcggtcaactcccgggctggacttcggaagtggaaatgagcggccacctagtcccgagtggggcttcacccaagagctgctcactcggaccagcccggcctccagcagatactcggcgcggcagccacgcccccaggcgctccctctcctcgccggctgccgcagcgcccgaagtctcgctgacgccgcaagcgggcgaggcagggtgaaa

SEQ ID NO: 693840 - DNA, 608 bp, Homo sapiens
ccacgttctttcttgacaaacgtgttgagtgatttgaataaagaatttgccaaagggctatcagatttggtaaggacaactaattcattatccagagaatcaaaagcaaagcagttattatctgctataattgatttgactctatcaggataatatttaattacaaaaactataaagtttagcatttagcctcaggaaaaccaattttaaaagagaagtagtgtctgctttggtaatgtcagcctgctagccatttwtttttttttttagcttgagctatcaagatgctgtggtgaataaaccactgcctcacaggtctttcattcctgtcaaaagatctttagagacagatggaattccttttacactcactgcttgagtgaggactgcaaacactacggtgacttttagtgtgcagagtggagacctggctgtgaataaacagtgacatcctggcttttctgctggaaaaagagaattgtttaagttaaaaaatgtaaaactgaggggtggggttgctgtgtgttatttcttttccctaaatgcagatctctgcttagaaagccagactctatttatcaggctttagccctgaggaaataagaaga

SEQ ID NO: 693841 - DNA, 598 bp, Homo sapiens
taaggcctatgattaaaaaggagtgccagaagatagatcccagataggttccacccagagcttatctctgtgcaaagtgagtcatgtgacctgtatttgggagaaactgtatagctacatagcttggaatttctttatattgcagaaaaatttagttataaatccaaattacttgttaagctggtcctcagctgacaaggtgaaaggagaagaatgctactgaaaaatccagacaaastagtaaataaagggaacctccaagtgtgagtaaagagatctcgatttcccatcgcacatgacatattaagaaccagtgatataccaaaagggagaaaccattccttagggtctaaattcccaaacttagattgtatcttttatagccttgtgaaaacacatattttgattgaactaagattttgttacctggaaggaatttaacactttctcagattcattagttttgtcgtcatttattcaacaaatattgagggtctggcactgtgttaggggacacatatatatatatatatataaaacctaatccttaccctcaagaagctcgcagtttagctgagcccatggccttagatgagga

SEQ ID NO: 693842 - DNA, 656 bp, Homo sapiens
acacatacgctatcatttatgtattcctggaataaagtcacagaaagcacattgagaagccaaggaccagagcctgggtcatgcaaaaaggcctaactcagtgatgcagaaaagatccattttcctagaagaatcaatcatgagactattttaaagcaaatgtttgaaaatgttctgagttctgtgcatgttcggaaatataaacacgtcaccagatcctatgtgggtgacccagtttcacagcagaagtgttgtcagttacatttctacctttagaatcttacatctaaggcaatcagagcaggaagaaacccttagtgatcaaatgcttgtttctgaataagctccctgggcttagtctcytctgtacttaattgtaaagcatttgtgctggctggattcatttctcacatttcctcatgatggtcctctttcgccccctcgtccccctgctggagcaattggcaactccctgtaagcatgtgagagccacatccaagggcagaggagaggagctcgtggagtcctcctcctcctcttcctgggccctcaactccctgagttctgcagcaccagccagctggaagttgaacaactttaccacagaggagcataagtctcacaaggaatgaatagatctttatttactaatcata

SEQ ID NO: 693843 - DNA, 676 bp, Homo sapiens
acatatggggtgtgtatatatataaatatatgtatatatatacacacatatatgtatacttctagttctctttctctggagaactctaatgcaagattataaaaaaaattactgaaagaattcttaaaatacatacataaattgaaagtcattttatgttcatggattggaagacaatattgttaagctagcaacactccctacattaatttacagattaaacccaagtcttatcaaaatctcaactgccttgcttacagaatttgacaaacctatcctcaaattcacatggaaatgtagtaaactcagaatagccaaaatagtcctgaaaaagaggaataaagttggaagacttacactccctsatttcaaaacttactacgtagctacaggaatcatcctgaatactttgtactggcataaggatagttatatagatctatagaacaaaattgagagtctagaaataaacccttacatttataatcaattgattttggacaaagatgtcaacaaaattcagtgaggaaagaatagtctggtgctggggtgactggatatcctcatgcaaaagaataaagttggaccctacctcatatcatatacaaaaattaactcaaaatgtaggagagatctgaatgtaagaactaaaatataaaaatcttagcagaaaacc

SEQ ID NO: 693844 - DNA, 659 bp, Homo sapiens
caggtcttacatttaaatctttaattcattttgatttgatttttttatatggtgagagataagggtctagtttcttttgtctgcatatggatatctaggtttccaagaagagactgtcttttccccagtgtatgttcttggcacctttgttgaaatgaattggctataaatgtgtggacttatttctggattttctatttagtttcattggtctatgtgtttttatgttagtactatactgttttggttgctataacttaggtagtgtgatgccccaagctttgttctttttgctcaggattgctttggctattttggatcttttttggcttcacaggaatttcaaggtttttttttccattttgtgaagaaagtcatttgtattttgatagagattgcattgaatttgtagatagctttgtgccagaaaggtattttctattgcttcaattctgtctctyggtaaaactgacaggctacccccacctctcaaaaaccatgtactttattttattccctttgttatttctcaccaaaattttacctaaggaaaaaataaaaatgaagtaggtattttttcctggttttaagatgagatctttgaacctctgcagattattattctttaaaaattggcaagattaatatttctactagac

SEQ ID NO: 693845 - DNA, 630 bp, Homo sapiens
cttttactttgaaatcatagtcttttgcacttgtattagtctttgtttgcttttctctggtctcagcaaaatgcttgtgtaactgtctgaccttttcacaaattatggcagtgcttaacagtacatttttctgggcttggtcttctttccatatatagagaactcagagctgtcttgcatgtgcccacttgggctacagaagtagggacagtcattgctctgggtgtttataatgaagcaggtggggactgaatggatgatgggcacatagaaagataattgattaaaactcacttatacaaagacaaaatcactatattttaaatccaaagttggccaaaccactgtagtgattactgcatctccccttaatagttaacaactacaataataacagcaacaacaacaacaaagagctgctgtcattcattgactgcttactctgtgtcagatgctgttyttagcactctccacggctaactcactaaatcttcatgacccaagtaactatgactttactcattttacagataagataactaatacacagagagattaaatttctcaggtccctgagttagtaagtggcaaatctggaattcaaattccaaagcagtccagttttagaag

SEQ ID NO: 693846 - DNA, 601 bp, Homo sapiens
atttgtttccttgcaagtcaacaagtgaatttcgtttgggtgtaaagatttacagaaagagctyctctggccatcaggtcaaaggtttgttcaagctgaaaagatagccaccaggtttctttgcacacaggtttgggtgggcagagaagtgaccttccagacagttctgcagcagagctctgctgtaactctgcctttggggtctgcagcaccaagctgcctcagggagagacccctccaccttgagcaagttctgctacatcactaatgaaaccccactggacatgacttatgcaaaattcttctctgaagtcaatatttccagactgagtttctcttgtggtaatacagatattgcttagtgtttcttatatggaagcatcaaagatttaaaaagtaccccagaatttccactccatttttatgggtcgtttagcctagcctagtgcatgatatgtatttgttgaatgaatagaagatggaggtagaaagcagaggaactaaactcatgtctgtgtaatgatgtctgatgtttctatattcctgcatttaaaaggccccaatctgctatatgcattcgacctcttggttaaaaagaaag

SEQ ID NO: 693847 - DNA, 994 bp, Homo sapiens
aaaactttaccacaaacataatcaaagcaaagatgatagaaaaagtgtgggcttattgaatctagcatccttaattcataaaactaatcatctccctgccttacactagtcacatataccaaaggtgctggaaatacaaaaatagatgaaaggccaggcgcagcagctcacacctgtaatcccaacaatttgggaggccgaggtgggcaggtcactggagtccaggagtgcaaaatcagcctggacaacatggcaaaaccctgtctcaacaacaacaaaaaaaatacaaaaattagctgggcatggtggtgcatgcctatggtcccaggtactcaggaggctgaggtgggaggatcacttcttgagcctgcaaggcagaggctgcagcaagccgagattgcaccactgtactccagcctggatgacagagtgagaccctatttcaaaaaawaaaaaggatgaagtacaattcttccctctttctacaggctcaaaccctaggtgtcactgaggcaacctgcataaaatgtgattgttatacagggtaaaacatgcaccaagaagcgggaaaatacataaattctacttaattgagtgcatttatcttttatggactcatctgccttgttgtatttcatttcctgtaaacaatttttaataaggaaaagttcacaaaggtaagagcaggcattttaaaatctcacagagataaaagaaacttataaatagctaataacttgtctgaggtaatacccaattatagagctatacaatttacgcctatggagaagctggaaaaggcctttaaaagcgaagcctggccaggtatggtggctgatgcctgtaatctcagaactttgggaggccgaagtgggcggatcacttgagcccaggagttcgacaccagtctaggcaacacggtgaaacgtgtctctacttaaaaaatacgagaaaaaaaaaaaaaaaaaaaaaaaaagcctggctttagagcaaa

SEQ ID NO: 693848 - DNA, 686 bp, Homo sapiens
tgagctcagatataaaataaagataacatgcctctgaagactgctctcttttggctatcacacgctcaccctcaaaatatatccatatttagtaacttaccaaaaaaaggcacacaaggtggattgattgacttaagttttactaggtattttttaaagtgatcttgacttaattccacagcttcgtccaaaattttccttttcctttcctgcagtgccttaaagtatacataaattgagtataaattttttacaattcaatcatattttataaatgcaaacctttaaattttataaaattttgcaaattatctggaaaacaatttttttacattaaragatgagtggtattcctttgtacacttacctgaagtgatttctcctctctttatctataaatataaaacccataatttactcatataaattagaagatcaagcaatacaaaaaattctacgtcatgccttgtgcgttattttgactagccagggtttcaagtcatagctgtagaagatgaaaattataacccctgaacattcaaatatttttccactgaaagatcttttggggctaaaggttggggttttgttaaggagaagacaactatcagaagacaagaagacttgaacaaaaatttagtgaatgaagtaaactagcatttcttttatacttcattactagatct

SEQ ID NO: 693849 - DNA, 686 bp, Homo sapiens
tgagctcagatataaaataaagataacatgcctctgaagactgctctcttttggctatcacacgctcaccctcaaaatatatccatatttagtaacttaccaaaaaaaggcacacaaggtggattgattgacttaagttttactaggtattttttaaagtgatcttgacttaattccacagcttcgtccaaaattttccttttcctttcctgcagtgccttaaagtatacataaattgagtataaattttttacaattcaatcatattttataaatgcaaacctttaaattttataaaattttgcaaattatctggaaaacaatttttttacattaaaagatgagtggtattcctttgtacacttacctgaagtgatttctcctctctttatctataaatataaaacccataatttactcatataaattagaagatcaagcaatacaaaaaattctacgtcatgccttgtgcgttattttgactagccagggtttcaagtcatagctgtagaagatgaaaattataacccctgaacattcaaatatttttccactgaaagatcttttggggctaaaggttgggrttttgttaaggagaagacaactatcagaagacaagaagacttgaacaaaaatttagtgaatgaagtaaactagcatttcttttatacttcattactagatct

SEQ ID NO: 693850 - DNA, 615 bp, Homo sapiens
aatcaacagattaatgaataaagaaaatgtggtatatatacacagtggaacactattcggccataaaaaaagaatgaaagcctgtcgttcaaggcaacatggatgagcccggaggaccttatgttaagcaaaataaatcagacacagaaagaaaaatataacatgttcccactcatatatgaaaactaaaaaaaaaatgaactcatggaagtagagagtagaactgcaggtattagtggctgggaaggaytgggaggaggggaaaacagagaggttggtgtagaaaaagtttttgatggaatgataatgatagtgacatttttcgacagagagctgttacatgcaaggcctgtacccttcgcaacagcctgagctgtaaatgagaaaagaaaacccatctcacacaatattctattcacttagctgctaagggcctagcatccatactaactgacttgactgactgacctcaaactaaaccaaggtgagaaggtattaggagttgaagaggggtggtggacttgaaaatcttcctgccattcctcttgtaatggattgctagtccccagtctagacataagacttttacttgcagggcagactagttaaaaactg

SEQ ID NO: 693851 - DNA, 1039 bp, Homo sapiens
tatttttgcaaacacacatacattcgtatgtatgcacagaaatatataaggataagttatctctgggtgttataaaataaagtgactttcatctaatttatatatctatttttctgaatatttttacaatgagctacattatttttatagtcatttaaaagataaaatgatttttactttggaaaacacttaaaataatataaagcttctttccaactttaagtttaaaatccatagaaggtaaagagctatggtcaataaaatgtatcttccttcatcttgaatatacttaccactaaaaaaaaaaaaaaaacctaaatgttactactctagtttatatactactctagtatataaactttcactataaatattgccataaacacactataaagaaagtgtcactatataggcaatgtgattttagtttgttatcagttaaatcttaaatatctttttataatggccagtggtatcttctaattttcataaagaatatcttacaaaaaaattttgttttttggagacagggtctcactctgtcgcccaggatggagtgcagtgacacaatcatgggcttgatctcccaggcttcctacctcagcctcctgagtcactgggaccacagatgggcactaccatgcctggataattattttacttttttatggaaayggggtctcactatgttgccaagactcatctctaagtttcttactacagcatttagggctttaatgagaatataagtagttttgtaaacttacttctgccaaatcttcaaaacagctgccagctaagggatgaggactgctttcatcagtcatttcaactgtgtcttcaatcaaacctaaaagtttcacagtcaattcatgtatatctgaaatgttactaaaaatcttttcgatatcctgaaaaaagagaaggaaggttaagaaatgtgagattgagaattctgctaaaaaattactaaatataaagagcaatataggctactcgaggcagactgcctatggaatagccctgctccacaagaaac

SEQ ID NO: 693852 - DNA, 1828 bp, Homo sapiens
cacagccacctgcctgaaagaagttgaagcaggccctcagacaggcctttgtcctctgacccttatgggaggctcatgcccaaccccctgtaagagacagcatacctaaaaggtcttcccaagaggaactataattttgtatgaaactccaaaagatcgatttaaaagtatgcctccccactccccacaaaaaaggcattgtatgtttatatgttacatacaacgtgctattgagcaaaaagagtgttttctggttctccaaggtatgaagatgccaccgaggtcatccaaatattgccaccaccaccaggtggaaagtcatygtacgtgggggaagtagctgttccaaacaccatctcctataatcaaggtgaaagggcaaagcattgctgggcgtggtggctcacgcctgtaatcccagcactttgggaggccgaggcggtcgaatcacaaagtcaggagatcgagacaatcctggccacggtgaaaccctgtctctactgaaaacacaaaaaattagcctggcgtggtggcaggtgcctgtagtcccagctactcgggaggctgaggcaggagaatggtgtgaaccccggaggcggagcttgcagtgagccaagatcgtggcactgcactccagtctgggggagcaagactccgtctcaaaaaaaaaaaaaaaaaaaagctatctgaaaggttgagatggggatcccttgagcccaagagttcaaggctgcagggagctatgattgcaccactgcattccagcctgggtaacagtgagaccctgtctaataataataataataatacattcgttcagagaatacagaatcattggaaagctaatgaagtagattctggttgagctttcaggaacaagtcccaaagccacatcacagaaccaggccactaagagagtaatttcaaaataattatgatccacagagaactgccacaccatgagtctagccattgctgctgccacataaaactagtgactgaaaaaaagcatcattcaaatttttgttatttatgttatcgcaatagaatccttcaaattcctgacagttaatgaagttgagctgtcaacaacgaacgtattcgtaatctgttcagtatagctcccagtctatcagatacactagagtgagatatagaaggcagaagtgagcccaggcacggtggctcacgcctgtaatcccagcactttgggaggctgaggtggatggatcacctgaggttaggagttcaagaccagcctggccaacatggcgaaactctgcctactaaaagtacaaaaattagccgggcgtggtgatgggcgcctgtaatcccagcgactcaggaggctgaggcaggagaatagcttgaacccaggaggtggaggttgcagtgagccgagatcacaccactgcaacccagcctgggtgacaagagcgagactccctctcaaaaaaaaaaaaaaaaaaaaaaaagaagaaggcagaagtgagttggaagccgcaactctgatatttctgttagcaagcaccattcagtcactagttttatgtggcagcagcaatggctagactcatggtgtggcagttctctgtggatcataattgttttgaaattactctcttagtggcctggttctgtggtgtggctttgggacttgttcctgaaagctcaaccagaatctacttcattagccttccaatgattctgtattctctgaatgaatgtattattattatcattagacagggtctcactgttacccaggctggagtgcagtggtgcaatcatagctccctgcagccttgaactcttgggctcaagggat

SEQ ID NO: 693853 - DNA, 1427 bp, Homo sapiens
caattattatgcaaatattaaaaaggatattagttacaattttcaagaactagtcaactgtaaaaacaattccttgaaggttgtctgtagagtgagttttcatatgttcatactttattccaaaagattctatatttttataagaaaataaaattacaatgagcttttttcatattaagaaaaggtctgaaatgtaaacactagattttgtagtacttcaatatctctgtctaccttctggtaatcactgcctatatgaaatttacttttggaagtgacaaatacaactacgagatctctttgaaacaagtcaataataaacacacataagccaatctaacaagcaaatttaaattaaattaaattttaatttagcagggtaatgtttattgcccttataattccatatttacctggcttgggattgaaatagtggattacggcaagatagcaatgatgctgagcttacaaagaatgttagggtcttttcactaataaaaattgtatttcctttatctgaaaaattcataggtacaatatgcttgtttttcatttaatacgtgtctattatggctttgtgtagaacttacccataatataagtatgaacagggtcccaggctataatttgttcttcatctggggaatatactatggacaggtatcatttagcaacatttatttaggttgaggaatatgtatctgacttgttaactattcaagaaaatatacattatttaaaagatagattcaattatggaatatatgaaagaagactaatttggataggcaaaggactgaaaactgacctatgtcttatttattttattcctgcaacgagtatgataacttcacaaaaaagttaccaatattaatatcacgtagaagaaaccttcttctacgtgatattgataagaccaaggattctacaataacgctgtcagcacatcctatatttttgcaatttattgaaacacaattgaataacagaatataacaaataattaatttaatgggaaaataacatataaatataataaatcccatttggtaaacatagacttackaaatctgagctattaaggagattattgacatcacaatgaaacacatttaaaaaattaaaatcacgtaattttcacagaacaccaccaaatttctgaaagtgcatgaagaaaaaaattcatatctataatataaacacattagttgccctagagttataaactcagtaagagcatccttgccttaagaaactcaaagtgcaacttgagaaggcagataataatcgaatttgggagcagagaagcagcacacctaatttgactggtgaatgagaggggagagtggcagtaagttatttacaagagaacagttcctgaaaaaaagcatgaggcagcatgagcaaaagtatactggtgagaaaaa

SEQ ID NO: 693854 - DNA, 2616 bp, Homo sapiens
tactagtccataaagttttagttcactaatacatattgcatgtgttggagtggttaaatttcatccaagtataggtttctagaccataaagaataccgcacatctggcaaagacagagacatgcttgtcacttagaaattctgtacagagttaaacgcaagtttaactctgagtgaactttgcctctcagtgtcatgaatgacttgagagttttgactggatatgccaaaggctcaaatgctctgtcacaagaaaaagtcattaaagaagttagagcatccctctctttgtaattgtggtcctccatgcctgcaaagattcttctctaagcataaactctgtctactatactcgatgtgctaacccccgctccgctgcccgcagcaatttaggacttggaattactcatagttgaaaaaaaaatcacatcttaaatcaaaagcttaaatgcagataaaatatacatatttagtagtatgttttacaagggatgaaggaattgtgaaacaatttaactgctctctgactattgatgtattgaaaaattttggtctcaataatttaaatattctaatttttgtcttcttcagaggtgagaggctgccctagtttagaaatcctcaaattttgccattaaagatgaccaaaatctaacagaaaagttgaaattttagaatctaaaatatctaatagaattaggattcaaaagatatacacataaaatttttattattgagatataactttcaaaagtaaaaacatgattcttttacagatttagaatgaatttgtgtcaaaaatactcaatttattattgaaaggaccaaaaaacagtaaatgcagtctaaatgtgaataagaggaacagggattatatcatctttcaaaaaatgcattaaaaaaccaataaaataagattgctaggtcagatacacatatggttaatgtcttatcaggcagggcaactataacttttatactgaacaaaaatatatgttaaaatgtaaattgacagaatttatggcgttacttaacaggaaatatcagaaataaacataagcatattttcctatatcagagggcaacaaactatgcctgctggccaattgcctactttcataaataaagtttgtttttttttttaaacacagccatacccattagtttaaacattgttgatggtggatctagagtcgcaatagcagaactgagtagttgtgagattgtatggcttgcaaagcctaatttatatcgttaaaaaaaaaggttcgtatctccctgataattaaatcatattaaaataactttttatacagtacattcattttgataatatataatttctaaggagtactcttgaggccaaaaaggccattcttttcatgcctaggtctgtttattaacgtagatatagcaagaggtgtaaattgactatatatgtttccttcagcacaaagtgtcaagcagctttgaggctagaataattaacttatttcaagacatttcatttaaaaatcacactatgaactttaaaaagttctacagtatatttttctgccccaagactggaaagtcaagtgaaagaaattctctccaccacactttccagatctgagctgctttctctctcctcaggttacactagattttctaaagttcctggcctgtcaggaagtcaccttcctcaccacctgagagactgaaacctgtaaactttgttccacaccgtcttgaaaatatttatgggcattgactccaagtataaagtgcaattctttttcattgatgatgagcttattattattagattaatgtattaccaaatatgacactccagggttggccttgattattgcataatcactttttaaaattatatcatactacagaggaggattaatctttattgtacttatgtgaataataatattatcatgaaaaataaggagaattaataaagtaattgttaccaagtttaatggagtcagtgaaagttacactaattttaaaaatgatccatttaattcatgaaaatgtattctaccaacttgagtattagagtcagattaaaaatgattccacatatgttaataaaaaatagaatattaggrcaacctcaacactatcacaaacaaataactacaaataatttccttcatccacatagtcaatctttatttatttcttttttattttatttgaaacagagtctcattctgttgcctaggctggagtgcagtggcacaatcttggctcactgcaacctccgcctcctgggttcaagcaattttcatgcctcagtccccactgtcctcccacccccacaagtagctgaggttataggtgcgtagcaacatgtctggctaatttttgtattttcaatagagacagggttttgccatgttagccaggttggtctcgaagtcctggcctcaagtgatatgcttgtcttggcctcccaaagtgctgggagccgcagcacctggtccacctagtcagtcttttataattaattagaacttgaggaaattattcatcttctagatcttgtgatagtttaatttcagaatcctgtgatattgcctgacagttgtctaagcaattataggtttaagct

SEQ ID NO: 693855 - DNA, 666 bp, Homo sapiens
tacatcgtaagtccaatttcaatagtcaattgtaaaagtgataagtttcaaacttaacattaaaattatgtcttatgtctgttactgaatccaagttatcatacaaagaaaaactcaaactgaaagtgccttaattttttgaaagaaatcactatgaaaaaattaaatttgaaaatgcccacttagggattcttatttttttttgtctcagtagagagtgagatcatattaaaaacataaattgtgttttaatttgtataattattaaacacattcaaaataaacatagaaaaacagaaaatacaagtgaaaaagttaaattagtaaaagctaatgatactgatactactattgacaatatttgaatatattctctttctgcttttctattttatacaatattagggtagtactacttaagtagtattataacatttttcctcaaaatacgatattgtagatattttctcaaatcccaraatattttttgtaacataattttagtttgaatatatcatgccgtaactgagtatttttctattttttgacgttcatattgctttaacatttttactattgtatataaaatactttgataaatgtctttttgcgtgaatctttgtatacgtccttatatttgtgatatggagaatattagatacgtaa

SEQ ID NO: 693856 - DNA, 656 bp, Homo sapiens
gattacaggtgtgtgccaccatgcccagctaatttttatatttttggtagagacagggtttcaccatgttggccaggctggtctcaaactcctgacctcaggtgatctgcctgcctcagcctccgaaagtgttacgattacaggcatgaacyaccgcacctagacaaggaagcttttttaaccatagaatcttaggtaactctttttcttaccatgtacatatatactgtttaagtatccaaattttaaaaccaatttttaattttaaaaatctcaacttgaatttatctgagatttcagctcatattcactgcagagttatttataatatcaaaaaatgcaaactttatatccaacagtttggtataaattggaaaaaaataaactaaacattaaaaaccatattgtggaatattttgcaacataggcaaatattcaaatacagtaaatgaaaaactgattatagattatatttcaatctccaattgtgtaataatcatatatgtacacgtatatggtcaggtctcactctgtcttccaggctggaatgcagtggcataatcattgctcactacagcctcaaactcctaggctcaaggatcctcccacctcagcctcccaagtagctgggactacaggtgcatgccagtatgccc

SEQ ID NO: 693857 - DNA, 1078 bp, Homo sapiens
gatctgatgaccctttctttttgcttactttcccctcaaaaagtggagaaatacgttttaatcattaataaacaaaataattgtacacactacataattcatawatacctccacatctattatctcacttaaactccccagtagtcttgtaagataggtaggaaatatatcccccatcttaaaggtaaggaaactgagtattaaaagagttaaaaattaatattaatagtaagtcacatttggatagcacttcacacttccctgaagtcactgtgctgtgtcctgtctttgcctgcacctggtgacagactcagtccttgaccacagggatgggcgtgtggctgtcatggtagtccatgcccctgggcatgggctcagtgattggttcagaaacaagtcagttaagattcttcttttttttttttttttcctggtagagctaatggggagagtctctctttattctcaaatcctggatttggaaaaaggagattctgggtcctgtcatagaaaatgaaagacgaaaatgaatccatgcagagctgagtaaggagattgggggaggctgagtgaaagggattcccacggatgcctaaggccccatttccagtgcctaagacctcagagtggtcttgttctgtgtccctcctgaggtttatttaataattaatccctcaaatctataagccatcttgtgtgctctcaataagcaccctctgccccccttttcttctttttttcttttttgagatggagtctcactctgttgcccaggctggagtgcagtggtgccacttcagctcactgcaacctctgcctcccgggttcaagcaattctcctgcctcagcctcccaagtatctgggattacaggcgtgcaccaccatgcttggctaatttttttgtatttttagtagagatggggtttctccatgttggtcaggctggtcttgaaatcctgacctcaggtgatccgcccgcctcagcctcccaaagtactgggattacaggtgtgagccactgcgcccagccaataagtcccattttgagttgttcccctgaccagcctacacttacca

SEQ ID NO: 693858 - DNA, 621 bp, Homo sapiens
cgtcctgctggccagccacactcacactggactgtggctgttccagaatgttccttttcctgtcacttcttccaccttcataatcagcttctctagcctactgttgcttagagtcactactgatttctgtgtaacacattaaactaacactgaagaaacatttgaaatgttttctaaaaagattttttaaaatgttggttatcttattgcttctgtggctaaggaattcaagagtggacgggtgtttccagatccgggtctcaggtgtggttgcagcyggaatgttggtaggggctgcagtcttctgaaggttggactggggctgaaggatctgcttccaaaatggctcatgttaacttggaaatcacacaatttataaatttggaaaggagactttatttcttatatagggttatagcctgcaaggtggccattttgagagggtgggaagcatagcctctggccaaagctccaaaagcaggcacttcctatgtttacttataatccttattgttacgcaggtacatataagagaccacctgagcaggcttagtgtgagcaacaaggctgtttattcacttgggtgcaagtgcactgagtctgagaaaggggtcagcgaag

SEQ ID NO: 693859 - DNA, 1476 bp, Homo sapiens
ggaaacagagttcattaggcctccttggacctgatgatttggaatcctgccccttcagatggtaaccactcccttataaaaggttaattccaagcagtcagcccttcattcccatcaagcattcccagcgtgagccttgacaactatggcaatctcagaccatataacctcacctgactcttcagattcctgctgtggtagaactgattctgtttcaagtggtaaacgactgggggaccagtaattgcaggaagcagtgtgagaaagagtagaaagaagttatgctttacagagcatcagaactactacctgaatttaccacttaatatctgtgtgattgtacacaagtttaatgtctccatgtctcattttccccatccagtagaattgctctgatcattgatgagaccaagttggtaaagtccctagcacagtgcttgctataaaatagggatggaaatgattggtcactatggtaatgttattgcaaaagtaacccagtattcctcctttccctgtgtccatgctcctgtgcaatgtcacctgcagttcctccattaagaagccaaatctacttctccaactcttgagtctgggcaggtctccaacttgacttggccaacagaatgtggcaaatgtggcataagccagtttcaggccttggtctcaagaagtcctgtgtgttctgctcattctctgggattcctgtccgtattgccatatcaatatgaataagcccaaaatatgaataaagcccaaaatatgaataagcccaaaatagcctggtggatgatacagacctcatgaagcccacttgtyttgtccaagtcctcaggtatatgagtgagcccaagtgaaactgcaaattgaccttattgatttgcagctgaaaacagaggcatgagccagcccagctgaaatcagctaactgggcctctaccagcaggaccaccaagccaacctataaactattgaaaaataataaatggttattgtactaagccataaaattttagggtggtttcttatatagcattatggtcgacatagataaacttcactgttcttttccccaattccttcaaatattttgttcaatgttatacatcaaaaatcaaaactaaaaacttctgtgtcccttttaactcctttctctccctgtatcccaacacaaagccagtcagtcaccaaccgaaaatgacttggattcaagtgtcctgcagatctcctggcaaattttcttccctgggaaagaaagctcttccccattcgtttttccagagaagccagttacatgaaaagttcctaataccagtttatatccagcctgcctcgtgggttggacaattacctggaacagaacttcttctgggtcagatcacacaatagcaatggtttcctacttctcactgaagctgcaaaggtctttggacacaatgttgttcagtactaagccccttattttgttttattttg

SEQ ID NO: 693860 - DNA, 1476 bp, Homo sapiens
ggaaacagagttcattaggcctccttggacctgatgatttggaatcctgccccttcagatggtaaccactcccttataaaaggttaattccaagcagtcagcccttcattcccatcaagcattcccagcgtgagccttgacaactatggcaatctcagaccatataacctcacctgactcttcagattcctgctgtggtagaactgattctgtttcaagtggtaaacgactgggggaccagtaattgcaggaagcagtgtgagaaagagtagaaagaagttatgctttacagagcatcagaactactacctgaatttaccacttaatatctgtgtgattgtacacaagtttaatgtctccatgtctcattttccccatccagtagaattgctctgatcattgatgagaccaagttggtaaagtccctagcacagtgcttgctataaaatagggatggaaatgattggtcactatggtaatgttattgcaaaagtaacccagtattcctcctttccctgtgtccatgctcctgtgcaatgtcacctgcagttcctccattaagaagccaaatctacttctccaactcttgagtctgggcaggtctccaacttgacttggccaacagaatgtggcaaatgtggcataagccagtttcaggccttggtctcaagaagtcctgtgtgttctgctcattctctgggattcctgtccgtattgccatatcaatatgaataagcccaaaatatgaataaagcccaaaatatgaataagcccaaaatagcctggtggatgatacagacctcatgaagcccacttgtcttgtccaagtcctcaggtatatgagtgagcccaagtgaaactgcaaattgaccttattgatttgcagctgaaaacagargcatgagccagcccagctgaaatcagctaactgggcctctaccagcaggaccaccaagccaacctataaactattgaaaaataataaatggttattgtactaagccataaaattttagggtggtttcttatatagcattatggtcgacatagataaacttcactgttcttttccccaattccttcaaatattttgttcaatgttatacatcaaaaatcaaaactaaaaacttctgtgtcccttttaactcctttctctccctgtatcccaacacaaagccagtcagtcaccaaccgaaaatgacttggattcaagtgtcctgcagatctcctggcaaattttcttccctgggaaagaaagctcttccccattcgtttttccagagaagccagttacatgaaaagttcctaataccagtttatatccagcctgcctcgtgggttggacaattacctggaacagaacttcttctgggtcagatcacacaatagcaatggtttcctacttctcactgaagctgcaaaggtctttggacacaatgttgttcagtactaagccccttattttgttttattttg

SEQ ID NO: 693861 - DNA, 1476 bp, Homo sapiens
ggaaacagagttcattaggcctccttggacctgatgatttggaatcctgccccttcagatggtaaccactcccttataaaaggttaattccaagcagtcagcccttcattcccatcaagcattcccagcgtgagccttgacaactatggcaatctcagaccatataacctcacctgactcttcagattcctgctgtggtagaactgattctgtttcaagtggtaaacgactgggggaccagtaattgcaggaagcagtgtgagaaagagtagaaagaagttatgctttacagagcatcagaactactacctgaatttaccacttaatatctgtgtgattgtacacaagtttaatgtctccatgtctcattttccccatccagtagaattgctctgatcattgatgagaccaagttggtaaagtccctagcacagtgcttgctataaaatagggatggaaatgattggtcactatggtaatgttattgcaaaagtaacccagtattcctcctttccctgtgtccatgctcctgtgcaatgtcacctgcagttcctccattaagaagccaaatctacttctccaactcttgagtctgggcaggtctccaacttgacttggccaacagaatgtggcaaatgtggcataagccagtttcaggccttggtctcaagaagtcctgtgtgttctgctcattctctgggattcctgtccgtattgccatatcaatatgaataagcccaaaatatgaataaagcccaaaatatgaataagcccaaaatagcctggtggatgatacagacctcatgaagcccacttgtcttgtccaagtcctcaggtatatgagtgagcccaagtgaaactgcaaattgaccttattgatttgcagctgaaaacagaggcatgagccagcccagctgaaatcagctaactgggcctctaccagcaggaccaccaagccaacctataaactattgaaaaataataaatggttattgtaytaagccataaaattttagggtggtttcttatatagcattatggtcgacatagataaacttcactgttcttttccccaattccttcaaatattttgttcaatgttatacatcaaaaatcaaaactaaaaacttctgtgtcccttttaactcctttctctccctgtatcccaacacaaagccagtcagtcaccaaccgaaaatgacttggattcaagtgtcctgcagatctcctggcaaattttcttccctgggaaagaaagctcttccccattcgtttttccagagaagccagttacatgaaaagttcctaataccagtttatatccagcctgcctcgtgggttggacaattacctggaacagaacttcttctgggtcagatcacacaatagcaatggtttcctacttctcactgaagctgcaaaggtctttggacacaatgttgttcagtactaagccccttattttgttttattttg

SEQ ID NO: 693862 - DNA, 1102 bp, Homo sapiens
cgtgctgccttcatatctttttttcaraaaaactttgctgcaagtcagcttttgtctcatgacttccatcatgcagcaaagaagaccaccctgtgtataccatggtggaaaaacatgagaagtttgagtctccaagactgtgtggggtcaagaggccctctaacctgaaactgcaactgatatatacaagagaaacacatttgcaccttgtttggtccattgcatttgatggtttgtttgtaaatgcagctaatattacccttatttacataagagcagatagaaacttaattttgcttgagaataacttttcaatcttaaatgttagagacaaggttttttgttttgctccctcaattataaatattctgcatcttttgtaatttattcaaaaaataaatttattatttcaaaaaaaattttttagcacttcttgaataaacagtacttttattcttaatgagattgctttctatatctgtaaagcccttatctttggttttataagaagcaatgtctgagttgtggattctcttgcatttcttgagtgggtactctcaagaacctgtgaagtggtgagggaagctggatatggaagagaaaagagccaagaaaagatgtgattcggctgaaaacaaacctcagtctgattgcacaggatgctctaggtagaaatctcactgcagagtggttcgtccctgaggcagcagcagttttttgagccttaatgtatatcagtcattggctagtgggaactccaagacatttgtcagaggatgggctcttactggatgaaggcaatcctctgtggaagagggccgctgagagctgagagcagacaacaggaccgcactggggaataagtacatcagcccagtgagagcctctgggcattgcaccagcattcattacagctccttttccttaaatatgtgaattcatgacctgtggtttcccattagacaaggctgatgggaatattctcttccccaaggggaatgtatagttttcatgacttcaaatatggtctctaattttgcagaacaaattctttcatgggaagacacaccgtcagaaagttaagttttgacacaagtacaaa

SEQ ID NO: 693863 - DNA, 1102 bp, Homo sapiens
cgtgctgccttcatatctttttttcagaaaaactttgctgcaagtcagcttttgtcycatgacttccatcatgcagcaaagaagaccaccctgtgtataccatggtggaaaaacatgagaagtttgagtctccaagactgtgtggggtcaagaggccctctaacctgaaactgcaactgatatatacaagagaaacacatttgcaccttgtttggtccattgcatttgatggtttgtttgtaaatgcagctaatattacccttatttacataagagcagatagaaacttaattttgcttgagaataacttttcaatcttaaatgttagagacaaggttttttgttttgctccctcaattataaatattctgcatcttttgtaatttattcaaaaaataaatttattatttcaaaaaaaattttttagcacttcttgaataaacagtacttttattcttaatgagattgctttctatatctgtaaagcccttatctttggttttataagaagcaatgtctgagttgtggattctcttgcatttcttgagtgggtactctcaagaacctgtgaagtggtgagggaagctggatatggaagagaaaagagccaagaaaagatgtgattcggctgaaaacaaacctcagtctgattgcacaggatgctctaggtagaaatctcactgcagagtggttcgtccctgaggcagcagcagttttttgagccttaatgtatatcagtcattggctagtgggaactccaagacatttgtcagaggatgggctcttactggatgaaggcaatcctctgtggaagagggccgctgagagctgagagcagacaacaggaccgcactggggaataagtacatcagcccagtgagagcctctgggcattgcaccagcattcattacagctccttttccttaaatatgtgaattcatgacctgtggtttcccattagacaaggctgatgggaatattctcttccccaaggggaatgtatagttttcatgacttcaaatatggtctctaattttgcagaacaaattctttcatgggaagacacaccgtcagaaagttaagttttgacacaagtacaaa

SEQ ID NO: 693864 - DNA, 1102 bp, Homo sapiens
cgtgctgccttcatatctttttttcagaaaaactttgctgcaagtcagcttttgtctcatgacttccatcatgcagcaaagaagaccaccctgtgtataccatggtggaaaaacatgagaagtttgagtctccaagactgtgtggggtcaagaggccctctaacctgaaactgcaactgatatatacaagagaaacacatttgcaccttgtttggtccattgcatttgatggtttgtttgtaaatgcagctaatattacccttatttacataagagcagatagaaacttaattttgcttgagaataacttttcaatcttaaatgttagagacaaggttttttgttttgctccctcaattataaatattctgcatcttttgtaatttattcaaaaaataaatttattatttcaaaaaaaattttttagcacttcttgaataaacagtacttttattcttaatgagattgctttctatatctgtaaagcccttatctttggttttataagaagcaatgtctgagttgtggattctcttgcatttcttgagtgggtactctcaagaacctgtgaagtggtgagggaagctggatatggaagagaaaagagccaagaaaagatgtgattcggctgaaaacaaacctcagtctgattgcacaggatgctctaggtagaaatctcactgcagagtggttcgtccctgaggcagcagcagttttttgagccttaatgtatatcagtcattggctagtgggaactccaagacatttgtcagaggatgggctcttactggatgaaggcaatcctctgtggaagagggccgctgagagctgagagcagacaacaggaccgcactggggaataagtacatsagcccagtgagagcctctgggcattgcaccagcattcattacagctccttttccttaaatatgtgaattcatgacctgtggtttcccattagacaaggctgatgggaatattctcttccccaaggggaatgtatagttttcatgacttcaaatatggtctctaattttgcagaacaaattctttcatgggaagacacaccgtcagaaagttaagttttgacacaagtacaaa

SEQ ID NO: 693865 - DNA, 1102 bp, Homo sapiens
cgtgctgccttcatatctttttttcagaaaaactttgctgcaagtcagcttttgtctcatgacttccatcatgcagcaaagaagaccaccctgtgtataccatggtggaaaaacatgagaagtttgagtctccaagactgtgtggggtcaagaggccctctaacctgaaactgcaactgatatatacaagagaaacacatttgcaccttgtttggtccattgcatttgatggtttgtttgtaaatgcagctaatattacccttatttacataagagcagatagaaacttaattttgcttgagaataacttttcaatcttaaatgttagagacaaggttttttgttttgctccctcaattataaatattctgcatcttttgtaatttattcaaaaaataaatttattatttcaaaaaaaattttttagcacttcttgaataaacagtacttttattcttaatgagattgctttctatatctgtaaagcccttatctttggttttataagaagcaatgtctgagttgtggattctcttgcatttcttgagtgggtactctcaagaacctgtgaagtggtgagggaagctggatatggaagagaaaagagccaagaaaagatgtgattcggctgaaaacaaacctcagtctgattgcacaggatgctctaggtagaaatctcactgcagagtggttcgtccctgaggcagcagcagttttttgagccttaatgtatatcagtcattggctagtgggaactccaagacatttgtcagaggatgggctcttactggatgaaggcaatcctctgtggaagagggccgctgagagctgagagcagacaacaggaccgcactggggaataagtacatcagcccagtgagagcctctgggcattgcaccagcattcattacagctccttttccttaaatatgtgaattcatgacctgtggtttcccattagacaaggctgatgggaatattctcttccccaaggggaatgtatagttttcatgacttcaaatatggtctctaattttgcagaacaaattctttcatgggaagacasaccgtcagaaagttaagttttgacacaagtacaaa

SEQ ID NO: 693866 - DNA, 457 bp, Homo sapiens
gtgatccgcccacctcggcctcccaaagttctgggattacagtgcccagtcatgactacctcttctatgaaactttccttggcattgtctcattccttgtctcggtgacagtctatttattgtgtgctcctggcctcaagcaatcctccagcctctcagcctcctgagtagctgggattacaggcaagagccactacaccaggttttaagaggtttactcgctgggcgtggtggctcacatctgtaatcccagsacttcaggaagctgaggcaggtggatcacttcaagtcaggagtcgagacctgcctggccaacatggtgaaaccctgtgtctactaaaaatacaaaaaaaaattagctggtcatggtggcgcacgcctgtaatcccagctactttggaggttgaggcaggagaataacctgaacccaggtggcggaggttgcagtgaggtgtga

SEQ ID NO: 693867 - DNA, 457 bp, Homo sapiens
gtgatccgcccacctcggcctcccaaagttctgggattacagtgcccagtcatgactacctcttctatgaaactttccttggcattgtctcattccttgtctcggtgacagtctatttattgtgtgctcctggcctcaagcaatcctccagcctctcagcctcctgagtagctgggattacaggcaagagccactacaccaggttttaagaggtttactcgctgggcgtggtggctcacatctgtaatcccagcacttcaggaagctgaggcaggyggatcacttcaagtcaggagtcgagacctgcctggccaacatggtgaaaccctgtgtctactaaaaatacaaaaaaaaattagctggtcatggtggcgcacgcctgtaatcccagctactttggaggttgaggcaggagaataacctgaacccaggtggcggaggttgcagtgaggtgtga

SEQ ID NO: 693868 - DNA, 620 bp, Homo sapiens
ctgaacttgaaatatgtattcgtgaggaaggaaaaacagttggggcatgttcctccattttggtgtatattttaggatatcatcctttaggaagaaggcatattctcttttttttttttgtttgttggtttgtttgtttgtttgtttttcttaaccatatcttctaaatgcattaatcaggggagaggcgacccagaaatcactgtgaaagttgggaccttatctttgctgtttgagcccagatcttgcatttagaatcatggcatggtgggcaggatctgaatactctccctggagaagatgaccctggcagccatgggtggctgggtggccagggctccacaggaggacaaagcacagaaaacaaagggacttaagagcatgagctggccatgacaagccatgccataagctttaagaaatatgtcttgtttctgaagagttggctgttgccaactcttctccaaacattgaaatcccttagaaatctgcttcctttccccattagattttgtgtgtgygtgtgtttattattttggtaggcggtggagatactgcaccagagcttgtcagatgagtaagctgctctttgggaagacatcttgactgaggtacctatt

SEQ ID NO: 693869 - DNA, 605 bp, Homo sapiens
gaaaaggttttaaaagccaacactgtggctctgctctctaattttgttactattattgctgttaactttcatcagatctgtttctcaaagccaagtttgtcctaaaagcctcataaattgaatagcacagtcctcaggatttaatatgaaaattggaggcaatattagcatttttttcaagtacgtcaagtgaattttgaaagctatgcaactacattctaaaacgttctaccaaatacattaatcctattctgtgttactggaaatcgcctatgtgcaaagcatctcctttgtcacctattttcttatttgaatcttaaatctaaagcaaagmacttatagttggagaatcacagcagttgacagcccagttgtagataggcacagtatcagaaaggttttctgaaaatattgcttatcaggttctgggatcaatttttatttttctgaaatctgacttaaaaaatggttgcagatgctcactttaaagactaacattgttaaagacattgtttaaagagcagttaatgttactctgtagtttcagccattaaaagttatcataatacaaaatcctttttttccccctatgacacctcccttta

SEQ ID NO: 693870 - DNA, 605 bp, Homo sapiens
gaaaaggttttaaaagccaacactgtggctctgctctctaattttgttactattattgctgttaactttcatcagatctgtttctcaaagccaagtttgtcctaaaagcctcataaattgaatagcacagtcctcaggatttaatatgaaaattggaggcaatattagcatttttttcaagtacgtcaagtgaattttgaaagctatgcaactacattctaaaacgttctaccaaatacattaatcctattctgtgttactggaaatcgcctatgtgcaaagcatctcctttgtcacctattttcttatttgaatcttaaatctaaagcaaagcayttatagttggagaatcacagcagttgacagcccagttgtagataggcacagtatcagaaaggttttctgaaaatattgcttatcaggttctgggatcaatttttatttttctgaaatctgacttaaaaaatggttgcagatgctcactttaaagactaacattgttaaagacattgtttaaagagcagttaatgttactctgtagtttcagccattaaaagttatcataatacaaaatcctttttttccccctatgacacctcccttta

SEQ ID NO: 693871 - DNA, 605 bp, Homo sapiens
gaaaaggttttaaaagccaacactgtggctctgctctctaattttgttactattattgctgttaactttcatcagatctgtttctcaaagccaagtttgtcctaaaagcctcataaattgaatagcacagtcctcaggatttaatatgaaaattggaggcaatattagcatttttttcaagtacgtcaagtgaattttgaaagctatgcaactacattctaaaacgttctaccaaatacattaatcctattctgtgttactggaaatcgcctatgtgcaaagcatctcctttgtcacctattttcttatttgaatcttaaatctaaagcaaagcacttatagttggagaatmacagcagttgacagcccagttgtagataggcacagtatcagaaaggttttctgaaaatattgcttatcaggttctgggatcaatttttatttttctgaaatctgacttaaaaaatggttgcagatgctcactttaaagactaacattgttaaagacattgtttaaagagcagttaatgttactctgtagtttcagccattaaaagttatcataatacaaaatcctttttttccccctatgacacctcccttta

SEQ ID NO: 693872 - DNA, 663 bp, Homo sapiens
atggtggcacatgcctgtaatcccagctacttgggaggctgaggcaggagaattgcttgaacctgggaggcagaggtttcagtgagctgagatcgtgccattgcactctggcctgggctacacggtgagactctgtctcaaaggaaaaaaaaaaagaatagagttgagtgcctgtggcttttccaggttcaggatgcaaactgctagtggttctgtcattctcacttctggagggcagtggcccccttctcacagctccagtaggtggtgccctggtggggactctgtgggggctcagaccccacatttcccttcctcactaccctagtagatttctctgttagggcttctcttgcttcgtcttcttgcttctgctctcaccatgtaacaccacccactctccctttgcgttgcactatgattgtaagcttcatgaggccctttccagaagcagatgctgcagccctgcttatacagcctgcaggactgtgaagcaattgaaactcttttyttaaaagttatcctgtgtcaggtattccttcatagcaaggtaaaaacagaccaacacagagagattgttataaagatacaaagagaaattccgtaatgagatacctagttgaaaacagccagaagtaatgttctcatgttgtttattatata

SEQ ID NO: 693873 - DNA, 642 bp, Homo sapiens
gtatgttttaattataattattctttgggcatgcatgagactttattccagtatcacctaactgtgtagtcctttggtgactggagataaattaccccactgtagttctcctgttataaagatggggctgttcattatttttgaacgaagaaaacacatggcttctttgacacttactagatcaaatgacagtcttaatctattatatcactatcartttgcctaattgtacttacttaattctgactaaattacatttagtctctgccatctgtccaagtagtgacagctgggagatagaacttatttattctattccaaaagagtatacttgccatcttctagttatatgtagttttaagacttttctccctgattttttcaaaatcaactaaataaagaacatatttaagtttaaatgtggctattcttgattagaaatatatttagaggcaaaatttactcaatcagctgactcatgttgagtatctaatatgtgctaaattccaaaattaaaagcaagcttaagttgctcattaaacatttaacccataaatgttctaggcaatggttaacatatattgtttggaagaaatctgggaccaaatggtcactacagagctaaatcaatccttggcattc

SEQ ID NO: 693874 - DNA, 728 bp, Homo sapiens
ccaaccatttgcagaaaagtgaagcccgatccttctcatgcgttgtcttctacaattgcagtagccatctgacagataatagaataataggaagatgttgccttggacaatgggccagccaaagagctgaatgagagacactaaaataaataaataaatattctaaaaaaggcattttgacagaaaaattctccaaagaggggaggcattctcttgtcttttcctatccacctttgcagcagggtatcttttccccctcacttggagtctttcatcagctttgggccctttcctagctcctctgctcttttagagacttttttttyaggggccatgtagtggtttagattttaatggaagtatgttaggtggggcctggcttccattatgctgagctcaggcctagtgatgtgatctgtcctcttcactgttgtcagggaagaaaagaaggaagggaggaagaaaaggaagagaggaaggaaggaaggaaggaggggaggaaggaaggaaggaaggaaagaaggaaggaagggagggaggaagggagggagttaaattaagtttagccctaaagctatctccctacatattttaagttcagcctaaaggtttctctgtacacagtaaatggtcacccacctggacatgtaaacagactgtaatctattattgtgccaatcaccaaattttggccaatcacagggggccaactgttcaagccctgttca

SEQ ID NO: 693875 - DNA, 1450 bp, Homo sapiens
ctctctctctcttgctctctctttctctctcgctctttaatactaaggctaatacttttgtcttggaagactgtgaagctcttttttccctgtcctgctccattgccagcctcttagttgaattttcaatcctagtgtacatgcactggaatgacactttatgggaggtttagtttctaaagtcagcatggaaggtragaatctattatatttttaaaaattcactcttaaaaagtgaattcactttttaagtgaatctatttttaagaatctattatatttttaaaaattcactcttaaaaagctgcccattttgtgcagcttgcatagtttactctattgttatacacaaaaacataccatagttaagactatgtaaggagtatgtaattttccagtgccatatccttaaacattagtatctcggcaagaggctctgagagataagcaggaacaaaaattgattcagggcagaatagattcacatctcacatctcctgctcactccggtacatttgctcactaagtgaaatggttggtagaatcgccacgtaactggaaaatttcttccctctcctctctctccttacactgaccctgtgtgcttctctctctctatttttctctctgtaatagacgtacttaaatttgtgtaagttaaatatgcatgtggtgtcgttttactgtatgtttcacaaatgacagctgtaagtcaatgaatatcattgtgaaatataagaaaaggaaaagaaaaaaggaagcttgtttttcagcactcagcaggaaaacacactgttggactttatgtttcttttggaatatgggtttactgttaaagctaaattaatagtttacatggtaagccaataagatcaatgtccttttggaaaaacaaggctaatattctagtctgggatgcactaagccggaaaagcatgagttacaagtaagtttaacacattaaaaagcatcttggggagaattcttgaatttacacaactaagtatatataacagagtctttacatctaaaccccattttatcaggccaggccatttgtcagcacatctcttcttagttacccccaaggcatccatactttacagcaaggagtgatggcaacagctgggggcgggaacttcaaagaagtaccagacccgtaggccccatgtggtggctcacgcctgtaatcccagcactttgggaggccgaggcaggtggatcacttgaggtcaggagttcgagaccagcttggccaacgtggtgaaaccccatctctactgaaaatacaaaaattagcctggcgtggtggcacatgtctataatcccagctacttgggaggctgaggcaggagaattgctggaacctgggaggcggaggttgtggtgaggcaagattgccccaatgcactccagctggggtgtcaaagtgagactttgtctcaaaaaa

SEQ ID NO: 693876 - DNA, 759 bp, Homo sapiens
attaattgtctggcaaatagaatacgcaatgaatgaatgctgttaaatgagtaagtatgtagacaattcataaacttatacagacctaattgtgtaccacagaaagacccagctttaaataatcacacagagtaaaattatttccagtatcgacatgccttgctttaccattgtttaatttaattttgtatttcccaggtaagtagtagataagkgtctgaatggaaggagggtagggatgaatattgtatttctatttggctataaaattatatttctcatcaaccaaaagtcttagtttctaaagcatttcagtcaccctcccttatggcacataacgtattttaatatcatcattatatgtagtattttgaatattacctagtggctaagggcaaaggctttggaaccaaactaattggacctgaatcctgactctaccacttagtagctgtatgatcttgaattagttacttaacaagctactaaagtttgcttcaatttcccatctgtaaaacggagattataagtgaaaccacttcatattattattgttaagatcggagcttaaacagtgcttggcatatagtaaatgctcaacaaatgctaacaattattaattatttttatctcttctagtagaccgtgaacttctgaaaagcaaggacagcagaagtattcatttccaggacctcatcttcccagtgccttgcacaaagtaacatactaggctaatgtctgcagaacagatgaatataa

SEQ ID NO: 693877 - DNA, 759 bp, Homo sapiens
attaattgtctggcaaatagaatacgcaatgaatgaatgctgttaaatgagtaagtatgtagacaattcataaacttatacagacctaattgtgtaccacagaaagacccagctttaaataatcacacagagtaaaattatttccagtatcgacatgccttgctttaccattgtttaatttaattttgtatttcccaggtaagtagtagataagtgtctgaatggaaggagggtagggatgaatattgtatttctatttggctataaaattatatttctcatcaaccaaaagtcttagtttctaaagcatttcagtcaccctcccttatggcacataacgtattttaatatcatcattatatgtagtattttgaatattacctagtggctaagggcaaaggctttggaaccaaactaattggacctgaatcctgactctaccacttagtagctgtatgatcttgaattagttacttaacaagctactaaagtttgcttcaatttcccatctgtaaaacrgagattataagtgaaaccacttcatattattattgttaagatcggagcttaaacagtgcttggcatatagtaaatgctcaacaaatgctaacaattattaattatttttatctcttctagtagaccgtgaacttctgaaaagcaaggacagcagaagtattcatttccaggacctcatcttcccagtgccttgcacaaagtaacatactaggctaatgtctgcagaacagatgaatataa

SEQ ID NO: 693878 - DNA, 1451 bp, Homo sapiens
aaatttaaaccacaatttgaaacaattttatatacaccagcatggctaaaatgaaaaagacaaactggctcaatcaacattgaaaattgagtgtctgaatcttctaccactgaaaatatacaaactctgtgacacagaaatttcactctgggatagctgataaacataaatctgtacataagttcatcaaagcatatgtgcaagaatatttataacaacatggaagacctgcatcaataaagaactacatgcaataacatgagatgaatctcacaaacaaatgattgagtgaaagaagccagacacaaaagtatactgctgcatgatttcattgttcaaaaagttcaaaaaatgttagtggtgggaatagcagtaagaagagagcatgatgtgcttttgggatgctggtgatgatctgtttcttaatctgagtgcttggatacttattactagaactttacttgtatcatgtgtgcactttacatagatcattctttaataaaattttactttaaaaaacaattgtatgaaagtgctaaggcctttctaagtttgaaaacacaagcagtaaaaataaaggcaatattactaaatgtagcttcaatatttgaaaaacatctatgcatcaaatataacgaaagacaaatatgaaaatatatgaaagtatattaaatataatacattttacaagaaaataatatattcaataaaaaaactagctactgaaaacacaactccagtagaaaaactggcaaagaacataagtagataatattcataaataataaatgcaaataaccgctaaatgtaagaaaatgttcaaaaacaggaaaagggaaaggttaattaaaacaatgagatagaatctttatgaatcaaatgtattgaggtgtaagaaagagcacagctgaatagaaaaataaatcgacacaaactttattgaagtcctttttttaaatctatcaagctttaaaaatatcacacacttgaaagcactaattctacttacrggatggaaacttaaggaaaatgtcactgatttagctgcaaggatgttcacttctttatttataagaacacaatgattcaaaattttctaagtatacaatggtaaaagactttttacagaaactatggtagatatacttaataaaatactatatatttagccattttaaaattattctatagaaggtatttgatgacaaaatgcttcagaagtagttataatatgcccttatgcataacaatatattaaccttggttcattttagatgataggcatttgattaattttgactttctgattttttatttatttgtataatttaaatagctaacaatggaaatatgttaatcttgttatttaaaaaaatgaatattcttcaaaatgaagctagaatattaaagagtagcagaaaacaggacagtgaaaggtgaagataaaatct

SEQ ID NO: 693879 - DNA, 1516 bp, Homo sapiens
cagtaagtgctctgcaagctgctcctcaatagaggtgatgtgctgtgctgagttcacacctgctgtcacctggtacctgcatggccaacactacacatctgcaggaagactygctttgttagaaatgcagtttatgaacaaggaagcttctttttttctctctgtgcaaagctgactggccacacacagggttgagaaccacaattataacttccctagccccatgtactaatctcaaaaactcaccagcccagatagtcatcaacgatgtggttctaagtagtgtattcacattggaacacttaggagattgcatatgaaaaactgcaggaggaagttatctattgcaaacttgccaaatatgagcaatagatgtggaaataaagaactgatcagaggaaaaacatgtgtgacatatcatatgatacattcatatgggagccttgttagcgatctgttcataccagcactttttgtctgttttgtttcacagtctttcaggaactaaagtccagcctttcaaaactataaactattctattattctagtctgtgtaaatttcatttacacatttacatttatgaaaggattgagacttaatacatctgctgtatttgattctatagtaaaagattacttatcatcacttaagcaaaggataagtttgggacatgcatttatgaacattaaactagagaaagcttggttctggccccagctttgccactgaatagcctggtgcccttggcaagtcccttttgggatttcagtttcctaatcccaactgggctagatccttggttctcaaactttaacgactacttatggaggttaagatgcagacctcagatctgtcaaatttgaatttctagaggaacagaaatctgctttttacacctgagtgattttgatttggatatttaacacattttgagaaatactagatgaggtaatatcttcatatacttttaaaaaaatctttaaaattctggttccatgactagttcaagttgaactcactacctccattctggaaaaagctacctcaagagtctttctgcccacttgattacttacttgccttttgtggatatagagacacacacaaaaaattgcaggatttcccattagccctacttagatatcaataattttgtagtaagcagattacttaataataataaagtcatgatgttctaattacaattgtcttttgcaatgtgtctaactcaaggacaatgattcatcaggtaatgttatagttaatcacaattttttataataatcacaagtgtatggattatcatccaaagctagcttttgcatgccaatagcacagaaactatttccaaacacttggcttttgattctggcataaatattaaaaataaaatcaaaattattacaaaaatatgaaagaaaattataattctaacagagattacattcttttccattgtataaagagcaattggtagaaaatttgatttttattatttttattttattcttggc

SEQ ID NO: 693880 - DNA, 3173 bp, Homo sapiens
ttggcacactgtcctgaaataatgacagttcagtaaactgttgcagtccctaaatacctagactgttttttcagacagattaaaatgtgattctctctttaaaacttgaggtgttatattattcaagtttttcgttgctattgtttaacatttgaaaggaaatttatgtctagcttagaaatggccagatgggacaggggatcctgtatctattaagtgataaaatgtgtgcttagagcaacgcttgacctcccaagcatataaatataaataggattaccataatttagaatgttctttgccaaagtttaagggcttgatggagctgtacactcatatgattttcagctttgtcacagtttatagacttatatattcctaatttttaaactgatctattaacagatttttaattagtcttaattaattagtcttacatttaagttcatggccaattagtcttacatttaagttctcaatacttacgtttaagttcatggccaattggtcttacatttaagttctcaatacttaattatctaattagaaagagcaatgtaattatagagttgaccttattttgaaaaagaaaatatatagttttccccagatgagcattcaaaaagagaagttatagacatttcctaagttttcagcacaaagagggatgcagagatttgtagccttgaaaataagcaaactaggctgggcatggtggctcacacctgtaatcccagcactttgggaggccaaggcagacagatcacaaggtcaggagttcgagaccagcctggccaatgtggtgaaaccccgtctctactaaaaatacaaaaattagccaggcgtggtggcaggcacttgtagtcccagccgctcgggaggctgaggcaggagaatcgcttgaacccgggaggcagaggttgcagtgagccgagatcatgccactgcactccagcctgggtgacacagcaagactccatctcaaaaaaaaaaaaaaaaaagagagagaaaataagcaaactatttctactagtacagccatggagattccatccactgtccctttgcattctttacacttgtagtcagcgtcccattcaggtgaatcttctactctgatgtatctttttttaggagatggggtcttgctatattgcccaggctggcctcaaactcctgtgctcaagtgatcctcccacctcagcatcccaagtagctgggattataggcacatgccaccatgcccagatacagcataatggtgctgtgtatttttctaagagacctttgaaatctttaaatttttttcaagattcaactatgggcttaaattaatggataaatgtttagtaaagtaggcaaatttcagtcagtgaagagtgatattattaataatgaatagtaaaaaaatgtaaaatctgcactgatgacaaacttagaagttgtaggaattaacagcatacagtgggctacttaatgatagaaactaaagacagagctaaaatttttgaaaattcaaactctttctaaagataatacctttctaatattgaaaaatatttaaatataaaaatctttcaatttctttagaaaacagaggctcttcggttgcagtatcgctacttagacttgcgtagtttccaaatgcagtataacctgcgactgaggtcccagatggtcatgaaaatgcgggaatatctctgtaatctgcatggtaagagaaatgcctggatgctctttggagctttgtagcatctcttctattttattcagcagttttattgtatcctttccttagcatgaggtcaagatgttgccagaagtctggaattcactcaatgtgtaatgtagtttttgaagaaaagttaacattattttaaagatgataaagatgatagtcgctattacattgattaatgtattatagtatttcccatcatcatcaaaggcaggacagccctttggctttttctataagatttcttttcttttttttttttgagacggagttttgctctggctagaatgcagtggcattaccacaactcactgcagcctcaaccttttaggcttaaccgatcctcccaccacaccttcccaagtagctaggaccacagacatgcaccaccacacccagccaatttttaaaaattttttgtagagacagggtctcattatgttgcccaggctggtctcaaacttctgggtttaagcaatcctcccacctaaccatcccaaagtgctgggattacaggcatgaaccacgatacccagccagttttcttaattctttatcatgtgcatacatcacttattgggagctcaaaaatgtcatgtgaattaaactagacatctcattcagtcctggactttttctgctatatttgtgttatttctacactaacagaacatttaaaaaatcagaatagttcagtagacaagaatccattaaatatttagaattattttatgtgaacagtatgctttatgaacagaatagtatttatgaaaatcttcagcttccttcttagatttgtagaaaccagcaccagtaggcttggtagcttatttcagctaaaattcttaattaaagggaagcctcagatttgttgtactatattgtggacatcatatatgacaaatttcacattcctatctactaagtgataatgtttctctctttttagggtttgtggatatagaaacccccacattgtttaagaggaccccaggggtatgtatattccttcaatcagtctattaataatgtcctattagttataaagctagactactttgcttttatattcacttggtccacttttatttactgcctcaggatggtcatattaactaggtttttytgaagaattgagaaaattatttgggtattttgagtcagaatcattttattccacataaattttctttcctttgagtttttttgtttttttttttttttttttttttttggtttgttttgggtttttttttttgttttttttttttttttgagacagtctcactccatcacccaggctggagtgcagtggcatgatctcagctaattgcaacctctgcctactggatccaagcgattctcatggctcagcctcctgagtagctgggattacaggcatgcaccaccatgcccggctaacttttgtatttac

SEQ ID NO: 693881 - DNA, 1166 bp, Homo sapiens
gactcagtaatacaaatttctctctgcaagtttttaaacacacatttgcccatgcactgtggtaagtgattggcaacaaagacaaactttaacagtggttcttcttaaaaaaaaaaaaaaaaaaaaaaaatcctgagtcgtgaactacttaactgtgtttgcagctgaaactttacaacatagttttgttactcagggattaaccaatcactaggaacaccttagacatctggtcagaatacttggcacaatagagagayagttcttgttaatatctggtgcttttagaaactataaataaggcaataaaaatataatcattttagaattgaaagagtaaaaaaaatcactgagttcaaatttgttgatttaaaattaagaccagttatgaccaattggataagatgttcaatagcctacatgtcatagcatctgggaccagaatcaaataccctgacatctgcctagggcattttacccatgtctccattcacattaagtcaatatcatgagtggtttaatgtgtgtagaaaatatttatggtatctgtggatagaatgacaacagaaccttcattcctgaattcaaaaaataaagaataatgaaggaaaagaaaaaaacacttatgcttctgatatccctgattactctgaggagaggagtaatgattatgtcaataataacacattctacaatgcaaaacacagattggagggcttgttttcataaattaatgagttttacagcaaatttgcttcttggaattattattgaggaattatggaattccaacatgctgatgatgacagggatattcgaaattgtagctcacattttttctaagtattcttacattgttctactcccttctcacctgccgcttacatggttaccacaactacgactgagtatttatatcccccatcttacccctactggtttctaatgcaaagcaggtagtctatcagccagcaacaaaatcataatggctaaccataagacaaaatagtcctcttatcaaggaactataacctacagatatacaagtcattcaataattgttaaggtcctgggatatgaagccagtttatattatttacactccaatgattgtgtgtctaactgtaatgtttccagaattcctcttaccaattgccaagaaatta

SEQ ID NO: 693882 - DNA, 693 bp, Homo sapiens
gaagctttctattccaccatcttgctctgcctcagttgctaattttctttgaggtcataatactggaaatgagttttgtacttgtggytcaaaacttacaagtgatttttagtccatggtgtacttgcattattattgtcatttggctctcagaccaaaacatgtaatgctccccaaaactatatgttgcagaattacatttatatactgtcatctttatgtgatcatctcatacaagattatattttctatattcttattatttgtgtactagggaaaaagctttgggtattagactatatctctaattgtcaaattgagtcaataaggaagataatattcaaaacataataaatatgtttgagcagtacacatcaatgacagatgagttattttttcccatggtttattacagttagtctaaacttctttattctagttttaaattctttttttttttaaaccgacattaaaggtaaaggaacccttaaaaaggatcacaaatggtttatgaaggtagggcatgccgtaagagaactaaattataagtaaagattactaataaaaactataaattgaaaatagcatagtagacaaacagctgaagttattttgatagtagatttactagatataggaaataaaaccagtggaaatttatacttaatgtttgttttctcatttggaatatta

SEQ ID NO: 693883 - DNA, 639 bp, Homo sapiens
ttcctttctagtgtcagaattaacctttgcaattttatttgaaatggtagaatttttaaaaatattcacccttaggcatgagaaagcattgtttacagtattcaaaataacattagtttagcctattttatacatatatcaccccacacactcacacttcttcctactgaaatttatattcctaaaaaaatataaatttatagaggaaaaagacaggaagaaaagaaggaaagagggaaaagtaagatggaaacatggatttttctgtggaagaacatgcctaaaatgggtaattttgttgagacacagaaaacgaaatgacattatayacagaatgtggctgaggcataaaaaggagaaacagaaataaacaaaggtctagaagggtgttgcaaaaaactatcttatttggttttatctcacctcctttaaaatatatttctacatgatccctcagtatcaggtaacctgccctgatattcacgtaggttcttttctattttccttaagtgccggccggcttgagaaataaagggacagagtacaaaagagagaaattttaaagctgggcatccgggggagacatcccatgttggtaggttctgtgatgccccacaagacacaaaacccagcaagttt

SEQ ID NO: 693884 - DNA, 639 bp, Homo sapiens
ttcctttctagtgtcagaattaacctttgcaattttatttgaaatggtagaatttttaaaaatattcacccttaggcatgagaaagcattgtttacagtattcaaaataacattagtttagcctattttatacatatatcaccccacacactcacacttcttcctactgaaatttatattcctaaaaaaatataaatttatagaggaaaaagacaggaagaaaagaaggaaagagggaaaagtaagatggaaacatggatttttctgtggaagaacatgcctaaaatgggtaattttgttgagacacagaaaacgaaatgacattatatacagaatgtggctgaggcataaaaaggagaaacagaaataaacaaaggtctagaagggtgttgcaaaaaactatcttatttggttttatctcacctcctttaaaatatatttctacatgatccctcagtatcaggtaacctgccctratattcacgtaggttcttttctattttccttaagtgccggccggcttgagaaataaagggacagagtacaaaagagagaaattttaaagctgggcatccgggggagacatcccatgttggtaggttctgtgatgccccacaagacacaaaacccagcaagttt

SEQ ID NO: 693885 - DNA, 616 bp, Homo sapiens
ggtctcgaactcctgacctcaggtgatccatccgcctcggcctcccaaagtgctaggattacaggcgtgagccaccatgcccggccacatttgatatattttaaggcagatgtttaatacattcaatatagaaaaaattcttatgtatgaataagaaaaaagaatttcaatagaaaaacaggccaaggatatcaataggcgatttgccaaacaatacacatagacacatacacccaaccaattagtataataaaaagctggtgttatttttaagaagaaaaattaaagttaaaaccacaatgagaaactgctacttgcttgacaaaaggtgtaaaaatccacaagtgtaaaaatccgaacagccagtgccaggagaataaaagggaaacgggattccaccaaagagctggtgggagtggacgctggcacaatccttctggacatcaatttggcaaaaaaggatcaaasccttcaaattggacctactcatggatccagcaactccaagacactgttctttaaccattaaggtttggttaaacaaaccttaatgatgtctcttaaaggagacatctgtctcctgctaaggtccttgctaaaatctttaacaaaattt

SEQ ID NO: 693886 - DNA, 627 bp, Homo sapiens
gatacgataaataattaatgagtaaaatttttgagtgcctattatgttgtaggcacatcatgaaactctaagggtatagtgctgaatattaggttttgcttacttgaagcctatatcctaagaggaatagaaaaataattatgcaaaaacttagtacaacttggaacagagatactaagaagtgtagaatgctataaacatttataatagggataaccagggacccaaaatctgaaaagtgggatgtgaaggaaggcctgccttggaaagttatgagattttgaggaataagaattaagtgtcaagggagaggaaagtattccaggcaaggggaacatcagagtatgctcakgaacgcagacagggaaagactgataggagaagctagatcaagttatatacagccatggaaggccatgcaaagatcttgtattttattctggaagcaactggaaaacttggtggagctctttcaaaggagtggcccagccaaatttggattttaaaaagatccctctggctgcaatttggagaatgaacttgaaggcaagaatgaaatctagagactagaaatatgaggttagctaaatagtattcaagagccccatatctacaggaagacataca

SEQ ID NO: 693887 - DNA, 583 bp, Homo sapiens
tttttttagccctctccagggtcaccctagaatcagatctgctccccagcatcttctgtttcctggagtgtgttgtctgctactttggattggccatgacaggctggagctgccttgtgacaggagcaggagggtttctgggttagagtatcatccgcctcttggtggaggagaaggagctgaaggagatcagggccttggacaaggccttcagaccggaattgaggaaggaattttctggtaagtaaacttgattcatgggtgtgtggttccattttagacactgcatgggtgcaggaaggtggaccttttctagcaagttacagagaacagtagtcaaatctaagccaatctcacatcgatagtcttaaaaaaaaagaaagaaaagaaaattaaatagtataaaatggcatagtgtgaaagattctggatgggctatccagagactggattstgtccctgacccagaacttgagaggcaaccactttggacaccagcccccttttcttctcatctagaaaatcccacatcagttatttttcttgtctgcaactattttaagttctgaagctttttgtctcg

SEQ ID NO: 693888 - DNA, 648 bp, Homo sapiens
ggggaatgaaaaccaagtgaaagattttcaggatgggaagcactgttttgatagtgatgtctaggactgctttattaaagaaaatacgaatcaagtgttttgtgtgtgtgtgtgtctatgtgtgccattcaggtgctgggaatacagtggtgagaaatgattcttgcttacatggagcttacagtagagtggagaaatagaccttaaacacatgcttatgtaaatacagttgatcctccttatttgcagattctgtgtttgcaaatttgcctgagtgctaaaatttatttataatcccaagattaatactsactgcagttttgcaattattcacaggcatgtacagaggggcaaaaattttggtggctgctgtgcacactccaggctgatgtcaaacaaggtgacactctgagtaagcatcttgtttcagcgctgtgtaaaccagtgttctttttgtggcctattttttgctacatgttttgcattttgtgctttttatggtgattttgttgtttaaaacagcacctaaccctagggctgaggtcccgtctagtgtttctaagcacaagaagaccatgttgtaccttagggagaaaattcatatgttgggtaagctttgttcaggcatgagttatcagtaccaatgtg

SEQ ID NO: 693889 - DNA, 594 bp, Homo sapiens
atgttggcttccatttccttttctgttcttgaatgcccgtgcaaagcagaaaagtatggaaatatacacttatttgcagagcactgcttagactccaagggctaaactgtagtacagacagctttggaggtcagagtatgagactgaacattaatatcaggcttcatgaagggtcttattatcttatgagacagtcatattttttgtattgtgtgcgatgaagagtgtataagttatccactgctgtataataaacaatccccaaaacattgtggcttaaaataataactgtttaataatactcacaagccaaagggtgagctggctggtaatgcrgatctggctcaggctcagctgaacttggctagacttgctccttttcagtggttggctaggtgggatggctttattcacatgtctggtgcttggctgccagttaggtggagcgatgaaggctattgggctgagtgtctcctgtcatccatcaggtaagcttaggcttgttcataggtggtgacagtgtttccaggagtgagaggaatgagactctacctcttgataagagagccagcaacatcacattgcaaggggacc

SEQ ID NO: 693890 - DNA, 594 bp, Homo sapiens
atgttggcttccatttccttttctgttcttgaatgcccgtgcaaagcagaaaagtatggaaatatacacttatttgcagagcactgcttagactccaagggctaaactgtagtacagacagctttggaggtcagagtatgagactgaacattaatatcaggcttcatgaagggtcttattatcttatgagacagtcatattttttgtattgtgtgcgatgaagagtgtataagttatccactgctgtataataaacaatccccaaaacattgtggcttaaaataataactgtttaataatactcacaagccaaagggtgagctggctggtaatgcggatctggctcaggctcagctgaacttggctagacttgctccttttcagtggttggctaggtgggatggctttattcacatgtctggtgcttggctgccagttaggtggagcgatgaaggctawtgggctgagtgtctcctgtcatccatcaggtaagcttaggcttgttcataggtggtgacagtgtttccaggagtgagaggaatgagactctacctcttgataagagagccagcaacatcacattgcaaggggacc

SEQ ID NO: 693891 - DNA, 1693 bp, Homo sapiens
tgcaggtggggagagggcacctggcaaggaaatgtgggcagtctcagtgggaactgagagcagaactgaaagtgaaacttgagtcctacagctataggatgaattctgctaataaccaataagcttggaagggaaccctgaatccagctgagaatgacagtcctggccaacaccttcattttagtccagtgagaccctgagcagagaatctatgccacacctgaacttctgaccttcagaaactgagctaaaaaatgggtatttttttaaagctgctgcctgtggtaatttattgtgcagcaataaaaaactaatgcactaatgttcaactgttgctaatagttctgtgtgagctcagactcacctcataccagcatcatcctaccttaaagattcactatgtgtccatcctctttctaccccagggtcttctccaatgagtagaagcttctttggccctgtgcagtcacagcttggaagtataagggacttgatactctacaccactaatccaatggagggtaaagtcagtagatgaaagttccagcctagtgctctttgagtggacaattccacatgtttcacagaagtgctggtagaactgagccttgattcctagagcagtgacctcaactgctcaccatctcaacattttattaacttatccttcttgtctcattttctttctacaataaactttcctgcatgcaagttcttctctcagattctgttttcagggaaatccaaactaagagagttgcaagccttttaaatgaactagataagaagcaagcaaatcttcccctccttgagtgctacatctcttgcgattattaccaagagatgcagtatcgaagataaaaagaaaatgtctcttcagcaaatcataagaagaaaataatactttcagattgaaagagtcaaaattagatgatggtgtgaagtatattctgaaaaattcttgaatcagcatgtgttatcacttctgtcaactcccaaaacaatgatcattacaatttctttcatgtgaagaacgcttcatatttataaagtacactcatgtgtattattattttttattcccacaacaatctagattatgcttttagtattaaaattatcttcggatattctatagcttgaagggggttaaaaattatttttgagcaatagatattatgtagttgttaatttgaaattttcttcttatgatttaataatgtcttccaaagaatatcatttaagcccttcttcattttacaactgttacatgttttgatacaggtaaattttttgttatctagtctgccgattcaatgatggttaaaaattctttcaatatatggaagaaacacataacttagtggagagttataacttatttctctttttgtttrcagcctctttatttagtatttgtctcatgtcttcacttactaatactcattaatgttcaagaaattagcagttttcatgatatttctgtttggaatagtgagattcttgagaactgtgatttttttgagcatttgaaaaactatttattgaataagtaatacattcacataggtcacaattctaaaggaacaaaacagcctacaatactgttaatgctatatgaaaactgtgagttttaaacaattcctgggccctaaattctctgcattgtgaaactttgctattatttccaaga

SEQ ID NO: 693892 - DNA, 1693 bp, Homo sapiens
tgcaggtggggagagggcacctggcaaggaaatgtgggcagtctcagtgggaactgagagcagaactgaaagtgaaacttgagtcctacagctataggatgaattctgctaataaccaataagcttggaagggaaccctgaatccagctgagaatgacagtcctggccaacaccttcattttagtccagtgagaccctgagcagagaatctatgccacacctgaacttctgaccttcagaaactgagctaaaaaatgggtatttttttaaagctgctgcctgtggtaatttattgtgcagcaataaaaaactaatgcactaatgttcaactgttgctaatagttctgtgtgagctcagactcacctcataccagcatcatcctaccttaaagattcactatgtgtccatcctctttctaccccagggtcttctccaatgagtagaagcttctttggccctgtgcagtcacagcttggaagtataagggacttgatactctacaccactaatccaatggagggtaaagtcagtagatgaaagttccagcctagtgctctttgagtggacaattccacatgtttcacagaagtgctggtagaactgagccttgattcctagagcagtgacctcaactgctcaccatctcaacattttattaacttatccttcttgtctcattttctttctacaataaactttcctgcatgcaagttcttctctcagattctgttttcagggaaatccaaactaagagagttgcaagccttttaaatgaactagataagaagcaagcaaatcttcccctccttgagtgctacatctcttgcgattattaccaagagatgcagtatcgaagataaaaagaaaatgtctcttcagcaaatcataagaagaaaataatactttcagattgaaagagtcaaaattagatgatggtgtgaagtatattctgaaaaattcttgaatcagcatgtgttatcacttctgtcaactcccaaaacaatgatcattacaatttctttcatgtgaagaacgcttcatatttataaagtacactcatgtgtattattattttttattcccacaacaatctagattatgcttttagtattaaaattatcttcggatattctatagcttgaagggggttaaaaattatttttgagcaatagatattatgtagttgttaatttgaaattttcttcttatgatttaataatgtcttccaaagaatatcatttaagcccttcttcattttacaactgttacatgttttgatacaggtaaattttttgttatctagtctgccgattcaatgatggttaaaaattctttcaatatatggaagaaacacataacttagtggagagttataacttatttctctttttgtttacagcctctttatttagtatttgtctcatgtcttcacttactaatactcattaatgttcaagaaattagcagttttcatgatatttctgtttggaatrgtgagattcttgagaactgtgatttttttgagcatttgaaaaactatttattgaataagtaatacattcacataggtcacaattctaaaggaacaaaacagcctacaatactgttaatgctatatgaaaactgtgagttttaaacaattcctgggccctaaattctctgcattgtgaaactttgctattatttccaaga

SEQ ID NO: 693893 - DNA, 729 bp, Homo sapiens
cgtagtttggagtgaatttcctctgttagtcatacttcagtgacgaattttttcataagagtttgcttccttaaaatgtttatagatctttatttttcttttttttgaaatggagtttttgttgttgtttttgagacagagtttagctcttgttgcccaggctggattgcaatggcgttatctcggctcacygcaacctccacctcccaggttcaagcgactctcctgcctcagcctcctgagtagctgggattacaggcacctgccaccatgcctggctaattttttatttttagtagagatggggtttcagcatgttggccaggctggtctcgaactcctgacctcagatgatccacccacctcggcttcccaaagtgctgggactacaggcgtgagccaccacacccagccagatatttatttttctataaccaccatttagtcaagatatttgcctagtgtttatagttccagttaatagacctaatccatgctccttccctaaatccttttgaaatgacagaagaattatacatattcaaaggatgccatcaatggccagagactgagaaatgtctataataggggttcttttggctcccctgggtcacattggaagaagaagaattgtcttgagccacacgtaaaatccactaacactaaagatagctgatgacctttttaaaaatcgcaaaaattttataaagttttaagaaagtttacgaa

SEQ ID NO: 693894 - DNA, 729 bp, Homo sapiens
cgtagtttggagtgaatttcctctgttagtcatacttcagtgacgaattttttcataagagtttgcttccttaaaatgtttatagatctttatttttcttttttttgaaatggagtttttgttgttgtttttgagacagagtttagctcttgttgcccaggctggattgcaatggcgttatctcggctcaccgcaacctccacctcccaggttcaagcgactctcctgcctcagcctcctgagtagctgggattacaggcrcctgccaccatgcctggctaattttttatttttagtagagatggggtttcagcatgttggccaggctggtctcgaactcctgacctcagatgatccacccacctcggcttcccaaagtgctgggactacaggcgtgagccaccacacccagccagatatttatttttctataaccaccatttagtcaagatatttgcctagtgtttatagttccagttaatagacctaatccatgctccttccctaaatccttttgaaatgacagaagaattatacatattcaaaggatgccatcaatggccagagactgagaaatgtctataataggggttcttttggctcccctgggtcacattggaagaagaagaattgtcttgagccacacgtaaaatccactaacactaaagatagctgatgacctttttaaaaatcgcaaaaattttataaagttttaagaaagtttacgaa

SEQ ID NO: 693895 - DNA, 651 bp, Homo sapiens
attcagcaaagtggtgaaacacaaaataaatatccaaaataactttcctttgtatgagcagtgaccagttagaaaattccattcataatagcagtctaaaacatgaaatcactaggagaaaattaacaaaaagtataacttttatgaaatatactgaaaaagtaatttgaaagatattagagaaagacataygacatttctgaataaagagactaagtattacaaataaattacttgtttgccagtcaaaattttaaacttttttaacttaaaaataattctaatattaaactaggtaataaaaatagagatgagaatggcttataaaatcttaaacaaaaggaatattaaagtcagactcaaactactatatagtaaaatgtaatatagaactcttgcgattaacaccacatggtattggcaaagaagtgtcagatcgatgaaatgaagtggataactttgaaatagactctagtatgtagactatattatattttaaaggaaatgtcacaaaccaatgggaagtcttttgcatccagcaaataaggttgaaagtactaataaacttcagaaaaaagtaagattctcattgttcaattcccacctatgagtgagaacatgcggtgtttggttttttgtccttgctatagt

SEQ ID NO: 693896 - DNA, 1788 bp, Homo sapiens
tattaaagttcttctataaataccatatccccgcttctctgtttccttcctttccttttgtttctttcctctagctgaaatgctgtcttgtaggggtgaaataggtaaactaatgttattgaacatgatgaaggctataaaaggaggcacagagatgtgtgcaaaatgcaataagaacagagacagggaggttgatgagggagtatatttgcaagaatattgcaagcctgtcagggtgagaaacagagcgactgctaagtgcaggccaaccacgaagaattcccttctgcttccttaaccctagtgctcaatcatgggctctgtcagcaggatgcagggacagtctctagagataagccctcctaaggccccccttgctcaaatcaggagggaggacacagtgataagcatctccaactggaggaacccgtagtccagaagtcagctccactgcaggcctcctaaggttggatatggatatgattagggtctgcaataagtgacatctgtttgctctgacctttgggtaatgtggcgtttctttctctggggcagatgccagaaaggtgtttattgtgagttgacaggggtcttggtgggtggtgaggtgtgagtcaaaattcgactatgcattttggcattttgtctacagatgtttctcagatgtttgtgggcgggcatgtctttaaatgaaaaaatactaaatgtatgtttcttttgcggagaaaaggaaacaactcacactcaaaaacttggcgcctttctgccttcaatggcactcttgtttaatggccagattgaaattacttgctgcatgtattttctgaagagaaaatttgctcatataagaaaaaaatcttgttagaatgaaattaacaagctgatgaagaacttgaatatggcagtgggggaagtacggaaacttcatggggttccaggtatgagttttatgtagtctagccttcctttatcctcccaacgtgcacttccccctaagcaagccaagatgctggtttcgatgaggatcattcctaaccccaaatgttcactgcagttggaattagggggatcttcataattcaccatctacacttgtttcactaataattatattatagtaccatggaaattatattctgttcaaaatgctgrtgttatatatgagagagagaaagcccttgaaggatattcaacttgcaatcccttcagaattaagttaaaatgtgaaaaattgatttgcaaaggaaagaagaaaatcaaaccacacttttaaaatatcttcttcttttcatactacaagaaaaataaattttaaaagtccattttacttttgatttccagaaattttaaatttctaaagaaatcctctatctaatttagtttgagaaaaatctacttgaaaaatttcacaaatagatgaaagaaacttctttagagttgattcatctgattagtcaataaatggaaaaaacagtgatgatgaaataagcctggaaaccaagagcttaaacattatgtagcatttccctgctttgtatcaaaacttcttgaaataatatttttgacagatgctcactttgacctctacttgttagcagctttatggaatttacctcccaaaaaagtttattttcaaaatatgcttatttatggctaaggaaaccaacttattcaatttggctcacttaaaattctcaaactttaatggctcttttaataggaagtattttatgtaatattgcagcttagaaagaagatagctgatgaaggattataagaatagttgca

SEQ ID NO: 693897 - DNA, 1788 bp, Homo sapiens
tattaaagttcttctataaataccatatccccgcttctctgtttccttcctttccttttgtttctttcctctagctgaaatgctgtcttgtaggggtgaaataggtaaactaatgttattgaacatgatgaaggctataaaaggaggcacagagatgtgtgcaaaatgcaataagaacagagacagggaggttgatgagggagtatatttgcaagaatattgcaagcctgtcagggtgagaaacagagcgactgctaagtgcaggccaaccacgaagaattcccttctgcttccttaaccctagtgctcaatcatgggctctgtcagcaggatgcagggacagtctctagagataagccctcctaaggccccccttgctcaaatcaggagggaggacacagtgataagcatctccaactggaggaacccgtagtccagaagtcagctccactgcaggcctcctaaggttggatatggatatgattagggtctgcaataagtgacatctgtttgctctgacctttgggtaatgtggcgtttctttctctggggcagatgccagaaaggtgtttattgtgagttgacaggggtcttggtgggtggtgaggtgtgagtcaaaattcgactatgcattttggcattttgtctacagatgtttctcagatgtttgtgggcgggcatgtctttaaatgaaaaaatactaaatgtatgtttcttttgcggagaaaaggaaacaactcacactcaaaaacttggcgcctttctgccttcaatggcactcttgtttaatggccagattgaaattacttgctgcatgtattttctgaagagaaaatttgctcatataagaaaaaaatcttgttagaatgaaattaacaagctgatgaagaacttgaatatggcagtgggggaagtacggaaacttcatggggttccaggtatgagttttatgtagtctagccttcctttatcctcccaacgtgcacttccccctaagcaagccaagatgctggtttcgatgaggatcattcctaaccccaaatgttcactgcagttggaattagggggatcttcataattcaccatctacacttgtttcactaataattatattatagtaccatggaaattatattctgttcaaaatgctggtgttatatatgagagagagaaagcccttgaaggatattcaacttgcaatcccttcagaattaagttaaaatgtgaaaaattgatttgcaaaggaaagaagaaaatcaaaccacacttttaaaatatcttcttcttttcatactacaagaaaaataaattttaaaagtccattttacttttgatttccagaaattttaaatttctaaagaaatcctctatctaatttagtttgagaaaaatctacttgaaaaayttcacaaatagatgaaagaaacttctttagagttgattcatctgattagtcaataaatggaaaaaacagtgatgatgaaataagcctggaaaccaagagcttaaacattatgtagcatttccctgctttgtatcaaaacttcttgaaataatatttttgacagatgctcactttgacctctacttgttagcagctttatggaatttacctcccaaaaaagtttattttcaaaatatgcttatttatggctaaggaaaccaacttattcaatttggctcacttaaaattctcaaactttaatggctcttttaataggaagtattttatgtaatattgcagcttagaaagaagatagctgatgaaggattataagaatagttgca

SEQ ID NO: 693898 - DNA, 633 bp, Homo sapiens
gattgccctcaggatcactatgaggacacaaactgtgtacacagcatgagtccatgaaaccgcaaacgcttcatggtggtcttacttgaccttccacactctgaccctgccctccacctccagcctcgccttcactccgtcccctctccacatcacatccagctatgctgaagttcttacagttcaggaataccctagrccaggtttgttgtaggtccctctgcttggaacatgtccctcttttccttcatctagccaattcccactccttatcctgaccttacacccacacacaattcagttagacctttgggctacactctctcagaagtccaggcatttccccaccctaaagtccatcacattctgttgttaccaggcactcaaaatccatcttaccctggacagctttgggatggcagggaccagtgcttgttcacacacacacacacacacacacacacacacacacactctctctctctctctctctctcacacactcctctcccccgttcccagcatgttgcatgcaacacagattttcagtaaatatttgtgatttaatggtctcacctcaaaaatttctggagtttttctttgttctcacaaatatatatacgattatgatatt

SEQ ID NO: 693899 - DNA, 633 bp, Homo sapiens
gattgccctcaggatcactatgaggacacaaactgtgtacacagcatgagtccatgaaaccgcaaacgcttcatggtggtcttacttgaccttccacactctgaccctgccctccacctccagcctcgccttcactccgtcccctctccacatcacatccagctatgctgaagttcttacagttcaggaataccctagaccaggtttgttgtaggtccctctgcttggaacatgtccctcttttccttcatctagccaattcccactccttatcctgaccttacacccacacacaattcagttagacctttgggctacactctctcagaagtccaggcatttccccaccctaaagtccatcacrttctgttgttaccaggcactcaaaatccatcttaccctggacagctttgggatggcagggaccagtgcttgttcacacacacacacacacacacacacacacacacacactctctctctctctctctctctcacacactcctctcccccgttcccagcatgttgcatgcaacacagattttcagtaaatatttgtgatttaatggtctcacctcaaaaatttctggagtttttctttgttctcacaaatatatatacgattatgatatt

SEQ ID NO: 693900 - DNA, 633 bp, Homo sapiens
gattgccctcaggatcactatgaggacacaaactgtgtacacagcatgagtccatgaaaccgcaaacgcttcatggtggtcttacttgaccttccacactctgaccctgccctccacctccagcctcgccttcactccgtcccctctccacatcacatccagctatgctgaagttcttacagttcaggaataccctagaccaggtttgttgtaggtccctctgcttggaacatgtccctcttttccttcatctagccaattcccactccttatcctgaccttacacccacacacaattcagttagacctttgggctacactctctcagaagtccaggcatttccccaccctaaagtccatcacattctgttgttaccaggcactcaaaatccatcttaccctggacagctttgggatggcagggaccagtgcttgttcacacacacacacacacacacacacacacacacacacwctctctctctctctctctctcacacactcctctcccccgttcccagcatgttgcatgcaacacagattttcagtaaatatttgtgatttaatggtctcacctcaaaaatttctggagtttttctttgttctcacaaatatatatacgattatgatatt

SEQ ID NO: 693901 - DNA, 633 bp, Homo sapiens
gattgccctcaggatcactatgaggacacaaactgtgtacacagcatgagtccatgaaaccgcaaacgcttcatggtggtcttacttgaccttccacactctgaccctgccctccacctccagcctcgccttcactccgtcccctctccacatcacatccagctatgctgaagttcttacagttcaggaataccctagaccaggtttgttgtaggtccctctgcttggaacatgtccctcttttccttcatctagccaattcccactccttatcctgaccttacacccacacacaattcagttagacctttgggctacactctctcagaagtccaggcatttccccaccctaaagtccatcacattctgttgttaccaggcactcaaaatccatcttaccctggacagctttgggatggcagggaccagtgcttgttcacacacacacacacacacacacacacacacacacactcwctctctctctctctctctcacacactcctctcccccgttcccagcatgttgcatgcaacacagattttcagtaaatatttgtgatttaatggtctcacctcaaaaatttctggagtttttctttgttctcacaaatatatatacgattatgatatt

SEQ ID NO: 693902 - DNA, 633 bp, Homo sapiens
gattgccctcaggatcactatgaggacacaaactgtgtacacagcatgagtccatgaaaccgcaaacgcttcatggtggtcttacttgaccttccacactctgaccctgccctccacctccagcctcgccttcactccgtcccctctccacatcacatccagctatgctgaagttcttacagttcaggaataccctagaccaggtttgttgtaggtccctctgcttggaacatgtccctcttttccttcatctagccaattcccactccttatcctgaccttacacccacacacaattcagttagacctttgggctacactctctcagaagtccaggcatttccccaccctaaagtccatcacattctgttgttaccaggcactcaaaatccatcttaccctggacagctttgggatggcagggaccagtgcttgttcacacacacacacacacacacacacacacacacacactctctctctctctctctctctcwcacactcctctcccccgttcccagcatgttgcatgcaacacagattttcagtaaatatttgtgatttaatggtctcacctcaaaaatttctggagtttttctttgttctcacaaatatatatacgattatgatatt

SEQ ID NO: 693903 - DNA, 601 bp, Homo sapiens
aataaagggaacaacaattctaattctgcaaggaaataaaatgttcagaggcatctgttttttcttgttgttgttttcaactaccaatcttttaaaatcatcaaattttggacattataatatgagacgaaatctattttctsttccattaagcagaaatataaggtatacaaagagttctagtgatagaaaaaaaattaaagcaaaggagacatacgtcagctcttgcttcatttctactgactctgattcccttcagcacccctgggtgctgaatcccctggatcctcagtgggctgagtccttgttgttcagcatctcttccattgatggggctcactgttggctctccttagccgttaggctggcctaggccaacagccaattaatgaccctggactcctgcaatgtttcaaattatatcctgggatgcagttttggaactcactgctgagttgcttcactggtcccagagtcacaagttccagtaatggggctcctagtcccaagtttctgggtgcctatcccttcctattgattgattccaagataagacattttctttctttagtaaatatttggagttaggaacaaacttaca

SEQ ID NO: 693904 - DNA, 601 bp, Homo sapiens
aataaagggaacaacaattctaattctgcaaggaaataaaatgttcagaggcatctgttttttcttgttgttgttttcaactaccaatcttttaaaatcatcaaattttggacattataatatgagacgaaatctattttctgttccattaagcagaaatataaggtatacaaagagttctagtgatagaaaaaaaattaaagcaaaggagacatacgtcagctcttgcttcatttctactgactctgattcccttcagcacccctgggtgctgaatcccctggatcctcagtgggctgagtccttgwtgttcagcatctcttccattgatggggctcactgttggctctccttagccgttaggctggcctaggccaacagccaattaatgaccctggactcctgcaatgtttcaaattatatcctgggatgcagttttggaactcactgctgagttgcttcactggtcccagagtcacaagttccagtaatggggctcctagtcccaagtttctgggtgcctatcccttcctattgattgattccaagataagacattttctttctttagtaaatatttggagttaggaacaaacttaca

SEQ ID NO: 693905 - DNA, 1071 bp, Homo sapiens
tctacaaaaaatacaaaaattagttaattgtgatggtgcacacttgtagtcccagcttctcaggaggctgaggtgggtggatcacttaagcctgggcagtcaaggctgcagggagatgagattgtaccactgcactacaacctgttcaatagagtgagaccctgtctcaaaaaacaaacaaacaaaaacccctaaacaaatgcgtatggctgtgttcacataatactttatttacaaaacaagtcaagctggcattggcacatgggctgtagtttgctgacctttgccctacaacaacaagtattaatatgtattaagtgyccaactccagtaaagattttatagcagttttaaaaagaagcccattttaatggcctagcactgtggctcacacccgtaatcctagcactttggaaggctgaagcggaaggatcacttgagtccaggagttcaaaaccagcttgggcaacatagagagaccccgtttctacaagaaattaaataaaaattaagtaaataaaaatttaaacaaagaagcccatttgaaagttttggttattttaaaattcatattatttgttggtacctaatgcactgacataattcaaagtccagaaagcacacagagaaataccttatccccaccttatccccaactacccattccgtagagtcagcccttatcagtttcttgtatatccttccagaaacattctatggctaaacaaacaatagcaaatgtattgtttccttttaaaaattttttggtaaaatacacataacattaaaagttaccctttttatttttatattttcctattttgagacaggatcttgctttgtcacccaggatggagtacagaggcacaatcacagctcatggcagcctccagctcctgggctcaagtgattgttccacctcagccttctaagtagctgagactacatgcacacaacatcacaccttgctaatttctttaatttttttttgtagagatggaatcttgctatgtttttcaggctggtctcaaactcctggcctcaaatgacccttcctcctcagcctcccaa

SEQ ID NO: 693906 - DNA, 628 bp, Homo sapiens
gcatttgggctaaatatcagaagatgggtaggatttcaacagacaggaatgtgagggaaagtattccaggtggagacaatggagtctgcaaagacccaagtgggaaaggggtcacttttagggaacaatgagaccagaccagagagcaccacgccagggagaaatggaagatacacctggaaagacatgatgggcacacacaggatcacccggggccacccctggagacaccctgcctccttccttcattgacctcagagtaggagttctgtgtccccattaaagatgacttgggccgggcacggtggctcacgcctgtaatcctagcagtttgcaatgctgaggtagatggatcacctgaggtcaggagttcgagaccagcctggccaacatggcaaaagcctgtctccactaaaaatacaaaaaagttaggggrcatgatgttggtgcctgtaatcccagctacttgggaggctgaggcagaattgtttgaactcaggaggcagaggttgcagtgagctgagatcacaccattgtactccagcctgggagacagagcaggactctgtctcaaaaaaataagataaataagtaaataaataagtaaaacaaagaaacaaacaaacaa

SEQ ID NO: 693907 - DNA, 679 bp, Homo sapiens
tttcagtatacaagtcttctgcttcttttgttaaatttattcctaaatatcttatcctttttagtgctattataaatggaattgttttatctcattttggattgttcattgctgatgcacagaaatataattgattttttcattttgatcttatattctgcagccttgcagaatccttttattagccttattagctttttttggtgaaatctttaggattttataaagatcatgatgatgtcatctgcaaatagaaatagttttacttttcctttccaatatagatgccttttatttcttttgtattgttattatyatacataaactgcatgaccatcaacacagattcataaccatttctttacacagtcatcttttaagtcagataagaggaaaaaggtttataaaaatatataaatatttacataacatgtatttctactgtatccttttactggtgttctttatttcttcttgtgaattcaagttgctgtctagagtgcttttattcagcctgaagaattctctttagtatttcttaaagaacagatttgctaacaataaagtctcttagtttttgcttatctgggaatgttttaatttctctctttttttttaaggaaagctttgctggatatagaattcttgattgacaatctctttcagtgctttgaatgtg

SEQ ID NO: 693908 - DNA, 1402 bp, Homo sapiens
cgccatctcaaaaaaaaagataagatccacatctaattttattgacacagaaaatgtcaagaaccccaaatttggttggtttgaagaacatgtgaagggtttgactagatgatgaatgtcaatattaaatcagctgaagtttcatatacaaaatgaagaggaacagcattcaaacttagttaagacacaatttccttgagtggccaggcatggtagtcatgcctgtaatcccagcactttgggaggccaaggtgagcagatcgcttgagcccaggaattcaagaccagcctgggcaacatggtgaaaccccatctctataaaaaatggaaaaattagctgggcatggtggtatatgcctatagtcccagctactcgggaggctgaagtgggagggtcgcttgagcccaggaggtcaaggctgcagtgagctgtgatcatgccattgtgttccagcctgggtgacagagtgaaaatgtgccttgaaataaaattttcctttgaatacggcttaagaaatatggccacttaaaactctaccttgaaaataaatatagattttatcttatctagaggtagagtgggaagttttcatttggtacattaaatctataaggccataaacaggtaatataaaaagctttcataattcaatttatatataacatgagaaggaacttccaggtgttactatgaatcttctatgtatagttacagtcaatatactttatataagagataattttaataccaatataatctagataacattttactttgttatgttatcattgttctcttggggaataaattttttcctctgaggctctggatttgacattgaattttgtgtgtactaattgacatgtgccagggcaatgatggactggaatccacccccaaatcaaagcatcatggtaaatcttgcttatccttataaagtcaaatgatagacatttcccatcacctatttctattcaacaagagcaccagattcagttagctaatctgcttccaaagagtagaactgcattgagctcaaataatttcaaaatactgacttttttttatttatttatttattttttagatgtggtcttgctatgttgcccgggctggtctctaactcctgggctcacacgatccacccacctcggcctcccagcatgctgggattacaggcgtgaaccaccatacccagcctatttctgcgtatgttaaacatgctttacaattttaaaaatgaactgttttgaaggtaaaattacaaatcttgaaattaaaaaagcaaatatgtaaaggagcaaaaactataaatcaaacatttgagaagagaaaattggaggctaacttgtattaaattcacaaaaacttctatactttctgtaaatactttttwaaaaa

SEQ ID NO: 693909 - DNA, 1477 bp, Homo sapiens
ttatatttgataatccaaaaggaacctcacattgctatagagaaacaagaggttgcttctcaacatgtggaaagtgctgaagatttttaaaaacgtttgattgttctgcttagtacaggtacctctgacgttgtaagcccagttaagttgcaagttaagagctcagtaagagctcaatatgagctcttaacttggaagactcacagatgcatagagggagaaagcttcatttctgtttctcatagctttcttcttctattaagaacaagggatgaggccagtcaagctatacattttactgaacatgatttcttcataaagattttgaaattagtttaactccagtttaacagaaatatattgtagaagtgtcttagtcactatgtctgtcaaaactccaacttttgtgctccttaccaaagatctgaggtgaggaccaatgtcatcctccagatgaatttggaatttggaactctgacccagtaacattattacctaatctaatgggtacaaatctggaatattagaaacacctgtgaatctttcttttaaaaactactcagatttctaattctgtggattttattctggtaatctgtacttttaagaagcatatcagacaattcacatgaatagttacattttcaattaatagcctgaatttggacaattttatccctattctctagccaagcatcaggaagggatttctctctcttttctctctgtccctaactctctmcttttcccctccataaatacattttaaacacttagtgtacaccaggtacaagaatgcaaaactaataagatcctcttcctaccctcaaaaagattatagccttttaaaaactatgcattatcaacttcaggaagaattttcattctgtcatcctgaataaaacttccttagtctgtatgaagagtgacaaattagacatatagcttttgtgtcaatcaagtcattctgcatcctagtttctctgttaccaaacacaaaagaaaacaaaacaaaaacagctctactgaacctttttatgtgaactattccttagccctgtaatcatctttttggttttcttcatgacctgttccatatgctacagatgattacatggctgataattagatccaatatgcatatttataatcatattttaagcatgttaattgtcattacacagctaaacaatgagagcagtgttagtgtattgacttcagctcagttgtttcatatctgctttcaactttttttcccaaaatatttctaagttgttcattgtgtaatcaaaatgtctttgtaggctcatgtctattcctccacacagtaactgctatcattacttaaaggtccactacctgtcaggtactcaattagggcatctcacaaatgtgtggaggaaagaattgaggaggtgatgcatgtacatcatagatggaagtgtctcaaacatgcaatacagattatggattaata

SEQ ID NO: 693910 - DNA, 1172 bp, Homo sapiens
gaaataatcttactcaagatatagattctttggggaaatcctaattatatcaatcaagtttcatgtaacagtaatgttatacatcaatcatttcattgactatatttattatttttcataggctttgcactaaaataatcaaactaatttcatttaaaaatattctggatgttctgaaattcaggctggaggtgaaaatttggctgcatgagatttttattgggtttacaggttaactgctgtcattgggaatactgaaataatattgcttagtcaatgacctcattgggttaaacggaacaccaaaagacagtcttacaggaaaaaataagtagttagaattttgttttatttaagaggattatagatatatttggaatgcctttttaacaaaacaagtcaatattaacaccttagctcatttactttaccacatgttaatcagagatarttcatttagcattcatgtggattaaataaattctatcactaacattggtcttgtctttgattattttttctctcttttttttttgttttaaacgtatgtacaagatctaaaaaagtgagactcttgttcaattacaatagggttaaaaaattcgtctataataaatgaaaactccaggtatgtatctcatgtaaggaaaataaggatttatgaacctgatactatgaagataataaaaacaagggagtatgtgtgtgtttatgttttttgaaacataagttattaagaaatttccaactatatttctacatctgtatatgttttcataaggctagaaggactttaaaatattatctgatttattgttgtggatagcatgtgcttgagtgcatctagactaccatatattttccttggataagagtccagtggggtttagaataagatttcctggaattgaatctcagttctgtcattagttatgggcctgaataattttgtaatatttctggacctattttatcataggcgaaagggacatagttataagccagttgtgaagatgatgtaaaaccatccatttaaatggtctaacctccaaagtctactcagtaagtaatagctattattgttggatggtaacatacctaacaactctggtaaagtagattttccctaacactgctcctatttcctcaagctaaaatcttgtgaagcctaa

SEQ ID NO: 693911 - DNA, 1786 bp, Homo sapiens
ggatcctaaaactagaagcagactaagatcaaatgctagggaaaccgtggacttgatgccaaactaagcaaaaagaataaatgctgagttggaggtagaccgtgtcattagcagaatatgctagatctaaacatgaacaaccagaaagctaagtctgaaatcagtcagcagagttgcaaattaagaagactagttgtccagatgagtttccagtaaaagataacaatttctcctaaccttaaaggccaatactctgagccagtatctgacaaactaacttgatttctagatatacattttacttcaagaacactaaactaattatccatttattattttaggtaaagtatttttgcccttttgtatacttagacatattgcacattgccaaaactggagcagaactgaagggccccagagtgattaaaaactagcatgttctttgaactagtttgaaagactggaaattgctgctaatgtgtgtaatccctttagcagctggtcccatctaatagcccagttactgcctgtgaagtggtaagcattaggattgtttcatactaattattagcatgagaagaatgagaaaaaaggtagggaaaggagaaagaaaaagatactagcctgtctgcactttgtgtagtcatgttggtccactatggccatagaacaggattccctttgactgtatcctctacaggagcagagtttcagggtcccagaacaattagggtcaagagtatcattttgccgtagttgcctgatgagtgttttmtttcttttcctctccaatctaccctgctcttcacctcccacgtagcaacatagtagcagaaagttcactacagtcagatgagaacaaggctaaggtttattgagcgttcactatgtagccagtgccggactgatctcttcaattgttatttcatgtaatcttgacaataatctgtaggtaagtactattatctattttacaaatgaagaaactacaatgcagagaaatgaagtaacttccttaaaatcacacaccatgttcaaatgtccagctccacctttgctatttatttcctgggagatcttaagcaagtatttttcctctataatgtttagtttctccatctattttttaaaaaggttaaactagatgacataaggttgcttccaactttcagtattctaagactgtgttgggtaaatcattccgttaataattgtaataagtcataaaagttcagtgtctgttcctattattgctagtattattgaatctagtgttaacctgagcttcctaccttcctaacctcttttgctattgttaacattttgtatattctattctggtttttattttttacagtttttaaaaatgcagtttaatcacactgtatattttactgtatgctatcctattctgtttttcactaaatattatctatcttgttctgtgttgttatacaatctttataaccatcattttaagttattatgtaagagtcaattgaatggatatgcaattgtttgcttaattattcccctagtttaatggtccaaattttcttttttaataatgatatgataaacttacttaagcatttttctcaatgccaaggaacgtatccttagtttcccagaaatacaagacggtgtcaaagaaagaatatttttaagaatcttggctgcacagagccaaatctgctcatttgaaatatatatattcgcatgttcaaccaagaatcatctgcttaaaatcgaccagaatatagcatcagaatggcacattttcctg

SEQ ID NO: 693912 - DNA, 1786 bp, Homo sapiens
ggatcctaaaactagaagcagactaagatcaaatgctagggaaaccgtggacttgatgccaaactaagcaaaaagaataaatgctgagttggaggtagaccgtgtcattagcagaatatgctagatctaaacatgaacaaccagaaagctaagtctgaaatcagtcagcagagttgcaaattaagaagactagttgtccagatgagtttccagtaaaagataacaatttctcctaaccttaaaggccaatactctgagccagtatctgacaaactaacttgatttctagatatacattttacttcaagaacactaaactaattatccatttattattttaggtaaagtatttttgcccttttgtatacttagacatattgcacattgccaaaactggagcagaactgaagggccccagagtgattaaaaactagcatgttctttgaactagtttgaaagactggaaattgctgctaatgtgtgtaatccctttagcagctggtcccatctaatagcccagttactgcctgtgaagtggtaagcattaggattgtttcatactaattattagcatgagaagaatgagaaaaaaggtagggaaaggagaaagaaaaagatactagcctgtctgcactttgtgtagtcatgttggtccactatggccatagaacaggattccctttgactgtatcctctacaggagcagagtttcagggtcccagaacaattagggtcaagagtatcattttgccgtagttgcctgatgagtgttttatttcttttcctctccaatctaccctgctcttcacctcccacrtagcaacatagtagcagaaagttcactacagtcagatgagaacaaggctaaggtttattgagcgttcactatgtagccagtgccggactgatctcttcaattgttatttcatgtaatcttgacaataatctgtaggtaagtactattatctattttacaaatgaagaaactacaatgcagagaaatgaagtaacttccttaaaatcacacaccatgttcaaatgtccagctccacctttgctatttatttcctgggagatcttaagcaagtatttttcctctataatgtttagtttctccatctattttttaaaaaggttaaactagatgacataaggttgcttccaactttcagtattctaagactgtgttgggtaaatcattccgttaataattgtaataagtcataaaagttcagtgtctgttcctattattgctagtattattgaatctagtgttaacctgagcttcctaccttcctaacctcttttgctattgttaacattttgtatattctattctggtttttattttttacagtttttaaaaatgcagtttaatcacactgtatattttactgtatgctatcctattctgtttttcactaaatattatctatcttgttctgtgttgttatacaatctttataaccatcattttaagttattatgtaagagtcaattgaatggatatgcaattgtttgcttaattattcccctagtttaatggtccaaattttcttttttaataatgatatgataaacttacttaagcatttttctcaatgccaaggaacgtatccttagtttcccagaaatacaagacggtgtcaaagaaagaatatttttaagaatcttggctgcacagagccaaatctgctcatttgaaatatatatattcgcatgttcaaccaagaatcatctgcttaaaatcgaccagaatatagcatcagaatggcacattttcctg

SEQ ID NO: 693913 - DNA, 664 bp, Homo sapiens
ccatgcacacctgtgatggaaatgatttagggaaatgttatcatgtgatagaagccctgtcatgtcggggctgagtgttgtgaataaatggtttttttttgcaaaaaccagagttgtcaagagacattatttggctgtctcaggaagagcctcatgggatggagtcttcatggttttggggcctggacacctactttgcatgggcagaaattaaattggatgtttttgcctgcagggagactgggtcrtgctaataaattcacaagagacttactggtaaaaagactactgctttatgaatttgtggtagaaattataccgggtttaagaaccaagaccacattggtgggtcccctggagacaggatatacatcaagtgactcagtgaacagtgagttatcaaactcattagtaattgtctgcgtactagtctacttctcttactagactgagctctcttcgagcattttattcctggtatctccctcatgtactgaagtgctcattaaaaaatcaacacttattggagaactgttgaatgaacagatgaatgattctaaaccaaggggatcaaataatcagaggcatatttatattgatctgggccaataggatggattgctcttcataccaggaatatttctgcctactaaaagagtatcct

SEQ ID NO: 693914 - DNA, 600 bp, Homo sapiens
tttattatccttttgtaatgttataatcagtttgtacatcatgcaactcttgtgcgttatattaaatgatacaaagcaggaggagaaatagaaggaggaggaggtggtggaggagaaaatgtagtaatggatattatggtgctgttttctgattctgagagactttacaaaaatcagtctaattctcctggggctagttaacaaaatttcactgtgttggccagggatgagatgaaatgagagctcaactagagattcaggaatagtatatgtgtcccagatagttcaggtgctgttaagtgggctgtattgaaacaggagtcccaggcctagcctatgggatgtgattgcataagccctagaaaccatatcaacaagcatgttcctgaagctttcccacacccacagctttgcctttcctcatggctctctcaggtattgccatagaggtccatggacagcagaggtcctccaggtgagtaccctggagtgattcagctgatgaaggcctcactttacctttgaggcagtgagttyttcctatctctgcctaacagaatgggcaatgctatgaagagctaactatggaatgttgctacc

SEQ ID NO: 693915 - DNA, 600 bp, Homo sapiens
tttattatccttttgtaatgttataatcagtttgtacatcatgcaactcttgtgcgttatattaaatgatacaaagcaggaggagaaatagaaggaggaggaggtggtggaggagaaaatgtagtaatggatattatggtgctgttttctgattctgagagactttacaaaaatcagtctaattctcctggggctagttaacaaaatttcactgtgttggccagggatgagatgaaatgagagctcaactagagattcaggaatagtatatgtgtcccagatagttcaggtgctgttaagtgggctgtattgaaacaggagtcccaggcctagcctatgggatgtgattgcataagccctagaaaccatatcaacaagcatgttcctgaagctttcccacacccacagctttgcctttcctcatggctctctcaggtattgccatagaggtccatggacagcagaggtcctccaggtgagtaccctggagtgattcagctgatgaaggcctcactttacctttgaggcagtgagtttttcctatctctgcctaacagaatgggcaatgctatgaagagctaactatkgaatgttgctacc

SEQ ID NO: 693916 - DNA, 646 bp, Homo sapiens
tcaagtcattggtagaaggagtaaaggtggaatcatctctcccctgagccttagtgcaccctcagactagattgccccttcgcagtgttcccagagcccctgtgctatccttcaagggtctgtgtgcccccgcaagagtctgtgaagacagaaaacctccttgtgcttggggccaacccctgcctgctctaggccagagtgttttgtaaatgctgttggatgaatgaatgaggcttgagactctccaccttcatttcttccccgctggggacaaactactcagatgctacttcatgctttgctgcgctgcacatcttgttgcttccccccatgyccttccctcctgtggccacctcctccactgtcccttcagctcaggagtctcctcctctgtgactgctcctgaccagccctccctttgagtggagtttctcctgcccctgctgtgtcccctctgaaccaaacctcactgagctccctaatcgggcctgtttgtggatgcgtctttcttccgcatgcgctgtgagctcctcgagggcaggtctccagcttagtgtttcctctgctgcacgtggcacctggatgccccatggaggtgccttgagagaatgaatagagctgaacacacggagcaaagatccgttca

SEQ ID NO: 693917 - DNA, 1268 bp, Homo sapiens
cacacccaggcaggctacgggctttctggcctttgggctgtctgggctggggaccctcatggctggtgattctcctcctcccacagaagcgkgtagatctgctggagcaggtggcccgggagcatgaggagtaccaggcaggtgtggacgagttccaactgtggctgaaggcggtggtggagaaggtgaatggctgcctggggcggaactgcaagctgcccatcacgcagcgcctctccacactgcaggtaatccccagctgtgtctcaaccagagggaccctagggacagtcacagagggtgggttctatgtcatagttccttttttttttttttttttgagatggagtcttgctctgttgctcaggctggagtgcagtggcgcgatctcagctcactgcaagctccacctcctgggttcacaccattctcctgcctcagcctcctgagtagctgggactacaggcacccgccaccatgcccagctaatttttttgtatttttagtagagacagggtttcaccatgttagccaggatggtctcgatctcctgaccttgtgatctgccagcctcgggctcccaaagtgctgcgattacaggtgtgagccaccacaccctgacctatgtcatagtttctttaataggacagtgcttggtgccacagaatatataagaacccatggcccacagacccccgtgaggagaagtgtggaatctagtctaaacgcttgggtcctcagaggctttatggaaatccctggccagcagagcatttggaaacccaggaccacagaagcatggtctaggctggtgggtctccaatggggggcatttggcagtgtctagagactcctcgccctgaggaaaatctttggcaatgtcctaagagggtagagggggtggatgttgctactgcctctgggtggcggccaaggatgctgcaaaaccatcctacagtgcacaggacagccccacacagcacagagcgatccagcccacgtggcaatggtgccaagggagaagaaccgtggtgcaggcgccaggtctgccatcgggagacgtgggctccccacttttcacctgctgaatggctttcaatgagcctctgactccctccataaactgagtgggtaaaatgtctttaataattcaagaaccacttgatacattttgccacaactgtgcagtatctgaactatttctttaatatttgtatttaaatggactcatttttaaaaaaactgatgattatttatttagaaagaaa

SEQ ID NO: 693918 - DNA, 1268 bp, Homo sapiens
cacacccaggcaggctacgggctttctggcctttgggctgtctgggctggggaccctcatggctggtgattctcctcctcccacagaagcgtgtagatctgctggagcaggtggcccgggagcatgaggagtaccaggcaggtgtggacgagttccaactgtggctgaaggcggtggtggagaaggtgaatggctgcctggggcggaactgcaagctgcccatcacgcagcgcctctccacactgcaggtaatccccagctgtgtctcaaccagagggaccctagggacagtcacagagggtgggttctatgtcatagttccttttttttttttttttttgagatggagtcttgctctgttgctcaggctggagtgcagtggcgcgatctcagctcactgcaagctccacctcctgggttcacaccattctcctgcctcagcctcctgagtagctgggactacaggcacccgccaccatgcccagctaatttttttgtatttttagtagagacagggtttcaccrtgttagccaggatggtctcgatctcctgaccttgtgatctgccagcctcgggctcccaaagtgctgcgattacaggtgtgagccaccacaccctgacctatgtcatagtttctttaataggacagtgcttggtgccacagaatatataagaacccatggcccacagacccccgtgaggagaagtgtggaatctagtctaaacgcttgggtcctcagaggctttatggaaatccctggccagcagagcatttggaaacccaggaccacagaagcatggtctaggctggtgggtctccaatggggggcatttggcagtgtctagagactcctcgccctgaggaaaatctttggcaatgtcctaagagggtagagggggtggatgttgctactgcctctgggtggcggccaaggatgctgcaaaaccatcctacagtgcacaggacagccccacacagcacagagcgatccagcccacgtggcaatggtgccaagggagaagaaccgtggtgcaggcgccaggtctgccatcgggagacgtgggctccccacttttcacctgctgaatggctttcaatgagcctctgactccctccataaactgagtgggtaaaatgtctttaataattcaagaaccacttgatacattttgccacaactgtgcagtatctgaactatttctttaatatttgtatttaaatggactcatttttaaaaaaactgatgattatttatttagaaagaaa

SEQ ID NO: 693919 - DNA, 2151 bp, Homo sapiens
tgtgatggagaatcgggctgagccctgagcacactcactctgtttctccgggattcttggtatctcagctccctgagcggggagtagacaagttgggtgtttatccccattttctagatgaggaagctggggcctacagagacttttttccccaacatccctagagtcacatggtaggtctgtgaataaataacagcagagggggattgggcagccaggtttgggcctcaaagctactctcctgcccagtggtgggataaggtrtgggcttcctctgcgtggaacagggaatattggatcagaaggggaaactcttaatgtggagatcatggggaacaaacatgggcctttaggaggccaagcagcagaggcccacggtggtggggggtgcttcccagaccccgacatgacatcccatcagaggctccccagccctcccccgaggtatacgaactgaagcttgacttgtggataaagagagttttaaaataagaagcaacggccctccccacctctgtctttatttattgttaactcaggatcacgacttcatgagaggagatacctccaagggaagccatcccagatcttacctgcactctgccactgttgttatatgttttctcttccttctaatctctgctcatacgcaaaaatatttttagtagggagaaacaaagggctgtcttctcattcgatcttgtagcagaacaggttaccctgcagttatcaccttcctccaaagggaactgtcccctgctttaggactgtctgcctcaatgcgccttggaggtggtgtggcacagtggtgagggatggggactttggggccagactagctgggtttaagtcctagtttctccccttgctaactgagtggctttcggaaaattactttaacctctgttatgtgtgaaatgaagcactgagaggctaggagacttgcctgtggttatacatccaataggtggagacagggattttaacttgaacccaggcaatctgactcaaggtcatatgcttccaaccactgggccagctcaggctcccagttctagaaaattaacatagcaagaggaacagaccaggaatccagacatcagtggatccatcccccctgggactgcaaccctgggatgctcccgagagagcagagggctgggtatgacttgtgttatccctctgctgacgggaacaggaccctcatctgtttcagggagactgtttgcagcaaaggttgaagtcagggtggatttgtagcttatccagcgtctggtcaggaaatgcaactacctggcagggtccaccctcctgagcctcccaaggaatcagcaaactaaacctgacaacattataggtcccagcatggcatgtcagagctggaagggatgtggtcttattttacaaggagggaactgagcctagaaaaaggtcatgcttagccaggccacccagccatggggcagcgtccttcccaggaatgagggccctgggtgttccagcactgcttcaagttgatgatgggccttccagtggcctggacaggcctctctccagggacagcccccagtcttgctcaccctctgcacccttgcccttcctgctgaattcctgcaggccggccagctttcctgaccactgatgtgctgggcttcttcatgaatgattttcaacctgccagttcccacaaaccaactgtgtctggtcttccgtgaaaactttcatagacgtcattatgtttgctaactaattgaatagcaataggaacatttttgagaatgaacagggctggctgggcagattctgtgtccttctgcctacatagtggcccctattgccccagctgctgcctaaaatccttccctctatttgtgctttctcccttgagcttaatactctaaaccctgttcatccgtgggtcaccccaggctaagcctaattggagctgcccctggttccctgtgaatggaggatcggtcagaggtcggtatggtcaagaaggacagaagcacaaggctgcctcctgggattgagggagctggggatggggagggactaatgcatccctgctctgtaccaagtgccttgtcaatatcacccgacccacgtggttggtgagagtggccccatttatcaaagaggaaacagccc

SEQ ID NO: 693920 - DNA, 656 bp, Homo sapiens
aaaccaaagtggaggtaactttactcttctgcttttycttttttctgtttttttttttttttttttttttttttgagatgaagtcttgctctgtttcccaggctggagtgcgatggtgtgatctcggctcactgcaacctctgcttcccaggttcaagtgattctcctgtctcagcctcctgagtatctgggattacaggcacccaccaccatgcctggctaatttttttttttttaatttttggtagagatagggtttcaccattttggccaggctggtctcaaactcctgacctcaggtgatctgcatgcctcagcctcctaaagtgctgggattacaggcatgagccacctcgcctggtctcttctgcttttcttatggaaggaggggtcagagaggcaaaaggcggctaaatgagagtacaactggaaacaacacttttgttcctggagttgaggtggtggggatgatggatgacagccataggatggtagcaaagttagggcagagtcagtggcctttagatggtgggaatgatgatggtaaacctgatgttgagggtgctgagggtgagaagagttgaatcgtaacatgcaccccagctttgtgctttatcctcaatgaaaactctgcttaaatgtgcaatgtgtttctg

SEQ ID NO: 693921 - DNA, 619 bp, Homo sapiens
tctcttgaccctgtaaaatgtcctctgggatctaaagtctgagattcccaggtgtgagtccttctctggacctcgggcttcggtagcagagtccagcctcagagcctttgtgcttgctgttccccttcctggagcctcccatgacctttggatgtcacttggcctctctgcgccctctcaccccagcagttctgcagaggtcagcctttagaactgacccacgcctccctgggcctgcagggtttcacagagctcggcagcagcttgggttacccctagggtcaggtcatcaccatttgcctcatctccttccacagccaacttggaaggattccccagccttgtgccaggagaggctggcacggctgccagagccccactccgtggcrccataggccctcacagggactgccctggctcctggtggccaaaccacacaggatagaaccacctttcctgctgggacacagcccaggcggaatccccctttctttctcctggaccaatcagatgtgagtcagggaccctctcattaacaaatttcctcccttcctcctcccctgttatgaggccaggagcgggcgtcgacctacatggaaggggaggagaggtggaacca

SEQ ID NO: 693922 - DNA, 559 bp, Homo sapiens
cctccttgggcttcagccttggcagcgtcctttctggcccttcaccagcttctttcccacccgagggcctttgcactggctgtctcttctacgggagcatcttccctggtcttcacttcctttgggtctcagctgccacctcccttccttggatgctgtcccaaccaccccattccaaaagaggttatcgcttgtgattctctatcactgggccaaatctgcctgttgcctagtgctcctagccctttctatattaattcatttcattatttcagcyctgtctcctccactaggatataagctgcacgagagatgggctatgtctcttactcactgttgggcctcccaggacctcagcacagggcctgacacacagtaggtgggttaatagatactgattgaatgaaagaacaaggtgggtactaaaatcccccttttaaagaggaggcttggagttatgaggttgtacgagcaaagcttattccctaactaccacagtcccccccctgcagccagggccgggatcataccacaattccctgcccatcaagctgtcatg

SEQ ID NO: 693923 - DNA, 559 bp, Homo sapiens
cctccttgggcttcagccttggcagcgtcctttctggcccttcaccagcttctttcccacccgagggcctttgcactggctgtctcttctacgggagcatcttccctggtcttcacttcctttgggtctcagctgccacctcccttccttggatgctgtcccaaccaccccattccaaaagaggttatcgcttgtgattctctatcactgggccaaatctgcctgttgcctagtgctcctagccctttctatattaattcatttcattatttcagccctgtctccyccactaggatataagctgcacgagagatgggctatgtctcttactcactgttgggcctcccaggacctcagcacagggcctgacacacagtaggtgggttaatagatactgattgaatgaaagaacaaggtgggtactaaaatcccccttttaaagaggaggcttggagttatgaggttgtacgagcaaagcttattccctaactaccacagtcccccccctgcagccagggccgggatcataccacaattccctgcccatcaagctgtcatg

SEQ ID NO: 693924 - DNA, 559 bp, Homo sapiens
cctccttgggcttcagccttggcagcgtcctttctggcccttcaccagcttctttcccacccgagggcctttgcactggctgtctcttctacgggagcatcttccctggtcttcacttcctttgggtctcagctgccacctcccttccttggatgctgtcccaaccaccccattccaaaagaggttatcgcttgtgattctctatcactgggccaaatctgcctgttgcctagtgctcctagccctttctatattaattcatttcattatttcagccctgtctcctccactaggatataagctgcacgagagatgggctatgtctcttactcactgttgggcctcccaggacctcagcacagggcctgacacacagtaggtgggttaatagataytgattgaatgaaagaacaaggtgggtactaaaatcccccttttaaagaggaggcttggagttatgaggttgtacgagcaaagcttattccctaactaccacagtcccccccctgcagccagggccgggatcataccacaattccctgcccatcaagctgtcatg

SEQ ID NO: 693925 - DNA, 559 bp, Homo sapiens
cctccttgggcttcagccttggcagcgtcctttctggcccttcaccagcttctttcccacccgagggcctttgcactggctgtctcttctacgggagcatcttccctggtcttcacttcctttgggtctcagctgccacctcccttccttggatgctgtcccaaccaccccattccaaaagaggttatcgcttgtgattctctatcactgggccaaatctgcctgttgcctagtgctcctagccctttctatattaattcatttcattatttcagccctgtctcctccactaggatataagctgcacgagagatgggctatgtctcttactcactgttgggcctcccaggacctcagcacagggcctgacacacagtaggtgggttaatagatactgattgaatgaaagaacaaggtgggtactaaaatcccccttttaaagaggaggcttggagttatgaggttgtacgagcaaagcttattccctaactaccacagtccccccsctgcagccagggccgggatcataccacaattccctgcccatcaagctgtcatg

SEQ ID NO: 693926 - DNA, 890 bp, Homo sapiens
cattttgaaacatttcttactggtctcttttagcacaccaccaagggaaaatctttgattcactgatgtatatatattttttatatatacatcattatatggatacatcctttaatggatgtatggatatttctcatagataaaagagcaacaccacaagtatttcttgatttctacaactgaagtacatcttagaaggaatctatttcttttctaaaatcatataataatttatgggcccatgaggagtatgccatttaaagggctctaattaggaatatttttgtaaaactcatttcattaattatctttcttttatatccctccagccttttacattctattagttcttctttctcatcaaacagacttatttatgacattttcaacctaaaacaaagaaagaaggatgaacgtctatagtatacaggaacataactcatgcagtgagtactacatgagaggatacctcacaggagagtacctcacccacacccacactggtagttcagcaaaagctttctggttttggtccacatggtccacatgacattgagctaggtcttaaagaaaacgagagtattaagcagtcactgatgtatatcttaagcaccaagaatatcctggcagttagtgctaaataaatgcttacttggttgcttagaagcagctgtggwcagcagctcccaccaagcagaatgaaaacggcgaatgaatcctgcaccttcaactgaggtatccagattctctcactgggactgactaggtagttggtgtaccatggagagtgaggaaaagcagggtggagccatggcacacccaggagctgcacagggcaaggggaactcccaaccccagccaggggaggcattaagtgattgtgctaccct

SEQ ID NO: 693927 - DNA, 650 bp, Homo sapiens
acagaaatgaaaacaaccacggtgccaatcacagccatggtgttgtgatctatgccgacactaaatattcttaaatgaagtcacgttaatgttgtccacaataagctcacaattagccttagttagcaaggttttatcatccacttaagggaaagagtataattcagtggttaacactctggacctggatttaacccctggggttcaaatcccagctttaacatttattagttaaatataccaccttggtcaaggtgtttagcctctttgttactcagctacttcrtctgtaagatgggatgatattcatagagttgctctgtgggtttaatgagaccatgcacaaaaagtacttagtatatttcctgactttacagtaaataaatgaaaactcaataaaagaaaactattattacattatagtattactgatttttaagacaaaaaaatctttcaccccaagctacatctcatcatattcttctattttcagtttgacaaattataaatctttacccaatttctagcttggggcatttaaaatgacctcagcaaggtaaggcaggtggaaaagttcatgcctgcgtctctgaaccactgcttttaggtatctgactcaataaactatgacagctaatagctccaagaca

SEQ ID NO: 693928 - DNA, 650 bp, Homo sapiens
acagaaatgaaaacaaccacggtgccaatcacagccatggtgttgtgatctatgccgacactaaatattcttaaatgaagtcacgttaatgttgtccacaataagctcacaattagccttagttagcaaggttttatcatccacttaagggaaagagtataattcagtggttaacactctggacctggatttaacccctggggttcaaatcccagctttaacatttattagttaaatataccaccttggtcaaggtgtttagcctctttgttactcagctacttcgtctgtaagatgggatgatattcatagagttgctctgtgggtttaatgagaccatgcacaaaaagtacttagtatatttcctgactttacagtaaataaatgaaaactcaataaaagaaaactattattacattatagtattactgatttttaagamaaaaaaatctttcaccccaagctacatctcatcatattcttctattttcagtttgacaaattataaatctttacccaatttctagcttggggcatttaaaatgacctcagcaaggtaaggcaggtggaaaagttcatgcctgcgtctctgaaccactgcttttaggtatctgactcaataaactatgacagctaatagctccaagaca

SEQ ID NO: 693929 - DNA, 1934 bp, Homo sapiens
taaatgtcttaggtgttcatttatgtaacttttctaggactgaagatagagattttcttggccatatgagagaaactttcttgtagagaggagttattgtaactatgtgtctataaacaaatccactacataggatactctataaaagtaaagggtcaacttaattggctttctctagggcaggagctacccagcccaaacaatgttttaaccttacttgtcctgtagactttgctttatgctctgagaggtgtctttaacccaccctgccacctagctagtatacgccggaaccccaggcaagtgagcacatgtggctgagcccatggcactggctgagaaggcaggctccaaacgttgtccctggcaggcagttggtagatgtttttttgttttaaaacctatatcaaagaaaattctcaaagagaaccgttcccacttcaggtatcataactcattgggctgttaagctgtgaagtgtatcataagaagtttattatcaatagtaaagtgtgaaaattcaagaatggcttatccctttgcaataaagagaaggtatccctataataaggtcactcccattaacttgtattctgaaatgctttcttgggaggcagtgaagggcatggtgttacagcctgaatgctgggccacacctgatccctgggagcctaaatacatgcatctattaacccctgatayggtttaacaggaagaaaagagcctcattccaagagcagaagtcctttaaagaaatctcacatatcagaatatgttatattccttacagatactaagatttcctttaacggatttttgaagtcatgtttataagaagttaatatattaaccagggaagagatgagtactttaggcacaaaaaagacatttttttctctgagtcagcaatacttgtccttcaatttcccattggagggcagagctgatttgaaatctgtcttctttttgtctcttgggattgttctcacctgaacagaacattacagaatttactacagggccaaatgaaagacagaagtcagagagcaactcctaaaaagtggaataaattgttcctgatggttgacaagttaaatggtactttttctttcttactaaagggtgataaaatgataaagggtgaaagatcatgtgcatgatccaacgtctgcattgagtcagtgactttttattgatcctttcctgaaagagtgtaagatattaggccaatattctctaaggatataaactctgtcattctaagaatctctgatccaaccacagttgaaacctaacaggagagtaaagatataaaggaagagaataggaagcctaaccccaattataaaaataaacttgcatgatcacaaaaatttaaaaggacaagtcaccaaagtaacttgatcttcctaataagaatttctaattttagatttttaagtcaatattttttttgccccaaataaaaggaccatcctgttgagatttagaaaaaaacaaaaccaaaaacctctcttgtatgactaatccctgacccagtcccacgatagaattcactcaattacagtttgtttttgttagtgccagttcataagcttcgggtcagtgagggatgataatcgaaggctctaaccatttgttggctgtgacttcctgtgcccaattgcattcacttcctcttctgcaatggtggagtacagttttgaagatcttttccctctactggaaggcttgccactgtcatgatctgaatgtcttttgtaataatctcctctttgcactactgaggaaaagggatttattttaccctttatattattagcacatacatcaatgtgttgacattaatatttaaaaatattaaaaattaaatatcagcttacccaccccacttaggattcaaggaacctacagtgttggtcctgggcagatat

SEQ ID NO: 693930 - DNA, 1546 bp, Homo sapiens
cgaggttttgccacgttgcccaggctggttggtctcaaactcctgagctcaagtgacccacccacctcagcctcctaaaatgctaggattacaggcatgagccaccgcgcccagccactatctttgtaactgttaattacaatggaaaaatggaactttatattggaaaaacctggtggaaccaccttaccctaacgatcaaaacgaacatcattaatatcgggaccaccagcatcgtgtgccttttgatatggtactgagaaagacacagcattactgcattggtcctcctatcaaaaatgcataacctgatttctgtccccaaggcatccaaatgagctaaataaaaaggtggagaaaagtcctagcttattaggaaaaaaagtatatctgtgtcatcccagaaaagatgtaagataaagtataagttactatgttacttatgttttgaaataattttaaacccagaaatgagtctgtattagaattaaaatgtctcttaaggtgaaatattatagaaacaacagaaagttataaaaatgagaagttttagaaaatgtatttgcactctttatcttactgaattatctataatcaggaataatcttaatatttttatacacaaactgaaagaatcctcagattttattaatgtaaagttatccagatgttcgtaggaaaacaaagacacacacattttttcccctgaatgtagcaatcaggctattggccccctgaagaaatccttgtgagtaagtagacactctcatagatatctcaattacttttaggaagaaaacaatattaaatagtgaaaattgctaagtgagaaaaaggaaaatcataatacatttaacacctgcatatgaattgactattcacaaggcagtttcatatatatttttttaatctcacaaacaacatttgaggtaggtggtttcagttgttcgttccaatgaggtttttattccacagaaatgccaacaaggatgccaagatgaaaaaatcacttgaggccaggagtttgagaacagcctggtcaacatagtgagacccccatctctacaaaaaataatagtaattagctggatgtggtggaatgcacctgtagtcccagctacttgagaggctgaggttggagatcgctcaagccctggaatttgaggttacagtgagttatgataatgccactgcactccagcatgagcaacagagtgagaccatatctcttaaaaacacacacacaaaggatgcccagwaaagtttgtgcttggatctggtttccatgtatttggaaaataaataaacgtgaaacgaattgtttttttgactagctttagtttagaaatcgcaatagacatttctcaaaatccattctttacagagaagaccagaaacttttgaaatccaatttagattctttctgattaagcaacattgttagtagagagaagcatttctttgttttgctcatgtcctttgaagagtaaataactgctgactgtccagatgtaggtgttaggaaaatcagtgctgagctctggcc

SEQ ID NO: 693931 - DNA, 1708 bp, Homo sapiens
cccaggtattcaggaggctgaggcaggagaatggcctgaacccaggaggcggagcttgcagtgacctgtgattgtgccactgcactccagcctgggcgacagagcgagagtccatctcaaaaaaaaaaaaaaaaagacgaagaagcccagggtcaggccgactgcaggacstgttggtccatctgcttagcgatgtctcggggcccaggcactttcctcctctgcacttaccccacatggtcccaggatggctgcactgactccaggggacacatccagacctgacatcaggaaaaggtgaggccgtggcttcccctgggtccttctcagaagtgaggaggccctgtcccacgcgtgtcttatggcccattctcaaacccatcagaggtcagggtggagtgtgtgttagaggtcagtttttacacttggtaaaacgatgaagtcatgcaaatggaattgctgggtcagcgattttaaagctacattaaaagtttgcagaatattcccaaattgacttatgaagatatggaaccaatttatactcctacaggcatgaacgagggttaagcagttcgagaagtgggctataaagctgagtgtgttgcactttgctttctagaggatgtatggaacaggacatgtttttatttgactgttcattatcagaggcctgtgccctttatctaggaaggatgtccaaagcagtggggaaaaatgataggtttaataaaacgtaggcctggaaacatggcttgttcatattttgggaacacagagaggcctttaaatgattaaattgcttcaagacttcgagtgtgccattttcctacacaatgaaatacagatagctatgttctaccctcctcaacccattccccatctctcagcaaatacccagttcagtattccagaaacattttagtgagtgaatgtagcgccaaacttcttcaaatagacccatctccaaatcatccaccaggtgtatgtttccttgttagtcagagccccacacatatgtccaagataaggctatttaaagacagagttactaagctgggtagaaagcactcagggaacttttagcaattcagttattatattggactgctgaagaattgtactggacgattgcactataagatgctaggaggtcatatatagtgtagtccttgtgatacaattcaaatgcacttgcaggtttagggccatttgtggagcagcaggcttggaataggactggggaattcaaccatttttctcctctagggactgtgggatccccatgtcggcggaaatgagttttcatttcctgctgtcttcctcctgaggttgtccctccagtctttggctgtgatgatagtgtggtacatttgttacaatcgatcaacctatattgattcatgattattaactaaagtctacagtttagggtttactctttgtgttgtatattctatggatttatgtcatgcctaatgtcatgtgcccatcattacagtttcatacaaaatagttttttcatatcagaaaggctattttgtatgatactgtatcaaacaaaaaagccttctaaattccctgtatggtacagtatcatacaaaatagccttgtaaattccccatacaccctccccatcctctgcccgaagtctggcaaccactagtctttttactgtttctatagttttgtcttttcccgactgtcgta

SEQ ID NO: 693932 - DNA, 1708 bp, Homo sapiens
cccaggtattcaggaggctgaggcaggagaatggcctgaacccaggaggcggagcttgcagtgacctgtgattgtgccactgcactccagcctgggcgacagagcgagagtccatctcaaaaaaaaaaaaaaaaagacgaagaagcccagggtcaggccgactgcaggacctgttggtccatctgcttagcgatgtctcggggcccaggcactttcctcctctgcacttaccccacatggtcccaggatggctgcactgactccaggggacacatccagacctgacatcaggaaaaggtgaggccgtggcttcccctgggtccttctcagaagtgaggaggccctgtcccacgygtgtcttatggcccattctcaaacccatcagaggtcagggtggagtgtgtgttagaggtcagtttttacacttggtaaaacgatgaagtcatgcaaatggaattgctgggtcagcgattttaaagctacattaaaagtttgcagaatattcccaaattgacttatgaagatatggaaccaatttatactcctacaggcatgaacgagggttaagcagttcgagaagtgggctataaagctgagtgtgttgcactttgctttctagaggatgtatggaacaggacatgtttttatttgactgttcattatcagaggcctgtgccctttatctaggaaggatgtccaaagcagtggggaaaaatgataggtttaataaaacgtaggcctggaaacatggcttgttcatattttgggaacacagagaggcctttaaatgattaaattgcttcaagacttcgagtgtgccattttcctacacaatgaaatacagatagctatgttctaccctcctcaacccattccccatctctcagcaaatacccagttcagtattccagaaacattttagtgagtgaatgtagcgccaaacttcttcaaatagacccatctccaaatcatccaccaggtgtatgtttccttgttagtcagagccccacacatatgtccaagataaggctatttaaagacagagttactaagctgggtagaaagcactcagggaacttttagcaattcagttattatattggactgctgaagaattgtactggacgattgcactataagatgctaggaggtcatatatagtgtagtccttgtgatacaattcaaatgcacttgcaggtttagggccatttgtggagcagcaggcttggaataggactggggaattcaaccatttttctcctctagggactgtgggatccccatgtcggcggaaatgagttttcatttcctgctgtcttcctcctgaggttgtccctccagtctttggctgtgatgatagtgtggtacatttgttacaatcgatcaacctatattgattcatgattattaactaaagtctacagtttagggtttactctttgtgttgtatattctatggatttatgtcatgcctaatgtcatgtgcccatcattacagtttcatacaaaatagttttttcatatcagaaaggctattttgtatgatactgtatcaaacaaaaaagccttctaaattccctgtatggtacagtatcatacaaaatagccttgtaaattccccatacaccctccccatcctctgcccgaagtctggcaaccactagtctttttactgtttctatagttttgtcttttcccgactgtcgta

SEQ ID NO: 693933 - DNA, 1708 bp, Homo sapiens
cccaggtattcaggaggctgaggcaggagaatggcctgaacccaggaggcggagcttgcagtgacctgtgattgtgccactgcactccagcctgggcgacagagcgagagtccatctcaaaaaaaaaaaaaaaaagacgaagaagcccagggtcaggccgactgcaggacctgttggtccatctgcttagcgatgtctcggggcccaggcactttcctcctctgcacttaccccacatggtcccaggatggctgcactgactccaggggacacatccagacctgacatcaggaaaaggtgaggccgtggcttcccctgggtccttctcagaagtgaggaggccctgtcccacgcgtgtcttatggcccattctcaaacccatcagaggtcagggtggagtgtgtgttagaggtcagtttttacacttggtaaaacgatgaagtcatgcaaatggaattgctgggtcagcgattttaaagctacattaaaagtttgcagaatattcccaaattgacttatgaagatatggaaccaatttatactcctacaggcatgaacgagggttaagcagttcgagaagtgggctataaagctgagtgtgttgcactttgctttctagaggatgtatggaacaggacatgtttttatttgactgttcattatcagaggcctgtgccctttatctaggaaggatgtccaaagcagtggggaaaaatgataggtttaataaaacgtaggcctggaaacatggcttgttcatattttgggaacacagagaggcctttaaatgattaaattgcttcaagacttcgagtgtgccrttttcctacacaatgaaatacagatagctatgttctaccctcctcaacccattccccatctctcagcaaatacccagttcagtattccagaaacattttagtgagtgaatgtagcgccaaacttcttcaaatagacccatctccaaatcatccaccaggtgtatgtttccttgttagtcagagccccacacatatgtccaagataaggctatttaaagacagagttactaagctgggtagaaagcactcagggaacttttagcaattcagttattatattggactgctgaagaattgtactggacgattgcactataagatgctaggaggtcatatatagtgtagtccttgtgatacaattcaaatgcacttgcaggtttagggccatttgtggagcagcaggcttggaataggactggggaattcaaccatttttctcctctagggactgtgggatccccatgtcggcggaaatgagttttcatttcctgctgtcttcctcctgaggttgtccctccagtctttggctgtgatgatagtgtggtacatttgttacaatcgatcaacctatattgattcatgattattaactaaagtctacagtttagggtttactctttgtgttgtatattctatggatttatgtcatgcctaatgtcatgtgcccatcattacagtttcatacaaaatagttttttcatatcagaaaggctattttgtatgatactgtatcaaacaaaaaagccttctaaattccctgtatggtacagtatcatacaaaatagccttgtaaattccccatacaccctccccatcctctgcccgaagtctggcaaccactagtctttttactgtttctatagttttgtcttttcccgactgtcgta

SEQ ID NO: 693934 - DNA, 1230 bp, Homo sapiens
catcctttgatagtcgcagtggaccgggtcacacccctttaatctgacttgtgggggaaagaagagaattatccttaggcctcagagaaagaacagaggaaatgggagttttgctttttcggcgaggatttaggtttcatcggagttcatttatgtttgcagattgcgccctccgttatgaaaacacatcctttccttctactcccggaggaggcctgcygcgggagggaagctcttcctgacctctgcctccccgaggaggctgccacggcgcgtggccctagattctgacagaggtactgggcttgggtttgagcaaaagcaaagacagttccagtgatgtgtcctgttagcccttcgattttagcattttcggttgattggcctgaaaacaggtgctgctcaggcagctcgtgatccacttggccctctcctcgttcatcctggggctgccaaagcaatgggtagagaatcaaggcctggcctagagtccaggctctccctagtcataagtgtgggatgttgcctcccccatggagccagggtttttgcaaagtgggaaggacagtagctacctaaaacggcactcagcgctgttagggacctgacgtgacattatttattcgagaacacccttaaaactgtcaagaattgagtaagacaaagcaccaccatgtttctccctggcagtacgagctgcttcagagagcaggtgtgggcagagagaggaagtgagccttatcagcctgatctttcagtcaggtttttacatttttttaaaaagaagtttggaaatttaccaagggaggaggagattgaagaagaattttacaattatttggagaattcagtgaaccgttctgtttctgtccacctctttttgaaattactgagaagtaacgttttcattagtaatcgcattacatgtgctggtacaaagactgagttgtgggccgggcgtggtggctcatgcctgtaatcccagccccttcggaaggccaaggcgggtggatcacctgatgtcaggagttcgagagcagcctggccaacatggtgaaactctgtctctactaaaaatacaataataaataaataaataaataaataaatattagccaggtgtggtgcatgcgcctatagttccagctacttgggaggctgaggcaggagaatcgcttgaactcgggaggtggagattgcagtgagccgagattgcaccattgcactcca

SEQ ID NO: 693935 - DNA, 644 bp, Homo sapiens
gtatttggaaataatgacagtatacacttcaaaaacctatggtgaggataaamaatagaatacatgtaaaagactagcatagcacctggtacctagtaagcatctaacaaatgtcacttattttcatcattactgacagtctcataatctttatcttcatcctcaagcagtcacaggtgagatttttcatccctgtccacgtgtggacaagcagcttttgtttgcctggcatccattccccttcttctctttccaggtgcctcatttacttgggaaagcctgacctgtagtcctcagttctcacccctaggtgaggttcactctctaccctccagggtggacatgtggctcaagcctggccagaagttggttcagaaatgggcaaagggcctaagccaatcagaggcaactccaggatttttgtcaaagcccttggtaaagagcagctctctttctgtatgtatctccatgatgtaatgctgaaactattagggccatcttgttgtcatatcagggagcttacaagagaataactaatatagaaaagaaaagctgagagatcaagttttgataatattgtttgagcccttggttccaactctgccagtcaatcagcagacccataggtaaggaccaatacattt

SEQ ID NO: 693936 - DNA, 644 bp, Homo sapiens
gtatttggaaataatgacagtatacacttcaaaaacctatggtgaggataaacaatagaatacatgtaaaagactagcatagcacctggtacctagtaagcatctaacaaatgtcacttattttcatcattactgacagtctcataatctttatcttcatcctcaagcagtcacaggtgagatttttcatccctgtccacgtgtggacaagcagcttttgtttgcctggcatccattccccttcttctctttccaggtgcctcatttacttgggaragcctgacctgtagtcctcagttctcacccctaggtgaggttcactctctaccctccagggtggacatgtggctcaagcctggccagaagttggttcagaaatgggcaaagggcctaagccaatcagaggcaactccaggatttttgtcaaagcccttggtaaagagcagctctctttctgtatgtatctccatgatgtaatgctgaaactattagggccatcttgttgtcatatcagggagcttacaagagaataactaatatagaaaagaaaagctgagagatcaagttttgataatattgtttgagcccttggttccaactctgccagtcaatcagcagacccataggtaaggaccaatacattt

SEQ ID NO: 693937 - DNA, 657 bp, Homo sapiens
atatatcccatataatatttaggctcatttctactaaaaaaaaattcattgcttatctgagactcaaatttgaccgagtgtctgtgttagtcactgttctcaggagaaacagaacctatagaatgtatgtrtatgtatagagagagatttattttaagaaattggctcccatgattttggagacaggcaagtccaaaatctgcaggataggccgataggctggagacctagggaggagttgacattgccattcaagtctaaaagctatgtgctagcagaaatactttctatagaaaggttggtctttttctgttaatgccttcaactgagtagatgagacccactcacattatgcagggcaatctattttactctaaatccaatttaaatgttaatctcatccaaaaacaccctcacagaaacatccaaaataagatttgaccaactatatgggcaccatagcccagccaagttgacacacaaaattagcatcacaagtgtcttttatttttatttcctaaatctgacaactctatttcagggggtctgaactgagttgctaagggtttaaattgctcccatagtcaatctctttctttctttaacaatatgaaactggcactatttaacagtactttgtattttagttttctattg

SEQ ID NO: 693938 - DNA, 914 bp, Homo sapiens
catagttatttattcattttcattgctgcataatgttcattcaacactatttctgacacttytaatctattatacatttcgtgcttattgtttgcctggtatatactttttacatccttttcttgcaacttatttggtcctttttagaaaaagcaaaaaaatgtatctcttgcagacagcatacaattgggtcttatttattttaaacagtctgacaatctctgcttcttacagtattcagcataataatgatattcaatggtatacctaaatcgaactatatttggtataatcatatctttggatttagatctacctcattttgctatgttttccatttttctcatctattcttgtgatttatgggttttttttttttcagtttgtttgtttgttttttgttttatttttgagaaagggtctcagtctgtcgctcaggctggagtgcagtggtgtgatcttggccaaccacagcctctgcttcctgggcccaagcaattctcccaccttagccttccaagtagctgggagttgtgcgtccccacacctggctaatttttgcatatttttgtagagatgggatttcaccatgttacccaagctggtctcaaactcctgggctcaagcaatcctcctgcctccgcctcccaaagtgctgggattaacaggcgtgagtcaccattcctggactattcttgtcatttctattcctctgttcctcctattctgacctctttggggttaaatatttttaataattttattttaattattctattagctttttagctatacctctactcctagtggttgatctagagatatgcatctttaacttgtcacagtacatttagagtcaatattataccatttcatttaaaatatgagaatcttgcaaccaaatagctctgtta

SEQ ID NO: 693939 - DNA, 732 bp, Homo sapiens
cccacacacataaaagaaacctgaaagttagcaatttaagactagcatggttacttgacaaaattgtcaaggtccatagctccttgccatccttcagtgtttcttgttctcacagcccaatrtggttgatagagcaccagccatcacatcacatccatgttctgggcagcatgatggaagaagggtcaaagaaactctctaaaaacttcctggaaatcccacataataatttcatttgcatttattggccaaaatgtggtcacatgaccatatctagctgcaaggaaggttgagaaatattctttggctgagttttaggattctattattaagaatgaagagaagaacagatgttaatttaagcaaccagcagcctttgccacagcatgatggaactagtaagttagcccttacctctttcactttctccctttcatactccgctttgtgatgttggaggtgggatgctgcccaccacatttctgctttgctgggagttctggagggagactagaagacctgagaaggaaggatgctgccttatccacatcaccaagctttgcttcttcaccctggcagcagcacttctttccaggagagacagttgatctcagtttgcagcttgttcagcacccacagaccagcctcatctttccttgattcagttacatcagcaccaggccagccagcacccctgcggtggacacaattgtgttctcccaaaattcatat

SEQ ID NO: 693940 - DNA, 732 bp, Homo sapiens
cccacacacataaaagaaacctgaaagttagcaatttaagactagcatggttacttgacaaaattgtcaaggtccatagctccttgccatccttcagtgtttcttgttctcacagcccaatgtggttgatagagcaccagccatcacatcacatccatgttctgggcagcatgatggaagaagggtcaaagaaactctctaaaaacttcctggaaatcccacataataatttcatttgcatttattggccaaaatgtggtcacatgaccatatctagctgcaaggaaggttgagaaatattctttggctgagttttaggattctattattaagaatgaagagaagaacagatgttaatttaagcaaccagcagcctttgccacagcatgatggaactagtaagttagcccttacctctttcactttctccctttcatactcygctttgtgatgttggaggtgggatgctgcccaccacatttctgctttgctgggagttctggagggagactagaagacctgagaaggaaggatgctgccttatccacatcaccaagctttgcttcttcaccctggcagcagcacttctttccaggagagacagttgatctcagtttgcagcttgttcagcacccacagaccagcctcatctttccttgattcagttacatcagcaccaggccagccagcacccctgcggtggacacaattgtgttctcccaaaattcatat

SEQ ID NO: 693941 - DNA, 604 bp, Homo sapiens
gaccccatggggaagggggtcaaggttctwcacttgcagtagacagtttccttgcatcagctgtgaggcaaaatctgttggccatgaaggacccttgctcacaatttaagctgatgtttttctgccccttctttatgtaagtaaagcattgttccatccaatgcctgtgtaagttgcgcctttcttggcaactttcttgcaagttggaagacaaatgcaaaccatccaggagtttgatgtcctagaactgctacttagggtgataggcaacagatgttacttgcttcacaatactggtgcaaaagacctcaataaaatactagcaaagagaattcaacagcataccaaaagaattgtatgacttgaccaattgaggttattcctgaaatgcaaggataatcaaatatctgaaaatcaatcactacaatataccacattagcaaaatgaagaaaaacccatatgatcatctttattgatgcagaaaaagcatttcacaaaattcaacactctttcatgataaaaaaaaaaaaactaaacatttagaaaaagaaggaaactatcatatacaaaggaaactaatgaatagaaagaaaccagctaaac

SEQ ID NO: 693942 - DNA, 604 bp, Homo sapiens
gaccccatggggaagggggtcaaggttctacacttgcagtagacagtttccttgcatcagctgtgaggcaaaatctgttggccatgaaggacccttgctcacaatttaagctgatgtttttctgccccttctttatgtaagtaaagcattgttccatccaatgcctgtgtaagttgygcctttcttggcaactttcttgcaagttggaagacaaatgcaaaccatccaggagtttgatgtcctagaactgctacttagggtgataggcaacagatgttacttgcttcacaatactggtgcaaaagacctcaataaaatactagcaaagagaattcaacagcataccaaaagaattgtatgacttgaccaattgaggttattcctgaaatgcaaggataatcaaatatctgaaaatcaatcactacaatataccacattagcaaaatgaagaaaaacccatatgatcatctttattgatgcagaaaaagcatttcacaaaattcaacactctttcatgataaaaaaaaaaaaactaaacatttagaaaaagaaggaaactatcatatacaaaggaaactaatgaatagaaagaaaccagctaaac

SEQ ID NO: 693943 - DNA, 603 bp, Homo sapiens
tttgttcatcactgtagtcccagggcttgcctcgcacgtgaactggaatacagcaggcccttaccagtgacccgtctggcagtgggagcactgagggagagcgggcaaagcttcatttcagtggggaaagagtttgaggagaatttcatttatttattttcttcaaaacattaaagggaagaactaaaaacaaaaaccagcaaacaaaataatatttgtgaaaagtgattttcaaaaatttccaaactgctgtggggtgatgagtgacacacatttccataaagtttctcattctatctgtgtctttcagtgtgaacaaaaaatttctttctaacatgtgaagattttactcrcttcactactacctcctttagtggttggaagtcatttgaatttttctttacttttctagcaagaattctttgttttgtgctatgactcacgtgaataatagctcctggcttaatctgaagctctgtgttgtctctgccagcatgagacaggaagaccttctccacttttgcccagtaattttcattctccccccacagggctccacttaagcgagagtccactggaggatgacatgctgacatggtcaca

SEQ ID NO: 693944 - DNA, 620 bp, Homo sapiens
cccgtcggtaccctccttggctgaatccaaagggaaggcagagggaagtagcccactgaagtcattcacaaaggtcagccttccaggatgcagaacagaatggagaaaggtcgagattggatctgaaggggcaattgcaagatacccaatacaccatatcgtctgcacatccaattcaggacaacagtctgaggctggtgtgggaggaggacactggggacccctgaaggaagtggccagtgaagatgagtcaygggcatccggttctggctgtcatcccactgtagaactagcagtatctgctggaaaccagaagcaaccaatagataaagcagcaaggctagggcaaggtatgactcagtggacaacacagtcaatttcacgtcagattcattcattcatttagtcgttcattctgggcttctcaaactcagcactattgacattttgagccaggtaattctttgttttgtctggcacttggtttgatatcagctggggtgacagaatgacttagtcacttgccactcatcatccagcagggtagcctgggcttgttcacgtgatggcagaagagcttccagcaacaagaggctaagcctcaatgcacaagtgttttt

SEQ ID NO: 693945 - DNA, 620 bp, Homo sapiens
cccgtcggtaccctccttggctgaatccaaagggaaggcagagggaagtagcccactgaagtcattcacaaaggtcagccttccaggatgcagaacagaatggagaaaggtcgagattggatctgaaggggcaattgcaagatacccaatacaccatatcgtctgcacatccaattcaggacaacagtctgaggctggtgtgggaggaggacactggggacccctgaaggaagtggccagtgaagatgagtcatgggcatccrgttctggctgtcatcccactgtagaactagcagtatctgctggaaaccagaagcaaccaatagataaagcagcaaggctagggcaaggtatgactcagtggacaacacagtcaatttcacgtcagattcattcattcatttagtcgttcattctgggcttctcaaactcagcactattgacattttgagccaggtaattctttgttttgtctggcacttggtttgatatcagctggggtgacagaatgacttagtcacttgccactcatcatccagcagggtagcctgggcttgttcacgtgatggcagaagagcttccagcaacaagaggctaagcctcaatgcacaagtgttttt

SEQ ID NO: 693946 - DNA, 955 bp, Homo sapiens
ctgaaatatgtcaaactggcatgcctatgcaattttccatatacttcagatatttatttcatatagaggcagggtctcactctgttgcccaagcttgagtacagtggtgcagtcattgctttctgcagcctcaaactcctgggctcaagtgatcctcccacctcagcctccatagtagttaggaatacaagcatgcaccatgcccggctaattttttaatttttgtagagatgaggtctctctctgttgccaaggctcatctccaactccyggcctcaagcaatcctcctgcctcagcctcccaaagtgctgagattacaaggcatgagccaccatacctggcagagatattctttttaaaaataaaaaaaaaactcacaatttagaaattctttctttcaaatgtatctgattaagaattatgaagaaaacattctaaaatcaatattttaaaactagtttgcatcataaactagaagagaatggaaacttgtgtcaaacgatagccagtccatgaacgtttttgctgtgatttttagaagacgtatctgcataccaccagcttccatacagagctctttgatggtaggtggtggcaaagaaaacaggctttatagaagtttctacacaacagtgtgagaggcttccatgaatggaaagcctcttagttcaagctgtcttagttcctgaggaaacgtgtctggctattgcaaaagattttgttgaacaagggcacaaatcaaggtgaagttcttctcctttccttgaagcagagatgactacaaatagaacacagtaataataggcaggcaggactattatattcttttaaaaattgggcacagcaagaagttgatagctcctaggtaaatgtgacaggaattgaaagcacaatagaatctaaatccatccaactgccaaacagtaatatcctgacaaaattagggtttttttt

SEQ ID NO: 693947 - DNA, 955 bp, Homo sapiens
ctgaaatatgtcaaactggcatgcctatgcaattttccatatacttcagatatttatttcatatagaggcagggtctcactctgttgcccaagcttgagtacagtggtgcagtcattgctttctgcagcctcaaactcctgggctcaagtgatcctcccacctcagcctccatagtagttaggaatacaagcatgcaccatgcccggctaattttttaatttttgtagagatgaggtctctctctgttgccaaggctcatctccaactcctggcctcaagcaatcctcctgcctcagcctcccaaagtgctgagattacaaggcatgagccaccatacctggcagagatattctttttaaaaatwaaaaaaaaactcacaatttagaaattctttctttcaaatgtatctgattaagaattatgaagaaaacattctaaaatcaatattttaaaactagtttgcatcataaactagaagagaatggaaacttgtgtcaaacgatagccagtccatgaacgtttttgctgtgatttttagaagacgtatctgcataccaccagcttccatacagagctctttgatggtaggtggtggcaaagaaaacaggctttatagaagtttctacacaacagtgtgagaggcttccatgaatggaaagcctcttagttcaagctgtcttagttcctgaggaaacgtgtctggctattgcaaaagattttgttgaacaagggcacaaatcaaggtgaagttcttctcctttccttgaagcagagatgactacaaatagaacacagtaataataggcaggcaggactattatattcttttaaaaattgggcacagcaagaagttgatagctcctaggtaaatgtgacaggaattgaaagcacaatagaatctaaatccatccaactgccaaacagtaatatcctgacaaaattagggtttttttt

SEQ ID NO: 693948 - DNA, 647 bp, Homo sapiens
cattgtatccaaatttcacctcatcagagatgctttctgcaaacaccaatctaaaagagcacctcgtccctctcccactttatcatactttttttttaattcactcttcatagtacctgccattctattatgtattgatttgtttgyttgcttattatctgtctccctaaccagactgtcagctccaccagggcagggactttgtttcattcactaactatatcccagcatttaaagagttcttgggatgtagtaggagcttaataattaagtgtgcaatgaatggattagagaagaggaggagaaggaaggaaagggaatgaaggagatggggaagagaggggaagaagggagtgaaaaaaaagagagaaaaggatgaaagaaagaagaaaaaaggcagccaccataataagaagcatcactaattgatgctgctgagctgcaagggtctcagagagggtctcagggtctgtatcctcttctattgtaatgggatatccttttctggcttccaaaaacagccctttccctctaatagctgttatgtcagaaatggaaacaaagatagtgtctctgattaagtgatgcattctgggaaaccggtacaacttcctggtacagaggcaggaaattttacctcaacctgc

SEQ ID NO: 693949 - DNA, 619 bp, Homo sapiens
tgacctcacgtctggagagattcacacttcaagaaagatattaagatttcataaatgaaattaaataaatacatattcataaaatttagagaattatctgccacagaataagtgttattcaaacctttgttatataaatactctacttttgagtagcctaacagattgcataaaccatccttaaaaatcaactccttaggactaagtaccagaaagtaattygtaaatattatactttgcctaatgctttacaacaatcacaaaattaaaaggatacacagcaaattacttttaaaatttttctttcattagactcagaaaaatgaaaatgggtatattccaatttgcattttttaagatgaacaggcacactatctttaaagctactgtaaattaccagcttaataatgacaaagaatgtgtatagctatttattcttgtgttcagtaaaaaaaatatagtaaccatggcaactaccaaatctcatagtatgtatgctacctctatgatcactttttataataaagacatgagtaatatatcatctaggttctggtattaaatgtgttgaaatgccttcaaacatacccattgctgatatacatatttaccatgttta

SEQ ID NO: 693950 - DNA, 649 bp, Homo sapiens
aggagagaagggccagagctgggctctgcaaataaacaagtgaaagacaaggccacctattgacaccagtcccttgggcagattccaggctgaaagccttgctccctggctccagccagtgtttcagacccactgagcccacaggcaagcagcctcctcacaccaggcctgtgggtcagccaagtctacacaaaggaccaattatgatcagtccaccttgcaattctcctgagccacctccagcatccccacccccagacacacctggagcacccagactagaaggcagagctaagttacccttcaccaacaccaaacaagggagagtgcctccctgattctcccctccccaggcacctggcctcccactcaggaccacaccctaagcaggtatttccagagccagagtgaatgcagagcccaggacacacaagagcactggcttctgggtctgtctataaaggaagcrcattcacctggccccacttgcatcctccctagagggtgagaacaaactcctcaaagctgaagacacagagggctcctaaagaagctgtgttcgccgaatagttaacttcagggccaggctacaaagcccaggagtcaactgcaaggtcacctttagaagtgcctgactcggatgagtatg

SEQ ID NO: 693951 - DNA, 649 bp, Homo sapiens
aggagagaagggccagagctgggctctgcaaataaacaagtgaaagacaaggccacctattgacaccagtcccttgggcagattccaggctgaaagccttgctccctggctccagccagtgtttcagacccactgagcccacaggcaagcagcctcctcacaccaggcctgtgggtcagccaagtctacacaaaggaccaattatgatcagtccaccttgcaattctcctgagccacctccagcatccccacccccagacacacctggagcacccagactagaaggcagagctaagttacccttcaccaacaccaaacaagggagagtgcctccctgattctcccctccccaggcacctggcctcccactcaggaccacaccctaagcaggtatttccagagccagagtgaatgcagagcccaggacacacaagagcactggcttctgggtctgtctataaaggaagcacattcacctggccccacttgcatcctccctagagggtgagaacaaactcctcaaagctgaagacacagagggctcctaaagaagctgtgttcgcmgaatagttaacttcagggccaggctacaaagcccaggagtcaactgcaaggtcacctttagaagtgcctgactcggatgagtatg

SEQ ID NO: 693952 - DNA, 644 bp, Homo sapiens
ttttttttttcctttgagacatagtttcactcttttagtccaggctggagtgcaatgggatgatctcggctcagtgaccctctgcctcctgggctcaagtgattctcctgcctcagtttcccaaatagctgggattacaggtgcatgccaccatgccagctaattttgtatttttagtggaaacagggtttccccacgttggtcaggctggtctcgaactcctggcctcaggtgatccgcctgcctcggcctcccaaagtgctgggattacagtgtkagccaccacgcctggcccaagctgtctttttattagcagaaaacaagagaagcctttcctaaccgtgattcatgaaagaaaagttcaatccgacacacaaaagcaaacaaagcagcttctgcaaaagataccaacagcaaggtcaaaagttaaatgaaaacacggggaaaacatttgccacataaatcacagacaaagggctcatcttccttgtcaggcctctgagcccaagcctgcgcgtgtacatccagatggcctgaagtaactgaagaatcacaaaagaagtgaaaatggccggttcctgccttaactgatgatattaccttgtgaaattccttctcctggctcagaagctcccctactgagc

SEQ ID NO: 693953 - DNA, 644 bp, Homo sapiens
ttttttttttcctttgagacatagtttcactcttttagtccaggctggagtgcaatgggatgatctcggctcagtgaccctctgcctcctgggctcaagtgattctcctgcctcagtttcccaaatagctgggattacaggtgcatgccaccatgccagctaattttgtatttttagtggaaacagggtttccccacgttggtcaggctggtctcgaactcctggcctcaggtgatccgcctgcctcggcctcccaaagtgctgggattacagtgtgagccaccacgcctggcccaagctgkctttttattagcagaaaacaagagaagcctttcctaaccgtgattcatgaaagaaaagttcaatccgacacacaaaagcaaacaaagcagcttctgcaaaagataccaacagcaaggtcaaaagttaaatgaaaacacggggaaaacatttgccacataaatcacagacaaagggctcatcttccttgtcaggcctctgagcccaagcctgcgcgtgtacatccagatggcctgaagtaactgaagaatcacaaaagaagtgaaaatggccggttcctgccttaactgatgatattaccttgtgaaattccttctcctggctcagaagctcccctactgagc

SEQ ID NO: 693954 - DNA, 644 bp, Homo sapiens
ttttttttttcctttgagacatagtttcactcttttagtccaggctggagtgcaatgggatgatctcggctcagtgaccctctgcctcctgggctcaagtgattctcctgcctcagtttcccaaatagctgggattacaggtgcatgccaccatgccagctaattttgtatttttagtggaaacagggtttccccacgttggtcaggctggtctcgaactcctggcctcaggtgatccgcctgcctcggcctcccaaagtgctgggattacagtgtgagccaccacgcctggcccaagctgtctttttattagcagaaaacaagagaagcctttcctaaccgtgattcatgaaagaaaagttcaatccracacacaaaagcaaacaaagcagcttctgcaaaagataccaacagcaaggtcaaaagttaaatgaaaacacggggaaaacatttgccacataaatcacagacaaagggctcatcttccttgtcaggcctctgagcccaagcctgcgcgtgtacatccagatggcctgaagtaactgaagaatcacaaaagaagtgaaaatggccggttcctgccttaactgatgatattaccttgtgaaattccttctcctggctcagaagctcccctactgagc

SEQ ID NO: 693955 - DNA, 663 bp, Homo sapiens
taacyctttattcatcacctgcagcaagacagccactgtaactttaactcgacattctttttacagatagaaaaattagggcatggggaaaagacatattttccagctttgtcagctaagctttcctgaaaggtccacccaaattttctatttatatctcattgtccaattttatctgcaaaagaggctgggaaatgcagtttttaggcctgcaaaactgctgccctcagtgatacaaaggctcctcccaagaaagaagaagtattgtctgtaggtaatatgagcttaagtaatgtgagattgttttcacagcgaacttgtattactttcatatcttttattataataaaaattagttccctgtaatcccagcactttggaaggccaaggcaggcagaccacctgaggttgggagttcgagaccaacctgaccaacatggagaaaccccatttctactaaaaatacaaaaaattagctaggcatggtggcatatgcctgtaatcccagctactcaggaggctgaggcaggagaatcgcttgaacccgggaggcagagtttgcagtgagccgcggtggagccattgcactccagcctgggcaacaagagtgaaactccatctcagacaaacaaacaaaaaagttccgttttggaaaaacagaaa

SEQ ID NO: 693956 - DNA, 663 bp, Homo sapiens
taactctttattcatcacctgcagcaagacagccactgtaactttaactcgacattctttttacagatagaaaaattagggcatggggaaaagacatattttccagctwtgtcagctaagctttcctgaaaggtccacccaaattttctatttatatctcattgtccaattttatctgcaaaagaggctgggaaatgcagtttttaggcctgcaaaactgctgccctcagtgatacaaaggctcctcccaagaaagaagaagtattgtctgtaggtaatatgagcttaagtaatgtgagattgttttcacagcgaacttgtattactttcatatcttttattataataaaaattagttccctgtaatcccagcactttggaaggccaaggcaggcagaccacctgaggttgggagttcgagaccaacctgaccaacatggagaaaccccatttctactaaaaatacaaaaaattagctaggcatggtggcatatgcctgtaatcccagctactcaggaggctgaggcaggagaatcgcttgaacccgggaggcagagtttgcagtgagccgcggtggagccattgcactccagcctgggcaacaagagtgaaactccatctcagacaaacaaacaaaaaagttccgttttggaaaaacagaaa

SEQ ID NO: 693957 - DNA, 663 bp, Homo sapiens
taactctttattcatcacctgcagcaagacagccactgtaactttaactcgacattctttttacagatagaaaaattagggcatggggaaaagacatattttccagctttgtcagctaagctttcctgaaaggtccacccaaattttcwatttatatctcattgtccaattttatctgcaaaagaggctgggaaatgcagtttttaggcctgcaaaactgctgccctcagtgatacaaaggctcctcccaagaaagaagaagtattgtctgtaggtaatatgagcttaagtaatgtgagattgttttcacagcgaacttgtattactttcatatcttttattataataaaaattagttccctgtaatcccagcactttggaaggccaaggcaggcagaccacctgaggttgggagttcgagaccaacctgaccaacatggagaaaccccatttctactaaaaatacaaaaaattagctaggcatggtggcatatgcctgtaatcccagctactcaggaggctgaggcaggagaatcgcttgaacccgggaggcagagtttgcagtgagccgcggtggagccattgcactccagcctgggcaacaagagtgaaactccatctcagacaaacaaacaaaaaagttccgttttggaaaaacagaaa

SEQ ID NO: 693958 - DNA, 663 bp, Homo sapiens
taactctttattcatcacctgcagcaagacagccactgtaactttaactcgacattctttttacagatagaaaaattagggcatggggaaaagacatattttccagctttgtcagctaagctttcctgaaaggtccacccaaattttctatttatatctcattgtccaattttatctgcaaaagaggctgggaaatgcagtttttaggcctgcaaaactgctgccctcagtgatacaaaggctcctcccaagaaagaagaagtattgtctgtaggtaatatgagcttaagtaatgtgagattgttttcacagcgaacttgtattactttcatatcttttattataataaaaattagttccctgtaatcccagcactttggaaggccaaggcaggcagaccacctgaggttgggagttcgagaccaacctgaccaacatggagaaaccccatttctactaaaaatacaaaaaattagctaggcatggtggcayatgcctgtaatcccagctactcaggaggctgaggcaggagaatcgcttgaacccgggaggcagagtttgcagtgagccgcggtggagccattgcactccagcctgggcaacaagagtgaaactccatctcagacaaacaaacaaaaaagttccgttttggaaaaacagaaa

SEQ ID NO: 693959 - DNA, 598 bp, Homo sapiens
tgagtgtgcatggtgtctgtgtgatgttggtgtgttgtgtgggtttgtgtgtgtggatgtggtttctgcctatgggaggaggtttgctcacagatggaggagaaggagctctataggcaaagatcccagggccgtggaggaggagacacagtcctgagaactccttcctctgaatcagaaggacargaaaggtgggattttaaaggaacagagaaccctggtgggagaggtgaatctgagctcctcgggccatcgggtgtcctgtggagcagaggcaggcccgtgagggtgattttcagaatgctgcctgcttctgagagtgagatgaagaccctctggggtcccgttgatgtcaccaatgtcgcctgtcttgaggcatctctggtccagacctggctgggagagagagctatgggtggagatgcactgggtgggtgctggtgggaggggagggctggcttttcctcagcccccagacttagagaagatcacacgcaagagcttggaagtcctgggaggaagtatgatcccgaatcctggcacacttgatcatgcgtgacagggacttaagaaagcccctaattatagccgtgtgggg

SEQ ID NO: 693960 - DNA, 1950 bp, Homo sapiens
agacaggagtatatcattctgacactcttttgaggcacatgtttattcaatgtccaccctctcacaagcagatatttaataattaaaaaaagaaaatctgcagcttgattatatgcttagccaagaaattcttttgcagttctaaggaaaatctccagcaaacccaattactctcccagcaatgcacttcaaaggagagcagaatgcatttcttgtacagaattcctggatatgtttgatcattagttagggcaagtagtttgacttgaggctatttactcagcaggaataaaaagtacagcattgcttcaaccaagaggagtgccccataccttccccaagcagaatttaataatttgatctgtcagaggaggtacagaggttggctatagaaatgagtcacgaccagtcagatttggctgacttgtgggccattaaaaatgttccttcccccaaacggcattttttaggaataataataacagaaacagttggcaccatgtaattgaccaagaacctgagaatttcacagcagtacttatcactgaaacagtttttgtttttttgagtctaagccaaatccacacttgagtattttttwaatttatccaggtgttctatggctaatatttatttcatctagcaagtgccacaaagtatttttgatgtagtcaaaaaaagtatttctgatgtagtttaaaaaagtatttttggtgtagtcaagaatataacatgatattattagactcctaattacaaatatttggtagagactatcagtttaagaaaaaattgcattaaaatgtcaacttttttctttttttgagacggagtctcgcactgcacactgtcacctgggctggagtgcagtgacgatctcggctcactgcaacctccacctcctgcattcaagtgattctcatgcctcagcctcctgagtagctggagttacaggcgcacgccaccatgcctggctaattttttgtatttttagtaaagatggggtttcaccatgttggtcaggctggaagttttttcgaaaactaaatatatatttcattatataaggtagactttacactttttgggaggaaaatgcacatcaccttttaattttttttttgagacggagtctccctctctcacccaggctggagtacagtggcacgatctcagctcaatgcaagctctgcctcccgggttcacgccactctcctgcctcagcctcctgagtagctgggaccacaggcgcccgccaccacgcctggctaattttttatatttttagtagagacagggttttgccgtgttagccaggatggtcttgatctcctgaccttgtgatccgcctgtctcggcctcccaaagtgctgggattacaggcgtgagccaccgcatccggccttaatatgtaatttttaagcactttaggttttaattaaattttatttcagttataaaaatgttcattaccatttggcatattcctcagctaaaataattaacaataattaaaattacccatgcttgattttcttatttcaatttttataaaagttatgccttcagtttatagaaaataaagaaacttatgtacacatcgatgctttagacaatatctatttttcaccatgaatatcactgaaagaaacaagtatcttttcatctttagacaaaagaaaaaaaagtactagtgtatcttttattattggttactttaaaaaaagagtaaaactacttctgtaacattaatttttaaaagttaattctcatattctaatgggagtgtaatgagtttttctcacagtgaactctaatgagtttaggaacgtgctgccatatttatggtagagactatgcaaattggactgatgtttatttatgcatttatttcatttgggaatctagttttcgaccttaagtttgctggagaatttgttacaggaaaga

SEQ ID NO: 693961 - DNA, 1950 bp, Homo sapiens
agacaggagtatatcattctgacactcttttgaggcacatgtttattcaatgtccaccctctcacaagcagatatttaataattaaaaaaagaaaatctgcagcttgattatatgcttagccaagaaattcttttgcagttctaaggaaaatctccagcaaacccaattactctcccagcaatgcacttcaaaggagagcagaatgcatttcttgtacagaattcctggatatgtttgatcattagttagggcaagtagtttgacttgaggctatttactcagcaggaataaaaagtacagcattgcttcaaccaagaggagtgccccataccttccccaagcagaatttaataatttgatctgtcagaggaggtacagaggttggctatagaaatgagtcacgaccagtcagatttggctgacttgtgggccattaaaaatgttccttcccccaaacggcattttttaggaataataataacagaaacagttggcaccatgtaattgaccaagaacctgagaatttcacagcagtacttatcactgaaacagtttttgtttttttgagtctaagccaaatccacacttgagtatttttttaatttatccaggtgttctatggctaatatttatttcatctagcaagtgccacaaagtatttttgatgtagtcaaaaaaagtatttctgatgtagtttaaaaaagtatttttggtgtagtcaagaatataacatgatattattagactcctaattacaaatatttggtagagactatcagtttaagaaaaaattgcattaaaatgtcaacttttttctttttttgagacggagtctcgcactgcacactgtcacctgggctggagtgcagtgacgatctcggctcactgcaacctccacctcctgcattcaagtgattctcatgcctcagcctcctgagtagctggagttacaggcgcacgccaccatgcctggctaattttttgtatttttagtaaagatggggtttcaccatgttggtcaggctggaagttttttcgaaaactaaatatatatttcattatataaggtagactttacactttttgggaggaaaatgcacatcaccttttaattttttttttgagacggagtctccctctctcacccaggctggagtacagtggcacgatctcagctcaatgcaagctctgcctcccgggttcacgccactctcctgcctcagcctcctgagtagctgggaccacaggcgcccgccaccacgcctggctaattttttatatttttagtagagacagggttttgccgtgttagccaggatggtcttgatctcctgaccttgtgatccgcctgtctcggcctcccaaagtgctgggattacaggcgtgagccaccgcatccggccttaatatgtaatttttaagcactttaggttttaattaaattttatttcagttataaaaatgttcattaccatttggcatattcctcagctaaaataattaacaataattaaaattacccatgcttgattttcttatttcaatttttataaaagttatrccttcagtttatagaaaataaagaaacttatgtacacatcgatgctttagacaatatctatttttcaccatgaatatcactgaaagaaacaagtatcttttcatctttagacaaaagaaaaaaaagtactagtgtatcttttattattggttactttaaaaaaagagtaaaactacttctgtaacattaatttttaaaagttaattctcatattctaatgggagtgtaatgagtttttctcacagtgaactctaatgagtttaggaacgtgctgccatatttatggtagagactatgcaaattggactgatgtttatttatgcatttatttcatttgggaatctagttttcgaccttaagtttgctggagaatttgttacaggaaaga

SEQ ID NO: 693962 - DNA, 1950 bp, Homo sapiens
agacaggagtatatcattctgacactcttttgaggcacatgtttattcaatgtccaccctctcacaagcagatatttaataattaaaaaaagaaaatctgcagcttgattatatgcttagccaagaaattcttttgcagttctaaggaaaatctccagcaaacccaattactctcccagcaatgcacttcaaaggagagcagaatgcatttcttgtacagaattcctggatatgtttgatcattagttagggcaagtagtttgacttgaggctatttactcagcaggaataaaaagtacagcattgcttcaaccaagaggagtgccccataccttccccaagcagaatttaataatttgatctgtcagaggaggtacagaggttggctatagaaatgagtcacgaccagtcagatttggctgacttgtgggccattaaaaatgttccttcccccaaacggcattttttaggaataataataacagaaacagttggcaccatgtaattgaccaagaacctgagaatttcacagcagtacttatcactgaaacagtttttgtttttttgagtctaagccaaatccacacttgagtatttttttaatttatccaggtgttctatggctaatatttatttcatctagcaagtgccacaaagtatttttgatgtagtcaaaaaaagtatttctgatgtagtttaaaaaagtatttttggtgtagtcaagaatataacatgatattattagactcctaattacaaatatttggtagagactatcagtttaagaaaaaattgcattaaaatgtcaacttttttctttttttgagacggagtctcgcactgcacactgtcacctgggctggagtgcagtgacgatctcggctcactgcaacctccacctcctgcattcaagtgattctcatgcctcagcctcctgagtagctggagttacaggcgcacgccaccatgcctggctaattttttgtatttttagtaaagatggggtttcaccatgttggtcaggctggaagttttttcgaaaactaaatatatatttcattatataaggtagactttacactttttgggaggaaaatgcacatcaccttttaattttttttttgagacggagtctccctctctcacccaggctggagtacagtggcacgatctcagctcaatgcaagctctgcctcccgggttcacgccactctcctgcctcagcctcctgagtagctgggaccacaggcgcccgccaccacgcctggctaattttttatatttttagtagagacagggttttgccgtgttagccaggatggtcttgatctcctgaccttgtgatccgcctgtctcggcctcccaaagtgctgggattacaggcgtgagccaccgcatccggccttaatatgtaatttttaagcactttaggttttaattaaattttatttcagttataaaaatgttcattaccatttggcatattcctcagctaaaataattaacaataattaaaattacccatgcttgattttcttatttcaatttttataaaagttatgccttcagtttatagaaaataaagaaacttatgtacacatcgatgctttagacaatatctatttttcaccatgaatatcactgaaagaaacaagtatcttttcatctttagacaaaagaaaaaaaagtactagtgtatcttttattattggttactttaaaaaaagagtaaaactacttctgtaacattaatttttaaaagttaattytcatattctaatgggagtgtaatgagtttttctcacagtgaactctaatgagtttaggaacgtgctgccatatttatggtagagactatgcaaattggactgatgtttatttatgcatttatttcatttgggaatctagttttcgaccttaagtttgctggagaatttgttacaggaaaga

SEQ ID NO: 693963 - DNA, 1289 bp, Homo sapiens
cagcctttatgctgtcatttacagatgctgactaggagccaggcaccaggctaagattttcacatgtagtctttcatttaatcctcacacagcctccataactgtggtatactctctctatccttcccattttacagatgaggaatgtacgtttttatcctgcagttattaattggcaatataaaaaagtaaatttgaagccacaatattttactttttctgggtgtttcaccttggttaatttttttcctgggaaataattgtgtgcagataaaatgaatgcttgggctattagactccaaataatcatttgtttgtggaaacatctgtcgcacttggcaaatatctgaggtttagatgtaatttcatagtttggtctagggaataaaaacttccagaattattaaactttgatgatcaaaaagaccacctactgagggctcctgccctttataaatgacagaactccccaccctggaaaaccccatgagaatgttcctcttttcttgatcatgacgtggtctcctagtccaggagaccaggcacccttactayagctttgagaaacagcctttgctatgactaagaagaatggtagcatctaagatatttatataagaaaggaaaacattaaacaattgaaacactgaatattttaggatcagacatttctggatgacaactgtagtaaatgcacatttgctgaatgtgttatccatcaataaagattgagattaaaaaaaaaacctgggctgggcatggtggctcacacctgtaatcccaacactttgggaggccgaggtcggcagatgtcttgagcccaggagttcaagaccagcctgggcaacatggtgaaatcccatctctacaaaaagtacaaacattagccaggcatggtggcatttgcttgtggtcctccctactagggaggctgaggtgggaagatcacctgagcctagggagatccgggctgtaatgagtcatgaccgtaccactgcactccaacttgggtgacagagtgagattttgtctctaaaaacaaaaataaaaacaaaaaatcctgacttcaaaagtaactacagggttggttgataaattaataactgaacctaattaaatgaggattgcttccccatgggttttgcaatgccctttttaatacatagaacaagaattgtatgcaatactttgggagcattcgaagagcaacagtattaattgggctagttcctctcttgttccttatactgtaacttctgctattggctgctaagtttgattaacttttt

SEQ ID NO: 693964 - DNA, 1479 bp, Homo sapiens
cggctaattttttgtatttttcatagagacggggtttcactgtgttatccaggatggtctcgatctcctgacctcgtgatcckcccgcctcggcctcccgataagactgggtttctgtgctcctgtgacatgctcttgtaggaatcatcatagaacagtcaaaatgccagttgaagttttgcttttgtgagtaaactgtaagggccggaatagtttggatgtgttgtgcttacctttgcctccccagtgccctgtccgagagtcagtatcaaaaaaatgtttgtcaagttttgctgaaaaatcttagaatataaaagtgaacatttggtataattaatatgttgtgctgcaggcataggaatgggatactgaatagaaactgagtgggaaactgaaaaatgacccaatgtaatattttaacgttaaagatgatgttctcaaagcagtgggtgaaaggagaggttactgaataaatgacatttgaacccttctttatttttttttaaagtttcctactaaacactatatagcaaaataaaataaattctaggtggattgaaaacttaagggtaggaacgagccctctagaaggattgaactagcacacggcaatgtttatgcactctcagaagggtcaggcctttccaagtgtcgtccccaaagtggagtcacgaggaaaggacacaagagtggctcagcctcccagaccaaggaaaacagattggccaccgccattgtctttctgtgactgctctagcaaatcatcacaaacttactggcttacagcaaacatggtatcctagagttctagaatttgcaagtctgatgtgggtctcgctgggctaacaccaaggtgttggcggggctggttccttctggaagctccaggggagagcgttttccctgctctctccagctccaggaagccgcccacgttccttggcatacagccccctttctccacgtacagagtcagccatgttgcatttgtgtgaccttccgcggtctcttctgctctgaccacagccaggaaggttctctgcttttgagtactcatgattagattgtgcccatccggattgcccaggatggtctcccacctcattcgtattcttaattgcatctgcaaagtcccctttgccatgtaaggtgacgtagtcacaggttctgggcattaggatgtggacgtcttgggtgggggccgttattctgctgaccacaccaccagaacgactaagaaggaatcctctgtttacaaggtttttttttacaaagcagtgagaaagtggtgagcacctcattagaaaatggacaaagggtatgagcagacaatttacaaaaagaagaggtacaaatgaacaaaataaaaaaaaaaagttttaccttactaatgaatgaagaggcacatagccgacacggagaccactgttctcttgttgaatgagcagtggtgtgtggtgttgacactgctggtgggat

SEQ ID NO: 693965 - DNA, 1479 bp, Homo sapiens
cggctaattttttgtatttttcatagagacggggtttcactgtgttatccaggatggtctcgatctcctgacctcgtgatccgcccgcctcggcctcccgataagactgggtttctgtgctcctgtgacatgctcttgtaggaatcatcatagaacagtcaaaatgccagttgaagttttgcttttgtgagtaaactgtaagggccggaatagtttggatgtgttgtgcttacctttgcctccccagtgccctgtccgagagtcagtatcaaaaaaatgtttgtcaagttttgctgaaaaatcttagaatataaaagtgaacatttggtataattaatatgttgtgctgcaggcataggaatgggatactgaatagaaactgagtgggaaactgaaaaatgacccaatgtaatattttaacrttaaagatgatgttctcaaagcagtgggtgaaaggagaggttactgaataaatgacatttgaacccttctttatttttttttaaagtttcctactaaacactatatagcaaaataaaataaattctaggtggattgaaaacttaagggtaggaacgagccctctagaaggattgaactagcacacggcaatgtttatgcactctcagaagggtcaggcctttccaagtgtcgtccccaaagtggagtcacgaggaaaggacacaagagtggctcagcctcccagaccaaggaaaacagattggccaccgccattgtctttctgtgactgctctagcaaatcatcacaaacttactggcttacagcaaacatggtatcctagagttctagaatttgcaagtctgatgtgggtctcgctgggctaacaccaaggtgttggcggggctggttccttctggaagctccaggggagagcgttttccctgctctctccagctccaggaagccgcccacgttccttggcatacagccccctttctccacgtacagagtcagccatgttgcatttgtgtgaccttccgcggtctcttctgctctgaccacagccaggaaggttctctgcttttgagtactcatgattagattgtgcccatccggattgcccaggatggtctcccacctcattcgtattcttaattgcatctgcaaagtcccctttgccatgtaaggtgacgtagtcacaggttctgggcattaggatgtggacgtcttgggtgggggccgttattctgctgaccacaccaccagaacgactaagaaggaatcctctgtttacaaggtttttttttacaaagcagtgagaaagtggtgagcacctcattagaaaatggacaaagggtatgagcagacaatttacaaaaagaagaggtacaaatgaacaaaataaaaaaaaaaagttttaccttactaatgaatgaagaggcacatagccgacacggagaccactgttctcttgttgaatgagcagtggtgtgtggtgttgacactgctggtgggat

SEQ ID NO: 693966 - DNA, 650 bp, Homo sapiens
tacctggggaaacactggagattccgaaaagaagagtgacaaggaacattctggcttcttgtgtaaatcacgcaagaagagcaaggggagaaggagggagaccattaattggctactgaaaaaatcaagagatttataatggtaactaggaccaagtagtaatagyagaggtgtgagaattggtcagattctagatattttttgaaggcaaggtcaatagaataagtaaagaaatgtgaaggctaactcacttatgtttacaggagcaagatatctaagtaaattataagttactcagcattgtattacaaaaatgggcttccaggatggcccagtagttatattaaatcaacatgctcacagatagcaactataaatactgaacaacatgtagaacaactacctgaagacactggaaactcatcaaaagcaggcagatactggaggggagtcaacatttggaaaaattaaacagcatggagtcagttttctgtttttaagatgtttagtctgaggacaggctcaagtctgggtcatgggttagctaaatagaaagcctacagacttgctggattgaaaaatctgaggacagagtttagggcaaatgcaattcctgtaaagtaaagtggggttggtttgtcaaatcctga

SEQ ID NO: 693967 - DNA, 652 bp, Homo sapiens
tggcactggtctttaagttcctgctttgctggcagatatgaagacattttactggcatgagcagttacccatgatgatgcaatatttccaaagccatcctgctctgggcactaaaatccaaaaagaggctttaggaaatggggtcaattccaaacattctcatgttccaaacactggctcccactaaactagggattgctgaggttgcctgcaagaactgcttcttactaaccaaaagttaacaccagtgtgagaatgtttatcacacttttgcactttccgcctgagcccatgggttttcttatactgacaacatgcaagaaaaatatttaaaataatggtcttggtaaggaattacaaagttacattaggtaactttttgataagtacagaaatttcatacatttataataattgtattgttgcaataaaataatttgtacaaacaacatgtgaatacatcttttgggaacaaaaattaaagttgaaacatgtaatttgaacctataaaatatggtttccttcaacaagatgattattaaagcatataaagtagaaaataaattctttttacactcttagacaacrtttattaaatcaaagtatactttgttctagtctactgttccttaaagatattaaaaaggtctcc

SEQ ID NO: 693968 - DNA, 633 bp, Homo sapiens
gggagctaatatgtttcacagcgtgttttgtagattgcatctggccagatgtttctctgtgtgggttcccttaagcaatgtgggagggaaggaacaccctgatgtacatggaatttcagccaagaggcctggtgttgcatcgccttggtctagaccaacctctttttttgttgctcccagggagcaagattgtattccagamtgaaagctcagaggcagtggacccaaggccacttttctccccttccattaggcacatgtcaaagactacttctattgatgacacagccttcagcttctgggatatacttcaagaaaggagcccaaatacaggctgttataaaacattgtcatagtcatgccccaaggtggccacgcaaagggtacttgatagtggccaggaaaaccatatagcttgttttacagggacagtctactccggaatcccatccagtcctatgcagcatccaatgcaacattcccgccttccactcaatttcagtctgagagtatatgaaatcttaattatggctcagagtcaaagcttttccacccaggagttcagcagagatacatgttcttcatcagaggggtagattatggagggcaccagcatccccaatccaggagctg

SEQ ID NO: 693969 - DNA, 1080 bp, Homo sapiens
caatcagaacctttggagaattaattatgctaaatttaagactaatggagttattacatttgggtaatgcttttgagcttcctggtggccagagttaaaagaaaagtctaacaaaaagaggaaatagaatgatttttagggagaaataatatattatttttcattttatgtatcttgccacagatacagttgaaaagaaatatattacataaaaccttctaatgggggcactaataggtacaatggaaaacgccctctgcagcaacgttaaaactaagacaaaattggtttytaaatgtttgtttgataaatcaactttgatgtttaataaagaactagggtacatagaaattattcaaaaattagttgttgaatgaatgattaaaaagatttaaaagtgttcattttatttaatgacccgataacttctgatggaattaaccagacactatttcctggagtgatggtaatgaaaaccaaattggagtaaagttcttggaaatggatgtagtgatgcagacacctttttgagaatgctgctgttaaaaaaacacagaaaaatagaggaaagtaaaatcaaagatttttttttttaagaaaagagagatttgagcagatgatattctgggaggatccactgtagaaagagtgcaaagttagggatgaaacaaagttgaatggcatctagagcacaggtgggtggaggaactggcctcagacagaaatatggaacctcttagagttgcttttgatctgggtttggtagcattacctgcattgtatttccaccaatgtgaacaattttatgattttttaaatgagttatactgaactttgctttcagatgccgttagggaaactgtgggaaaagcagctaatattctctctccaccctccttcaaatggggccattttctattcccttttaatagttgaatgatttataataagggaaactgtgggaaaagcagctaatattctctctccaccctccttcaaatggggccattttctatcccttttaatagttgaatgatttataataagcatatattactttttaagtaaaaataagtcata

SEQ ID NO: 693970 - DNA, 2904 bp, Homo sapiens
atgcaggcagcctctaagagctcagaatggcccctggctgacagccagtgaggaaacaggggtttcagttcagcaaccacaaaggaatgaattttgccaacaactggtgaacttggaagaggatcccaagccccaaacaagaactccagcccctgccttgttgacaccttgatttttgctgggtgaaattctgagcagagaatttagttatgctgggcccagacttctgacttacataaactgtgagataatacacttgtatcatttttaagctggtaaatttgtagtyacacagaaatagaaaactaatacttgaagcaaaagaaaattcagctttccaaaacatttaggcatataggacttaagtaagtgtcctcctcatcattgaccgatgccccattctgagatttttaatccagacagttgcccaaagcatgaagaggggatgtatatcacgtgtgtctttagaaacagggcagggagtagttctactcttaactgcaactcacagttgaaagtccgatttcttgtaatattgatatctgtgttctttctggaatggaaggggtcgcagatatttagattatttttgtgaccaactaagagtgggtaaaaggtgaaaatgggctgaaagctggtattagagacatgggtactacttacctgtagaataagcaaataactgccttaataagtaaacaaataacttctaagtttaatccccaaaccacaattctataagttggcatacaccaaagtattgaaagttgatttggaagtattgacatagaccaaagcccaaagtgcttgtagaatttgaggggagaaccagagtggcatctcttggcagatagcatggaagggagacctacattccccattagaaaggaactgggctaatgttgacatctgacctgtagcaatgttctcctaatacacgtagcccaagaaaagaaagctctttgtcaactgagagttgctggccacttgcctaatcaccagccttgcttgctttagagaaatttattaccataaaaaagggacaaactgtaaaactcagacttcagtgttgaaaaattgttaggcctttggcccttttctcagcatttgcaaagaatttccttatatacttagtgatggggttagatatatgtaccttggagaggagcacttgtattggagcttttccttttaatttttcttccacttttaatttaggttcaggaggtatatgtgcaggtttgttacatgggtaaattgtgtgctgctgaggcttggtgtatgaatgatcctatcaccaaggtagtgagcataaccttccaactcattccccactttcattttcccccgtcaagcagtctccagtgttcccatctttgggtccctgtgtattcaatgtttagctcccacttataagtgagaaagtgccacatttggttttctttctttcacagcaccattcacaataacaaagacatggatggaattaacccagatgcccatcaatgatggactggataaagaaaatgtggtacatgtacaccatggagatttttcaaaagggaaactgtgttagaactgagccgcctcctagtctttccgaagaatgtatcaagagaacttttgttggtgtcagaaaaggcatgttggtgtcagaaaaggcttcccatgaaggcaatattggggctgggaaaaatgttcatatgtcagacaagagaaagctaggacaatctagtcagaggttgcagaaggtgtaaagatggtggcatgaatgaccgtggaggatccaaaaaactgaaagtcagtttagtatgcttggagtacattatttagtcaatggcagaaagagaagatatacaattggagatgaacttggaaaagtaggtctgactcagagtcaaggtaaccttgatgctttcctgagcaggctgggcattagcctgtaaggaccaaaggatttttgccaatggcatgatgtgattattctcattttggaatgctgtccatgagggtagcagtgtgaagaataaattgagatatctaggatgagatcccatttctggtttggccaatgtcttgaaatgagataaggaattaaattgggagtcgggggggatatatttagtttgcttttggacatgttaaattgtgtttgcctgcattacacaagtgaatatgttgtgtttctgttactcaggacatggtcaataattggaaattcagactggagagctgtcacacttagcaggggcagattcatgagcttgcctagggaagcaggtagcatgattgtttattttttctgtaaatcaggatactcctttagtttattttacatagatcaatcactcttgaatttttgttagggaaggcactcacttatcaatcatcaaaaatttaatgtgatccttccataattggcactgttcagacatcaatggtgttgtagaagacaagatggaaaaaatccctagcctcatagagcttcactccacaaaaagatgaggaagagtaacaaatcatagaataaacaaatgtcagatagtggtaagtgctatatagagaaataaaacaggttaagcagatcaaacattgctatggagataatcgttctattttagatagtttggccctgtaaattgtccctcaggacatgacatttgagcaaagatctgcatgaggcaaggtatgagccagtcaaggtctaaaggaagagaaagcggagtctgaaaggtatgagtcaggaatcagacattcaaggaaatgaaagaaggttaagggcagacagagatatgtgaatgaaaggcagagaagtaggagatgagaatcaggcagacgactgatcataacagaacttggggctagggttagtgagtttgggtgagacagaaaccactgaagggc

SEQ ID NO: 693971 - DNA, 645 bp, Homo sapiens
ttgcctgaaacaattattactcttgtggttgccaagtggtgattttctaatctcatctttccttctatatttattagttggaattctgacatgtcttttccatctgtgtcctcattgcttaggtcagtctggtccaaagaaggtattattttgtgtgagttgttctcgttagttgcttagtgttattataaaaatattacaagcaacatcattgttttaaagaagaaagcaggcaaacatggtaaattgtgctattcaataaactttatatgaattgtaatttaaataggtcttttaaaaattagcatagacaaaggcactttgtaaacatcatcagaatacataaactgtggtccaaaaccccttacataaatgagacaagtctccaggataaagccttccatcctctctcaagtgagtgggtgtcagctgtctcrgacatagaggactgagtcatacctgagactatcctttgcttctgggtcagcaagttacccagaagaaacttaacattgtgatgacacacttgagaaagattggacagttttcacagacagtttcgtcttactctctgttcttcaaattttagtttttatttctccataacacaaaaacaatggggcaaatttatttgctgctcctaga

SEQ ID NO: 693972 - DNA, 594 bp, Homo sapiens
aatttaacacagctttagaaataactggcattctttgaagtctgaccacacaactgcaatcttgaatatcactgtaaacacggcgtttacagatgactttaaaaagcaaggcaggaccattctccacttttcccctgtgcctacagcagttctgagtacataggaggcactctatatttgcacaatcaatgaataattaagcaaaaaaggtaatgcagtatgaaaagacagctgacagaaagtgagaaaatatttgtaaataatatatctgataagggtctaacacccaaaatatataaaagaactcctacgactcaacaacaataaaaaacaaacaacctgatttgaaaattggcaaaggacttgaatagatatttctccaaagaagagatacaaatggctgataaacacatgaaacaatgctcaacaccattagtcattagaaaatgcatgtaaaaaccacagtgtgataccattcacaaccatgaggatggctactatttaaaacataggaaayaagtgatggtgaggacgtggagaaattggaacccttatgcattgctggtgggaatgtaaaatactgcagttgctgtg

SEQ ID NO: 693973 - DNA, 639 bp, Homo sapiens
ttggtttgaaaggctgaatcctaaaatagtacaagttgtttgggtcagaagtagtggtttctaatcacaggagattttctgcagtcatatcatggaaaggacccttgattccacattggtctcttcagcactgttgctcagtaaagctattaagaaggtggtactgaggtacatgtgcatgagtatccatgcatatgctacaagtgagaattccatgttttggattttataattaagaagctattagttgtctggacgtggtggttcacgcctgtaatcctgatactttgggaggccaaggtgggcgcatcacttgaggccaggggttcaagaccaggttggccaacatggcaaaacccagtctctactaaaaaaacaaaaaamcccaaaattagccaggtgtggtggcacatgcctgtaattccagctactcaggaggcttaggcacatgaattgcttgaccttgggaggcagaggctgcagtgagctgacatcacatacacttcaccccagcctgggtgacagagtgagaccctgtctcaaaaaaagaaccaaaaactgttagttgtatatcattgtatatcatactcctattccttaatctggtaatgtattatcaatctgaaaattatcaagcat

SEQ ID NO: 693974 - DNA, 615 bp, Homo sapiens
aagactattggtggttcttgagaatggcttgggtgtgtgggtatgactctgtgtgtctgtatgaatgtgatatacgtgtttccgtggaacgttgccaagtccagatttgccctgtggtggcgtgaaccagtgtaatgcctggggagaatagagcgaagtacatagaagtgaaagccattcaggaggtatcttttgccttttcccttcatgaaaatgaaggtgaatatgttttaaaaattttatgcagctttgcactccttggaagctctaggtctaaagtcagctagccagggcscacacccagccctttgctgaggagcctctcagcagaatgttttggctccggcagactaacggcagttcctttaggattgctgctctttcgagtgacttaggctgcaggacttgctgcccagcattgcccagtcaggacactaatcagtgtggctcggttgaataggagagctttaactgcattctcttgtgagaatgcagttgaagaatgccaagaggagtgtacaattcaaatgcgttagtgcttgtaacacgtggttccagttctctccctcttggcttgtatggtataaattgtgtacaggtaattaagttatttta

SEQ ID NO: 693975 - DNA, 615 bp, Homo sapiens
aagactattggtggttcttgagaatggcttgggtgtgtgggtatgactctgtgtgtctgtatgaatgtgatatacgtgtttccgtggaacgttgccaagtccagatttgccctgtggtggcgtgaaccagtgtaatgcctggggagaatagagcgaagtacatagaagtgaaagccattcaggaggtatcttttgccttttcccttcatgaaaatgaaggtgaatatgttttaaaaattttatgcagctttgcactccttggaagctctaggtctaaagtcagctagccagggcgcacacccagccctttgctgaggagcctctcagcagaatgttttggctccggcagactaacggcagttcctttaggattgctgctctttcsagtgacttaggctgcaggacttgctgcccagcattgcccagtcaggacactaatcagtgtggctcggttgaataggagagctttaactgcattctcttgtgagaatgcagttgaagaatgccaagaggagtgtacaattcaaatgcgttagtgcttgtaacacgtggttccagttctctccctcttggcttgtatggtataaattgtgtacaggtaattaagttatttta

SEQ ID NO: 693976 - DNA, 1444 bp, Homo sapiens
catgtacatatatatgaaaccattgatttttttaggttctaatggaaggcttttatttgattctatttatgaatagccattttgttcgctttgcrttttcagcaacttctcagtggttctatgtatctaaaatgcctaagctacctttgtcagcctgcaaaaaattgatagacgacaccagccacttaaaatttgattgattttgtttacttctggtgatctagagggtatgagctttaaggttcccagcaaaatgtaaaataaaaataaaagacttttgtttacaagttctaagccaaaatagtacattattttgttatttgttaggtgagaataaaaatgtttaaatcatgtttatttccaagataattcaatttaatcaataatttgagttgtttttgaatcttttcctttaagtaatgaagaaaatctgtgatataagtacacagtgttagtgttctgcaaagattggccttgtctgtaaggaaattatgttcattgggatttctctcaaactgattttgttgtctttgctaatattgaaatgtagtgatgttcacttggattaagtagtaataaacatatgtgagacttttagtgatttttttatcccaagacatttatcactgatgtggcttcatgtatgtacttgaaaacaaaatatatgcaagtgttgcactggtttgaagattttaatggtggaaattgcctaatcagttgtcagtactgtatctggaaactaatcttggtaatgtgtgatgatgctctttcaaaatagctgaaaagaaattaccgtgtgcttgttcttacttcatccccattttgttgtatggtatttaaatgaaagattatttgtcttcctattgaatttccaaagctgatatttgcatttgccattttttaatgatggatagaaacattagttgtcttactttgctaagtttggcgtaggacctatcatatattttatgttttttgtcacagtcctgttactagaatgctagcaattagacatatgcaatgagtaacctaattgctttcatacagtgatttgaagtgctgcaggcagtaactcctgcactccaaattacaatgttttaacttgtaacatgttagagggaattataggactttctataatataaatatcctattaactaattcttgtgctgttaagttacaggctttgacttccgggtcagaaaaagtcacctacttcagataaatcttgagcattgacacaagtcaaagtcttgtcttcaaacctgtgagaaagtgacaataaaaatgaactgctcttgtgagacacagggccagaaattacaaccattcaatccatctaggctcagggactatcacagaagaggtgggcatgtaaaattgtaagggtcaattttgaggggtaaaattagatcagagcttttctataaagtaaatattaata

SEQ ID NO: 693977 - DNA, 1444 bp, Homo sapiens
catgtacatatatatgaaaccattgatttttttaggttctaatggaaggcttttatttgattctatttatgaatagccattttgttcgctttgcattttcagcaacttctcagtggttctatgtatctaaaatgcctaagctacctttgtcagcctgcaaaaaattgatagacgacaccagccacttaaaatttgattgattttgtttacttctggtgatctagagggtatgagctttaaggttcccagcaaaatgtaaaataaaaataaaagacttttgtttacaagttctaagccaaaatagtacattattttgttatttgttaggtgagaataaaaatgtttaaatcatgtttatttccaagataattcaatttaatcaataatttgagttgtttttgaatcttttcctttaagtaatgaagaaaatctgtgatataagtacacagtgttagtgttctgcaaagattggccttgtctgtaaggaaattatgttcattgggatttctctcaaactgattttgttgtctttgctaatattgaaatgtagtgatgttcacttggattaagtagtaataaacatatgtgagacttttagtgatttttttatcccaagacatttatcactgatgtggcttcatgtatgtacttgaaaacaaaatatatgcaagtgttgcactggtttgaagattttaatggtggaaattgcctaatcagttgtcagtactgtatctggaaactaatcttggtaatgtgtgatgatgctctttcaaaatagctgaaaagaaattaccgtgtgcttgttcttacttcatccccattttgttgtatggtatttaaatgaaagattatttgtcttcctattgaatttccaaagctgatatttgcatttgccattttttaatgatggatagaaacattagttgtcttactttgctaagtttggcgtaggacctatcatatwttttatgttttttgtcacagtcctgttactagaatgctagcaattagacatatgcaatgagtaacctaattgctttcatacagtgatttgaagtgctgcaggcagtaactcctgcactccaaattacaatgttttaacttgtaacatgttagagggaattataggactttctataatataaatatcctattaactaattcttgtgctgttaagttacaggctttgacttccgggtcagaaaaagtcacctacttcagataaatcttgagcattgacacaagtcaaagtcttgtcttcaaacctgtgagaaagtgacaataaaaatgaactgctcttgtgagacacagggccagaaattacaaccattcaatccatctaggctcagggactatcacagaagaggtgggcatgtaaaattgtaagggtcaattttgaggggtaaaattagatcagagcttttctataaagtaaatattaata

SEQ ID NO: 693978 - DNA, 1444 bp, Homo sapiens
catgtacatatatatgaaaccattgatttttttaggttctaatggaaggcttttatttgattctatttatgaatagccattttgttcgctttgcattttcagcaacttctcagtggttctatgtatctaaaatgcctaagctacctttgtcagcctgcaaaaaattgatagacgacaccagccacttaaaatttgattgattttgtttacttctggtgatctagagggtatgagctttaaggttcccagcaaaatgtaaaataaaaataaaagacttttgtttacaagttctaagccaaaatagtacattattttgttatttgttaggtgagaataaaaatgtttaaatcatgtttatttccaagataattcaatttaatcaataatttgagttgtttttgaatcttttcctttaagtaatgaagaaaatctgtgatataagtacacagtgttagtgttctgcaaagattggccttgtctgtaaggaaattatgttcattgggatttctctcaaactgattttgttgtctttgctaatattgaaatgtagtgatgttcacttggattaagtagtaataaacatatgtgagacttttagtgatttttttatcccaagacatttatcactgatgtggcttcatgtatgtacttgaaaacaaaatatatgcaagtgttgcactggtttgaagattttaatggtggaaattgcctaatcagttgtcagtactgtatctggaaactaatcttggtaatgtgtgatgatgctctttcaaaatagctgaaaagaaattaccgtgtgcttgttcttacttcatccccattttgttgtatggtatttaaatgaaagattatttgtcttcctattgaatttccaaagctgatatttgcatttgccattttttaatgatggatagaaacattagttgtcttactttgctaagtttggcgtaggacctatcatatattttatgttttttgtcacagtcctgttactagaatgctagcaattaracatatgcaatgagtaacctaattgctttcatacagtgatttgaagtgctgcaggcagtaactcctgcactccaaattacaatgttttaacttgtaacatgttagagggaattataggactttctataatataaatatcctattaactaattcttgtgctgttaagttacaggctttgacttccgggtcagaaaaagtcacctacttcagataaatcttgagcattgacacaagtcaaagtcttgtcttcaaacctgtgagaaagtgacaataaaaatgaactgctcttgtgagacacagggccagaaattacaaccattcaatccatctaggctcagggactatcacagaagaggtgggcatgtaaaattgtaagggtcaattttgaggggtaaaattagatcagagcttttctataaagtaaatattaata

SEQ ID NO: 693979 - DNA, 1532 bp, Homo sapiens
acatgtcttacatggcagcaagcaagagagcgtgtgcagggaaactgcccttttataaaatcatcacatctcatgagacttattcactatcatgacaacagcacgggaaaaacctgcccccatgaatcaattaactcccactgggtcccttccacaatatgcgggaattatgggaattacaattcaagatgagatttgggtgaggacacaacaaaaccatatcaacacttttacattacttttaaaaaatctgtttatttctgatattatagaactacagtatagagcagggatatggcataaggtataatatatcttgtcttgaatgttactgtattctctcataaatttgaatataatgttaatgtacctatatttctatgtattattaataataaaagctatcattattaacattccactactaagatgactaaattcttcaattttctactatatttcttaaaataataatataaataatagttgttcaattgggcatcatttctttgttctctgttaataaggggttttctattgattcatgatattcttcaatagggtaaatatcttgtgtcctattcttagtttgtcacatgattgttttttaaaaattaaaaatgcatactgatttcaaattattttttcatatcttaaaatatatttgtagttttcttttttaatctaataatatgtatttttattatttcctactttctcataacatttaagacttaatttttgtagaaaaattttagctgcattgtgtaatatttttatatgttgtattctcagttttgttcaattctagtttattacatactttgatttcctgtttatttgaataaatatttggaaatgtaaaacatttgatctttattccatttcttccttccctcctttcttcttttcttctcctttcaattttctaataccactttccaaaactgaacaatttgtgctaaatatttttgtgtttggctttataatgttgttggatttttaaaatccaaaacattgttatactggcaaacactatggtttgcttagttaataggtgttctccaattttgcataccaacaaaactccttgttttgactccaaagttcccagtygcagaggattcattatcattggttttggtcatagaaaccaatcttattctccttgataaatccttgctttcatgactgtcctggctgctagagctgggcatgtgacctagttctgtccaatgagttgtaactggagatatcctgaggaagcaattggaaaaagaatatcctcttagataataaggggataacagatggagatagctcctgcttcttctgcctcctgcccttgaataaaacctaactctgcagtggctgaagctgtgacaatcctttggtctcccagggaaaaacaagaaaattataatagaaacagcttaacgtctatatatgtaccaacttttcttgatgttagttgcagtcaggtcattaagttctgacgaaagatatgcaacttttgatatttttcctctttc

SEQ ID NO: 693980 - DNA, 1532 bp, Homo sapiens
acatgtcttacatggcagcaagcaagagagcgtgtgcagggaaactgcccttttataaaatcatcacatctcatgagacttattcactatcatgacaacagcacgggaaaaacctgcccccatgaatcaattaactcccactgggtcccttccacaatatgcgggaattatgggaattacaattcaagatgagatttgggtgaggacacaacaaaaccatatcaacacttttacattacttttaaaaaatctgtttatttctgatattatagaactacagtatagagcagggatatggcataaggtataatatatcttgtcttgaatgttactgtattctctcataaatttgaatataatgttaatgtacctatatttctatgtattattaataataaaagctatcattattaacattccactactaagatgactaaattcttcaattttctactatatttcttaaaataataatataaataatagttgttcaattgggcatcatttctttgttctctgttaataaggggttttctattgattcatgatattcttcaatagggtaaatatcttgtgtcctattcttagtttgtcacatgattgttttttaaaaattaaaaatgcatactgatttcaaattattttttcatatcttaaaatatatttgtagttttcttttttaatctaataatatgtatttttattatttcctactttctcataacatttaagacttaatttttgtagaaaaattttagctgcattgtgtaatatttttatatgttgtattctcagttttgttcaattctagtttattacatactttgatttcctgtttatttgaataaatatttggaaatgtaaaacatttgatctttattccatttcttccttccctcctttcttcttttcttctcctttcaattttctaataccactttccaaaactgaacaatttgtgctaaatatttttgtgtttggctttataatgttgttggatttttaaaatccaaaacattgttatactggcaaacactatggtttgcttagttaataggtgttctccaattttgcataccaacaaaactccttgttttgactccaaagttcccagttgcagaggattcattatcattggttttggtcatagaaaccaatcttattctccttgataaatccttgctttcatgactgtcctggctgctagagctgggcatgtgacctagttctgtccaatgagttgtaactggagatatcctgaggaagcaattggaaaaagaatatcctcttagataataaggggataacagatggagatagctcctgcttcttctgcctcctgcccttgaataaaacctaactctgcagtggctgaagctgtgacaatcctttggtctcccagggaaaaacaagaaaattataatagaaacagcttaacgtctatatatgtaccaacttttcttgatgytagttgcagtcaggtcattaagttctgacgaaagatatgcaacttttgatatttttcctctttc

SEQ ID NO: 693981 - DNA, 604 bp, Homo sapiens
gaacatatttacaaaaaawtttgaaatatctacatctatgttcataactttatatcaatatttgtatctatctctttaaatgtctttaagatactatggactgtttaaagcaatataacaatgaactgtgatatcctgtaacatttgtgtaattaaatatatgatgagaacacaaaaatcaggaaggtaataattcaaattatatttttgtaaaattcttattgtttataaagtagtacattattttagaagctagattgttatagattaaagatacataagagaaacgacaaaataaataacacaaagaaacacgactaaaaatgaaaagaagagataaaatggaatactaaaaatatcaattcactctagagatgaaaaacaaataccattttagtagacttaaactcaaacatagtaattattacattaaaagtaaatgtcatttggttcttctagaaagtttactcacacagagtagaagttcaagatattttctcacggtaacacctgtgaataacaaacacgagggtcattaggaatagcaggaaagcatttctattgccaatgtattaatactggtaaaactagaaagagaaggaaa

SEQ ID NO: 693982 - DNA, 604 bp, Homo sapiens
gaacatatttacaaaaaattttgaaatatctacatctatgttcataactttatatcaatatttgtatctatctctttaaatgtctttaagatactatggactgtttaaagcaatataacaatgaactgtgatatcctgtaacatttgtgtaattaaatatatgatgagaacacaaaaatcaggaaggtaataattcaaattatatttttgtaaaattcttattgtttataaagtagtacattattttagaagctagattgttatarattaaagatacataagagaaacgacaaaataaataacacaaagaaacacgactaaaaatgaaaagaagagataaaatggaatactaaaaatatcaattcactctagagatgaaaaacaaataccattttagtagacttaaactcaaacatagtaattattacattaaaagtaaatgtcatttggttcttctagaaagtttactcacacagagtagaagttcaagatattttctcacggtaacacctgtgaataacaaacacgagggtcattaggaatagcaggaaagcatttctattgccaatgtattaatactggtaaaactagaaagagaaggaaa

SEQ ID NO: 693983 - DNA, 624 bp, Homo sapiens
acatctttctagttggggtaaactttaaagaaattgctgaggctttattacacacccattccaggactacttttctttctgcaccactgttcctccacctagaacccacacaatagcaatgccctttcttccttctttatctatattatgcctacccactttcaagtcttaactgttccgagctttttcaagttttctccaaccacaataggaaatgtaattcctctctcttcttctagatacacacatttgtgtatttctcatagccttattttatttgtttttccatttgtttctatctcctggattcatgcataacctctttgattttacagcacttactgagaggtgacagtgtgctggcagccctcacaaccctcgcttactctctgtacccattctggccacgcttgaggagcccttcagtccgccgctgcaccgtgggagcccttctccgggctggctgaggctggagccggctccctcggcttgtggggaggtgtggagggagcagcatgagtgggaaccagggctgcgctgggcrcttgtgggccagctggagttccgggtgggcgtgggcttggcggccctgcactcggagcggcctgctggccctgccggccc

SEQ ID NO: 693984 - DNA, 605 bp, Homo sapiens
ccccctgctacctaaccccagattctgcccaggaaaatttactcttgggcaaaattattacaaagttcagctgaaagtttccttctccctttcatccttccccaagtccaccggcagccctcccctagtacccctgtgagataaagtaaaaaatggcttcccagkggggactgggagtgcctatcgggctcttcctgctgttcttctactttcatactttggttagctctctaaattcatttcagctctgggtaaggttaaatccttctcccatgatttggattttcaggttccccagtgaggatgtgtgttcagaggggaagtttccccctctcacactttgggcattcagttttttggctgtctaacaaagtttgcagcagcaaagctgtttatttcaaactgaaaattatttcagttttcctggtatgttgctatggtagttctaggagtaaatgttcacaatgtgagcctccacacactgttctggggctgaaagaacaaaagaaaaactttcattgccattgtaaaggaaggaccacaggtggaggtcagcaacagagggtttctgctctgatatttattattttttttcttctacgaat

SEQ ID NO: 693985 - DNA, 619 bp, Homo sapiens
ataggggcatgcagattgaggggagaacctgagagtacaggcttcaaaaagtggaaaatatactgtgactttaaaaaatattgttttggtaaaaccctgagtcagctttccattattgggaaaccaagaggtatcagttatctactgctgcctaacaaaccacctaaaaacttagtagttcaaaataatggcaatcatttattttgctagaaaatatgcaatttggatgggatttggcaggacagtttgtctctgctccttctgttgttagccgaggggctcaacttggggctagaggaaccattttcaagatgctcattcacatgggtggcaagttggtactggctgtctgctgggaattcatctggggttagaagccttggttcttccctgtattggcctttccatgaactgattgggctttttcattgcrtggttgctgaattaagtgagcatcctaagagaatatagcaaaagtgcatgacatttcatgacctagccttggatatcataaaatgtcagataatcacacagcaatcacagtggccattgaggctcaatgggaaagagagtggcaaggtgctacaaaaacatgtggatgggcttttgtagccatttt

SEQ ID NO: 693986 - DNA, 671 bp, Homo sapiens
atattttattggcagcaaacactctttgtttrttgtgagagaatattgcagccccactgagctgtctctatatttaatagaccataaaattgaaattcccaccctgacctctaagagatgagatgagtcagaaggtgactcactctctaatcagttggaagtaaatgacctttattgtcatttactttggattgggtaaaagtaaagagcttttattgctttagcactgaaacgattacagcaaggactgacagaggaaggttacctgttataatgggctgagcaggccctgacattttctccaatcccttctgattccaacaagttggctattgtaagcctagtttttaaactctataaaaaacatgataaaagggaccttgacacagccagttaattcatttttctatcttaataatacctacaaaattccacattgttatgttagctgaggcagttgcagtccaacacaaagacagtcataatgatcattttttctaattagtacccaattgaattcagaaggccccaaagataaaagcaacatgagttggaacaaaacatgaaatattttttctttttttcttttttttttgagatggagtcttgctctgtcacccaagccggagtgcagtggcgcaatctcgactcactacagcctctgcctccca

SEQ ID NO: 693987 - DNA, 671 bp, Homo sapiens
atattttattggcagcaaacactctttgtttattgtgagagaatattgcagccccactgagctgtctctatatttaatagaccataaaattgaaattcccaccctgacctctaagagatgagatgagtcagaaggtgactcactctctaatcagttggaagtaaatgacctttattgtcatttactttggattgggtaaaagtaaagagcttttattgctttagcactgaaacgattacagcaaggactgacagaggaaggttacctgttataatgggctgagcaggccctgacattttctccaatcccttctgattcyaacaagttggctattgtaagcctagtttttaaactctataaaaaacatgataaaagggaccttgacacagccagttaattcatttttctatcttaataatacctacaaaattccacattgttatgttagctgaggcagttgcagtccaacacaaagacagtcataatgatcattttttctaattagtacccaattgaattcagaaggccccaaagataaaagcaacatgagttggaacaaaacatgaaatattttttctttttttcttttttttttgagatggagtcttgctctgtcacccaagccggagtgcagtggcgcaatctcgactcactacagcctctgcctccca

SEQ ID NO: 693988 - DNA, 655 bp, Homo sapiens
ttcatagccagaataaacaaacaaataaaccaaaatgggggaaatggatgaatactaacacctgcctyactccttttagccaaccagggacttgcttttaggaggtgataagtcattatctgcaaaaatgatcaccttatgaaaatatgtaaaataagaaatcccaagagaagttgaaagttcatgtaaggaaaagaagagaaagaacaagtgaaagagagtgtcacatttctctttggaaagtgctggctttttgtgaattctaatggatggtatgtcattgaagcaccatttaagtgacctgaatgattcttcttttcaggatgataacggatgtgacataggtgctaggggattaagaggaagcaagagtgtgagttaagcagatactgaaaagatatcctgtaaaagcttttagttctttttattattcacatccctgaaaattgatatatctgcaaactgactacaaaaatcaactttccacgatgggaggagttatcagttaattctgtctaccccccaacccccctccaaaaaagctttagttgctgatgctgatgtttctgcactaaaggaagcattaatattcccaccttaagctttatatattgatcactattcaatgactagagtaattgcctacacttgaaaa

SEQ ID NO: 693989 - DNA, 1109 bp, Homo sapiens
tttatccctgaatgtgggggaaaatatcacaaactggcagatgagaaggcagacagtcaggctgcatagagagtgggtgagcacttctattgtgtgtgttatggatttttctcttcttgattttcactggatagctcctttcaggccgtttataaaagaatcaggaaaagagcagaaaacttgggcagtgtgcttcgctctggttgcaataaacttagtctttttgtgggggggttcccatgcccaggaatccctgagttctctttgggaaggtttttattattgtaaaaattaaagtgaaaagggaaagtgtgagaacagaaaaatgtcttttcctgatctattctttgtgtgcatgactctattttttggtctgyggctatagttaccttttatgccgttaaaaaatacatatccatttaagtcaggggtacttgaatatgcagatgagccgatatgtaatattcctggttcatttgagtaataaattctgcagcccgctctttatgatggtagatcatattcctcaccaccaataaatattgtaaagtactttcgctgtagccatgctaacccggggcatctgtcattccggttgctgctattaggaattattggactgaaccactggcagagaaagcagaggggggtgaatgtggtggttgtgatgctctctgcccttttgtgtgttttgctttttaaaaaaactcaatcatgctgcacattgagtatgaatcagtgtggacaaacataggcaccttctgttggccgaggctcagagcaggacacaggactccaccggactgggacacctctcacccccaattcagcagatccatctttctgatgctatactgtaaatttatttcacctcagagagtaaacagatatattggagccccaagggttcatgggtagcgtatttacaaaggagcctcctccgccagcccgtgccaccgctgctaatgagagcagtcattaagtaaatgagacgtcgcctttagctggcttaggagttcgcacactaaggggagaagatatttaattgaaacccgcacgcaggcttccccacatgtgaccgctgtacgggaggcagctgccttccctct

SEQ ID NO: 693990 - DNA, 1520 bp, Homo sapiens
tggcataaactaaaagatttatgtctatactaagtttcattcctgaaagagctgcttctgtctttttatcctcaaaatacaatactgtattaggtattgaagtgtttgtgtatgtgtrtgtgtgtatttataccatatagacaaggtctatgattctgtaatcatagaacttacagtgatgtgatccttttcaagcttcatattataacacacacacagacacaaagattcacaaatgtactgaatcgatttaattccatgagttgtaacgttcttgataccatatttgttctaaagcagcatttcttagtaattaaaatgaatgagaagatctctacctaaagagatagtatgaactttaaaagcagaagcagagttcagtatttatatttggtagcaataaactacctgttagaaatatttatcaagtgaagatataattgcctgctttgtctgtgaacctcataagtacaaaaattgtgttctttgaatttacactttttaagggatgtatgttaaacattttagcagtgtatttttttaaattaaaatatatgaatttaatttacacaaataatttattttacataaaaacattctagctagcatctagcagttttaataccttatacattttaatcatatctgctagaacaagtaatctctagagtggtcagctatggaagaggataaagttagtagacctactaactttatagctcatatatattttggttatatactcgaattcctattactcgatgcttcaagcattatcttttaacctctgtatacaaaattagaatgtcagcacgtttacacttttctacttgttctccctctactttctgtttttataacttactgatactaaaatgttcaaagcttatagtatttttatgttctgtaactataattctcacacttttttctttagttatatacataaatcattttagggctgacctccaaatttttacaatagactctccattctataagttgactggaataatttctaacaacatgaatcatgcatgacttgtacataccctttgggaaataccaggattctcagaggttttacttgtgtcattaaatggagactgtaatggctgctaccatttctcttctctgtctctccggtgtgaaacagggctcaggggtacacataaggctgcaatctggtcctttttcttttctctatctattcacatttctctttgttttgacctcctgaatgtgaaaatgtttaatagcatgtatatttacatatttaagtattcaagctctactgcttagttcttaatagtatcttacctgtgcattttcaccagccaaagattttgagaggacaaaagaggggacaagaacttgctatccgttttaaagaattttctatagagaccttttaaaagtaagatgattaggatttcattaaaaagaattttaaatatgttaaaagcatgagtttttgcagctgctaggcagaaagacttgcttgctaaccacactttgtt

SEQ ID NO: 693991 - DNA, 1520 bp, Homo sapiens
tggcataaactaaaagatttatgtctatactaagtttcattcctgaaagagctgcttctgtctttttatcctcaaaatacaatactgtattaggtattgaagtgtttgtgtatgtgtatgtgtgtatttataccatatagacaaggtctatgattctgtaatcatagaacttacagtgatgtgatccttttcaagcttcatattataacacacacacagacacaaagattcacaaatgtactgaatcgatttaattccatgagttgtaacgttcttgataccatatttgttctaaagcagcatttcttagtaattaaaatgaatgagaagatctctacctaaagagatagtatgaactttaaaagcagaagcaragttcagtatttatatttggtagcaataaactacctgttagaaatatttatcaagtgaagatataattgcctgctttgtctgtgaacctcataagtacaaaaattgtgttctttgaatttacactttttaagggatgtatgttaaacattttagcagtgtatttttttaaattaaaatatatgaatttaatttacacaaataatttattttacataaaaacattctagctagcatctagcagttttaataccttatacattttaatcatatctgctagaacaagtaatctctagagtggtcagctatggaagaggataaagttagtagacctactaactttatagctcatatatattttggttatatactcgaattcctattactcgatgcttcaagcattatcttttaacctctgtatacaaaattagaatgtcagcacgtttacacttttctacttgttctccctctactttctgtttttataacttactgatactaaaatgttcaaagcttatagtatttttatgttctgtaactataattctcacacttttttctttagttatatacataaatcattttagggctgacctccaaatttttacaatagactctccattctataagttgactggaataatttctaacaacatgaatcatgcatgacttgtacataccctttgggaaataccaggattctcagaggttttacttgtgtcattaaatggagactgtaatggctgctaccatttctcttctctgtctctccggtgtgaaacagggctcaggggtacacataaggctgcaatctggtcctttttcttttctctatctattcacatttctctttgttttgacctcctgaatgtgaaaatgtttaatagcatgtatatttacatatttaagtattcaagctctactgcttagttcttaatagtatcttacctgtgcattttcaccagccaaagattttgagaggacaaaagaggggacaagaacttgctatccgttttaaagaattttctatagagaccttttaaaagtaagatgattaggatttcattaaaaagaattttaaatatgttaaaagcatgagtttttgcagctgctaggcagaaagacttgcttgctaaccacactttgtt

SEQ ID NO: 693992 - DNA, 1520 bp, Homo sapiens
tggcataaactaaaagatttatgtctatactaagtttcattcctgaaagagctgcttctgtctttttatcctcaaaatacaatactgtattaggtattgaagtgtttgtgtatgtgtatgtgtgtatttataccatatagacaaggtctatgattctgtaatcatagaacttacagtgatgtgatccttttcaagcttcatattataacacacacacagacacaaagattcacaaatgtactgaatcgatttaattccatgagttgtaacgttcttgataccatatttgttctaaagcagcatttcttagtaattaaaatgaatgagaagatctctacctaaagagatagtatgaactttaaaagcagaagcagagttcagtatttatatttggtagcaataaactacctgttagaaatatttatcaagtgaagatataattgcctgctttgtctgtgaacctcataagtacaaaaattgtgttctttgaatttacactttttaagggatgtatgttaaacattttagcagtgtatttttttaaattaaaatatatgaatttaatttacacaaataatttattttacataaaaacattctagctagcatctagcagttttaataccttatacattttaatcatatctgctagaacaagtaatctctagagtggtcagctatggaagaggataaagttagtagacctactaactttatagctcatatatattttggttatatactcgaattcctattactcgatgcttcaagcattatcttttaacctctgtatacaaaattagaatgtcagcacgtttacacttttctacttgttctccctctactttctgtttttataacttactgatactaaaatgttcaaagcttatagtatttttatgttctgtaactataattctcacacttttttctttagttatatacataaatcattttagggctgacctccaaatttttacaatagactctccattctataagttgactggaataatttctaacaacatgaatcatgcatgacttgtacataccctttgggaaataccaggattctcagaggttttacttgtgtcattaaatggagactgtaatggctgctaccatttctcttctctgtctctccggtgtgaaacagggctcaggggtacacataaggctgcaatctggtcctttttcttttctctatctattcacatttctctttgttttgacctcctgaatgtgaaaatgtttaatagcatgtatatttacatatttaagtattmaagctctactgcttagttcttaatagtatcttacctgtgcattttcaccagccaaagattttgagaggacaaaagaggggacaagaacttgctatccgttttaaagaattttctatagagaccttttaaaagtaagatgattaggatttcattaaaaagaattttaaatatgttaaaagcatgagtttttgcagctgctaggcagaaagacttgcttgctaaccacactttgtt

SEQ ID NO: 693993 - DNA, 1520 bp, Homo sapiens
tggcataaactaaaagatttatgtctatactaagtttcattcctgaaagagctgcttctgtctttttatcctcaaaatacaatactgtattaggtattgaagtgtttgtgtatgtgtatgtgtgtatttataccatatagacaaggtctatgattctgtaatcatagaacttacagtgatgtgatccttttcaagcttcatattataacacacacacagacacaaagattcacaaatgtactgaatcgatttaattccatgagttgtaacgttcttgataccatatttgttctaaagcagcatttcttagtaattaaaatgaatgagaagatctctacctaaagagatagtatgaactttaaaagcagaagcagagttcagtatttatatttggtagcaataaactacctgttagaaatatttatcaagtgaagatataattgcctgctttgtctgtgaacctcataagtacaaaaattgtgttctttgaatttacactttttaagggatgtatgttaaacattttagcagtgtatttttttaaattaaaatatatgaatttaatttacacaaataatttattttacataaaaacattctagctagcatctagcagttttaataccttatacattttaatcatatctgctagaacaagtaatctctagagtggtcagctatggaagaggataaagttagtagacctactaactttatagctcatatatattttggttatatactcgaattcctattactcgatgcttcaagcattatcttttaacctctgtatacaaaattagaatgtcagcacgtttacacttttctacttgttctccctctactttctgtttttataacttactgatactaaaatgttcaaagcttatagtatttttatgttctgtaactataattctcacacttttttctttagttatatacataaatcattttagggctgacctccaaatttttacaatagactctccattctataagttgactggaataatttctaacaacatgaatcatgcatgacttgtacataccctttgggaaataccaggattctcagaggttttacttgtgtcattaaatggagactgtaatggctgctaccatttctcttctctgtctctccggtgtgaaacagggctcaggggtacacataaggctgcaatctggtcctttttcttttctctatctattcacatttctctttgttttgacctcctgaatgtgaaaatgtttaatagcatgtatatttacatatttaagtattcaagctctactgcttagttcttaatagtatcttacctgtgcattttcaccagccaaagattttgagaggacaaaagaggggacaagaacttgctatccgttttaaagaattttctatagagaccttttaaaagtaagatgattaggatttcattaaraagaattttaaatatgttaaaagcatgagtttttgcagctgctaggcagaaagacttgcttgctaaccacactttgtt

SEQ ID NO: 693994 - DNA, 1709 bp, Homo sapiens
gcctgggtttagaggtttgtggggcagtaagatttgaattaaagaagagattatgatgctktggcatggcttaggtaggacacattcaaactcctagcctaccccgtacacttgagtagctgtcagggtgaaactgcaaacagataccttcagaaaagaacatacaaatccagatttatccattttgcatactattttactcatttgtctgttatttacttattgtggtcatgttactatttttcccgtatctgtatattttaataattatcttatattgaatgaccctgcttgcccagtttttctcttttctctactgtaagcaacataaaagaaaatatttcattttatttgtattttctgctcttaactataatattttgcgtatttagatgtgagaaaatgtaatactgtcaggtcatttcttaaagtatggccttgtgtgatcctaaaacattactgagatagtttaagtttcaggtaaatggtggatgattgttacaatcagtattactcaatatattaagtccacattaggtctcaaaatcttaggtctgcatttgattttagagacatacattatggtgtgagtcatttttctataaatcaggtaaaaaatagatacattttgatgttatacgaaactgtatttttctaccatagcagttactaaatatacaaatgatatccttcaagaaagaaatgataaaactgttttaaattcttttatgagtgtattttaattataatctacatataatgttaatagttttcttatttgattagaggaaaattttttgggctaaactttattttattttgaatagtttagtgccattgagcttctttctgtatgtattacaaatttaatacatttaatccattttctccctcattgctttctttcccaaaaggacacaaggctgttaacataattatttggtctggagatgtcagaggcttcgctcaaattattatatatcaactttatttgctctctcttattctgtatagttttctttttgtaaattacgtagtatagctagattggctccctgtaaatatatctcatagcacaagaaatttaaaatatttccagcaatgcctgttttaaaagcgatttcagctgcacctgtgcttaaatctggccacctctagttcagagcaatattcaaacaccaaaagccaatgatgaactggacattactaccccatgtctacaaaggaagaacattaacttaacatagtgtggtgtctagaagaaaatgtacagcctcataaagtttgaggagacgtttttatgcactttaagcttcagtgtaatacctttataagacaggttctgcagagaggggcaatattatcttctcaggctagctagtattacaacacactttcgctgtaatagtcaaacaaacctttattgaaagccaaccatataccaagcagtgttctgggaattctggaaaaatataaaaatatgaaataatttgagatcatgtaattatgtaatgagtgagaatacatttaagtgctacagtacttccaagaagggagagtttagtacttgatcaagaaatttagactgaatgtgaaggtgacaggaaatcattgggcagagaggagaaaagaagatatgctggatagagaggactgcagtggaaggacatggcaaataggaatgcagagggcatgactagacatgcatt

SEQ ID NO: 693995 - DNA, 1709 bp, Homo sapiens
gcctgggtttagaggtttgtggggcagtaagatttgaattaaagaagagattatgatgctgtggcatgkcttaggtaggacacattcaaactcctagcctaccccgtacacttgagtagctgtcagggtgaaactgcaaacagataccttcagaaaagaacatacaaatccagatttatccattttgcatactattttactcatttgtctgttatttacttattgtggtcatgttactatttttcccgtatctgtatattttaataattatcttatattgaatgaccctgcttgcccagtttttctcttttctctactgtaagcaacataaaagaaaatatttcattttatttgtattttctgctcttaactataatattttgcgtatttagatgtgagaaaatgtaatactgtcaggtcatttcttaaagtatggccttgtgtgatcctaaaacattactgagatagtttaagtttcaggtaaatggtggatgattgttacaatcagtattactcaatatattaagtccacattaggtctcaaaatcttaggtctgcatttgattttagagacatacattatggtgtgagtcatttttctataaatcaggtaaaaaatagatacattttgatgttatacgaaactgtatttttctaccatagcagttactaaatatacaaatgatatccttcaagaaagaaatgataaaactgttttaaattcttttatgagtgtattttaattataatctacatataatgttaatagttttcttatttgattagaggaaaattttttgggctaaactttattttattttgaatagtttagtgccattgagcttctttctgtatgtattacaaatttaatacatttaatccattttctccctcattgctttctttcccaaaaggacacaaggctgttaacataattatttggtctggagatgtcagaggcttcgctcaaattattatatatcaactttatttgctctctcttattctgtatagttttctttttgtaaattacgtagtatagctagattggctccctgtaaatatatctcatagcacaagaaatttaaaatatttccagcaatgcctgttttaaaagcgatttcagctgcacctgtgcttaaatctggccacctctagttcagagcaatattcaaacaccaaaagccaatgatgaactggacattactaccccatgtctacaaaggaagaacattaacttaacatagtgtggtgtctagaagaaaatgtacagcctcataaagtttgaggagacgtttttatgcactttaagcttcagtgtaatacctttataagacaggttctgcagagaggggcaatattatcttctcaggctagctagtattacaacacactttcgctgtaatagtcaaacaaacctttattgaaagccaaccatataccaagcagtgttctgggaattctggaaaaatataaaaatatgaaataatttgagatcatgtaattatgtaatgagtgagaatacatttaagtgctacagtacttccaagaagggagagtttagtacttgatcaagaaatttagactgaatgtgaaggtgacaggaaatcattgggcagagaggagaaaagaagatatgctggatagagaggactgcagtggaaggacatggcaaataggaatgcagagggcatgactagacatgcatt

SEQ ID NO: 693996 - DNA, 664 bp, Homo sapiens
cacacttggagacataaaatgtgccgattacaaaaaatgtgtagaggggccggtaggtcgtgcatcaaagaagtgtggagaatagtgagctggcccagagatggtagatcttagaaagcttgactgtaaaatacaataatatcctttgtatgtgacaatgggagcaggtaaagagatgagcaggctacaagataaagcctttatggaaaaggtttagtcacgactagggagatatggtagggcttttgcacaacgaatccgttttagcaggaaatcatctctgtggaagcagtggagagaacttttgacttaagaagcctgaaaggctatttatcctaacatataaagagctctttggagtcagtaagaaaaagatcattagcagtggctcacgcctgtaatctcagcactttgggaggccgaggcgggtggatcacgaggtgaggagatcgagaccatcctggctaacatggtgaaaccccgcctctactaaaaatacaaaaaattagctgggcatggtggcgggcrcctgtagtcccagctactcgggaggctgaggcaggagaatggcgtgaacccgggaggcagagcttgcagtgagtcgagattgcactgctgcactccagcctgggtgacaaagcaagactctgtttcagaaaaaaaa

SEQ ID NO: 693997 - DNA, 596 bp, Homo sapiens
gcctggggccagcggcaccggccggctgcttcaagtgcgggcccactgagcccgcgcccatccagaactcgcactggccagtgagtgctgcacgcagccctggttcccgcctgtgcctctccctctacccctctctgcaagcagagggagccggctccagcctcggccagcccagagagggtctcccacagtgcagcagcrggctgaagggctcctcaagcatggccagagtggatgccgaggccgaggaggtgctgagagtgagtgaggcctgctagcacgttgtcacctctcaggatgatgtaggggaaggagggaggaagtgaccaggacaggaaataacatttcacaagaagtgctcttaagggaggaaggttagaatgatccatgtggtattggattagagttagagacatcagaatgaactcacgaatttagcttaatatagctacagatggttacaaatagatatttgcagatatgtatcgattcatggattagtatgtatagatacatacattttattgctctgtcagctaaaagggcctagaaaccacaacaccccaatagtaatgagcacccctagcacccagatc

SEQ ID NO: 693998 - DNA, 596 bp, Homo sapiens
gcctggggccagcggcaccggccggctgcttcaagtgcgggcccactgagcccgcgcccatccagaactcgcactggccagtgagtgctgcacgcagccctggttcccgcctgtgcctctccctctacccctctctgcaagcagagggagccggctccagcctcggccagcccagagagggtctcccacagtgcagcagcaggctgaagggctcctcaagcatggccagagtggatgccgaggccgaggaggtgctgagagtgagtgaggcctgctagcacgttgtcrcctctcaggatgatgtaggggaaggagggaggaagtgaccaggacaggaaataacatttcacaagaagtgctcttaagggaggaaggttagaatgatccatgtggtattggattagagttagagacatcagaatgaactcacgaatttagcttaatatagctacagatggttacaaatagatatttgcagatatgtatcgattcatggattagtatgtatagatacatacattttattgctctgtcagctaaaagggcctagaaaccacaacaccccaatagtaatgagcacccctagcacccagatc

SEQ ID NO: 693999 - DNA, 596 bp, Homo sapiens
gcctggggccagcggcaccggccggctgcttcaagtgcgggcccactgagcccgcgcccatccagaactcgcactggccagtgagtgctgcacgcagccctggttcccgcctgtgcctctccctctacccctctctgcaagcagagggagccggctccagcctcggccagcccagagagggtctcccacagtgcagcagcaggctgaagggctcctcaagcatggccagagtggatgccgaggccgaggaggtgctgagagtgagtgaggcctgctagcacgttgtcacctctcasgatgatgtaggggaaggagggaggaagtgaccaggacaggaaataacatttcacaagaagtgctcttaagggaggaaggttagaatgatccatgtggtattggattagagttagagacatcagaatgaactcacgaatttagcttaatatagctacagatggttacaaatagatatttgcagatatgtatcgattcatggattagtatgtatagatacatacattttattgctctgtcagctaaaagggcctagaaaccacaacaccccaatagtaatgagcacccctagcacccagatc

SEQ ID NO: 694000 - DNA, 1248 bp, Homo sapiens
ccaccccttctagattcagtgttttctgatctccacctctcagagtggagcctttatgaagtctttccatgaagttcactggggcaagtgtctcccaccacccccacccccaccctcactgatccacatagctctttgcaccatatgggaggcaggattgttgtcaattatttctagggtcttctgggtgcatggtagatgacctcgtgacttgctttggtcaacaaaatatatgtggaagtgacacatgtcatttctggccaaaagctttaaaggccagtatacactttattatattttcttccgcatgaaatacatgatggaagctgagcttccatcagcctgggtcctgccaacccacaggatcataggatgtgaatgaaaaagaggcctttgccctgttggctggaactgccatcttccagtaatttgccaaaataatgaacacaaagggaaagaagagaggcacccgacacatgttctctaggtcttttagaaaacagagctgttggctgggtgtggtagctcatgcctgcaattccagcactttgggaggcctaggtgggcgaatcacctgaggtggagagtttgaggctagcctgaccaacatggagaaaccccgtctctactaaaaatacaaaattagctgggcgtggtggcgcatgcctgcatgcctgtaatcccagctactcgggaggctgaggcaggaaaatcacttgaacccggtagatggaggttgcggtgagccaagatcacaccattgcactccagcctgggcaacaagagtgaaactccatctcagaaaaagagaaaacagagttgttcctttggccacatacaagcaaatctataagaaaggccatattatagacatcaaggaaatgggtactgttcagaaaggaaggccctacaagtgttaccatggcaatactggaagaacctacaatgccacccagcgtgttgttggcattattataaataaacaagttaaggccaagattcttgccaagagaaccaatgtgcatattgagcacattaagcactctgagagccaagatagcttcttgaagcatgtgaagaaaaatggtcagaaaaacaaggaagccaaagagaaagttacctggattcagctgaagtgccagcctgctccactagagaagcacactttgtgagaaccaatgagaaggagcctgagctgctagaacctctttcttatggattcatggcataataggtgcaaaaaawtaa

SEQ ID NO: 694001 - DNA, 738 bp, Homo sapiens
gaggatcacctgagccttgggaggtcaagactgcagtgagcccagatcgtgccactgcactccagcctgggtgacaagagtgagaccctgtctcaacaaataaataaataagtaatacagttgtcatatcctatggagcagctggcctggggggtctgggtgtggtggggaaggatttgaaggcagatgctgggggacagcaagggaagagaagggggaaacccagcgaggcagcaggggaggggtggcctccagaggaaggaagaaaaggggaagggaggcaccaagggagggcaagggaagagttgtggctggtgctaagccttgggttagtgtgggaggggttcaccttggcagactcacgggaggtgcatttcagggtcaaggaaggagttaacagagcctgtcagagcattcggggtgccgggyggggagggatggctggtccccgagtgaagaaggccaagctgtgtccacagaggtcatggtgagcccaggagtccaggaagggcccagccaggttgtccaccgcccctgccaggccagaggagttgaggctttgggtagcaccccgcaggcccagcagtagagctcatatggcctggggtcacctccggggggaggcaccctccagtgcccagccaggggcaggctgagtgcgggcaccggagaggccagctaacagcaggaagcccagccctcgagtgattgccccctgcagccctaatacatgacaga

SEQ ID NO: 694002 - DNA, 435 bp, Homo sapiens
tgagaacacaagagtgggctgcttttctctcagactgaggaagactgtgtcgcttagaaaaggacgtcctcacccgcagctctaagcggaggccctttctcagctcagcctccacgcaggtgtcacccggcggttcccctctggccgtccggggccgtgtgtgccgacgtcagagtcagagcccgagcgggacccaccggccctccacgctcactctgcccaggacaccctggcagatccttcaccaaaagctagtgactttgcgaaagccatgcagccccgctctggccgggcccccggccatcccgtgctcccaaacagagtctccaaacacggtggactctgccgctgctgattccgcaccccagggtgctggctgaggagkttactgcagaaacaaggcaccacagagaggctggacacttgggtggtggg

SEQ ID NO: 694003 - DNA, 629 bp, Homo sapiens
cgtagctgactagcatctcacctgtagcccctccaagggcctctggttgcaactggaagctgaggccgaaaccccttcccactgtccagttacaatcaggcagtcacrtcgcttttaattaacacagagtcgttctggggacgaagacctgaatcccatggattagaaggacaaagtacaacccatgtatttttttaaagtgcaaaatgcttacagccccccagaccttcactgtccctgtcatggtctctgaggaaggagagtgccctgtgaggaccaggccaggtctatcctgtgacgttgcagccaagatccttctgcaagaaaacgtgtcggccgggcctctgcacgtgcggttccgtctgccgggaccttccctccaccatctgcttggtccgttcctacttggtttccagatcccctggggcatccttggtcttctctggtctccccgacgaggccaaatctccctaccccagcactggcggcttcgcattcaaagcactcacagttcaactgacatccatctgcacgattagggtgagtctccgctctagacctatacgctctgcaaagggcaggacctgtatctgttttattcaagtctgtgactccaatcccaggcagaa

SEQ ID NO: 694004 - DNA, 1083 bp, Homo sapiens
atatttccaagagatggctctcaggctcttaaggagagcctgagatataaacatttatgggtgaaagaagatttacttatcaaaggggcagataaaggatcgacaatggcaagttttctaaactgctccaagaaaagggagactaggagcctatggtcaggttttggctggaacaaatgataaattattttggcagtattgagctttctcaagaagactggggttatcctagggacacggtcttgggctgatagaagccactagagtttggtcaagccttttagtgcaggaagttggactaaatcattcacaccaagaattttgcagctgtcacctgtttacttratagttgataggcatctcagaactaatctgatcagaatgcacctcttaatttcttcccagatatgaccctatcctagtttgccctacattgttgtatctgttgcctcatatttacagcatatcttttcttatccccacccacagcccagcaatcaattagcaaatttgggccctaattggtctagttattctctccctgtctactgctgtcactctgattcaagacaccatcatttatcctctaggactctggtctgatatacatatatccagtggaaatcactgttcattaggtcaaatgtccatcccaggtgtggctgggcagtatctacaggggtctgtgatgggcaggcacagtgacttatatttctaaggtaaaagctagttcatttaggttctagggcatgaactgtaatttcccaatctgtgacaactccccttcctcttacagtctccctgggcaatatctattctttggtccttctttcatgcaatactttaaaatgtaaatataaaagacaatgttgtttatcacagtttttaataggaactaaaaccccacacaaaaatatagatatgtgaacaagtaaaattcaggtatcaaccagtaaggggaactccaagaggcagtttcagggtgcacattccaacaggcccttgtgtactcaccaggcctacaaacagccctactgtgtacaagacctcaaagggataaagatattcatgtacctagaataa

SEQ ID NO: 694005 - DNA, 602 bp, Homo sapiens
tgaacatagcagggatgactaagcagctacctcaaactttgtaaggctaagcactaatacttcaagatggaaaacagccaacaagagcttaatgatttattggattcaaaaatggagaggcaaacatttaaggaaaatacaacatgacacatgtcttttaatcttttaatctctgtgcgtgtgttctgtatttcaaccctatttgagcttcttaagaccaatgtcgaatctgttaaagtgttttcctgtcacctaggttaatgcccaaggatagtgtacttaataaatttatgttgataaaaatcaccttgcaaatatctgtgtggaatttttctttttaatttaaaacagtagatatagatgttatttcctgattggccggttttatgtattttgaagttttgttatcaggtgcgtacrtattaagatttgcatggcttcttgatgaattgacctttttatcattatgaaatgtccctcttcatctctagtaatatttcttatcctgaagtatatttttctgaatcaatgtaatgattccactcattatatttgttttcttttaaatcctttaccatatttagaataactggtctaaagtt

SEQ ID NO: 694006 - DNA, 602 bp, Homo sapiens
tgaacatagcagggatgactaagcagctacctcaaactttgtaaggctaagcactaatacttcaagatggaaaacagccaacaagagcttaatgatttattggattcaaaaatggagaggcaaacatttaaggaaaatacaacatgacacatgtcttttaatcttttaatctctgtgcgtgtgttctgtatttcaaccctatttgagcttcttaagaccaatgtcgaatctgttaaagtgttttcctgtcacctaggttaatgcccaaggatagtgtacttaataaatttatgttgataaaaatcaccttgcaaatatctgtgtggaatttttctttttaatttaaaacagtagatatagatgttatttcctgattggccggttttatgtattttgaagttttgttatcaggtgcgtacgtattaagatttgcatgkcttcttgatgaattgacctttttatcattatgaaatgtccctcttcatctctagtaatatttcttatcctgaagtatatttttctgaatcaatgtaatgattccactcattatatttgttttcttttaaatcctttaccatatttagaataactggtctaaagtt

SEQ ID NO: 694007 - DNA, 614 bp, Homo sapiens
tgatttctccttatttggatttgtctacacatgaaaatgacatttackggaacagtgcaaaacaaaaacaagaaacagacaaacctcgaggtgtaattttttttaacagtatttttgcctacagaactctgcatggtgaaatttcactgtcctttccccatccacagcggttgccacttcttgctctaagctggcctgtgatgctgtgaccactgattgttggtgagagtgggagaaaggctggcccttggccccatcttcccacatgaggtctgcctgaagctaacatctgactggtgctggtgactatccacatggcctggtgccctgactattctgcctgcaagtctcagtgacactcgtcgtacagtgttcttcagcctgcgcccacagatacgcagctgcacagtcagctgccttccaagccagaacccctctgtccaaaggtacatggggagactcccagtcaagttctcactgttggataattcttgagcaggagattagcctatggtcaaaaataccaggaaggtcacttcaggaagctgggacacaggaggccaggaagaagggtacctagaagaacaagcactaccaaaaaccccatttgaaaa

SEQ ID NO: 694008 - DNA, 808 bp, Homo sapiens
tcctgatctgaagtgatccacctgcctcggcctcccaaagtgctgggattacaggcatgagccaccgttctcgcccaagaataacatttttagaggagaaatattcaggttttgcctgctgttctttgaaacactccttggtcagcttaagtcagcccaggtcacttaaccacaaactggctacggtgatctgcgtatggtgatgatggctgggtaggcaggacttccccaggggtctttmagggagagaagacgaagacgccctgctgggtgttgtaaagcatgtaggagtttaatcactgtattagcaactcctgtctgtaccgatagcctccaggattcacgtggcccttcttcttgtcctatagtttgaagagcttcctccacttaccacagccacactgggagccctgatccccaaggtatgtaaggtgggcaggtcccattgccttcagcctcattctctatcttgtttgagaaactggattggaagggaagatgctcagcgctggggtggggtgctctcccccgaacccctgcttgggagtgcagtgacagtgacaagggcttgcaggctagacccccatgggtgggggcgggggaagacacagagggttgaggtggaaagaccctgaattctataggtggtccagcctgcataggcctaatcctagcctggccacttcccttgctgtgtgactttggagaagagtcttaacatctctgagccttagcttcctcatctgtcaaaaaaggctgctgatacctattccataggttatcataggaaggtaaatgagatgatgca

SEQ ID NO: 694009 - DNA, 860 bp, Homo sapiens
gcatgccccgtggtgatggagaactcaccatcttccccttacctcatggttccaattgtcagaaagcccttctttataacatcgtgtgggtatggctcagagcacccaccccagagttgatcccatggtttaatgggggccactctgtcaccttgattactaccctgcaggatccggattctgaatgtccatgtgccccgcctccacctgaaattcattgctggtttcggagtgcgcctgctggcagcagctaattttactttcaaggtctttcggtgagcggatctccttgttagggggtgagaagggttttggggatgctccgagggatacagtgaggggacggggggtagcaactcctccagggccctcatccaggcctcttgactctctgtccagttgctctctctcccctcacgcttggaggggagcaagatagtgagaacatttctgagaaccctgctcaacagctctgcaactgggcagagtcacttggcttgtttaccccctcagcttcctcatctgtaaaatgggatgaacttctgtaaagtgycaatgacggtttggtgaatgggttcattgctgtgattataatgactgtcctctctttcccagggcaaggcacatgagagacgctcaataagcataacgatcagagttatttttgtgtgcctggcatcttgtatgttactgcatttaattttcacaccatgagctgtgcagtcagaggggtctcttatctagcttctctaccctgacactatgattttatgattgcttcctgtgggccaggctctgtgctgggtgttttcacatgattatctcacaggaaactcagcacagccctgcgaaataggtcc

SEQ ID NO: 694010 - DNA, 643 bp, Homo sapiens
gaaagaaaaaaattgcccaggggctcacagctataaatctgcagatacttattgtgacctgccatgtgccagacactgtgctaagagctggggacacagcaatgaacaagacagagacctgctctcatgtggcttacatcctgctgagccaagagtaggtagatatgccaatgtcctgtcatagaaagcaccaggcagggaaatgggcaaagacagagagaggtggaggccgggcgcggtggctcacgcctgtaatcccagcactttgggaggccgaggcgggcggatcacgaggtcaggagattgagaccatcctggctaacacggtgaaaccccgtctctactaaaaatacaaaaaatcagccgggcgtggtagcaggcgcctgtaatctcagctactcgggaggctgaggcaggagaatggcgtgaacccgggaggcggagcttgcagtgagccgagatcgcgccactgcactccagcctgggcgacagagatagactccatctcaaaaaaaaaaaaaaaragagaggtggagcgagagccattttagatagggtagtcaaggaagacctctctgaggaggtgacttttgtgtagagtccagaatgcagcaagtgctgggtgaagcctcaggaaatctgc

SEQ ID NO: 694011 - DNA, 615 bp, Homo sapiens
taaacaactttggacatctccagcatctttgcaaatctttgttttgagggtgaatatttttgtcattttaaattttatttttgtttgatgaaagaatgttgaataatttattgagccaacaattgaaatgctgtrtaacagggaagaagagttaggattaacagcgttggtgccatgagaaaagtcgactacacaacttgaactatccagtatgtttttttatgtacagaaaaattggaatgcagaatatgtttttgctattatactttggataagagtctgaaagtttttttcacagttggagtaattatagtccatatattataaaatattttaatagtgaattatattgtagcaatttctaacaagtatgtttatattatctaaatgagagcttttggtattttacatttttaaatttctttttaatttcttaattttatgggttgtgatttgtagtttgatttaattccatatgagcagttatttttgaaattgtcatatgtaagaatgttagtgagccattcgtcgaacatgtccacatagacactactcttgaaatcacatttaattttgagaaataaatccatagaaatctttactgtgtgaatgtta

SEQ ID NO: 694012 - DNA, 604 bp, Homo sapiens
tgttaaattgcaaacctccactcacctcccttgctctctctactctcgccccttcactctgtacacttctccattctgttccctgccccaacagacttgttttaattatttatttattgttcatctgccccactgaagtgtaagctccatgagagcaggattgcttcttcactctggtgtctcccgagcccagaaccatgcctggtgtgtagcaggagctcrgtgactctggggaatgcagaatgcgcttcgcttcatagaagggtaggagtaacaacgcccttgcagggtagttgggaggctggggagaatcactcatagacgctacatgggacatagcatcacctcagagctcttttttaaaactcacatacctatgatctgcatggtaagagttgcatgcagcagctgagtgaactcagtgaaccctgaaagggccccttgacagccactcccccatcctctttgcccaccctcctccccggttcaccactgtatgttggtggacatgtttccaggcctttcccatatatttacatctgcacagatataacatgtgtgtcataggtatgcatcatacatcaataagatcattctccattta

SEQ ID NO: 694013 - DNA, 605 bp, Homo sapiens
cagcatgttttgtgccagggttatgttctgagatataggagggttaactaagctggggctgtggattagttataccccccaacccctgccaccctgtgcctcaacctcccaaagtactgggattataggcatragccactgcgccaggccagtatttgaataaaagattgaatcagtgagagacacccagcctctggtaactggcctccagtgagccctcctttctggaactcagctgtcccccaccatgtggtaccatatttggtgggggtgaccaagagcatttgggagaagtgatgatgtgccacttccaatattaggttataaaggcagccgtttccatcttcatcctctctctctctctttctctctcagaagccatgtggtagagaggcccatgtggttagggaccaaaaactcctcccagtagccacgtaaattatcctggaggcccatctgcctcgagctcttacaagtcttagaagactgcagccccagccaacagcttgcctgcaacctcgtgacggattctgggagctcagctgctcccagaatcctgaccctcagaaacatatgaaataataaaagtttgttgttttaagtta

SEQ ID NO: 694014 - DNA, 605 bp, Homo sapiens
cagcatgttttgtgccagggttatgttctgagatataggagggttaactaagctggggctgtggattagttataccccccaacccctgccaccctgtgcctcaacctcccaaagtactgggattataggcatgagccactgcgccaggccagtatttgaataaaagattgaatcagtgagagacacccagcctctggtaactggcctccagtgagccctcctttctggaactcagctgtcccccaccatgtggtaccatatttggtgggggtgaccaagagcatttgggagaagtgatgatgtgccacttccaatattaggttataaaggcagccgtttccatcttcatcctctctctctctctttctctctcagaagccatgtggtagagaggcccatgtggttagggaccaaaaactcctcccagtagccacgtaaattatcctggaggcccatctgcctcgagctcttacaagtcttagaagactgcagccccagccaacagcttgcctrcaacctcgtgacggattctgggagctcagctgctcccagaatcctgaccctcagaaacatatgaaataataaaagtttgttgttttaagtta

SEQ ID NO: 694015 - DNA, 679 bp, Homo sapiens
ctgtcatttataaaggtcactctggctgcagtgggaaaaccagaccaggttggggaaggtggaggtgsgtgacaggtggtgaggcacagttaaaagaccatcccagtcatccaggaggcttgaaggatggtgctggcttccgaagtggaaaacagtagatggagctgatctagagaagaggaaggatccgtaggacttgatgagggatcccatgagggaagagggagaggtggaaattgagtaggacacccaggttttatgctggctgctggatgaatggtgatattctcgttcactgagatggggagatgaggtggggagcaggctgggtagaggcagggagctaggccctgggttccgttttgtacactttgcctctgctgtgcctgtggatatccaaggggcatcccagaagcctctgggtgtaggagtgtttgtaggtatttatcctgcattcagcacctgcctcggatgtccacaggccagtgagggcggccctcagggatgtgcgacattttctgctttcttctcaagcacacctgctgcttcttgtcccttggcactccgtggacatgccagatgccactcctgtgtcccacacagcataaagggagaaagcccctcctcaactcgctattgaactatgacattagaggcccaaggtggcactctcaaaccc

SEQ ID NO: 694016 - DNA, 652 bp, Homo sapiens
cctccacctcctgggatcaagtgattctcctgactaagcctcccaaatagctgggactgtaggcgtgggccaccaggcctggctaatytttgtatttttagtagagatggggttttaccatgttggccagggtggtcttgaactcctgacctcaggtgatccacctgcctcgacctcccaaagtgctaggattacaggcgtgagccactgcgcccggcccacctgtactattcttgacttagtttttctttaaaccaacttacttttttggttaatagatttactttaaaaagaaagttggtatcattatggtaaacagaaaagcagtatcacttggcataaataaaaatagccaaaacataaatgcaatcaaagacttgaatgtcattagattaaaacaaaatattcattgtgtacaatctaaaatcatcttgcacatcacaggttgtatctatactgcacttacagaaactctaaagagaataataatacttagtaaaaaaatttaaagttggaaaacctgctaagattcataaatgctgcaatgggtctaaagagagagaagtttgacataaataatgtgtaaattatacccaattattcctcgacatttcatcatatttagaggaaaattactatgaaatatagtgtg

SEQ ID NO: 694017 - DNA, 652 bp, Homo sapiens
cctccacctcctgggatcaagtgattctcctgactaagcctcccaaatagctgggactgtaggcgtgggccaccaggcctggctaatctttgtatttttagtagagatggggttttaccatgttggccagggtggtcttgaactcctgacctcaggtgatccacctgcctcgacctcccaaagtgctaggattacaggcgtgagccactgcgcccggcccacctgtactattcttgacttagtttttctttaaaccaacttacttttttggttaatagatttactttaaaaagaaagttggtatcattatggtaaacagaaaagcagtatcacttggcataaataaaaatagccaaaacataaatgcaatcaaagacttgaatgtcattagattawaacaaaatattcattgtgtacaatctaaaatcatcttgcacatcacaggttgtatctatactgcacttacagaaactctaaagagaataataatacttagtaaaaaaatttaaagttggaaaacctgctaagattcataaatgctgcaatgggtctaaagagagagaagtttgacataaataatgtgtaaattatacccaattattcctcgacatttcatcatatttagaggaaaattactatgaaatatagtgtg

SEQ ID NO: 694018 - DNA, 376 bp, Homo sapiens
gtgggataagagaaaagcccatgtcttcctgcaccgaacatctaggctgcagccgtgagggccagcctcggggcagggacatcggaatcatgaggctaagaccttggagtgttctgaggacttgaactgaaggtsagaggcagaaaaaaatatacccccttgcttttcttccaccaggatgttttgaagaggaatgcctcttcagggagcgggcaaggagaggagggggctgtgtcagggtgccgactgttttctggtgatagtaacagagacccgaggggaatatctgagcttggatagtcactgcagtggctcagtcacgacacatacccccctttcccccacaggcagcctttttgcggccacccgcggcccc

SEQ ID NO: 694019 - DNA, 613 bp, Homo sapiens
cttcatttactgctggggaaaccgagggccagcctgccacagtaatgccgtgggtgcctgagtcatctcctcctcctcctcttccttctcctcctcctcctcttcctcccccttcctcatctccccctttcctccttctcttcctcttcctcccttcctcccacccgtctccctctcctgagccccagctctgctctgccaccaggccttgtcccttttagggtccaaaagagcaggtcctgccctggggccagtcagcatgaaaagggatgaccatctcttcctccagaggacagggactctatgccccaggcactccaaggtcaaacctggctcccaytcagactatgaagacagcatccactgggtcagagtcatgaagccacgggtcccaggggacagctcaggtggccacagggccagactggcaggctgccctctgcctcctgttagcacaaacacccctcccctcaggcctgaactctgacatgagccagtgggcaccgggccctgtcaggaacaggaggaggccacagccatcctcaggagagaacaaaggacacacaggcctccggggagagcagtgggtggcagtgacaggaggggctactca

SEQ ID NO: 694020 - DNA, 1652 bp, Homo sapiens
ttgaatcagtaggaatcatccttggtggttgggggactctaagattatgtagaaaagagataggggaaaggtgtcagaaagaatgtaactacagcctcctagagtagtctttgctaaaaaattatgttgacaataagtgatagaattgactgcctctctagctaataaaataacagcaacaacaatgcttattttttcttactcctgtttgggcaggatttgggcagattacctgaggtccaaattccctggtggacataaacaggaaaaccttgaagcttattgctagcgtattctagcaccaaagcaataccctcaatggttagagtctgtcttaataataatcagaataacacatttatcaagtgcttataatgcacctgatgctaaatttaatgtttcacaaatataatcacataaaatcctgacaaagaatttgtgagargggactactgctcccattttacagaagagaaagcagaggctcagagaagttcagtaactatagctggaaagcggtggaaatcaagttcaatcctggttagttagaccacaaattccgtgcctttaactcttatgctattctcaccaacacctacactccctcccacgtctagcactgttaggcctaagtctttaggcaatgactcaaaatatgagtgtattggtcagcgttctggcaggagacagacggcacactcaaatggggtaattgagcagaatttagaaatgtcactacttacaagttatgcgtaaagctaaaggaagctaacaaggaaagatgaagccctccagggctagcagcggggggagcctgaagggtaaagggggcgaagtgaaagagaaagtatctggaggagagagccattcatcaggggctatggccttagatacaggggcagtggagagacacagccaagcaagggcccattacagtagaaccaggaggataaataaatatcttgaccttgtcccacccatctctctctctctctctctctctctttgtttttgagatggagtctcactctgtcaccaggctggagccagtgctagattcactcactgcactcaacctgctggttcagcactctctgctcagctctgagtgctgatataggtcgacacacgctactatctttggattttgtagagtagattcacatgttgccagctgtctcaactctgacctcagtaatcccccacctagctccacagtgctggataacagggtgacccaccacgcctgcccccaccctcctgtctctagctggtgcctccaactggcagaacccaactgaagccagagagcaaggtgcccagtaatctgtccacaagtcagcttcctgggtacagagcagtggagaggaggatggagtggctgtggaggggcaaatggagatgcccagcataatgaattaacacgtacagctgtctgaaggcttctgctttgaactcagggttaatctctctcatctacaaggaaagggatggcttatgaaggcttaggaaagaaagtgatgatcgttaggaatcagcatggatttaccaagaaaaaagatgactactcactgtacttttttggagggaggagacaggattcctaagttggtagcacatggcattgtggtaggcagcagagcagacagctc

SEQ ID NO: 694021 - DNA, 1652 bp, Homo sapiens
ttgaatcagtaggaatcatccttggtggttgggggactctaagattatgtagaaaagagataggggaaaggtgtcagaaagaatgtaactacagcctcctagagtagtctttgctaaaaaattatgttgacaataagtgatagaattgactgcctctctagctaataaaataacagcaacaacaatgcttattttttcttactcctgtttgggcaggatttgggcagattacctgaggtccaaattccctggtggacataaacaggaaaaccttgaagcttattgctagcgtattctagcaccaaagcaataccctcaatggttagagtctgtcttaataataatcagaataacacatttatcaagtgcttataatgcacctgatgctaaatttaatgtttcacaaatataatcacataaaatcctgacaaagaatttgtgagaggggactackgctcccattttacagaagagaaagcagaggctcagagaagttcagtaactatagctggaaagcggtggaaatcaagttcaatcctggttagttagaccacaaattccgtgcctttaactcttatgctattctcaccaacacctacactccctcccacgtctagcactgttaggcctaagtctttaggcaatgactcaaaatatgagtgtattggtcagcgttctggcaggagacagacggcacactcaaatggggtaattgagcagaatttagaaatgtcactacttacaagttatgcgtaaagctaaaggaagctaacaaggaaagatgaagccctccagggctagcagcggggggagcctgaagggtaaagggggcgaagtgaaagagaaagtatctggaggagagagccattcatcaggggctatggccttagatacaggggcagtggagagacacagccaagcaagggcccattacagtagaaccaggaggataaataaatatcttgaccttgtcccacccatctctctctctctctctctctctctttgtttttgagatggagtctcactctgtcaccaggctggagccagtgctagattcactcactgcactcaacctgctggttcagcactctctgctcagctctgagtgctgatataggtcgacacacgctactatctttggattttgtagagtagattcacatgttgccagctgtctcaactctgacctcagtaatcccccacctagctccacagtgctggataacagggtgacccaccacgcctgcccccaccctcctgtctctagctggtgcctccaactggcagaacccaactgaagccagagagcaaggtgcccagtaatctgtccacaagtcagcttcctgggtacagagcagtggagaggaggatggagtggctgtggaggggcaaatggagatgcccagcataatgaattaacacgtacagctgtctgaaggcttctgctttgaactcagggttaatctctctcatctacaaggaaagggatggcttatgaaggcttaggaaagaaagtgatgatcgttaggaatcagcatggatttaccaagaaaaaagatgactactcactgtacttttttggagggaggagacaggattcctaagttggtagcacatggcattgtggtaggcagcagagcagacagctc

SEQ ID NO: 694022 - DNA, 615 bp, Homo sapiens
actattacacaaatggaagatttatccttatgtaaatcttagtaaacttagcataggatttcttttctttttcttactaacttgagaatgttcatctttccattaaaggaagcactgtatggcttctccttgtcatatccaaacaaccagcatcactactcttattcttagggtccgtatgctttgttcaaggaaacacaagcatagcattactgccatattcaatttgataaatggtgatgtctacaaagtaacaaacagcttaaaccgtagatataccagaaaaagggatgattcaggtcccrgatgggatagagtgagatggcataaaatttcatcatgttactcagaatggtacacagtttaaaacatatgaactctttatttctggaatttcctatttaacatgtttggattgcagttgacagtggataaccacagataagagggacctcctgtattggtacttaaatataacattttactctttgcttttaattttaactgcatgacttatgttcatttgcttcttatttattgcctttggaatgatgttttttgctatcatcccactcttcttctaaaagcttgatagttaaacactttttcctcgta

SEQ ID NO: 694023 - DNA, 457 bp, Homo sapiens
caagagtcctgagaatcagacactttcagccctggtttctcctagtgcctctgtggttggcttttccttccgtgagagtgtttgattatttcatatggtgtaagatgctacgyagagaccgtccctcccatttttgtttccagatgctgctaatcagttgttctaataatttgtggaatgcatcaatgaattgtttttccctgaggtgtgagagccaagctttcttttcttttcttttctttctttttttttttttttgagacagagtctcgttccgtctcccaggctggagtgcaatggtgtgatctcagcttactgcaacctccgcctcgccccccccgaccccaggttcaagggattctcctgcctcagcctcctgagtagctgggactacaggcacctgccaccacgcccagctattttttttttttttttttgtatttttagaagagatggg

SEQ ID NO: 694024 - DNA, 1495 bp, Homo sapiens
tcttggtgatgtgatgcttttccaaatggacttgaaagtcagtgtgtccaccatgcgactgcaggttagtttaggaggaactcacgtctttgtgtggtgttgagcctctccatccaggaacacagcgttccacacaaattctcccagcgttccacgcacatggaccctgctcagcgcccggcccctggggctgctattgtcgagggcctgccctctcccaggagctccaacgtgattggtctgcggagaggctccctggtggttgacggcccacccagccgacctcccgaggtcgctgtgagcccccagcctggccctccccacgaggtgctggccttgggtggcagccttgcttccttgtttcaggggcagcatcactgtccgttatctactgctgcagaacagatcgccccaaagctcaggggcttaaaacaacacagatgtttattttatttatttatttgttttgagatggagtcttgctctgttgcccaggctggagtgcagtggcgcaatcttggcgcactgcaacctccacttccttggttcaagcaatgcttctgcctcagcctcccgagtaactgggactacaggcgcccgcccccacccctggctaatgggacgtttattttaaacatagacatctaacagctgggcgtggtctaggtgggagggttaggcctggggtctccctgagatggcagtaaggctggggctgggactcgagctgcaagtgggctggaggcctcagctcctctatggggcctccccacagggctgctgagggcccagagccagtccagagagccaagagccaggcgtgctgactctgggacccggcggccacttagccattcctgccatatcctggttggtgacagaagggacttggggtcccagcagcaccagggccacgggcaggtcctgcctgtcaggggacccaggcttccaggtcagctgtgcctggatttctccaggggctgatggtggagtcaccagaccatcctgccgtccagggccgggcagggtctcaccccttccgcctggcacatcatcggggcgtctctggtgtgtgaagggctggacggggcgtggggccctggaggggtgcgggaaaggacccccacccccagccgcctccgccttcgacggcgctggcccttcagggaggggcgtcctctgctcgctggcgcttcccgaggttccctcgcagcgggggccgagctgtcgctggaggcggggcagggcggggcggggcggggggcggtgaggtaatttccgcgatcagcgtcagtgcccgggccagaatcgaaactgagagctcctgggcaggctcggcagggcaggcagctccaggagggtgagcgcgggggtcccagggcggaggggcgggggcgcrggggtccaggggcggctccaggagggtgagcgcgggggtcccagggtggcggggccgggggcggaggggggggtccgggagggtgagtgcagccgg

SEQ ID NO: 694025 - DNA, 611 bp, Homo sapiens
aggctgctttagcctccagcaatgtgcctatcagcttcgtgtcagcagagccagcatctctttaaaaagggctatctccaaatgccaagaacattttcccctggatcagtatgcaaatcaatctttcaaagattctgattaaaccgaggtcaaatgccagcaaggccaggcatataatagagatgagggaagaaggtctggcagagacaggcttgtccacaccccttctgaagggcggcagcagcccagcacatgttgctcactccacggggcaagacaggctgtagcagacgctagactcatggcaaaggcacaggttaggattgctcctcctatccccttgatattagggatgtcaaggcaggcccgttcctggggggatgtgagactcctctgataggcaactttgcattgagggttccctgggcctcactgmaccttcctcagactgcgtgccagctaggacagtgcacccaaccatccctgtctccacgggggtcagacccgcatcacagttggacaggctgcatgcccagctcccccgatgccccattttctatcaccagttgtttcccgctaacaaaattgttgcaggtttaattgtatcttca

SEQ ID NO: 694026 - DNA, 581 bp, Homo sapiens
gaagctacccatctccttcttgttcatggtaatatctaggggtcagaggcatgaattccaggggaaaaaatctgcttttattcctctgattaacaaaatacatgatcccataaacaaaattaacaacgaaatcatgatcatatcatagaggcagaaaaagcatttgataaaagttcagcatcactcatgacaaaaaaactgttaacaaactagacatagaaagaacatccctcaacataataaaggccataaatgacaaactcatagtcaacatcatatttaatgggggaaagttgaattcattcactctaccaactggaacaagtcaagaaaggcatcctaatgggaaaagaggaagtgaaattacccttgttcactgatgatatgttcttatatctagaaaaccctaaatacttcaccaaaaatctcttagatttgttaaatttggtaaaaagtttcaagatacaaaattaatgtacagaaatcattggagtttctacacaccaatarcaatgtagctgagaaccaagtcaagaagcaatcccatttatagtcgctatcaaaaactaatgaaataccta

SEQ ID NO: 694027 - DNA, 817 bp, Homo sapiens
tttttttgagactgggtctcactctgttgcccaggctggagtgcagtgacgtgatcttcactcactgcagctttgaccacctgggcttaagcagtcctttcacctcakcctcctttgtagctgggactataggtgcatgccaccacacctggctaattattttattgtattctattgttattttttgtagagacagggtttcaccatgttgcccaggctggtctcaaaagcctgggctcaagccatctgcctgcttcagtctcccaatgtgctggggttacaggcatgaaccacctcacccagcccctccttaattctttatagttgtttcacacacaactaattgaacagtaatttttaagtgactctcctttaactagtctttccaaatcttttcatgtaattttttcatagaagcaactctcttttctcacgaacactttaaaaatttgcgtaaagttttattaaactacacaatcaaatggcaagtagaattggcagaagcaggttttggaaacaaacgtgactgacttttggtaagcccagagcactatgcttgggagctgatgcaaatggaaaaactggcgattaacctaccaaaaacaaaggctcagtgcacttcacacattagtcagtaggttttacaatttgttaagtggagaattggttaagagaatatttactatagaaggttctagtaaatatttgttgagtttaatttaattcaattggatctttaggaagaaatgtttccaccatccatttgtattggtcatttatctagtatgtccatgaaaggggaaatgcagataggacg

SEQ ID NO: 694028 - DNA, 604 bp, Homo sapiens
gactcaaattagtattttaatcctatttctgccagaatgacagaaactgaggatagagcacttttgtttccatgagaaatttctgtcaagaagtgagaagaaagaaagaaatagataaaacacatggtgaagaagaaataagaggatagtctgcagggctcaaggactctgttctgggcatgtctgggacaagaagggataaggtgggtacctcaaagacaacccccagggcagagaggctgctgagagacctgttgatctagccttggaaagtagcagcacaagcttggactcccagctctgaaaaccggtgggatgggctatctgtgagttggtatttcaagccaccattgccactttgaccctgtaaggcaccggctggcactggcaatccaaagaatttgcctgaaggagctatagaatttgatgtyatggatttatcatttgagcgcatcctgattacatcaccaccctattgtggattacagagttctctctcaagtatcttttagaaaatcattgaatgtcagagttggaaagtggcagtcgtgcttccatgattttcaatctcttactttcagttcagttatatggaatgtgatca

SEQ ID NO: 694029 - DNA, 651 bp, Homo sapiens
caaagagctgagatacagacacaaatgacatctggctcctgcctgaaacaaagggtaatggtgcagccctgttaggtataataggtactgacagtggtctgtcttagaaatatggagaggtcacttctgcctgggaaggggcaggatgtgaacaggctcaagagggaggtgacccctgggctatattggagtgaacatttgctacctgaagtatctttcagagggccactggtgctgataaccaaggtcattaacttccaaaatgccaaaaacagaagaaattaaactgccttactccaatcccatggctcgttgtccaagctggaaaatttcccattctaactgaccaggataaaaagcaggactaagtggatttcagcccctgagaatgaagaccattcctactaacagtctctgtctgacaagtgcccaggaaacacatcaaacaaggaaactggaacccactggtggtgtytctctatggtgatgactgtctcccattatatctctgcctttactcttctaaagcctcaggacaaaacaatgccaaaaggaaatgaacatggaagggacacaaagcaaacagcacagaggtatagggtactgtgagaaagaggctgactcactgtttactcaaaagatataaaaaga

SEQ ID NO: 694030 - DNA, 2533 bp, Homo sapiens
tgtatttgaaatttaattttggccagaatattcaggaaaggtgtttttttttccatatacgtaatacttagtggtctatatatttaagttataggtatgtggagatagctgtttaataattctttttgtctggaaataacgttattcaaacataggcagctatgtatcattttaaaatgatattgaatttccccttaaagagaaatcagatttataatgtaaacatgaccaggaaaagcaactggtgactttacctggggaggctccaaggaggttaagaaagtatctgaacaactgtgtttttcagaatagaaaaattgtgtgtgtgttgcgggggaaggtaaaattttaactttattcttttattgttttcaagacggctgttttcagaaatgtgtggttgaactgagaccctcatattttatactcttcaaatttgagtggcctcagttatagaatcatacagaagatcaaaagtctagctcagcaggggcatgtggtgtaatccctcactatctgtgttatgtaatccagaatgctgtttttcataggacagtcttgcatgatccttagctggtgtattgatctattatatcatcttccttttgaactgtagtagtttaataaatgattgccatctttggagagcacctgttttcataaaaaatcactttttgaaatggcaaaacatttttattggcacttttatgaacgtaagacttgctgccagacgagtaaccttttgaatgtgacgtattataacatatctaaaggtaccatgtattagcttatggactacacttccttccaactatattattactcaacagttggaacttagttttgatggtattactacccagctctgaattaatcgctgttgaaaatgctgttctacaagtaactgtcaaaacagaatttctaactccatttgatcactgggtgcacatttaaatctgtcggaataactctacctttattttgcaaatgcatacccacgcagaaagctttgttctaaaatactctattggaagttttatatttatatgcctgaaaatgtgagtgatgttaaactgcttacatgtcctggaatcgtgaggcggtgtgtttttgccttatgagataaagaaatatggtagttgaaaaagtgttacaggttaccaaaaaccttttgcaggaaaagattttaaaaatttgtatcacctctgaaatatttcaaccacagcagagtccattcagtgcccgtagcacagctagtttgcctttcccaagattacacacaactgtctttagattaatgtatactgctgactttggcaacatgggacagttatatttggcaatttcagtaaacatkgtattttcctaagataccactaacttcattttggggtttgatttattaagaattgaaatgtttgcctggtattcatctttacctcaccctctaagtaaaattgaggtaaaagtgagcttcagggctgctgtgctgttttccttgtgatcacattagcatgctaatttgtgaaaggatgtaacaatataagtgaaattagcttctgagtttagtgtctgaattttcatccccagtttttcagatgtagctggaaaactcaaataacagaattaatgaaaaaattttgcagattattaaaaaaaattagtaattagctgagtttgattttttattttgaaatcttgagagtaaattttatcttttcggattagagcacttaggtaatgtaagaaagattttggatttctcatgctctccacacttaatagtaaactatttttgaggaagtataaattttctttgaaacttaaaattatttagcaggctgtgactaaatttttgtttgtgatcacttataaagtaagggtgaaacagcatgttgattagcaccgccgacccaggtcttttaataaactgtctatctaccacagttgagtccctgtaaaaccaagaacttctgtatttgatatgcaaaattaggtcaaggactaatggagatgctttaatgatcacagttggtattttatgtccagattgaagtttttaaaatagttgcttttcacctcataatatatgaatgtgtaggccatattagtgtctgtcaaggagacttatctgcctgttgggaaataaatacagcttttcatcgctggtgggaggcagcagtgactttctgtggttttgctgttggttttcagatgtgaactgtgtttgcaaggacactgcttaattctcagtgctgtccattccacattttcctatttccctctcatattgggaaaatgaataaacttgtgtagctctttcttctattccttagtatttgtttgtttaatagttttgcttttgataaagcctcaccctttaaagtagaaatactttctcaaattgtaatattatttatctagttatgccttagaatgatataaaggttttacatgttcctaggctgtgattctttagctaaccaagtataaaaatgagtttacttccttgccagtggaggcagacctgggt

SEQ ID NO: 694031 - DNA, 2533 bp, Homo sapiens
tgtatttgaaatttaattttggccagaatattcaggaaaggtgtttttttttccatatacgtaatacttagtggtctatatatttaagttataggtatgtggagatagctgtttaataattctttttgtctggaaataacgttattcaaacataggcagctatgtatcattttaaaatgatattgaatttccccttaaagagaaatcagatttataatgtaaacatgaccaggaaaagcaactggtgactttacctggggaggctccaaggaggttaagaaagtatctgaacaactgtgtttttcagaatagaaaaattgtgtgtgtgttgcgggggaaggtaaaattttaactttattcttttattgttttcaagacggctgttttcagaaatgtgtggttgaactgagaccctcatattttatactcttcaaatttgagtggcctcagttatagaatcatacagaagatcaaaagtctagctcagcaggggcatgtggtgtaatccctcactatctgtgttatgtaatccagaatgctgtttttcataggacagtcttgcatgatccttagctggtgtattgatctattatatcatcttccttttgaactgtagtagtttaataaatgattgccatctttggagagcacctgttttcataaaaaatcactttttgaaatggcaaaacatttttattggcacttttatgaacgtaagacttgctgccagacgagtaaccttttgaatgtgacgtattataacatatctaaaggtaccatgtattagcttatggactacacttccttccaactatattattactcaacagttggaacttagttttgatggtattactacccagctctgaattaatcgctgttgaaaatgctgttctacaagtaactgtcaaaacagaatttctaactccatttgatcactgggtgcacatttaaatctgtcggaataactctacctttattttgcaaatgcatacccacgcagaaagctttgttctaaaatactctattggaagttttatatttatatgcctgaaaatgtgagtgatgttaaactgcttacatgtcctggaatcgtgaggcggtgtgtttttgccttatgagataaagaaatatggtagttgaaaaagtgttacaggttaccaaaaaccttttgcaggaaaagattttaaaaatttgtatcacctctgaaatatttcaaccacagcagagtccattcagtgcccgtagcacagctagtttgcctttcccaagattacacacaactgtctttagattaatgtatactgctgactttggcaacatgggacagttatatttggcaatttcagtaaacatggtattttcctaagataccactaacttcatttkggggtttgatttattaagaattgaaatgtttgcctggtattcatctttacctcaccctctaagtaaaattgaggtaaaagtgagcttcagggctgctgtgctgttttccttgtgatcacattagcatgctaatttgtgaaaggatgtaacaatataagtgaaattagcttctgagtttagtgtctgaattttcatccccagtttttcagatgtagctggaaaactcaaataacagaattaatgaaaaaattttgcagattattaaaaaaaattagtaattagctgagtttgattttttattttgaaatcttgagagtaaattttatcttttcggattagagcacttaggtaatgtaagaaagattttggatttctcatgctctccacacttaatagtaaactatttttgaggaagtataaattttctttgaaacttaaaattatttagcaggctgtgactaaatttttgtttgtgatcacttataaagtaagggtgaaacagcatgttgattagcaccgccgacccaggtcttttaataaactgtctatctaccacagttgagtccctgtaaaaccaagaacttctgtatttgatatgcaaaattaggtcaaggactaatggagatgctttaatgatcacagttggtattttatgtccagattgaagtttttaaaatagttgcttttcacctcataatatatgaatgtgtaggccatattagtgtctgtcaaggagacttatctgcctgttgggaaataaatacagcttttcatcgctggtgggaggcagcagtgactttctgtggttttgctgttggttttcagatgtgaactgtgtttgcaaggacactgcttaattctcagtgctgtccattccacattttcctatttccctctcatattgggaaaatgaataaacttgtgtagctctttcttctattccttagtatttgtttgtttaatagttttgcttttgataaagcctcaccctttaaagtagaaatactttctcaaattgtaatattatttatctagttatgccttagaatgatataaaggttttacatgttcctaggctgtgattctttagctaaccaagtataaaaatgagtttacttccttgccagtggaggcagacctgggt

SEQ ID NO: 694032 - DNA, 319 bp, Homo sapiens
ctcaggcataccatatgtctttaaaatattataaaaaactttgtaaagtcttttgttttataaacagcttatctgggctaggcctggagcatattcatagactgtccctttatgcaattcctgggcaagtgcatggctttgaaaaagactggagctgaaaagcataatgtgtacttttggcctggggattctttatagagagtatgcagatttccccaaggaaaactgattttgcatgcaaaagctgtctctataattataacaatttcctcttgccctttttwaaaaaaaattcagcttctcaaattggtacgtataa

SEQ ID NO: 694033 - DNA, 1609 bp, Homo sapiens
ctcagattatttagggaccacctctcacctctctcccaaatacccctgttgtctcagcagtatcactgcctggagtttcaggtaggagcagctgcttctctcctaaggaatgttctgggattcgcctctgagattttcttcacatctgaaactagctcaatggtgccccatcactcacttgagtctcccaagcaaatgtgcccacagctgtccccttaaaagagggagtatgtgccatggcttcagagccaggcaggctctgcttctgcttgactgtgcaaccctgggcaaatccctttacctttctaagcctcggtttcttcctctatcaggtgaggatgattagcattccccatataaagctaattcatcacttgcaagacgtgcattttccttacattgtaaatatcttaaattggaatgcattgtatattcaatggcatttcataatttaattggcaatttaaaaatttcttagtggcacattaaataatgcatatcttaatcaatggtattctagtgtgtgtggaatataatatgatgattagatgagaacatgcttggttatttacctagcacagcctaggagctcaaacactagtggtttattcctctttacctttattattattattttttgtatttatttatttttgagactgagtctcgctctgtcacccaggctggagtgatgcaatcatggctcactgcaacctccacctcccaggttcaagtgattctcctgcctgagcctcccgagtagctgggattacaggcacgcgccaccacacccggctaatttttgtatttttagtagagacagtgtttcaccatgttggccaggctggtctcgaactcctgacgtcaggtgatctgcctgcctcggcctcccaaagtgctgggattacaggcgtaagccaccatgcccaacctgcccttagtttaaaatattaaattaagtgagttacttggcatcacaatattcgggggttttaagtccatgatgggcctgcatccctttcctctcagcttctcccaagccttagcataatcctgccggcccctctaactcacagaaattcttgaattacagagaatgtgttttgttccacaaagtagaaccttcagggatcttggggcagagccatctctgagtctcctttccttgtccataattcttatattgcaaggttgttgtgaggattaaatgagaggcacakagtctagcatacaataggtgctcaactaatgtgggctatctggttttttccccaggacaaatacttcccaggctctttcattaactggctgcttgaaagtaagttttgttttctcatatccaccccactgtctcccagtcctgcctccctcttcagggcaggacagtccttcctcaaacattggtgtaaaaccgtaggacctcagagcacctacctgacacagaatttgtgccctgatcaatagcaccaaagcagggtttctgaatagtcaatttcatggtgaccagtgttgcagtgtggttcctgagatagcccactccactatgattactgttacaatgcattctagggccatcctattccgtagtgattcttgttattgagggatc

SEQ ID NO: 694034 - DNA, 464 bp, Homo sapiens
aaaaaactgggaacaaagcaatcaaaagaaatgtatgtggccgggcgtcatggctcacgcctgtaatcccagcactttgggaggctgaggcaggtggatcacaggtcaggagatcgagaccgtcctggctaacatggtgaaaccccatctctactaaaaatacaaaagtttagcccggcgtggtggcgagcgcctgtagtcccagctactcaggaggctgaggcagaagaatggcgtgaacccgggaggcagagcttgcagtgagctgagatcgtgccactgccctccagcctgggcgacagagcragactccgtcttaaaaaaaaaaaaaaaaaaaaaagaaatgtatgtatgtatgtatctgtgatgtcatttgcctcttaagggaaaggtaataataacagcttcctaccaaaacacatttcatgatctcaagaaaattttctcaaacctggtggtgaaga

SEQ ID NO: 694035 - DNA, 464 bp, Homo sapiens
aaaaaactgggaacaaagcaatcaaaagaaatgtatgtggccgggcgtcatggctcacgcctgtaatcccagcactttgggaggctgaggcaggtggatcacaggtcaggagatcgagaccgtcctggctaacatggtgaaaccccatctctactaaaaatacaaaagtttagcccggcgtggtggcgagcgcctgtagtcccagctactcaggaggctgaggcagaagaatggcgtgaacccgggaggcagagcttgcagtgagctgagatcgtgccactgccctccagcctgggcgacagagcgagactccgtcttaaaaaaaaaaaaaaaaamaaaagaaatgtatgtatgtatgtatctgtgatgtcatttgcctcttaagggaaaggtaataataacagcttcctaccaaaacacatttcatgatctcaagaaaattttctcaaacctggtggtgaaga

SEQ ID NO: 694036 - DNA, 596 bp, Homo sapiens
taatgactaaatagtaaatcataatataattaactgtgctttaattacttgacattttatctttttttataactctgatgatgtcactaatttggaagtaatgatccttaccacttaagtaactgtggctttctgtttttttatatagtgaatgaatttcctgtccttaaagctgacggtatcaaatatattatgatttttagaaatcaagtaagtagctttttatttgttacacgccacttaatctctttaagagttttattatgtaccaccttctcatctactgtgcagtcattttatatccacatctaacaaaattaacaatgatttctttataacttagaattttagaccatgcttaattttcctcagatgtctttttgcaataatagtaatagaattgggatctagataatgtccacacattgcttacagttgattrtgtcttaagtctcttaatttacaatagagaggtccttctctgccactttttgtttgagatggagtctcattctgtcacccaagctggagtgcagtggcaccatcttggctcactgcaacctctacctcctgggttcacgtgattctcctgtctc

SEQ ID NO: 694037 - DNA, 655 bp, Homo sapiens
gagacagagagagatttcagccagctccatgcagtctgagtggaggaaacttcctccaactcctaaycgataagtgcatattgaaagacaagagagatctatattcagtatgaatagcatcccagtggttctttcccaataggcctggactagccgactgcgtacagatcgagtccaggcatggagagaccatgcacagtggctcatgccagagtccactgttactcacttggacccagagggccatccgtcctgattcaatagcaaacactgtcctttgtctgaaagtcaggaaggagcccaggattccctgagtctctaaacagcaggcctgggaaattccaaaccaaggcctgtgcttatatgtttaattcaatgcatgttgtaacaatatataacaatatagaattactatggtaggaattgagtcagtcaattcgagttgatttttttaatcccctgctcacagcgagtacagtgcccaaggcgtttaatgaatatttaatgcattgaaggttcggaataacactttatagaaaaagttttagggtttaggataatatatggaaactgctatgttactctgttactttgtccacgtgataattaaaacacaaacgtacctgagacccatcattttaccttaaagtgatga

SEQ ID NO: 694038 - DNA, 655 bp, Homo sapiens
gagacagagagagatttcagccagctccatgcagtctgagtggaggaaacttcctccaactcctaatcgataagtgcatattgaaagacaagagagatctatattcagtatgaatagcatcccagtggttctttcccaataggcctggactagccgactgcgtacagatcgagtccaggcatggagagaccatgcacagtggctcatgccagagtccactgttactcacttggacccagagggccatccgtcctgattcaatagcaaacactgtcctttgtctgaaagtcaggaaggagcccaggattccctgagtctctaaacagcaggcctgggaaattccaaaccaaggcctgtgcttatatgtttaattcaatgcatgttgtaacaatatataacaatatagaattactatggtaggaattgagtcagtcaattcgagttgatttttttaatcccctgctcacagcgagtacagtgcccaaggcgtttaatgaatatttaatgcattgaaggttcggaataacactttatagaaaaagttttagggtttaggataatatatggaaactgctatgytactctgttactttgtccacgtgataattaaaacacaaacgtacctgagacccatcattttaccttaaagtgatga

SEQ ID NO: 694039 - DNA, 1804 bp, Homo sapiens
atttagtcttcggaatctcttacttaacatgatgcttgtggaattcaccatgtagttgcatacagcaatattttatttattcttttgctgaatattattccattacttttgccagtttgaatggatttctttcttacrgtcaagtaggccatgactaagggagataatgaagcatggaattgtcttttccagagaaaccacaggcatggaataagaattccctgaggaggccttttctgtcctttcttcatcaagctgcgacattattttcatattcagagaacttcagagcaacaccgagtttcgctgagtgggttcagagttccatatggcagctgtctcagttcctggcacgaggccaaaggatgacagttcttatcttctttcatgttcttttgcccaaccttagggaatatttctttaccctgtgattgctcatatctgaaaatcttactcacactctacaatcttccatcagcccaatgccatgtggtgttaaccctttgcatgctgcagtgttgagctgcaaacctgcccttttcttgcagtaatccaaagtgcccgtaaagtcttgaggcagacaatgttattttgtcatgtatgttcatataatatcagcaaatcattcattgtgtctttgtctatcttccagacatggtggttgctttgtagaatcaaaatttctgttatcttttttcataattagttaataaattcaagttgagctaaggagccaggtgaagccactgtgatttgggcaaggttcccatcgatagacatgtgctttcagacacaagatgtgctttcagacatacaattctgtttggccagagtagaatagaatgggtggtgcacactttcattatgtaagtacaccctgtttttcccattggtaataatatcttaaggagcgcaaggaaattcaggaaggaacatttcataatgtcaagaatacctactaagtaaattattctttagaataaatctgagagatggattgtcataccaaagccaatagaaactgaagcatgataatgtcaatgcatattttccctgatatactgtagatccgtagttttaaaagcctgcttttttattttgctagctgaatctcttttatcttgctgccactcttctcatgggatgcctcaaaatcctacagactcttgcctggcaatggggaaaaatgagggtgtttaccactaagaaagccaattaaagaagtaactgatggattatccagcccatagaccaaacaaaatggacgttacttcatgtcttcaaatatctaggcactggaatcagaaaatgaactcccaatcagacttccctgcttttcctgcagggaaaatgagatgcaaagcagagtcagagaaaaatagcaaatggccatttgtctgctgggagataaaaatcttactcagaggtcaagtcacattcaaactggttgatcccatggagactgactctgtcctgtgggacatttcttctctcctcctgtctctacctttcttttctctgtctctcccacccttcctctttttatttgcccccactcagggtgcagatacaggttttgtaaggctgaagtttaaatgacagtcaggggccagaggaagaggaagatattattataagtagcaatgaagtaaacatttatctaaaattaaaaaaaaataaatcaccagaaattgcaaatgtttaaatgttgaaagtccttcaacattattcaataccaaaaaagttacaccatgttttttaatgagctgctttatactttttcctacacgtttggctgtattcc

SEQ ID NO: 694040 - DNA, 1804 bp, Homo sapiens
atttagtcttcggaatctcttacttaacatgatgcttgtggaattcaccatgtagttgcatacagcaatattttatttattcttttgctgaatattattccattacttttgccagtttgaatggatttctttcttacagtcaagtaggccatgactaagggagataatgaagcatggaattgtcttttccagagaaaccacaggcatggaataagaattccctgaggaggccttttctgtcctttcttcatcaagctgcgacattattttcatattcagagaacttcagagcaacaccgagtttcgctgagtgggttcagagttccatatggcagctgtctcagttcctggcacgargccaaaggatgacagttcttatcttctttcatgttcttttgcccaaccttagggaatatttctttaccctgtgattgctcatatctgaaaatcttactcacactctacaatcttccatcagcccaatgccatgtggtgttaaccctttgcatgctgcagtgttgagctgcaaacctgcccttttcttgcagtaatccaaagtgcccgtaaagtcttgaggcagacaatgttattttgtcatgtatgttcatataatatcagcaaatcattcattgtgtctttgtctatcttccagacatggtggttgctttgtagaatcaaaatttctgttatcttttttcataattagttaataaattcaagttgagctaaggagccaggtgaagccactgtgatttgggcaaggttcccatcgatagacatgtgctttcagacacaagatgtgctttcagacatacaattctgtttggccagagtagaatagaatgggtggtgcacactttcattatgtaagtacaccctgtttttcccattggtaataatatcttaaggagcgcaaggaaattcaggaaggaacatttcataatgtcaagaatacctactaagtaaattattctttagaataaatctgagagatggattgtcataccaaagccaatagaaactgaagcatgataatgtcaatgcatattttccctgatatactgtagatccgtagttttaaaagcctgcttttttattttgctagctgaatctcttttatcttgctgccactcttctcatgggatgcctcaaaatcctacagactcttgcctggcaatggggaaaaatgagggtgtttaccactaagaaagccaattaaagaagtaactgatggattatccagcccatagaccaaacaaaatggacgttacttcatgtcttcaaatatctaggcactggaatcagaaaatgaactcccaatcagacttccctgcttttcctgcagggaaaatgagatgcaaagcagagtcagagaaaaatagcaaatggccatttgtctgctgggagataaaaatcttactcagaggtcaagtcacattcaaactggttgatcccatggagactgactctgtcctgtgggacatttcttctctcctcctgtctctacctttcttttctctgtctctcccacccttcctctttttatttgcccccactcagggtgcagatacaggttttgtaaggctgaagtttaaatgacagtcaggggccagaggaagaggaagatattattataagtagcaatgaagtaaacatttatctaaaattaaaaaaaaataaatcaccagaaattgcaaatgtttaaatgttgaaagtccttcaacattattcaataccaaaaaagttacaccatgttttttaatgagctgctttatactttttcctacacgtttggctgtattcc

SEQ ID NO: 694041 - DNA, 618 bp, Homo sapiens
tatatacaagaaatatcatataatttcaggtatatatggaatcttaaaaagtcaaactcaaaatagagagtagactggtgcttactaggggctggggaagagggtagacaggagaaggggagatgttggtcaaagagtacaaatctcagttagacaggagtacaatcccatcttccaggattttaaatgttctcaccacaaagaaaggataaaatatttgggatgatagatatgttaattagcctgatttcatcatccccaaatgtatacacatattaaaacattatattgtaccccataaatatatgcagttattatttatcaacccaaaatataaaagaamaaaaccaaaaaagctcatccggattatctactagttctagcatgtaacagcctcctatgtgccagcctaaaggaacagctgttgacattctggaagctgagatggggtctcctgttctgctcgggtcctgcgttgtgcgcagcctctctgggcttggtgtggttgtcctctgcttgcttgtgcagtctggctggatactaccaccagccccaggctgctttgacttgcccccatccctgaagccattccccttgcctgcagtaattctgcttccc

SEQ ID NO: 694042 - DNA, 1066 bp, Homo sapiens
tgtggatgtgaaaactttcctcgccctcagaagtgggtgtgttaagtgcaaccgttgaccgggggcaacttctgaacccttaggaaacagggatcgtttccttccctggccgtctggttccaagtcagggacgtagtggatattacaatttggggrcgaccacaggctgggccctgctgacggccttgcatagttggcttgtttagagtggagcagatgtcagggagtctgactgagagtggattaatgagggcacaaaggctgaaggttcacagtgctcggggggtcgggggtgggaggggtgaggggatagggtggggctgtgtgtgtgcaggctgcaaagccggcccaagactgactcacctgtcatgggagccctggaggggtctgcggggctgtcatcatttggaatcagaaacaagacatcttggctgagttgtgccagtcagggttcaagttccctgtactcagttggcctccttggcctcggtttccccgcctctaaatggaaggatgtagcagctatggtcgtctgcttcccagcagccatgctgccgttctctctcctacagtggcctggcttcgttcagggatccaccgtcgtccaggtggtccaagccctggctccagcctagtcaatcaaggcagtcccatttctccaggggttcatgtgtgcccagctgtgaccagtgagaactgaagagaggcggttctgggacattttctttgttctgaaaagaagatgcacctggagccgtgtccccatcctgttgtgtgtagtcctgtctgcatgtcattcctggggccctggcagccatcttggaaccatgaggggacccttcacagccaagccaatgtgtcaaggtggtggagcagcagggggtttgggaagaacctgattccttcataaccattgaccaaccctaaagctccctcgcccctgggtttcttggcaggccagaaattcaggtcctcttcacgtatgccactttgagctgggctccctgctgctggcagctgaaatcctatgagatagaggaggagagagtgaggagggtggggatgg

SEQ ID NO: 694043 - DNA, 1292 bp, Homo sapiens
tatctccttgacacagcccccaagtgacttctgggcctcttaaggctcacaatccctgaactgaagcatctcgctctataatgtctgaactcatccagaaaagtatttctttctgtcttttgtttttttkttgttgttgttcttgagacagagtcttgctctgtggtccaggatggagtgcagtgatgcaatctcagctcactgcaacctctgcctcctgggttcaagtgattctcctgcctcagcctcctgagtagctggaattacaggcgcacaccaccatgcccagctaatttttgtatttttagtagagatggggtttcatcatgttggccaggctggtctcaaactcctgacttcaagtgatctgctcgccttggcctcccaaagtgctgggtttacaggagtgagccactatatcccaactcttttttttcttttcttttttttagagattagctcttgctctgtcaccaaggctggagtgcagtggcaccatcatagctctctgcaaccccaaactcctggtctcaagggatacccccactcagactcccaagtgcatgagccactacacctggatatttaaaaataaattttgtacagctggggtctcactatgttgcccagcctggtctcaaactcctgcctcaagggatcctcctgcgttggcctcccaaagcgttggaattacaggcataagccaccaggcccagcctcagaaaagtatttctaagagtagctgaagtctgggggctgatcagaccatgggcaatttgaaagaatgtttctacttcctctttcgttgctaagaaacacactgagaatgactaaatttataactttcaaaaatgcaaggagacttggtggtgaggttttaaaaatctactcaaataataaatttttaagaaatttaaaaatcccttttaattctaatatggtaaacttgaacgccaaaagttttcggaagaaatccaaatcaactgacctatctgcctatgctgacctatctttatctgacttgttaataagatttcatcaagaattttactttcataaattttattttctagaaaatggaaccagtgtctccccaaagcctatacactatggaaagagtctcagcatcttagtagccactactccaggtaacaattgaagcccctttttcgatcacttggaactctgaactcacctgtccacagatatttgccctatttttctttaatagttcagaagagtgttcatcttccctttgcttagtggaaggggtactcttttggtgtgattca

SEQ ID NO: 694044 - DNA, 1557 bp, Homo sapiens
gcaagaataaatgaaatttgagcatgataggaaatgttagtcccattttaggtgcaaatacaaaagcgtagagctgcaaagggacttaggatcttgaacattcccaagtcagacacggctgagtttgagggatgaggtcgagagctcatctgcctctccaggcagctgggctggctggtggaggtgggactcagtcacttcctagctgtgtggctttaggcaagtttcttcacttttctgagccaattgcctcgtgcctaaactgaggatcttagtcatccccctgtgaggatgttgggaagacagatgagatggcggtggctacagagcatgcagcatctggccggctgctggtgggtgccctgcacatagtagctgctagtattattaacccgtctcttgccagaaggatttgcaaggtatcaggagaattgttgtgccttaaatggctcaggaaactggcagttgggctgagagctggccttgctcttatttagtgccaatgccctgcccacccctgccagcatctgtcctgagttaggggacctcaccagcatcctctctatcagtagctgcagtttactctgatgcactgggatcagctccagactgcgagttccctctccctccctcagccctgtaatgacatggttggaggccattattttacagaaaactcttagaacttacagagtcttttacaagaccaaattgatgcccaactgaaggatcctgtaggtgctaaggtttcaaatctgggacttaccttctaagccttcattaagtcatttcattaataatcacctggcaagggcttgttttagggcatccaggcttctaggctggtcagtggaagagcagataagcctccaagaagctccccagaccttcctcctagtcagggaagccaaagacatcaggcaggagggaagtttctggcatgctaagtaccacgatgcaaataaaatgaggttttgcgatggggaggcggtggcgaaagagatggcagggagtcccttagcgagagtggtcagggaaggcttctcaaaagagggggcattttttttaagccctgaataatgggagtgagccagccataagtgggccgggaggaaagatgctcaggaatagagacaaggccagaattatagcaaggcatgagaggtggggaagcccaggagacacagtgtgctcagagtcaacgcatgaggcttrgattttattctagttgacgtttggttttaagcaaggaaaaaataaaatctaacttggcttttaaacagacaattccctctgctgtgggagaaataggttagtgtggaggcagggaggccagtttacgaggctccggtagtgatccaaggaggttggggggtaggctggagtggcagaggggagccgggtgccagcatgttttgcggatggacctgatggaacttgctgccaggtggacgggagacacctctagcacttttcaagcggttgtaaactatttatagcagcttctggcactcggcagttctcctgggtcttggtgatgacagagggagagccgcc

SEQ ID NO: 694045 - DNA, 1557 bp, Homo sapiens
gcaagaataaatgaaatttgagcatgataggaaatgttagtcccattttaggtgcaaatacaaaagcgtagagctgcaaagggacttaggatcttgaacattcccaagtcagacacggctgagtttgagggatgaggtcgagagctcatctgcctctccaggcagctgggctggctggtggaggtgggactcagtcacttcctagctgtgtggctttaggcaagtttcttcacttttctgagccaattgcctcgtgcctaaactgaggatcttagtcatccccctgtgaggatgttgggaagacagatgagatggcggtggctacagagcatgcagcatctggccggctgctggtgggtgccctgcacatagtagctgctagtattattaacccgtctcttgccagaaggatttgcaaggtatcaggagaattgttgtgccttaaatggctcaggaaactggcagttgggctgagagctggccttgctcttatttagtgccaatgccctgcccacccctgccagcatctgtcctgagttaggggacctcaccagcatcctctctatcagtagctgcagtttactctgatgcactgggatcagctccagactgcgagttccctctccctccctcagccctgtaatgacatggttggaggccattattttacagaaaactcttagaacttacagagtcttttacaagaccaaattgatgcccaactgaaggatcctgtaggtgctaaggtttcaaatctgggacttaccttctaagccttcattaagtcatttcattaataatcacctggcaagggcttgttttagggcatccaggcttctaggctggtcagtggaagagcagataagcctccaagaagctccccagaccttcctcctagtcagggaagccaaagacatcaggcaggagggaagtttctggcatgctaagtaccacgatgcaaataaaatgaggttttgcgatggggaggcggtggcgaaagagatggcagggagtcccttagcgagagtggtcagggaaggcttctcaaaagagggggcattttttttaagccctgaataatgggagtgagccagccataagtgggccgggaggaaagatgctcaggaatagagacaaggccagaattatagcaaggcatgagaggtggggaagcccaggagacacagtgtgctcagagtcaacgcatgaggcttagattttattctagttgacgtttggttttaagcaaggaaaaaataaaatctaacttggcttttaaacagacaattccctctgctgtgggagaaataggttagtgtggaggcagggaggccagtttacgaggctccggtagtgatccaaggaggttggggggtaggctggagtggcagaggggagccgggtgccagcatgttttgcggatggacctgatggaacttgctgccaggtggacgggagacacctctagcacttttcaagcggktgtaaactatttatagcagcttctggcactcggcagttctcctgggtcttggtgatgacagagggagagccgcc

SEQ ID NO: 694046 - DNA, 1146 bp, Homo sapiens
gatctcggctcactgcaacccccgcctcctgggttcaagtgactctcctgcctcagccttccgagtacctgggattacaggcacacgccaccatgcccaggaaatttttgtattttttgtagagacggggtttcaccatgttggccaggctggtctcaaactcctgacctcaggtaatctgcccaccttggcctcccaaatgctgggattacaggcatgagtcatcacacctggccctatcacccttattctttttttttttttttttttgagacagactttcgctcttattgcccaggctggagtgcaatggcacaatctcggctcaccacaatctccacctttcaggttcaagcgattctcctgcctcagcctcccaagtagctagcatcacaggcatgcaccaccatgcctggctaatttcgcatttttagtaaaggcggagtttctacatgttggtcagcctggtctcgaacttccaatctcaggtgaactgcctggctcggcctcccaaaatgttgggattataggcatgagccactgtgctcagcacccttattcttaagttagtttggttctctaaggttcccagggctggcagcctcactgaagtagaaatctttgtattgttcctacccaaagactggtttttcttttctttctttctttcttttagaaacagggtcttgctctgtcacccaggctggagtgcagtggtgaaattgtagctcactgcagcctcaaactcctgggctcaagtgatcctcctgcctcagcctcccgagtagcaaggactacagatgcatgtcactaacctggctaattttttttttttaattttttgtagagatggggtctcactatgctgcccagatagtctcgaactcctggttttaagtgatcctccccttaagggctggttttcaatctgtcgrtaactggctattacaaaacaacccaggcagcaggatgagtagcaacttgctggccacaggtctacttacaggcactttcctgcctccctatgaaggttgtgagtataaatcttggctggatgcagtggttcgtgcctgttaaccccagcactttgggaggctgaggcaggcggatcacttgagtccaggaatttgagaccagcctggccaa

SEQ ID NO: 694047 - DNA, 1329 bp, Homo sapiens
taccttcttgccagtaattaggaaaaagattgtgagtaagaagctgcaaacaaccataatgtatgcagttgggtgggctttttattagttgctgatcagaatagcaataacacttgacactgtgctttggagcagttaataaaaggtctgcctggrcctcccaaagtgctgggatcacaggcatgagccaccgtgcccagcctaaaacaggcctaaaacaggcggatcatgaggtcaagagatcgagaccatcctggctaacacgctgaaaccccgtctccactaaaaatattaaaaaattggcctggcatggtggcggtgcctgtagtcccaaatactcaggaggctgaagcaggagaatggcatgaacccgggaggcagagcttgcagtgagccgagatcgcaccactgcactccagcctgggtgacagactgagactctgtctaaaaaaacaaacaaacaaacaaaaaaaccctgttttaattacagtaaaagttttagtcaattcctccactctcccttttcctacggtgtttctgggagagaagacacaatgtttctgcatttgctgaaaataattaacatttgtaacatcagcacttgaagatcacaaaacattttcataaacactaattagactttcttacacacatggaaggtaatcaggtgatcaaaagaaatgtcaactgatttagggagtttggcagactgtgttctgcatattagagagaggtgaagaatcacctgatagaattatgtgaaatttcagagaactccattaaatagaatgaagttactggaattgaaatattcaggcctgtttttttgttttttttttttggacagactcttgcactgttccccagattgaagtgcagtggcaccatctcggctcagctcactgcaacctctgcctcccaggttcaagggattcttctgcctcagcctccccagtagctgggactacaggcgcccaccaccacgcctcgctaatttttgtatttttagtagagatggggtttcactatgttggccaggcttgtctcgaactcctgacctctagtgatccgcccgcctcagcctcccaaagtgctgggattataggcgtgagccactgcacctggcccaggcctgtattaatatgaaagttgttttcatgtattttccctttcgagacccatcttagcttccaacaccccactggagacacccatctcctctgtgtcctaaatcctattagggtcaggaaatgctccaagatccaaaggataacattaccagcatattctgtgagaaacgacaaacaaaacgctgctaattttattatc

SEQ ID NO: 694048 - DNA, 1329 bp, Homo sapiens
taccttcttgccagtaattaggaaaaagattgtgagtaagaagctgcaaacaaccataatgtatgcagttgggtgggctttttattagttgctgatcagaatagcaataacacttgacactgtgctttggagcagttaataaaaggtctgcctgggcctcccaaagtgctgggatyacaggcatgagccaccgtgcccagcctaaaacaggcctaaaacaggcggatcatgaggtcaagagatcgagaccatcctggctaacacgctgaaaccccgtctccactaaaaatattaaaaaattggcctggcatggtggcggtgcctgtagtcccaaatactcaggaggctgaagcaggagaatggcatgaacccgggaggcagagcttgcagtgagccgagatcgcaccactgcactccagcctgggtgacagactgagactctgtctaaaaaaacaaacaaacaaacaaaaaaaccctgttttaattacagtaaaagttttagtcaattcctccactctcccttttcctacggtgtttctgggagagaagacacaatgtttctgcatttgctgaaaataattaacatttgtaacatcagcacttgaagatcacaaaacattttcataaacactaattagactttcttacacacatggaaggtaatcaggtgatcaaaagaaatgtcaactgatttagggagtttggcagactgtgttctgcatattagagagaggtgaagaatcacctgatagaattatgtgaaatttcagagaactccattaaatagaatgaagttactggaattgaaatattcaggcctgtttttttgttttttttttttggacagactcttgcactgttccccagattgaagtgcagtggcaccatctcggctcagctcactgcaacctctgcctcccaggttcaagggattcttctgcctcagcctccccagtagctgggactacaggcgcccaccaccacgcctcgctaatttttgtatttttagtagagatggggtttcactatgttggccaggcttgtctcgaactcctgacctctagtgatccgcccgcctcagcctcccaaagtgctgggattataggcgtgagccactgcacctggcccaggcctgtattaatatgaaagttgttttcatgtattttccctttcgagacccatcttagcttccaacaccccactggagacacccatctcctctgtgtcctaaatcctattagggtcaggaaatgctccaagatccaaaggataacattaccagcatattctgtgagaaacgacaaacaaaacgctgctaattttattatc

SEQ ID NO: 694049 - DNA, 626 bp, Homo sapiens
acctttagtgatatcttagagaaatatgagattgttcaaaaaacagtacagaactgaacctgggaatataatactgtgatttgctttgtttcttcattgttaattaaataatgctaacatagtcattgtattagtcaaggttctttacagaaacagaactaatatgagagatatatatgtataccttatacactattcaaaacaataagatttagaactgtgttttttattttcttcccaacatatttgctgaatattttaccatttagggtattgtggggaaatttattgtaattaaaatggttccaattactctcgatttctcttaacatgtttgattatatattatccattcctttctaagacttcctttgaactgtactgaatgtgtgatatctgacagggtaagctgatattcatgttaacagatctcagctgatgttccatagttattattatgagtgacaactgttacaagtcatatttttaaaaattaggatatattaagggaagaatataaacataaatattaayattaaattttatatgttgtctgtcatgtttaaattatagtgaaataaatctaatttttcctagtttaaatatagaatttaaagggattgctg

SEQ ID NO: 694050 - DNA, 1614 bp, Homo sapiens
tatggtattgtctctagaaatatgcagataagtaccagataaaacaactgagcacttaaagaagctgtttctggggattcaggagtaataggttggaagtgggaagtggaactgacatttcttaaaagcactttgtcccatttggttttttttttaaatacatgtaatacatataaagagcttttttaaaaactttgacagaatgatattgtcttgagaaatatgtagataagtaccacataaaacaactgaaccacatttaaaaagaaaagacgttgactgggcgtggtggctcacacctgtattcccagcagtttgggaggtcaaggcagccagatcacttgaggtcaggaattcaagaccagcctggccaacacggtgaaaccccatctctactaaaagtacaaaaattagccaggcatggtggtgcatgtctataatcccagctacttgggaggctgaggcacgagaatcgctttaacccaggaggttgtagtaagccgagattgtgccactgcactccagcctgggcgacagagtaagactccgtctcaaaataaataaatagactcaaatggttgcctcagtgatgaaagtcaagtaagatgagaacgagagtaaccattgaatttgacatgaggataacactgagaaatttgaacagattatagtgaaaagcagggaggggaaacaaatgctgacattttatcattaggttccatatgaagcatatcatattcctcagcccaaatgatttcatgtctaagaagaagaagtttttgtttctatctcgcagtgggcctgggaagagcaggaacttcctaagagcagcaccacttcacaaggcctctcccattcaggaaccatgacaggcaggggcatcctaggggcatcctagaggttctgttctctaaaccttgggaaatttagagatcctgtctttcattgtgtaagactgatgacttggtttctgtcaaaaagacccagatgctatccaatcaaaatagtgtctgttatgcaatagcttgagctccaagtactttcttcttctttcccccagaccctttctttwcagtatggctccgttagttgcaagtaaaagctctttttcccccctgaaaacaatgtcttatgagaatatgaagcatgagacaaaagtatcattgaaaggggctgataagagaagtgaaatgaggaaggggaaatagattataggtgatatgatcagaaagttaagcatgaagaggaaaatgggacaggagcctttcaaactaggaaggctaaggaacgatgggtttgaatgaagccacaaattctatttcagtctatgtgctgatgagaagacagggagtaagaactaggaaagctcagtttaagaggggaagacaagcttggaaacaaaagatgacaataaacacatctgcttctgaaactagggctcagatcaggtgtctgccatgagaaagggaccaagtgtcacaggatacacctggcccatcttccaggaaagcctacttctcttggaggggacaaaggctaatcaggagaagccctagaagtgaggttgcatctgcttgatgcaatgtctgaaagacattgcagaaggtgcagccc

SEQ ID NO: 694051 - DNA, 990 bp, Homo sapiens
tgggctgggtagtggccggtttctggatgcagctgcacgctggctggacttagcactgcagctcctcctccttggtccgccgggagcctcctgccaagctctgggcactggcatgggccgtggagctgaggacctcctcaaaactgcctccattagggttcgtaccgcctactttcgtctgaaatgagcagatccacaaaaatgcagttagttgttactatcatttttgtaatgtttttataagaataccaaaagctggattactttcaaattcagaaatactttctatctttagagacaaaagaatgcacagaagtttgtttcctttagtagagtgctagaatattattcatacttgggttctcggataggattccaaactttaattttgcacacttttagcaaccctctctttatctctcctgtatctaagattttaatcccttcaggagcataatcggatccatggacttggaacagctatcyccactcacccagagaactgatctaatcaaaatggaattagattttttattaattcctccaattgtacaaatgtataaacatccttacatgacctaaacttagatttttctacttgggagttagcagggcaaactggatttctgacaaatgtcttttgaaaagtcagagtggctcaatggaaaatgatttctggtttctgctttgaaaattgaagatggatcaagtcttaatcactggtgatttcacatcatcttaggcaactgccttttgatatggtttggctgtgtcctcacccaaatctcatcttgaatggtagttcccatagtcctcataatcctagcaaggaggaacctggtaggaggtaattgaatcatgggggcggtgacctccatactgttctcgtgatagtgagtgagttctcacaagatctgatgcttctacaaggggctttcctccttttgttcagcacttctccttcctgccaccatgtgaagaaggacatat

SEQ ID NO: 694052 - DNA, 630 bp, Homo sapiens
atgttctaagctccaccttaatttatgttgtttagaatatatcagtaaaagacagctctacttgactgtgaatattattgaaattgtttataaactgttttagaagtaggtcaagggaacaagtatagaagacatcaggttttctacaatgaaagccagaaatacagaaacttaggttccttacagatggggtggttcctccagggtctgtgtagaacttcactccaggggagccaactggattctcaaccaaagagtgagctgctcagccctaagcttttattcctgacctgaggtcatgtggccttatgcacacaccaagggtttctgctgtgtcattagcatttcagtgaccaaactcaaaaccatgcagacaaacaacagctctaytttcaatgagaagatgtaaaatatgtgtcacaaatatcctcagctcctccaatttcctacatttcaaatataagattaaagcatttgggatactcttcctatttcaaaccattatttgtactcttgaaagggactgtttaatacacacaaaatagatgcattgtgggtaacactgcaagcaagaaaaaaacacccccgacaaaaagtcacaagaacacagcagccacaaatttgggaagg

SEQ ID NO: 694053 - DNA, 1013 bp, Homo sapiens
gtaaatctgttccatagaggtagaagagggccaggttcctggagaggggatctggggtgtaactgagcttcacataaactttcagtctatcctccagttggcagctttgccctgaagtcctgctatcagaggtacctactatcccgagatttaagtatttccaagattcaccagagctaagcagcttccttccctgcaagctcacagttctgttttctctggtctgccaaatcaattgctatttatccatctgctttcttgactctaaagttttgttgacatctctcatctgctgttatctgctctcccattctctttgttcttgtagatttatggcttttaagcatttattttcattttggcgtgttacagaggagcaatagtaaacatgtgtgtttaatctgctacgtgtagccagaatttccagctgcttatctgaaactaggtttggatgagagggaaggtggaaaggacgtaaaatatgtacactggagaggtgttattaatggttttggttaaagaaaaaaatggaaatttgaaggtacaaaaaacactcttttcatgtttcttttgttctgcctaaagccctgattgttatatctttatcatctgttcaataaaagcaacatttgaaactaacaatatagcccttaagaggccctgaaataaagggacctccaaaatagacacctttaagcaagacagtatttataaaaacccattataaatttcaaayagacacctatgttgggttatgattcatcacttaaaaacatagagattacaggttgccattttacccacaaaatcaaaggcatacgttcttacagttagactttctctttaatttactcttagatgcaatcagaaagtgttatttaggtattagtcatacttgctcatgcataattcctcttattgatgagagagctcaattcatgactttaagggatcaggtgggatttagccataagaagtaaccaaaaaggatattgaattgaatttaatttcaa

SEQ ID NO: 694054 - DNA, 1013 bp, Homo sapiens
gtaaatctgttccatagaggtagaagagggccaggttcctggagaggggatctggggtgtaactgagcttcacataaactttcagtctatcctccagttggcagctttgccctgaagtcctgctatcagaggtacctactatcccgagatttaagtatttccaagattcaccagagctaagcagcttccttccctgcaagctcacagttctgttttctctggtctgccaaatcaattgctatttatccatctgctttcttgactctaaagttttgttgacatctctcatctgctgttatctgctctcccattctctttgttcttgtagatttatggcttttaagcatttattttcattttggcgtgttacagaggagcaatagtaaacatgtgtgtttaatctgctacgtgtagccagaatttccagctgcttatctgaaactaggtttggatgagagggaaggtggaaaggacgtaaaatatgtacactggagaggtgttattaatggttttggttaaagaaaaaaatggaaatttgaaggtacaaaaaacactcttttcatgtttcttttgttctgcctaaagccctgattgttatatctttatcatctgttcaataaaagcaacatttgaaactaacaatatagcccttaagaggccctgaaataaagggacctccaaaatagacacctttaagcaagacagtatttataaaaacccattataaatttcaaatagacacctatgttgggttatgattcatcacttaaaaacatagagattacaggttgccattttacccacaaaatcaaaggcatacgttcttacagttagactttctctttamtttactcttagatgcaatcagaaagtgttatttaggtattagtcatacttgctcatgcataattcctcttattgatgagagagctcaattcatgactttaagggatcaggtgggatttagccataagaagtaaccaaaaaggatattgaattgaatttaatttcaa

SEQ ID NO: 694055 - DNA, 2850 bp, Homo sapiens
tgagaatgttgcatgtgtactaaatgggtaattatgttgatgctggaaaacggtattttagttgtgggaaagagcatatacaaatgcacagtttggccgggctcatgcttataatcccagcactttgggaagctgaggcgggtggatcacctgaggtcaggagttcaagaccaatctggccaacatgggaaaccccatctctacaaaaatacaacaattagccgggcatgatggtgggtgcctgtaatcccagctacttgggtggctaaggcaggagaatggtttgaacctgggaactggaggttgcagtgagcctagattgtgccgttgcactccagcctgggtaacagaacgagactgtcacaattgaaaaggtaaatgtgagttggaaataacattatgaacatatgatttattttcaatatatattactttaactactaaaaaggcctagaaacaatgagcactcctagaacccagattattatttctaaatactatttccaaaggaaccaactctccttggagaaatgactgatttcctgtctagagcaagaagtgaataaaatgaacctgagacatcctgcacattagaaataaaaggagctattaaagattattgttgtcatgtcaaaggagtcaggaatcatcatgaaaatgttcctggctgggtgtggtggctcacgcccgtaatcccaacactttgagaggccgaggcgggcggatcaccttaggtcaggagctcaagaccagcctgaccaacatggtgaaaccccatctctattaaaaatacaaaacttagcgaagtatggtgcacacctgtaaacccagctacatgggaggctgagacaggagaatcacttaaacctggaaggcagaggttgcagtgagccgagattgttccactgcactgcagcctggaggacagagtgagactccatctcaaaaaaaaaaaaaaaggaaaatgttcccactggactaagatgggacaatctaaccattaatatgaataatatttgtaaaggattgaaacactgcaaatatatttaaaatcgtgaatttgtaatgatacaaaaacacaaccatgggaccaccattggaagatgctcagtgaactaccaaaattttgaaaactggtgcataagagaacaaagccaggtattcatcctgtctttattgtctgaaatatatctcaggataatcatatagttgatgagttttttacagacatatttgactgctacgtagaaaaggaatggaagatttggattactattagatgaatgttattattaggttatttaacatttctgtgtctttacttaagttttaactgttgcatccatcatagcctaagtaggtgcattacagttgtctacctctagtgtgtttctgtttctgcttgcgtcttctgtttcttttatgattgttgttatatcatttggttcataagtattcctaatatatttagtgtgatgtgcaccccatagtattgtaaactgccctttattgtggcatttatttttggctagctttcaaccttgctgatattaagattcatacatctgctttccctttgatagcatttgtctggtatacttttgatcaccctgttattttgaactgttctgaatcatttcatttttaagtgttttgcgtgtgtgtgtgtgtgtgtgtgtgtgtgtgtgtgttccaatctgaaaagtttgttttgtttgcttctttgcctttattaacaaaaagtcactcacagcatttcaacattgttcaaacacacaaatcacagccaatggccccaacaaataaccacttaatgtctagatcaaaaccatgctgcagggagcagtgttcctctggttctgttccttgagcatctcagtttcttcttttcttgtatctcactaactcccctgagagttataaaatgtgcagaaacaaaatcaccctagaggagtcaccctactttgttaacaaggaagagtatttgatgcctgagaaacaaatagaagtgcactgcttgttgccaccccagggatgccagtctactcactacacttgtctgttcaatcctcagcctgtccatcccctaggtccttgcaaggcctcaggagaaagaaaaaagcaaggaagacgctccaagcatggcagtatctggcactgggggaattagtgctgaccgaaaccatgggcagaactctgcagtaataaggcaggctctccttgagggtagaaggaaggaacggagagaaggtttcaagaaaggatctatgctccatttataagcagtttggctaagatgccacctagaaaccttaacaatgaatcctgctcttattcctggagctctaggaaatgttaaattaataattaggtggcaatcagatgtaaaacttgattaaaaccaggcctcaagggcagaaatatcatctgtgtttgtctcaccgagcrtctggtatggggctcaatatcacttttaaagaataaaatttatccatgagataatcatttggaaatccacccttccagaacacctctctctttcctggaaaacttggtaatacagcttaggaaggaccagtggcatgccccatagatatgaacttgggccatgttgggtatcagaaattcccaggaaaggaaataaaagggctgggacctaaacaattagcatgaactggacacaatgtcctgattttagctcctctttgtcttcatgagtctaatatgacttaccctaattggccaaagagtatctcttttacacctattgtcttaatctagtaaaaatggctttctgttaattttgtttttattttttttcttgaatacatccaaagcctcatttctgaa

SEQ ID NO: 694056 - DNA, 580 bp, Homo sapiens
gtaacagcaggcagactggtgaaagaagctaaaatttgaagaacaacaaaatgctggcaataagtttcctgggtggtttcttttattattcctttattctctgacaggatgtcctagcaggctaaattaagaaaatgcatggcaggtgttaagaaaactttsaaaaggattctttctggccagagagcttgtggagaaaagtctctgccagccctagagtgtgggaatggccattttttactctctctctctctttttctctgtgtgtgtgtgtgtgagtgtgtgtgtgtgttttctctttttcttttctgtccttgccctgaagtaagcatcagttatggaattaaactgcagctgtgcagtttgaaaaatttgagcacctaaaactgtaagaaaaacttgtctctccgaatacagaaaatgggatgcctattgtactaagagtgtgagaggaattatttcaaagaaatttttttctttttatatttttttttttcgtagatgcttaatagttaatgtggaccgtttgtgtggaagcatgcaatggtatggaaaactgaaactctgaaagaaatctgca

SEQ ID NO: 694057 - DNA, 580 bp, Homo sapiens
gtaacagcaggcagactggtgaaagaagctaaaatttgaagaacaacaaaatgctggcaataagtttcctgggtggtttcttttattattcctttattctctgacaggatgtcctagcaggctaaattaagaaaatgcatggcaggtgttaagaaaactttgaaaaggattctttctggccagagagcttgtggagaaaagtctctgccagccctagagtgtgggaatggccattttttactctctctctctctttttctctstgtgtgtgtgtgtgagtgtgtgtgtgtgttttctctttttcttttctgtccttgccctgaagtaagcatcagttatggaattaaactgcagctgtgcagtttgaaaaatttgagcacctaaaactgtaagaaaaacttgtctctccgaatacagaaaatgggatgcctattgtactaagagtgtgagaggaattatttcaaagaaatttttttctttttatatttttttttttcgtagatgcttaatagttaatgtggaccgtttgtgtggaagcatgcaatggtatggaaaactgaaactctgaaagaaatctgca

SEQ ID NO: 694058 - DNA, 580 bp, Homo sapiens
gtaacagcaggcagactggtgaaagaagctaaaatttgaagaacaacaaaatgctggcaataagtttcctgggtggtttcttttattattcctttattctctgacaggatgtcctagcaggctaaattaagaaaatgcatggcaggtgttaagaaaactttgaaaaggattctttctggccagagagcttgtggagaaaagtctctgccagccctagagtgtgggaatggccattttttactctctctctctctttttctctgtgtgtgtgtgtgtgagtgtgtgtgtgtgttttctctttttcttttctgtccttgccctgaagtaagcatcagttatggaattaaactgcagctgtgcagtttgaaaaatttgagcacctaaaactgtaagaaaaacttgtctctccgaatacagaaaatgggatgyctattgtactaagagtgtgagaggaattatttcaaagaaatttttttctttttatatttttttttttcgtagatgcttaatagttaatgtggaccgtttgtgtggaagcatgcaatggtatggaaaactgaaactctgaaagaaatctgca

SEQ ID NO: 694059 - DNA, 667 bp, Homo sapiens
tctttctttctttctttctttctttctttctttctttctttctttctttcttctttctttcttttctttctttcttctctctctttctgtctctttctctttctttttcttttttctctttctttttctctttctttttctttcttttttcttccttctttttccttccttcctccctcccttccctcattcctgccctctctccttctcttcctcctttccctccttccctccatcccttcctcccttcctcccttcttttcttcctgtttcargttgaggttaccaggcacagtggctcacacctgtaatctcagcactttgtgaggccgaaaaggggggatcacctgaggtcaagagttcagaaccagcctggccaacatggcgaaaccccatctctattaaaaaacaaaaattagctgggcatggtggcatgtgcctgtaatcccagctaatctggaggctaaggcaggagaattgcttgaacccggaaggcagaggttgtagagagctgagatcacgccattgcactccagcctgggcgacatgagtgaaactccatctcaaaataaataaataaataaataaataaataaataaataaatagagacatgcagtgtatacaatacagcacacaaaatcttaattgcatagctcatttaattt

SEQ ID NO: 694060 - DNA, 667 bp, Homo sapiens
tctttctttctttctttctttctttctttctttctttctttctttctttcttctttctttcttttctttctttcttctctctctttctgtctctttctctttctttttcttttttctctttctttttctctttctttttctttcttttttcttccttctttttccttccttcctccctcccttccctcattcctgccctctctccttctcttcctcctttccctccttccctccatcccttcctcccttcctcccttcttttcttcctgtttcaagttgaggttaccaggcacagtggctcacacctgtaatctcagcactttgtgaggccgaaaaggggggatcacctgaggtcaagagttcagaaccagcctggccaacatggcgaaaccccatctctattaaaaaacaaaaattagctgggcatggtggcatgtgcctgtaatcccagctaatctggaggctaaggcaggagaattgcttgaacccggaaggcagaggttgtaragagctgagatcacgccattgcactccagcctgggcgacatgagtgaaactccatctcaaaataaataaataaataaataaataaataaataaataaatagagacatgcagtgtatacaatacagcacacaaaatcttaattgcatagctcatttaattt

SEQ ID NO: 694061 - DNA, 1706 bp, Homo sapiens
aatcgcttgaacctgggaggtggaggttgcagtagctgagatggtgccactgcactccatcctgggtgacagagtgagactccgtctcaaaatgtacatatatgtaaaaaataaaaataaaagtataagcctaaggaaagatgtggcatttactattgagctttactgaacatgtcactatatacacttcaggctttgcttttttaaatttttgtgttgatacatgatattatgaggtacatggatagaatatacagtgatcaagttagggcatttagcgtatccatcatcttgagtatttatcatttgtatgtgttgagaacatttcaagacctcttttctagctgttttgaaatgtaaatacattatatattatttatatatataaaactctcagacaaaacttgctaagtttgttctttgtatattttatatattttctgatatttatttgatggattcatttctgataaaagtatattaaaaatatctctccagccagacgtggtggctcacgcctgtaatcccagcactttgggaggccgaggtaggtggatcacctgaggtcagaagtttgagaccagcatggctaacatggtgaaaccctgtatctactaaaaatacaaaatttagctgggcatggtggtgcatgcctgtaatcccaactactcggtaggctgaggcaggagaatcgcttcaacccggcaggcagaggttgcagtgagccgagatcatgccattgcactccagactggacgacaagagcaaaactccatcttaaattatatatatatatatatatatatatatatatatatatayatatatacacacacacacacacacacacatccataattataaaaatttttctttataatttgatcagttattgctttatatatttcaaagttatacaatcacagactacaagttgacaattgccaaaattattccttgtgacactttttagttaagttttgccttctattaatattattgttcccattgatatatatttcagtacctttattttcaagcattgtgtgtggtatagttttgagagtgtcactcgtaagcagcatgactctatttttcagtgactttgtaggtaaagtttaatctagttctggaacagtggttaaaagcatgtgttagaccacctgagtcccagtcctggcacttccgctcatctgtgtgtgatgggcagaagtgccagggtaattttcctgggtaatctctccacaccttagtcctctcatctataaaaacattgaggataatattagtatctcatcatagggttattgtaggaattaaataacataaagttcttagagcagtgcctagtatcagtaactgttagctgttgaaaaaaattttttgttgtgattattgatgtatttagtcccatttctaccattattttctgttttctctttaccatcctctttcccttgtttactctctcctttcctgtcaatattctctttgtatttcctcttttttgaattatctatgcgttggatttctattcttttagtgattacacttatacgcctgaagccaccaaataaatcaatataattaacatttccatcatccctgtcctagttgtattttctcagattctgtatttgtctatgtggcatccattaattactaggtcaaataatggccaagttgcttacatctgccctgtgatc

SEQ ID NO: 694062 - DNA, 1706 bp, Homo sapiens
aatcgcttgaacctgggaggtggaggttgcagtagctgagatggtgccactgcactccatcctgggtgacagagtgagactccgtctcaaaatgtacatatatgtaaaaaataaaaataaaagtataagcctaaggaaagatgtggcatttactattgagctttactgaacatgtcactatatacacttcaggctttgcttttttaaatttttgtgttgatacatgatattatgaggtacatggatagaatatacagtgatcaagttagggcatttagcgtatccatcatcttgagtatttatcatttgtatgtgttgagaacatttcaagacctcttttctagctgttttgaaatgtaaatacattatatattatttatatatataaaactctcagacaaaacttgctaagtttgttctttgtatattttatatattttctgatatttatttgatggattcatttctgataaaagtatattaaaaatatctctccagccagacgtggtggctcacgcctgtaatcccagcactttgggaggccgaggtaggtggatcacctgaggtcagaagtttgagaccagcatggctaacatggtgaaaccctgtatctactaaaaatacaaaatttagctgggcatggtggtgcatgcctgtaatcccaactactcggtaggctgaggcaggagaatcgcttcaacccggcaggcagaggttgcagtgagccgagatcatgccattgcactccagactggacgacaagagcaaaactccatcttaaattatatatatatatatatatatatatatatatatatatatayatatacacacacacacacacacacacatccataattataaaaatttttctttataatttgatcagttattgctttatatatttcaaagttatacaatcacagactacaagttgacaattgccaaaattattccttgtgacactttttagttaagttttgccttctattaatattattgttcccattgatatatatttcagtacctttattttcaagcattgtgtgtggtatagttttgagagtgtcactcgtaagcagcatgactctatttttcagtgactttgtaggtaaagtttaatctagttctggaacagtggttaaaagcatgtgttagaccacctgagtcccagtcctggcacttccgctcatctgtgtgtgatgggcagaagtgccagggtaattttcctgggtaatctctccacaccttagtcctctcatctataaaaacattgaggataatattagtatctcatcatagggttattgtaggaattaaataacataaagttcttagagcagtgcctagtatcagtaactgttagctgttgaaaaaaattttttgttgtgattattgatgtatttagtcccatttctaccattattttctgttttctctttaccatcctctttcccttgtttactctctcctttcctgtcaatattctctttgtatttcctcttttttgaattatctatgcgttggatttctattcttttagtgattacacttatacgcctgaagccaccaaataaatcaatataattaacatttccatcatccctgtcctagttgtattttctcagattctgtatttgtctatgtggcatccattaattactaggtcaaataatggccaagttgcttacatctgccctgtgatc

SEQ ID NO: 694063 - DNA, 1706 bp, Homo sapiens
aatcgcttgaacctgggaggtggaggttgcagtagctgagatggtgccactgcactccatcctgggtgacagagtgagactccgtctcaaaatgtacatatatgtaaaaaataaaaataaaagtataagcctaaggaaagatgtggcatttactattgagctttactgaacatgtcactatatacacttcaggctttgcttttttaaatttttgtgttgatacatgatattatgaggtacatggatagaatatacagtgatcaagttagggcatttagcgtatccatcatcttgagtatttatcatttgtatgtgttgagaacatttcaagacctcttttctagctgttttgaaatgtaaatacattatatattatttatatatataaaactctcagacaaaacttgctaagtttgttctttgtatattttatatattttctgatatttatttgatggattcatttctgataaaagtatattaaaaatatctctccagccagacgtggtggctcacgcctgtaatcccagcactttgggaggccgaggtaggtggatcacctgaggtcagaagtttgagaccagcatggctaacatggtgaaaccctgtatctactaaaaatacaaaatttagctgggcatggtggtgcatgcctgtaatcccaactactcggtaggctgaggcaggagaatcgcttcaacccggcaggcagaggttgcagtgagccgagatcatgccattgcactccagactggacgacaagagcaaaactccatcttaaattatatatatatatatatatatatatatatatatatatatatayatacacacacacacacacacacacatccataattataaaaatttttctttataatttgatcagttattgctttatatatttcaaagttatacaatcacagactacaagttgacaattgccaaaattattccttgtgacactttttagttaagttttgccttctattaatattattgttcccattgatatatatttcagtacctttattttcaagcattgtgtgtggtatagttttgagagtgtcactcgtaagcagcatgactctatttttcagtgactttgtaggtaaagtttaatctagttctggaacagtggttaaaagcatgtgttagaccacctgagtcccagtcctggcacttccgctcatctgtgtgtgatgggcagaagtgccagggtaattttcctgggtaatctctccacaccttagtcctctcatctataaaaacattgaggataatattagtatctcatcatagggttattgtaggaattaaataacataaagttcttagagcagtgcctagtatcagtaactgttagctgttgaaaaaaattttttgttgtgattattgatgtatttagtcccatttctaccattattttctgttttctctttaccatcctctttcccttgtttactctctcctttcctgtcaatattctctttgtatttcctcttttttgaattatctatgcgttggatttctattcttttagtgattacacttatacgcctgaagccaccaaataaatcaatataattaacatttccatcatccctgtcctagttgtattttctcagattctgtatttgtctatgtggcatccattaattactaggtcaaataatggccaagttgcttacatctgccctgtgatc

SEQ ID NO: 694064 - DNA, 1706 bp, Homo sapiens
aatcgcttgaacctgggaggtggaggttgcagtagctgagatggtgccactgcactccatcctgggtgacagagtgagactccgtctcaaaatgtacatatatgtaaaaaataaaaataaaagtataagcctaaggaaagatgtggcatttactattgagctttactgaacatgtcactatatacacttcaggctttgcttttttaaatttttgtgttgatacatgatattatgaggtacatggatagaatatacagtgatcaagttagggcatttagcgtatccatcatcttgagtatttatcatttgtatgtgttgagaacatttcaagacctcttttctagctgttttgaaatgtaaatacattatatattatttatatatataaaactctcagacaaaacttgctaagtttgttctttgtatattttatatattttctgatatttatttgatggattcatttctgataaaagtatattaaaaatatctctccagccagacgtggtggctcacgcctgtaatcccagcactttgggaggccgaggtaggtggatcacctgaggtcagaagtttgagaccagcatggctaacatggtgaaaccctgtatctactaaaaatacaaaatttagctgggcatggtggtgcatgcctgtaatcccaactactcggtaggctgaggcaggagaatcgcttcaacccggcaggcagaggttgcagtgagccgagatcatgccattgcactccagactggacgacaagagcaaaactccatcttaaattatatatatatatatatatatatatatatatatatatatatatayacacacacacacacacacacacatccataattataaaaatttttctttataatttgatcagttattgctttatatatttcaaagttatacaatcacagactacaagttgacaattgccaaaattattccttgtgacactttttagttaagttttgccttctattaatattattgttcccattgatatatatttcagtacctttattttcaagcattgtgtgtggtatagttttgagagtgtcactcgtaagcagcatgactctatttttcagtgactttgtaggtaaagtttaatctagttctggaacagtggttaaaagcatgtgttagaccacctgagtcccagtcctggcacttccgctcatctgtgtgtgatgggcagaagtgccagggtaattttcctgggtaatctctccacaccttagtcctctcatctataaaaacattgaggataatattagtatctcatcatagggttattgtaggaattaaataacataaagttcttagagcagtgcctagtatcagtaactgttagctgttgaaaaaaattttttgttgtgattattgatgtatttagtcccatttctaccattattttctgttttctctttaccatcctctttcccttgtttactctctcctttcctgtcaatattctctttgtatttcctcttttttgaattatctatgcgttggatttctattcttttagtgattacacttatacgcctgaagccaccaaataaatcaatataattaacatttccatcatccctgtcctagttgtattttctcagattctgtatttgtctatgtggcatccattaattactaggtcaaataatggccaagttgcttacatctgccctgtgatc

SEQ ID NO: 694065 - DNA, 1706 bp, Homo sapiens
aatcgcttgaacctgggaggtggaggttgcagtagctgagatggtgccactgcactccatcctgggtgacagagtgagactccgtctcaaaatgtacatatatgtaaaaaataaaaataaaagtataagcctaaggaaagatgtggcatttactattgagctttactgaacatgtcactatatacacttcaggctttgcttttttaaatttttgtgttgatacatgatattatgaggtacatggatagaatatacagtgatcaagttagggcatttagcgtatccatcatcttgagtatttatcatttgtatgtgttgagaacatttcaagacctcttttctagctgttttgaaatgtaaatacattatatattatttatatatataaaactctcagacaaaacttgctaagtttgttctttgtatattttatatattttctgatatttatttgatggattcatttctgataaaagtatattaaaaatatctctccagccagacgtggtggctcacgcctgtaatcccagcactttgggaggccgaggtaggtggatcacctgaggtcagaagtttgagaccagcatggctaacatggtgaaaccctgtatctactaaaaatacaaaatttagctgggcatggtggtgcatgcctgtaatcccaactactcggtaggctgaggcaggagaatcgcttcaacccggcaggcagaggttgcagtgagccgagatcatgccattgcactccagactggacgacaagagcaaaactccatcttaaattatatatatatatatatatatatatatatatatatatatatatatacacacacacacacacacacacatccataattataaaaatttttctttataatttgatcagttattgctttatatatttcaaagttatacaatcacagactacaagttgacaattgccaaaattattccttgtgacactttttagttaagttttgccttctattaatattattgttcccattgatatatatttcagtacctttattttcaagcattgtgtgtggtatagttttgagagtgtcactcgtaagcagcatgactctatttttcagtgactttgtaggtaaagtttaatctagttctggaacagtggttaaaagcatgtgttagaccacctgagtcccagtcctggcacttccgctcatctgtgtgtgatgggcagaagtgccagggtaattttcctgggtaatctctccacaccttagtcctctcatctataaaaacattgaggataatattagtatctcatcatagggttattgtaggaattaaataacataaagttcttagagcagtgcctagtatcagtaactgttagctgttgaaaaaaattttttgttgtgattattgatgtatttagtcccatttctaccattattttctgttttctctttaccatcctctttcccttgtttactctctcctttcctgtcaatattctctttgtatttcctcttttttgaatkatctatgcgttggatttctattcttttagtgattacacttatacgcctgaagccaccaaataaatcaatataattaacatttccatcatccctgtcctagttgtattttctcagattctgtatttgtctatgtggcatccattaattactaggtcaaataatggccaagttgcttacatctgccctgtgatc

SEQ ID NO: 694066 - DNA, 619 bp, Homo sapiens
aagtgtcacaaataaaacaatatcaatatgtactctgataacattcattctatacaatcctttttttttttttgagctggagtttcgctcttattgcccaggctggagtgcaatagtgcaatctcggctcactgcaacctccacctcccaggttcaagcaattctcccacctcagccttccaagtagctgggattacaggcatgtgccaccatgcctggcttactttgtatttttagtagagatggggtttctccatgttggtcaggctggtctcaaactcctgatctcaggtgattcacctgcctcggcctcccaaagtgctgggattacaggygtgagccactgcacctagcctgcaatctattttttaaaatgcttttcacaagtgaatggcagcctgcagtttgcaaaactggaactggatgaccttttcagctttcatcttttttaaaaaaaaatcacaattcattggcaaaatgtcataagactgtattgcatttagattcctaaagcattcatttgtcttttttttttgggagatggcgtcttgctctgttgcccgggctggagtgcagtggcacaatctcggctcactgcaatctccgcctcctgggttca

SEQ ID NO: 694067 - DNA, 643 bp, Homo sapiens
aaaaaaattttatttatatatgtcatctagtttttattgtttccaatggcaagaaggctagtccagtactagtctctcatgtctagaactgttaagaaattttaaatgccaactactgtacaacttttgaaaaagcacactttttgaattcttatttcttctgttagctttggtaaattttattagaaagttgactaatttatccaaagtgcaaactatactggtgtaaagttgtttataatatcctcttattatctcttaatgtttgtaggatctgtagtgatttcccgttttttattcctgacattgctyttatgtgtatatgtatttttttttccttttttcttggtcagtgttaccaagagcttactaatcttttcattgaacacttggctttgttggtcttcttcttcctcctcctcctcctcctctgcctcctcctcctcttcttcttcctcctccttctcttcctcctcctcctccccctcttattcttattcttcttcctcttatttttattccatggatttctgctcttatatgtattttctattttctctcttgtacagctattctgttactagtttttgagttggaaacttagatgactggtttttagccttttctttcctaacatatgcat

SEQ ID NO: 694068 - DNA, 1636 bp, Homo sapiens
catgggcctgtcatggggtgggggaggcgggagggatagcattaggagatatacctgatgtaaatgaagagttaatgggtgcagcacaccaacatggcacatgtatacatatgtaacaaacctgccctttgtgcatatgtaccctagaacttaaagtataagaagaagaagaagaagaagaagaaattattaccctaacaaaaaactaatataagaagacaaagaagggaggcagtgaggccaggagaggtccgcatggtgaaggatgagggctgccccccacctagtgaggatggggagggacagatgcccaagcacccaaagctattggctgttggggagattagcaacaagtgcaggagtggatcagggagtgaggagagggtgaaggaagggatcattcccaggtgacagcttgcatgatattccctttatagcaccatgtctaatcctccccaaccttgtcctctgagccttgcagagcacatgcygaaacagtaagggggactatgctccctgaccacctcccagcccccaggggctcctctcgctctgcaggctgtgtttctcacctaagccacactggccctcaggactcccaggactccccttgaaatagacagataagtgcccaggcaggctaagctgcaggacctgtgccttgcatgtggctctgtggctcagcatcctccaaattgacactcactgggggtcgtccctgatgatcccagctaaagccaagtatatttgtaatcgtaatttcagattgtaatacaatatttatataatccggtaaaatatgactgtggaagggggttattccttaaaaataaaccaaaacaccacgctgttttaggaaaaagtgataaaggtaagtcacctaacagaccaccaacaaattgagtggagatgagagaactgaaaaagcttgagaagcaatctctgctcagcccgggttgtggggtagtggaagtaatcatgtaatagaatctactgcaggcagtccacttggggtctgctctttcccagctcctctggatcacactctacattcccaagtccatttgggtcttgttttgtgctttctgtttggttcacatgatctccgtggcagtaccacagtatctgatagggcaaatccatcctggttgctcttctagatgtggacttcacatcttaaatagtactcttcgattttggttgattaagtagagggaacctatagattcatggtccaaattataacagcacaatttatagagccatctggcttggctagtaggcagttaatattagaaattgattgattctggaagcctttcatgtaaacatgtttaaagctaaatctatgatcatgcattcatccaacaagtttttcacgaagagccaaggtttttccattgagtttgggtctgctgattagagttttgtgggttttcttgcatccttaaaacctttagaagataccttactcttcaactctgcagttacaagggtatattggcaggtgtatcggcaattctagttctaaattttcatctcattatgctcttacagaataatttccataaggttttacctggcacaagaatcggcattccattgggaggccatccctgcaccccaccccatgcta

SEQ ID NO: 694069 - DNA, 1636 bp, Homo sapiens
catgggcctgtcatggggtgggggaggcgggagggatagcattaggagatatacctgatgtaaatgaagagttaatgggtgcagcacaccaacatggcacatgtatacatatgtaacaaacctgccctttgtgcatatgtaccctagaacttaaagtataagaagaagaagaagaagaagaagaaattattaccctaacaaaaaactaatataagaagacaaagaagggaggcagtgaggccaggagaggtccgcatggtgaaggatgagggctgccccccacctagtgaggatggggagggacagatgcccaagcacccaaagctattggctgttggggagattagcaacaagtgcaggagtggatcagggagtgaggagagggtgaaggaagggatcattcccaggtgacagcttgcatgatattccctttatagcaccatgtctaatcctccccaaccttgtcctctgagccttgcagagcacatgccgaaacagtaagggggactatgctccctgaccacctcccagcccccaggggctcctctcgctctgcaggctgtgtttctcacctaagccacactggccctcaggactcccaggactccccttgaaatagacagataagtgcccaggcaggctaagctgcaggacctgtgccttgcatgtggctctgtggctcagcatcctccaaattgacactcactgggggtcgtccctgatgatcccagctaaagccaagtatatttgtaatcgtaatttcagattgtaatacaatatttatataatccggtaaaatatgactgtggaagggggttattccttaaaaataaaccaaaacaccaygctgttttaggaaaaagtgataaaggtaagtcacctaacagaccaccaacaaattgagtggagatgagagaactgaaaaagcttgagaagcaatctctgctcagcccgggttgtggggtagtggaagtaatcatgtaatagaatctactgcaggcagtccacttggggtctgctctttcccagctcctctggatcacactctacattcccaagtccatttgggtcttgttttgtgctttctgtttggttcacatgatctccgtggcagtaccacagtatctgatagggcaaatccatcctggttgctcttctagatgtggacttcacatcttaaatagtactcttcgattttggttgattaagtagagggaacctatagattcatggtccaaattataacagcacaatttatagagccatctggcttggctagtaggcagttaatattagaaattgattgattctggaagcctttcatgtaaacatgtttaaagctaaatctatgatcatgcattcatccaacaagtttttcacgaagagccaaggtttttccattgagtttgggtctgctgattagagttttgtgggttttcttgcatccttaaaacctttagaagataccttactcttcaactctgcagttacaagggtatattggcaggtgtatcggcaattctagttctaaattttcatctcattatgctcttacagaataatttccataaggttttacctggcacaagaatcggcattccattgggaggccatccctgcaccccaccccatgcta

SEQ ID NO: 694070 - DNA, 617 bp, Homo sapiens
tgccccttaattattcagaattctctcccctatcagacagtataatttcttccttttctctaggtaataaatttatacacactataggtagattaaaattatmttttaaaaaatcacataaagctttaggaatgatcttgaatgtgaaaatctaagtctaacaaaatatagcttttaaaacaacatttacatgtaaacaatatgtgccatgttatccatagaaaggagtcatcattactgtttgggatgaaacataatatagttgtaaacagagattaaatggttttaccaaggcattattcaaattgcatcctttatgtaagaggcctcaaggcacaatcaataagttaatgattaaaatacataaaactgcagcagataatcatcatcataaaattgtgttaaaataatgtttaagtgttgatttgtcagaaaggacctattaataaagacagatttttatggtactattcctagaaggcccatacatgggctagggatgatttggggaaatcatcttgtccctaattccttagagtaagaatttagaaactgtggaaacatactgcttgatctcacatgtggccaaggcaaagctttgcaaggaataaggaagc

SEQ ID NO: 694071 - DNA, 653 bp, Homo sapiens
caaaagaaaatgacaagcttattctgggatcaaagtcgaaaagcaatctacttcttagggtgcctaatcagtatcatccttactattcaaattttttaaatgtgagtttttgtgtctctttctctgaacttattctcaattaaaaggctgacttcacttaacaggtgacattcttatcaatacagaacagtaaccrtctagatttccccttgagtaaacatccctctagccctttcctgattaggattcctgcttttctgactgagctgcatagaacaacaacaatcgcactattaaagcacaaccattctctgggtccccacaacagtttaaacttatatactctcttactataaagagtaatgcgcacaggcaggagcaaaataactgtttggttattttttaaataaaataaaatcctactttacatagaagtaaacaaactggaaagatggttcaaagtaatttttttaagtaaaaacaaaataataaattcaacaaagatttacaggcaaaagatgggtgacaaacacacaacaggttgttaaagaaagccaagagtatactttccccacacttcaagcccctgagattcctaatattaataaatcttccaaagaaaaatccttcagtatcagaagtctgacccattt

SEQ ID NO: 694072 - DNA, 653 bp, Homo sapiens
caaaagaaaatgacaagcttattctgggatcaaagtcgaaaagcaatctacttcttagggtgcctaatcagtatcatccttactattcaaattttttaaatgtgagtttttgtgtctctttctctgaacttattctcaattaaaaggctgacttcacttaacaggtgacattcttatcaatacagaacagtaaccgtctagatttccccttgagtaaacatccctctagccctttcctgattaggattcctgcttttctgactgagctgcatagaacaacaacaatcgcactattaaagcacaaccattctctgggtccccacaacagtttaaacttatatactctcttactataaagagtaatgcgcacaggcaggagcaaaataactgtttggttattttttaaataaaataaaatcctactttacatagaagtaaacaaactggaaagatggttcaaagtaatttttttaagtaaaaacaaaataayaaattcaacaaagatttacaggcaaaagatgggtgacaaacacacaacaggttgttaaagaaagccaagagtatactttccccacacttcaagcccctgagattcctaatattaataaatcttccaaagaaaaatccttcagtatcagaagtctgacccattt

SEQ ID NO: 694073 - DNA, 1397 bp, Homo sapiens
tgccttagcaagttcacttcatctataagaaagagcaggtctcactttgcttgactttgctgttccctctagtgaccatctagtttctcttcattcttttacagtaacaacttctgaatttttccatccccagtctagttcattcagacctatatcctcccttggtagaactaactagaaagcctttcagctcattttcatgagaccatttttgttgcttcatattaatatctgatttttttctaaacattgttctaatccatacaatcaatattcaacatccttagtatgaacatgcaaggtttcctcaatatctggtaactacttttcttttttttcttcttttttttatttttttgagacggaatctcactctgttgcccaggctggagtgcagcagtgccatctcggctcactataacctctgcctcccaggttcatgcgattctccttcttcagcctcctgagtagcagggattacaggtgcctgccaacatgcccagctgattttggtatttgtagtagagacagggtttcaccatgttggccaggctggtctcgaactcctgacctcaggtgatcctcccaccttggcctctcaaagtgctaggattacagatggcatgacccactgygcctggccaataactacttttcaattatacataacagaacaattatttattaagtgttctggaaaataagctaggacctaattgtcccctttaattcagttaaggaaaaagacaccacaattactatattcactactatgtaagttaaacacatgaaataaatgataaaatgagggctccaacaagggcaaaacttgagcaccacagaagcactgtgacagggagcccgggaaagtccagtatattattactacaccaaaatgagtcctcggctccagtccactggattattcactatccgatgaccacgcagtcatgctctgtagcttctcatttttctcactctgctagccctgcctggtgcacccttctcatgcacatgccatgtagccaaagccaagtcatcattcaagacccaactcaatttctatttcttttggcacattccttgattacttcttattcattcaatcaacaagtatctatttaacactgactatgtgtacagccctggggaaccagtagtgaacaaagaagtcaaaaaccctgtcctcgaagagcttatttttaataggaggagacggacaatgaatacagacattaaaaagataacatctgatgccaaaacactggaaatgaaataagagaaatgaaatcaagtgtgattaggggagaagtacttccatttgggtggccagggaagcctttttgaggagatggcatttcaagtaagacaaagtaagttggattctagtgaaatga

SEQ ID NO: 694074 - DNA, 1074 bp, Homo sapiens
tcaaaaaataaaaaattaaaattaaaattaaaaaacatagaaaagataaatattatttctgagtagtaatgataggtttttccttttcctttcctgtattttctaactttattttttaaataatgagactatattatttttgtatttagaaacaaactccatctaactcatctatcctcaataaaagtatgccttaaccttgtatttacgtaaatagctcattcatttgagatctttctgtaaagttagttatctctactcatttaacttaaacttgtcaagcagttcagcacactgttgttgaattaaaagagctttctacagtgccctaaagtcaagggtaacaagtacatggtactaagaacttcaatttgaataatggaatgaaagcaagaaaaaaaaataagtttttagtaattgaagcggtttcaccactttaatatactttattcactttactgcacttggatttataagcataacaaggctgtgcctttagattacctgaggtgattgagcagaggctgaagtctttcatcagactgcacagcaggcaaggacctggctgttaactaaaagcagggaagaaaattagtaaaaacagcaaaggccgaacaccgaacatatttgaatactaaatgtaaaacgagctgaagggcaaatagggaggcaatacttaaaaatataaggttctatttctcttttttcaaatcaagaaattatataaaaacctgacacattacatgatcaaagctrgctacatggttctaaggacatagggtatgtcactaagtttaaaagtaaagaaaaaggtgagcaaaacagagagtaaaagggagtgtcctgagttcatgaaaaagcattcacttatgagactattatctttgtaaataaaaaaggaaaaacttctaaatgtaaaactgtataacaacctatcttgtagcaccgagtcctaagatgatgaataaattggaaagataaattctgatttatagctaagccactgtgaaactggttacatacagaagtgtatgtactttattctgtcagccacatgactataaggaaccaagg

SEQ ID NO: 694075 - DNA, 1074 bp, Homo sapiens
tcaaaaaataaaaaattaaaattaaaattaaaaaacatagaaaagataaatattatttctgagtagtaatgataggtttttccttttcctttcctgtattttctaactttattttttaaataatgagactatattatttttgtatttagaaacaaactccatctaactcatctatcctcaataaaagtatgccttaaccttgtatttacgtaaatagctcattcatttgagatctttctgtaaagttagttatctctactcatttaacttaaacttgtcaagcagttcagcacactgttgttgaattaaaagagctttctacagtgccctaaagtcaagggtaacaagtacatggtactaagaacttcaatttgaataatggaatgaaagcaagaaaaaaaaataagtttttagtaattgaagcggtttcaccactttaatatactttattcactttactgcacttggatttataagcataacaaggctgtgcctttagattacctgaggtgattgagcagaggctgaagtctttcatcagactgcacagcaggcaaggacctggctgttaactaaaagcagggaagaaaattagtaaaaacagcaaaggccgaacaccgaacatatttgaatactaaatgtaaaacgagctgaagggcaaatagggaggcaatacttaaaaatataaggttctatttctcttttttcaaatcaagaaattatataaaaacctgacacattacatgatcaaagctagctacatggttctaaggacatagggtatgtcactaagtttaaaagtaaagaaaaaggtgagcaaaacagagagtaaaagggagtgtcctgagttcatgaaaaagcattcacttatgagactattatctttgtaaataaaaaaggaaaaacttctaaatgtaaaactgtataacaacctatcttgtagcaccgagtcctaagatgatgaataaattggraagataaattctgatttatagctaagccactgtgaaactggttacatacagaagtgtatgtactttattctgtcagccacatgactataaggaaccaagg

SEQ ID NO: 694076 - DNA, 1857 bp, Homo sapiens
atgcctgagttcaaatcctagcccttactagctatatgacctttaattcattccttagtgcctcaatttcctcatctgtaaatgagggcactagtcccaattttacmcagctactgtaaactaaactttactgtattaactaaaattaataaatgaagggaacatataaacaggccttcaactatatattcaacaaatatgcattatataaaacaatggactatgtgctaaaagctagtggctgctgctagtaacaaacactactaaaactcccaccatcaccactactatcacttctcctatttcgaattaattgactgagcttcactcagaattaacatgcttaccctagagacaattattttaagagtacatttacagaattctcaaattatttcaatccccaatgtgttcaatttgcttctttaaaaaaaaatcaaattatctatcgccatatggtttttagtaaaatgtttcttctgcaagttaaatgtgtttgcttctaattatttctaaatgtagtgcttgtagtaccataaaaataattttgagatccaaatttcattgatcaggccaggggcagcggctcatgcctgtaatcccagcactttgggaagccaaggtgggaggatcacttgaggcaaggagcttgagaccagcctgggcaacatggtaaaaccccatctctagtaaaaatacaaaaattagccaggcatggtggcatgcacctgtagtcccagctactcaggagcctgaggcaggagaatagcttgaacctgggaggcacaggttgcagtgagccaagatcacaccactgcactccagcctgggcaacatggaagtttccatcttcttgtccatctttaacaacatgaatatgtcatagaagatggtaaacttgaagacactgattcaaaatcgagtgcttattccaattaaatttaatattaaacaagcttattagaagtcatttttgttgtaactttctaggggaattgttagaacttgactagtaatcttttaaattgttttcctgatgtaacaatgactataaaaattcaagggctacataaaagtcaccaaaaataaacattaaattcttttgccattcatcacacaattttctcaactgctttattttctgaatatgaaaaacaaatccttatgcttcacactagaagaaatcaaatgtacactctatgtaaggggaaaaaagattaaggcttttatataaataaccaaccacagaaatatttattgagtgtctactcaattttcatccattttccccagacatgaatctcaccaagccaagttgttacacaataattcctatgtcaatgctagttatctagctgttttccaaggtctcatttctgatgcctaggtttgccatttaatgtgaaatatgactggctgagctataaagatgatataactgttgggggagttgaacatgccatatatactggacacatcaggaatgtgttcactgttctcagcatcctcatgaagttcaatccgcccatctagagcctctgctcaggcaaggcctcactttccctaaggacggatctgtgactaagaacataaggcttcagattatctgctttccgtggtcttcctgcctccagcccattctttactttgtcatggcagggtacttgccaaaatacaaatatgttccactatttccttgaataagtctcttaacccattcatgccataggttgcaaattgttttgtgaaaaatcagaccttggtgatgaccatgagcaggatataaataacccccacaagcttagcgtttcaataatggaacactaggcataaatgggttaaatgactccttactac

SEQ ID NO: 694077 - DNA, 1857 bp, Homo sapiens
atgcctgagttcaaatcctagcccttactagctatatgacctttaattcattccttagtgcctcaatttcctcatctgtaaatgagggcactagtcccaattttacccagctactgtaaactaaactttactgtattaactaaaattaataaatgaagggaacatataaacaggccttcaactatatattcaacaaatatgcattatataaaacaatggactatgtgctaaaagctagtggctgctgctagtaacaaacactactaaaactcccaccatcaccactactatcacttctcctatttcgaattaattgactgagcttcactcagaattaacatgcttaccctagagacaattattttaagagtacatttacagaatyctcaaattatttcaatccccaatgtgttcaatttgcttctttaaaaaaaaatcaaattatctatcgccatatggtttttagtaaaatgtttcttctgcaagttaaatgtgtttgcttctaattatttctaaatgtagtgcttgtagtaccataaaaataattttgagatccaaatttcattgatcaggccaggggcagcggctcatgcctgtaatcccagcactttgggaagccaaggtgggaggatcacttgaggcaaggagcttgagaccagcctgggcaacatggtaaaaccccatctctagtaaaaatacaaaaattagccaggcatggtggcatgcacctgtagtcccagctactcaggagcctgaggcaggagaatagcttgaacctgggaggcacaggttgcagtgagccaagatcacaccactgcactccagcctgggcaacatggaagtttccatcttcttgtccatctttaacaacatgaatatgtcatagaagatggtaaacttgaagacactgattcaaaatcgagtgcttattccaattaaatttaatattaaacaagcttattagaagtcatttttgttgtaactttctaggggaattgttagaacttgactagtaatcttttaaattgttttcctgatgtaacaatgactataaaaattcaagggctacataaaagtcaccaaaaataaacattaaattcttttgccattcatcacacaattttctcaactgctttattttctgaatatgaaaaacaaatccttatgcttcacactagaagaaatcaaatgtacactctatgtaaggggaaaaaagattaaggcttttatataaataaccaaccacagaaatatttattgagtgtctactcaattttcatccattttccccagacatgaatctcaccaagccaagttgttacacaataattcctatgtcaatgctagttatctagctgttttccaaggtctcatttctgatgcctaggtttgccatttaatgtgaaatatgactggctgagctataaagatgatataactgttgggggagttgaacatgccatatatactggacacatcaggaatgtgttcactgttctcagcatcctcatgaagttcaatccgcccatctagagcctctgctcaggcaaggcctcactttccctaaggacggatctgtgactaagaacataaggcttcagattatctgctttccgtggtcttcctgcctccagcccattctttactttgtcatggcagggtacttgccaaaatacaaatatgttccactatttccttgaataagtctcttaacccattcatgccataggttgcaaattgttttgtgaaaaatcagaccttggtgatgaccatgagcaggatataaataacccccacaagcttagcgtttcaataatggaacactaggcataaatgggttaaatgactccttactac

SEQ ID NO: 694078 - DNA, 1391 bp, Homo sapiens
ctcggcctcccaaagtgctaggattacaggcgtgagccaccgcgcccggccatgatgaagttttataccaagaattcaatgagcctacgcctaaagtttcaccattgtaatttcccaggatgtctttcctatatggtataggaaagacatcgaaagatatcctgggaaattacaatggtagtactttatatgacatatatgatagacatatatgtctatcatatatagactatatatatgatagtctatataggctatatatgatatatctcatatatatcatatatatctcatatatgatatatatcatatatatctyatatatgatatatatcatatatatctcatatatgatatatatcatatatatcatatatatctcatacatgatatatatcatatatatcatatatatctcatatatatcatatatatctcatatttggtatatatcatatatagtcatacataggctataaatatgatagacatatatatctatatatatctatattgtaagtataacactgcccacaaacctttggatcatgattgtgtaagggagatgctacacttaactttaaggcagaagaaattagcagcaactaggactcatatgtgacaacttgtatcataagcacaatacatggaatatattcatgagaggcatctgaagtaatatgctacactctgcaacaattacctaagtttcccacatggttttaagacttttgtgcctcgattctgttaaaaatatcaactagtataaacactaaatcatatccattggttttttgttttttgtttctttttgagatggagtttccctcttgtcacccaggctgaagtgcaatggcaccatctctgctcactgcaaacaccgcctcctagtttcaagcgtttctcctgcatcagcctcctgagtagctgggattacagtcacccaccaccaggcccagctaatttttatgtttttattagagcctgggtttcaccatgttggccaggctggtcttgaactcctgacctgaggtgatctgcccgcctctgcctcccaagtgctgggattacaggcatgagccatggctcccaacccacatacccattgtttttgcataaacaagttagagggctgttctctgaaattcaatagatatagttaattaatactactactgtgtttttaagtgcttaggtttcatgagtggactgcagggctatttcaactgcaactaaatcaaatatgctttcataaaattgtcatttaaaaagacttcagaaactaagcagggggagaggaccattggaaagagaaaagggtactatgaattggaggttgtggggagcagaggagaaaactgtaggaggggaaagtatagccagcaatattc

SEQ ID NO: 694079 - DNA, 1391 bp, Homo sapiens
ctcggcctcccaaagtgctaggattacaggcgtgagccaccgcgcccggccatgatgaagttttataccaagaattcaatgagcctacgcctaaagtttcaccattgtaatttcccaggatgtctttcctatatggtataggaaagacatcgaaagatatcctgggaaattacaatggtagtactttatatgacatatatgatagacatatatgtctatcatatatagactatatatatgatagtctatataggctatatatgatatatctcatatatatcatatatatctcatatatgatatatatcatatatatctcatatmtgatatatatcatatatatctcatatatgatatatatcatatatatcatatatatctcatacatgatatatatcatatatatcatatatatctcatatatatcatatatatctcatatttggtatatatcatatatagtcatacataggctataaatatgatagacatatatatctatatatatctatattgtaagtataacactgcccacaaacctttggatcatgattgtgtaagggagatgctacacttaactttaaggcagaagaaattagcagcaactaggactcatatgtgacaacttgtatcataagcacaatacatggaatatattcatgagaggcatctgaagtaatatgctacactctgcaacaattacctaagtttcccacatggttttaagacttttgtgcctcgattctgttaaaaatatcaactagtataaacactaaatcatatccattggttttttgttttttgtttctttttgagatggagtttccctcttgtcacccaggctgaagtgcaatggcaccatctctgctcactgcaaacaccgcctcctagtttcaagcgtttctcctgcatcagcctcctgagtagctgggattacagtcacccaccaccaggcccagctaatttttatgtttttattagagcctgggtttcaccatgttggccaggctggtcttgaactcctgacctgaggtgatctgcccgcctctgcctcccaagtgctgggattacaggcatgagccatggctcccaacccacatacccattgtttttgcataaacaagttagagggctgttctctgaaattcaatagatatagttaattaatactactactgtgtttttaagtgcttaggtttcatgagtggactgcagggctatttcaactgcaactaaatcaaatatgctttcataaaattgtcatttaaaaagacttcagaaactaagcagggggagaggaccattggaaagagaaaagggtactatgaattggaggttgtggggagcagaggagaaaactgtaggaggggaaagtatagccagcaatattc

SEQ ID NO: 694080 - DNA, 1391 bp, Homo sapiens
ctcggcctcccaaagtgctaggattacaggcgtgagccaccgcgcccggccatgatgaagttttataccaagaattcaatgagcctacgcctaaagtttcaccattgtaatttcccaggatgtctttcctatatggtataggaaagacatcgaaagatatcctgggaaattacaatggtagtactttatatgacatatatgatagacatatatgtctatcatatatagactatatatatgatagtctatataggctatatatgatatatctcatatatatcatatatatctcatatatgatatatatcatatatatctcatatatsatatatatcatatatatctcatatatgatatatatcatatatatcatatatatctcatacatgatatatatcatatatatcatatatatctcatatatatcatatatatctcatatttggtatatatcatatatagtcatacataggctataaatatgatagacatatatatctatatatatctatattgtaagtataacactgcccacaaacctttggatcatgattgtgtaagggagatgctacacttaactttaaggcagaagaaattagcagcaactaggactcatatgtgacaacttgtatcataagcacaatacatggaatatattcatgagaggcatctgaagtaatatgctacactctgcaacaattacctaagtttcccacatggttttaagacttttgtgcctcgattctgttaaaaatatcaactagtataaacactaaatcatatccattggttttttgttttttgtttctttttgagatggagtttccctcttgtcacccaggctgaagtgcaatggcaccatctctgctcactgcaaacaccgcctcctagtttcaagcgtttctcctgcatcagcctcctgagtagctgggattacagtcacccaccaccaggcccagctaatttttatgtttttattagagcctgggtttcaccatgttggccaggctggtcttgaactcctgacctgaggtgatctgcccgcctctgcctcccaagtgctgggattacaggcatgagccatggctcccaacccacatacccattgtttttgcataaacaagttagagggctgttctctgaaattcaatagatatagttaattaatactactactgtgtttttaagtgcttaggtttcatgagtggactgcagggctatttcaactgcaactaaatcaaatatgctttcataaaattgtcatttaaaaagacttcagaaactaagcagggggagaggaccattggaaagagaaaagggtactatgaattggaggttgtggggagcagaggagaaaactgtaggaggggaaagtatagccagcaatattc

SEQ ID NO: 694081 - DNA, 1391 bp, Homo sapiens
ctcggcctcccaaagtgctaggattacaggcgtgagccaccgcgcccggccatgatgaagttttataccaagaattcaatgagcctacgcctaaagtttcaccattgtaatttcccaggatgtctttcctatatggtataggaaagacatcgaaagatatcctgggaaattacaatggtagtactttatatgacatatatgatagacatatatgtctatcatatatagactatatatatgatagtctatataggctatatatgatatatctcatatatatcatatatatctcatatatgatatatatcatatatatctcatatatgatatatatcatatatatctcatatatgatatatatcatatatatcatatatatctcatacatgatatatatcatatatatcatatatatctcatatatatcatatatatctcatatttggtatatatcatatatagtcatacataggctataaatatgatagacatatatatctatatatatctatattgtaagtataacactgcccacaaacctttggatcatgattgtgtaagggagatgctacacttaactttaaggcagaagaaattagcagcaactaggactcatatgtgacaacttgtatcataagcacaatacatggaatatattcatgagaggcatctgaagtaatatgctacactctgcaacaattacctaagtttcccacatggttttaagacttttgtgcctcgattctgttaaaaatatcaactagtataaacactaaatcatatccattggttttttgttttttgtttctttttgagatggagtttccctcttgtcacccaggctgaagtgcaatggcaccatctctgctcactgcaaacaccgcctcctagtttcaagcgtttctcctgcatcagcctcctgagtagctgggattacagtcacccaccaccaggcccagctaatttttatgtttttattaragcctgggtttcaccatgttggccaggctggtcttgaactcctgacctgaggtgatctgcccgcctctgcctcccaagtgctgggattacaggcatgagccatggctcccaacccacatacccattgtttttgcataaacaagttagagggctgttctctgaaattcaatagatatagttaattaatactactactgtgtttttaagtgcttaggtttcatgagtggactgcagggctatttcaactgcaactaaatcaaatatgctttcataaaattgtcatttaaaaagacttcagaaactaagcagggggagaggaccattggaaagagaaaagggtactatgaattggaggttgtggggagcagaggagaaaactgtaggaggggaaagtatagccagcaatattc

SEQ ID NO: 694082 - DNA, 1428 bp, Homo sapiens
cctcaaacaccaagttaattaattattaaggaaaaattctaaatttaaaataaaaattagagtggtacaattttccgaaggtcagcataattgcttttggcaatatgtattgaattccttgcagctggcttccatttatattacatttccccaattataatttttctccacaaatgaccaaggtgtttatgtaagtgtccctttcttaaattctataatgattaattagtgaccatacaactctgctttaacatctaattgtttaaaattttaatatactctaattcataagaatgggtttaacattacaatgaataattttataataaaacaagataaaaatatcaacttatcattgtattaagattgagctcttcaattatacatccaaagattataggtaattctcctcatctttgtaaggccacaagttttcaactgactgttaggcagcaaatttgtgcaaattagaccataaaattaagacattctctacatcaattctagagatacaaataaataacaccctgaagggagaatcgtttatcactgagtttgtttccatagtttaaaaaccttttcttcaaaattcaaaaaagtacttaatgcagtgtaaaatatctgacgaaattgcataggtattgacataaactaatgcaaaagccctactgccaagcaaaatttataactgccaaacattaagactaaaagagctaataaatcaacaagcactaaggtcttactctgcctacaatattaaatgaaaagaagctttaatagacaatatctatatttaagtaagttgcactctagtggtggtggttagaatatacattctaaatttaatactaacatatacctaaaaatatgggtaaattgagtgtcacaggggtttagtgtaccgactattttgtcacacaggtaatgagcatagtacttgctaggtaatttttcaatcctcactctcctcccaccctccatcctcaagtaggcccaggtgtctgttggtcccttatttgtgtccgtgcatactcaatgtttagctcccactaagtgaaaacatgtgttatttgcttttctgttcctgggttaatttgcttaggataatggcctccatatccttttcagcaacatggatggtgctgattttgttcttttttatggctgcataatattccatgatgtgtatgtaccacattttctttatccagtctactgctgatgggcatctaagttgattccatgtccttgttatcgtgaaaagtgttgtgatgaatatatgcatgcatgtgtctttatgttagaaagatttatattcctttgagtatataccaagtaatgggattgctgagtygaatggtagttctgttttaagttctttgagaaatctccaaactgctttccactggctgaactaatttacatttc

SEQ ID NO: 694083 - DNA, 1844 bp, Homo sapiens
ttctctttgttggagagataggaaaagatgacagactctgtgaatgtatttcaagctcgtattcctttctgttgaacatggcatagtgaaatacattgtaccgactgctcactaatttgaaatccaagttcctcctcagggtgtcatggtagagatagtgcatcagacttggcagggccctcctgactctcctagtcaagcatgctgatgctggcagtgaatctgggaggcagtctaggggaaaggcaaaagaacagatttatttttcagcaacatttatttcctcttggctcatcaatattgatacaactgataaaacacaacaagcaaagacaggaaagtctctcttctctccaaagagaagagattggatggaatgtagctaggaaaaaagttgtgagtatttaaagtgaaaacacttgcaatacagctaactcttgtttcctacagatagacagtgcaataatatatctgaaataacactaacaagagtagctgtgcatgaataaggaagtcactaaaaatttgtgttctactgttttttaaaggattaatagaggctcaatcaaacagaacaggatagaaaaccaagaaagataacaatatgggttgggggaagcaatagctttaaccaggagttcagttaaggatagctgcagaataaccacacaggaggcctgggatgaagagtcctgactgaagcagtaagcaagggctctgagaaaaaagaagcttgggttcttcagaatatcaagcatatcactgagaagcagaatgatttttcctgatacgctaaaacgctattttgtggtctacaagacagaaaattccaaatatagaaatgtcaagaaaaacaaaagctcaacaagaaaataattttccataaaggaattaaatttggcagttaattttttattacaaaaatcttgaaatatacacagaggtggagagaatagtgtaatgaactatatatccctctatcatattcagtagtggtcaagaatattccacatttgctttatccttgtttcttgctttctttgctgaagtatttaaaagcaaattgcagacagcaaataatttttacccctacttttgtcagtgccaatctataaaaaaagatggacatttacttttctaatcataatgctgttataacacctaacaaaattaacaataatttctggtataatctaaaattcagttcatgatcaagtttctccagatggctcaaaaatatgtttttacagttgacttgtccaaattaattcaaaattcttgtattaaaaaaaagaaatctgtgttctttccaaagtgtttttattcatgaataaaactgaattctgtaataataatatagaaaaatcttcattgtgctacttatgatgcctacatatatttgttttattttaaatgctcacctataaatcccattttgatagttggtagaatttcaactcacccaaagatattcttcacatggttttagtttgccatgctcattgtatccaacaaaggaattactgtcactcattaacagtgctaacagtgcttgktatatagtagatgttccatcaatatttgctgaattcaatcctcaggagatttatttactttgcagctaaacacacaatctaaaataactaatttctatagaaatgccatttttccccagactctaataccagagcttagaatttttgttttgtttgcaataacagtaatgatacataatcataatttattctcctctactagattgtaaatcccatgaaagtagcaatattgccattttgtttgatgcttggtatttcataataccaagattttcaataaatatttgt

SEQ ID NO: 694084 - DNA, 672 bp, Homo sapiens
tgtattttgaaactattagatatttcaggctatgtcaaagatcctagattatttaatacagacatccaatcctaatttctgtttcttttcctttaggtaaatcattttattttcacttgattacctgagtatagcttccaaaaataactaagacatatattcacataactaaaaaatgatctctcatttatttatggcacatattaaaaatatataggataggttaaaaaagtagataactgtataaagaactcatctgtgaaacatgagaataaaaaaataggttaataacaatgctgtataaagttattcttttctgtttttcagaatccatctgagaatatgctgccacaaataccctttttgctgctagtatccttgaacttggttcatggagtgttttacgctgaacgataccaaaygcccacaggcataaaaggcccactacccaacaccaagacacagttcttcattccctacaccataaagagtaaaggtaaattgaattgtatattttgttctattaacaagttgcttgttgctttctataatcttaataatctctttaacaaaatgcatttaactttggtgttactttccaacttctgaattagcccaaattattacaacaaagtgatctgtgaaaaaagtagaacaagaatatccaataag

SEQ ID NO: 694085 - DNA, 672 bp, Homo sapiens
tgtattttgaaactattagatatttcaggctatgtcaaagatcctagattatttaatacagacatccaatcctaatttctgtttcttttcctttaggtaaatcattttattttcacttgattacctgagtatagcttccaaaaataactaagacatatattcacataactaaaaaatgatctctcatttatttatggcacatattaaaaatatataggataggttaaaaaagtagataactgtataaagaactcatctgtgaaacatgagaataaaaaaataggttaataacaatgctgtataaagttattcttttctgtttttcagaatccatctgagaatatgctgccacaaataccctttttgctgctagtatccttgaacttggttcatggagtgttttacgctgaacgataccaaatgcccacaggcataaaaggcccactacccaacaccaagacacagttcttcattccctacaccataaagagtaaaggtaaattgaattgtatattttgttctattaacaagttgcttgttgctttctataatcttaataatctctttaacaaaatgcatttaactttggtgttactttcyaacttctgaattagcccaaattattacaacaaagtgatctgtgaaaaaagtagaacaagaatatccaataag

SEQ ID NO: 694086 - DNA, 645 bp, Homo sapiens
caggtgaatgtttattacagcactagtcacaataacaaagacatgcccatcattggtagattggataaagaaagtggggtacatatacaggtcattttattaggaagtgagataaagtgtatgttaatgagcatgttgcttttgtgggcctaatcccaacagcaaccctctgagaagctgtgtggagcatccctcaagtcatcctttcttggatgatggggaggctggggcatttatccacttaccttccttccccattggttgatgggtgtccctggtggcatgaacccctctcacttcagggttgcatttgtttttgacagagcaaaccccatggtgttggagaatcaggagaagaagagagaggctggtctagaggtgcagagctttcagcaaactgcttaccacacctaaagtgaattcaggtgggccccgcaggtatggggtgtggtgttgacagggtctgctacacttggcaagggttaagrttagaattagagtcaggattagtaaactctgataggttgaagtaaacaaagaaaaaagagcatcagcatcaacctctcccactctttcctcaggatatattgagaaccacattttggcaaagtgtgtataaactattaataaagtatcatttatttc

SEQ ID NO: 694087 - DNA, 644 bp, Homo sapiens
gagaaggaggactcaaggttaagaggcagggatggggtactctttacagaggggagagagacactttctttagacttggcaggattgtgtgagattcttgttagtsttgaacttttatcttttagagacatgatattctaatttcataaaagcaaaatgattaacatcctgatgcagatttgaaatgaatttccctgatgacatggtgcctccaggaagaaatctgggtggctaaggataaaggtgggggagtttggaatttcgtactgtgcctatatacctagtcaataaaatgtgttttgaaataggatcttatgacagccaaaataataaaatacctgtggataaatctgaaataagaaatgtggaagatatgtatgatgaaaactttaaaacacaaagagatttgctagaagagttaaatggaaaaaggaacaggttagaaaggaagacaatattgaaagatatcaattcttataaattaatccaataatcaatgaaatcctaattcaaagggcaacagagttttgttgctcttgttgtgcagaggaatttggtacagtgttacaaaattcatctggaaaaatcaaattgtgagaataacttggaaaatactccaaaagataagtaatgaggggcaactt

SEQ ID NO: 694088 - DNA, 1146 bp, Homo sapiens
ctttaaccagcagttctgtaaattagaaagatcattcagattgctttggtgaaaatggatcgaggagtctaagactggaggcagtgaaaccagttgagggtccctgaaggttaaggtgggctgatggaggagggagtggcagtagagttggaaagaggcagatggatacctgggatattgaagaggtgggttcagcagaaccgtttatggatggtgtgggtgtgatggatgggacaggtgtgtgggggtggaggagagggatgagttgagcttaggtgggtgggagcagggagaaagggatgatcctgggagattgtttccttgtttctgcaggggtcattctaccagacctgctgaaccaaggtgaccaagttacactagtttctcctttcaggaggtagctgagaaaatccgtcagttgtttgctgagcacttaccttttaggataaactgcctatggtctgttttcttccaggcagaggtgatgtcttgttcctcctcagtttgagtgggtgtttttttctctaatgattaatcatcttatagctcatttgcatgagacatctgtgaycttgattaaggggaattctcctcacacttgtgacccatgcaggtcctcgtcgatatggggttaccactggctcagtggcctccagagaacttcagatctcttgtgcaaagaatgagagatagttggggaaatacagatttcattactctttcatgtaattgaattggaaatgtatctcacttttatctgaaaagtttttggagaaatgtgaggcaaattttatgtagcaatcgatgttctttgagaaagaagtataacctctgtaacaaaagttcagttgtgttctctctttaggaaaatccagtatacaaaaatctgaatttacaaagcacgcacattctgggtagaggtaattagtggttgatgattttggtaatgaattcttggctttgtgaaaagatgtcctttgagaatcttttgtaaagtaagttttctatgttctttaagtgacttggattttaggaataaatttttggaataagtaacagcctatctgggtattataatgtatataatctactatgtactgttatgcgaatcttggccaaggattaggaagggttaagacccgtttg

SEQ ID NO: 694089 - DNA, 1146 bp, Homo sapiens
ctttaaccagcagttctgtaaattagaaagatcattcagattgctttggtgaaaatggatcgaggagtctaagactggaggcagtgaaaccagttgagggtccctgaaggttaaggtgggctgatggaggagggagtggcagtagagttggaaagaggcagatggatacctgggatattgaagaggtgggttcagcagaaccgtttatggatggtgtgggtgtgatggatgggacaggtgtgtgggggtggaggagagggatgagttgagcttaggtgggtgggagcagggagaaagggatgatcctgggagattgtttccttgtttctgcaggggtcattctaccagacctgctgaaccaaggtgaccaagttacactagtttctcctttcaggaggtagctgagaaaatccgtcagttgtttgctgagcacttaccttttaggataaactgcctatggtctgttttcttccaggcagaggtgatgtcttgttcctcctcagtttgagtgggtgtttttttctctaatgattaatcatcttatagctcatttgcatgagacatctgtgaccttgattaaggggaattctcctcacacttgtgacccatgcaggtcctcgtcgatatggggttaccactggctcagtggcctccagagaacttcagatctcttgtgcaaagaatgagagatagttggggaaatacagatttcattactctttcatgtaattgaattggaaatgtatctcacttttatctgaaaagtttttggagaaatgtgaggcaaattttatgtagcaatcgatgttctttgagaaagaagtataacctctgtaacaaaagttcagttgtgttctctctttaggaaaatccagtatacaaaaatctgaatttacaaagcacgcacattctgggtagaggtaattagtggttgatgattttggtaatgaattcttggctttgtgaaaagatgtcctttgagaatcttttgtaaagtaagttttctatgttctttaagtgacttggattttaggaataaatttttggaataagtaacagcctatctgggtattataatgtatataatctactatgtactgttatgmgaatcttggccaaggattaggaagggttaagacccgtttg

SEQ ID NO: 694090 - DNA, 604 bp, Homo sapiens
tttcaacactaccatattggggattaactttccagcacatgacatttgggggacccatgcaaaccatatcatggagragggacatccttgttaggtagtggtagaaagcttagtgccactattgtctgcagttacatggaaagcaaaatatgtacctaataaacttagtgatctagctatggagatgtccaagcaaagtgttgaaaataatttcttcttactgcttatgtgagaagagagaaaaaaaaaagttaaagtgagacaggacctgatagttttgaaaattctcagtctcccaagtcagcaaaaggtgctaaaattaagaaatggcatttgagcaagaaatggtggtctgagataaagctgtgggtgtgactgtgggcctttggttaagacttcagaaagatcaaaagatcatggtattattcagtcatacaaaggccctttaaagagattagggtaggcctcatagatcctccagatcaaacaatagggactctaggaagccaaggggctgtcccttggccatcttttcaagaggctcaggttgaaaagtttagttctcaaagaaatttgtgggtttgtttttttgtgtaatagaggg

SEQ ID NO: 694091 - DNA, 2482 bp, Homo sapiens
tgctctgaaagagttcatgttgggaggaggactctgtattctaraaaagtttggcttgtgccagtgcgtcgtaggagcctggggttgcccagtgtgggtggggctgagggagggcacaggtcccaatgcatctaaaggtttcaggagggagacccttgcacaggcttataccaggtagacaaggaggtgagactagacttcaaggctaaactttagcagctccttgaaaggttgagacttcctagttcagcattgtaatcacaaagcttatcacagaaactggcacagagtaggcaaggaaaaatatttgtgaaataaataaataaagtttactaggagtcaatgtgcttcattttatggaatagatgtgcttgcccaaactcacgcataagccataaccaaacctatacgtcaaacataactggggagaaattcaataatgaatcaattcataaaaagacaaatcatttcataatgggcagaatctacttcctttatattatcactctggaaagtattctatttaggcccagggtaactcttaaacttaaatctatttcagaacacccaggaaaatggttaaaaatactgaattagttgagttctattctcaggaatccatgattttacagaggtggggctcaggaatctgcattcttccaaagagcattcaagcaagtcttctgaagcagggagttggtcagtgcaacccagtttgagaaacacaggataagtcctagagggcattttttaaaggaaacacagggtattttttttaaaagttgggggtgtaactgagatggatcagaaactgcagggctcctggaaaccgccccatctggctgcctcttcttcccttaccctgcctgacacaacatagagagatgtccctctatttccagaaagacaatcaactcctgaaaagcccattttctacttcactctttgatgtccttcataatctctttcccaaaagcctctcatgctctatcacatcatgtttctcctctttggtgcacacgaatccacagtgagctgtaaaaatcaccgatgcctgggtccctccctgggcatgctgacttatttggtctggggaatcaccttgtcaccctgctggttctaatcaggatccgagttgcatggactgcactaaaccctttatccctgcacctttttttctggcccggagattaatgtccacaaacccctcagctttcgctaagtatccccctcagccatatctccagtgaccagaagaggtatctagagaagaaagataaagccacatgcaggactggctctggaggctggaggctacagataaggcttaagaggggtccctggcggtccccaagttcactcctgagagtgggaagcctgttcatcaccctctgattgcctttcctcctgtctctctgggttttgtaggccagagacatagagcactatatggactcctggtgggacaggttgctggcaaattgatttcaccccaaccccagggtgggcaagcagacagtacccatcaaatctctcacctccttcctgccagacacagggcactgcagctcagaggaagtgagtgaatagctgaaactgacgtggctgcagaaattgacatcaagtgccagacaggcatttgcttagcaaattggctaattttaacctctgcctcacagaccaaaactctctggaaggaaagaaacaaaaagaaagtgatatttaacacatttctatttctgtgctacacagtctctctctgaggttgcaagtttgagcctaattgatttcttagtcaaaagaaaaaaaagccaaaaaggaaaaaacaaacaactgagagagatctcacattgcaatcaaacctctccagttctgttgtcgactgctgagcttttttttttttttaaagactggccaagtgacttgcataatttaagatcctttctagcactgatcagcccgctctggccaagcagtttgctgattaattattaatcagactgagtttaggatgagtaatcagcaagagtcagtgctaatttgcaaatgtcccccaggaaggttattacttaaaatacttggtggagaggctccatgttaacctttgcaattagccacaggacattgtaactggcaaggcagaagcagatctctcctccaaacaaaccaaccttggatacctactaagtgccaagatgcacattaggggcttgtcacggttctgctggcaatggcaggggaggggaagggcacagaagaaaaagaaatacgtaagtaagcaagaaaatatcaggtattgatgaatgtttaaaataaaacaagatcctctgatagacagcaagggttactttaggctgcatggacgggaaagtcttttctaaagataggaaatttacattgaactctatatttcaaaaaaacagtggtttttgttttttgtttttttaacttggaaggaagatttgaagactgtgaaggagga

SEQ ID NO: 694092 - DNA, 922 bp, Homo sapiens
gccgagacaagagaatcacttgaacctgggaggtggaggctgcagtgagcgagattgtgacattgcactccagcctggctgacagagcaagactccatctcaaaaaaaaaaaaaaaaaaaaaagaaaagtaaaaaagaaaaaagtacagactaagggatagaactgaagacttaagtcagtcttgggaacctgggaagtggttgcagtagcaggagagacgcaaaccaacgtgaaacaacatgtaggttaagctgagagtgagtggaacaaacattcatggccaaacatgaaaacagagaccaggagggggccttgaacattcagaatgaagcaacatcattccagaagacaggtcttgccagaacaaggggctctggaggacccagaacarctccttccatctgtcttagcggcaccatcaggcatctggcagctcctcaagagaggtcgaggacagcattttgttctctggtgcccttcacagtcctggcacaggccgcctcgcagatgaggcacttagtacaaacctgttgcatgcagtcagacccatggggggcaggccagctgcccgacctcagcttcccatgcacagaactttgccaagtcacaagctttagcagagccgctgtgcccactgcgacaacaccagttcacttcctgctcctcccagctgtgacttttgttctctttttgagagcaagttctcactagtggaagcaaggaagtcacattgatactccatgtagagtgctggagccctggccttcactcctccggacacatttgtgccagcagcatgctaaggcactaatcttttcttactgctccgcggcagagcttgtaatgctatttccaactccaagagatacaggagacgagattttaaagggctggttatttatggcttggctcctgatggat

SEQ ID NO: 694093 - DNA, 627 bp, Homo sapiens
ggtatgtatatatttttaattgacaaatgataattgtacatattcttggagtacatagtgatgtttagagccatataatttgtagtgataacataagggtaattaacatacttgtcatctcaaacatttatcatttctttgtgttgggaacattcaatgtcctccttctagttatctaaaactgtacattattgttaactrtagtcatcctagagtggtatagaacactataacttattcctcttattcctcctatctagctataattttgtaatctttaacaagtccttccttatccctcctctctgcgtttttgttctattcaggtcctcgatagatgtgtgatgcctgccctcattggtgagggcaatcttctttacttcatctactgattccaatgctgatgacctctgaaaacacccagcaacaatattttatctggtatctgagcatcccttagcccagtcaagttgacacataaaatttaccatgacaaggaccaagagttgttttccctctgccaaggtagatcctgtataaggcagggacagccgcatgggatagcttccagaagggacaatcctggagctgagttagtctgggaagaaagcaaacaagatgaggaca

SEQ ID NO: 694094 - DNA, 627 bp, Homo sapiens
ggtatgtatatatttttaattgacaaatgataattgtacatattcttggagtacatagtgatgtttagagccatataatttgtagtgataacataagggtaattaacatacttgtcatctcaaacatttatcatttctttgtgttgggaacattcaatgtcctccttctagttatctaaaactgtacattattgttaactgtagtcatcctagagtggtatagaacactataacttattcctcttattcctcctatctagctataattttgtaatctttaacaagtccttccttatccctcctctctgcgtttttgttctattcaggtcctcgatagatgtgtgatgccygccctcattggtgagggcaatcttctttacttcatctactgattccaatgctgatgacctctgaaaacacccagcaacaatattttatctggtatctgagcatcccttagcccagtcaagttgacacataaaatttaccatgacaaggaccaagagttgttttccctctgccaaggtagatcctgtataaggcagggacagccgcatgggatagcttccagaagggacaatcctggagctgagttagtctgggaagaaagcaaacaagatgaggaca

SEQ ID NO: 694095 - DNA, 627 bp, Homo sapiens
ggtatgtatatatttttaattgacaaatgataattgtacatattcttggagtacatagtgatgtttagagccatataatttgtagtgataacataagggtaattaacatacttgtcatctcaaacatttatcatttctttgtgttgggaacattcaatgtcctccttctagttatctaaaactgtacattattgttaactgtagtcatcctagagtggtatagaacactataacttattcctcttattcctcctatctagctataattttgtaatctttaacaagtccttccttatccctcctctctgcgtttttgttctattcaggtcctcgatagatgtgtgatgcctgccctcattggtgagggcaatcttctttacttcatctactgattccaatgctgatgacctctgaaaacacccagcaacaatattttatctggtatctgagcatcccttagcccagtcaagttgacacrtaaaatttaccatgacaaggaccaagagttgttttccctctgccaaggtagatcctgtataaggcagggacagccgcatgggatagcttccagaagggacaatcctggagctgagttagtctgggaagaaagcaaacaagatgaggaca

SEQ ID NO: 694096 - DNA, 973 bp, Homo sapiens
ttctatttctaagcaaattaccaattaagtacgaaggtggaagtaaaatctcagtagttttaccctattgcattcttctttaaaatctcctggtagatttactcacaaaaatgagagatccaatccaccaaacagaaaaaaggatttcccaggatgatgttaaaaaaaaaagttccagaacagtaactgtgcagcaggcacagagaacagtctagagaggaaagggaggatggagggttccaggagggaccttggcaagaaaaaaatggaatgtaagggtcaaactgttatcttcactccaattaagagagccatcttaatatgagtaacagtccactaacaggtytaacatgatacaacattaagcagacaacacaacatcacctatgaaatattttaggcaaaacttgactccattagacataatgtcaagtttataggaaatacaaactaaatggcacctcaagtaaatcagacaaatctagaaggaggaatactgtgaaaaataagtggccttgttcagtcaacaagtcagtgtcatagacaggggactgtgctggattacaaaataccacacacacagagacaaattaataaacataacaaaaagatgcaatgtctggtcctggattggatactggtttggataaaatagctgctgcaaaggacatttttggatcagctggaaattttaaatatggtctgggtagtagatgtaatttcagaaattaaaaggtggaattcatttgctgaagaaggcaaattgcagaatatgtacatgattaccttattttgagagtagcatacacataattattttggtatcaaaagatataagaatgtatgtatacatccacacccacatacaggttcatacaacaaacaaacctcacataggtttagtttcataaaatttctaaattcacaaagtgaatataagactgatttttttcagggaggaaatttaggtaca

SEQ ID NO: 694097 - DNA, 801 bp, Homo sapiens
aggctcccatgagcaggagaggacccaacccccaaccccattgtgcaaccaatgacaatgagagccaggcgtcccctttcttacccaccactttcctccccacaccatggggtgctgccagttcagcacaatagtgtattctgtgtccaaaagcctctgctggcagcccctagtcttttgcagcccctccagacaatggcagagcccaaaaggcctgatagccggtgacaaatgtatgtgaatgaccagctcacaggaagtggccttcaatagtccgatagcttcctgtatcctgacattgtgaaggcccacttcctgtgctgtctctgaaaatacagcaagtcaaagctgggggtgggtccagaggcagggtttccctgtctaccccctagcccaggctcccctataaaacgcaactctgtttgcctaaggatgccaccagccagtctcacctgacttctgattcaagggtgaattcctggctggtctctgacctgtcccttcacctcttaaccaaaccccacccaagcccagtcagaacaaaatgacctatttttaaagattttacagggcttcctcagtctcacccccgacccccsctttccagttccccaggccttctcctgctgggaaaggctttctcatgtctactcacatacctttgctgcatactaaaacccatttccgcgtgtccgccggtcactctgccctgaatgatacccttcgataggtttacaaatgctcattaagtcccccttcaagtttatcttcccggagccgataatcacaatgccttcagct

SEQ ID NO: 694098 - DNA, 921 bp, Homo sapiens
ggaaaagtgcagcaagacggaggggcttttacattttcactgcctggctcccaacccactactctggcaaggctaattccatgatgtttcactcagcggcagtcccaccagcctggagccctggggagctgaccagagtcaaaaggctccctggcaggcttgttctggcagctgcccagccgacttgtgctaacacagcaacaggcacaggaaagagtctagaaagagtggaaaagcaccagacactgaaccgctgcagggagagaagtgattcctgccgtgctcggagaggaccctatactaaagccaccaccatcaytgggctgggaagagacgggggtaagcggggagcaaaaagccccaagcacatccactcactcatgtgtttcagtgaactgtgactggaaggccagtcaaaaagagggtcacatgcctccaaggtgaatcagcaagcatggaagaaaaccggtctgcaccttggttcatcccagcaaccctgacctgtctatacccacgtccacataaaccttgctatctaatgtcacccgagcagaggcaagagcacatatactatcttacagccaccgcaacggctgatttcagccagcctgtgggaaagaaagatctagctgagaacactaatagacttgctagaggaagaattcagtgacaaagtgcccttggaaaggaaagaaaagaatttaaaagggggcacaatcaaagtgagactggaagaagggagccacctggattcccaaagatagggctctctcgaccagacaccaagtggaggccaacgggtggtgacagggatattttaaaagatctgaaaatccaaaaatgtccatgggaaatgtgtttgctattatttctgtaggctttccatcctcacatttttcttaggttattaagctgcctttg

SEQ ID NO: 694099 - DNA, 921 bp, Homo sapiens
ggaaaagtgcagcaagacggaggggcttttacattttcactgcctggctcccaacccactactctggcaaggctaattccatgatgtttcactcagcggcagtcccaccagcctggagccctggggagctgaccagagtcaaaaggctccctggcaggcttgttctggcagctgcccagccgacttgtgctaacacagcaacaggcacaggaaagagtctagaaagagtggaaaagcaccagacactgaaccgctgcagggagagaagtgattcctgccgtgctcggagaggaccctatactaaagccaccaccatcattgggctgggaagagacgggggtaagsggggagcaaaaagccccaagcacatccactcactcatgtgtttcagtgaactgtgactggaaggccagtcaaaaagagggtcacatgcctccaaggtgaatcagcaagcatggaagaaaaccggtctgcaccttggttcatcccagcaaccctgacctgtctatacccacgtccacataaaccttgctatctaatgtcacccgagcagaggcaagagcacatatactatcttacagccaccgcaacggctgatttcagccagcctgtgggaaagaaagatctagctgagaacactaatagacttgctagaggaagaattcagtgacaaagtgcccttggaaaggaaagaaaagaatttaaaagggggcacaatcaaagtgagactggaagaagggagccacctggattcccaaagatagggctctctcgaccagacaccaagtggaggccaacgggtggtgacagggatattttaaaagatctgaaaatccaaaaatgtccatgggaaatgtgtttgctattatttctgtaggctttccatcctcacatttttcttaggttattaagctgcctttg

SEQ ID NO: 694100 - DNA, 921 bp, Homo sapiens
ggaaaagtgcagcaagacggaggggcttttacattttcactgcctggctcccaacccactactctggcaaggctaattccatgatgtttcactcagcggcagtcccaccagcctggagccctggggagctgaccagagtcaaaaggctccctggcaggcttgttctggcagctgcccagccgacttgtgctaacacagcaacaggcacaggaaagagtctagaaagagtggaaaagcaccagacactgaaccgctgcagggagagaagtgattcctgccgtgctcggagaggaccctatactaaagccaccaccatcattgggctgggaagagacgggggtaagcggggagcaaaaagccccaagcacatccactcactcatgtgtttcagtgaactgtgacyggaaggccagtcaaaaagagggtcacatgcctccaaggtgaatcagcaagcatggaagaaaaccggtctgcaccttggttcatcccagcaaccctgacctgtctatacccacgtccacataaaccttgctatctaatgtcacccgagcagaggcaagagcacatatactatcttacagccaccgcaacggctgatttcagccagcctgtgggaaagaaagatctagctgagaacactaatagacttgctagaggaagaattcagtgacaaagtgcccttggaaaggaaagaaaagaatttaaaagggggcacaatcaaagtgagactggaagaagggagccacctggattcccaaagatagggctctctcgaccagacaccaagtggaggccaacgggtggtgacagggatattttaaaagatctgaaaatccaaaaatgtccatgggaaatgtgtttgctattatttctgtaggctttccatcctcacatttttcttaggttattaagctgcctttg

SEQ ID NO: 694101 - DNA, 739 bp, Homo sapiens
ccctgcctggccagcccattgccctgggggctgcctggccagggggcccacttcttgctgggctgccagaggggccttgagtgttgaaatccttccattccacaaggccagaaacttgattatggtattaattaaagcaagatgccaagtctgggagatttattttcttttccatatctgtggctgtaaatgccactcagggagctcaaaggcccrtgtcagcctgcatcaggctcctgaacagacgttctgttcccagtttggtctcctcagcccctccttctcagcaccaggaaggaagtgtgtgtcgtgatacccacgcctcaccccaatttcccctcctccttctgcacaaggcgaaaagggggaaatacctgggcaatgtggggtggggatgaaattttccaagaaatttgttttaagtttctgcctcatcattataggactttcacgtttctatttttagctgcgcaaacgagccaggcccacattcccctcatctccccctgccccaacctttatttatacaaagcacatgctggaatcattatttaaaaacctccaaacccataattgctcaggtaggtgaagaatgcagcctttatggctgtcgcttgcggagagggctgcagtgttagtggggaactatggcttattcatatgtgtaccaccctgtacctcacccaccctgaacccctggaatgcccagaagaatcaagtaacttagaagcatttgtga

SEQ ID NO: 694102 - DNA, 939 bp, Homo sapiens
cttatatatattaaattctttaatcctcacaacaaccccatgaagtagatattattgatattcccattttatagatgaagaaactgaggttcaatgggtcactaactaacatacccaatagtcacacaattaggaagtgtggaaacccaggttcaggtccaggggtctgcccccacagcctttgatcrtaactcctgcctgcactcttatgttcccagtaaaacactcaaggttgtccaccctctcatcttgcacctcaaccatgcccctagcagtcatcttcccagtgagtctgcagtcacacaaccacagggttcctattggttggaggagcccttgggaaccatgcactccagctctcttatttttcaaatggagaggcccagttattaagtaatttacccagaattacactgtgaggtagtggcaaagctggacacatgataaattgtgatggaagtgattgatgacttgccaatctcaccaacaatcaaaaatcctcaagtgaaagccaagtgtcagggtgtggaaagcactggtgtctgttgtcacttcatctacaacatccattgctcacagtagataacacagctcccattatatagtttgagaagaagataactatccagcatcctataggtgggaactgtctaagctggaaaacattcattcatttatttattcatccattcatccatttaacacatgtttagcaagggcctcctgtttgcctgcctagctgctaggtgaacaaataagatacagccccagtcacaatagagattttgctttggaaaggaaggccaatatcatttgaattgtcccataaagttctttaaagtttaaattgtaacaactgctacaaaatgctcagagaacttaaaatatgaggaattgatggagagttaggagtcacagggaattgatggggactggggg

SEQ ID NO: 694103 - DNA, 600 bp, Homo sapiens
gttttggctttgatttcagggtaagattgcaataaaattctggctttccaagctcaagccggtctggcccatgctgccttcacctgcaaggacttcatttcctgccatcatggcagctctgtctcatcagtgtcccaactgcttagtgtttctttcactctcaggcttggcttctgtttctgctgccaccagcctcatggtacaggccctggaggagctgaaaaagcatgtggattttgtgggcctatggatttttgaaatgttatgaatgttgatttattatcttctctgcatgtacaaaatggccttctaaaaactttatggatatatttacatgggaatttccaactaaagartgtactgtaataccaagaaatttgttgccaatattggttcatttccaagtgatattgaatcaggtctaagtaaatatttatgatttatcttgaaatgtgacagactcatgacacagtaattaattttactgtaggctgcattcagaatggctttggtaatatatgagtaggtgtgtaaaatgtttatagggttttcaaaaataagcccaaggcttaaatgaaaccttaatcagacaaccgagga

SEQ ID NO: 694104 - DNA, 2034 bp, Homo sapiens
cagactgttacacttgctttccttggcaagctctaatcaatgagccagccacagaggatcgaaggcaactgtgatgaaatgccaccttatgaagtaattggcttcatggatctgcccagatgaatcataaaactattcatcaatatcctcagttgtgcagcagtgagctgttacatggttagctcaaggaatactctgatcaggaaagcttattgtacgattcatttggcaacctattaatcatcttcaccttagaatagaagagggtaggaaaaggaacaaataccatcatcaccattaagccagggctagcaggcacgaacttctctgctaatatagatgcaaaatctaaatgcacttacaatgttttcctgtcaagaatataggtgttacacttttctattcgaaatttgtatttccctcagccttgatttattgttgtccataaaaatttacgtgaatattggaaaaagtggctgtacatgtgctgttgtctataaggtaatgttattcgtgaaagaaattccacttgcacaaattcctgagctataaaattcaggatattctgaattaagggagaattaactgtagggggaaatgtaggtatcacagaaaattctgctggttaatgactagtcctctcatatgcaaaagcaattgcccaaactcagcaagagatagtactttacacacttgctactagagactctgaaatagtagccacatggatattgttcttgagcattttgaagtaagagctagatgacaatacattttgcttcagaaggacgttacctgaactggcacatttttgatattttaaagtatgtgtaaattccatattctaaaactggtattgacaacttagatctaactttgaagctgaaacacagagaggaagacttctccatatcatgtatttcacgccttcctttgttcttcactcattcattcatttagtcttgccatgaagacaacgagaatggaaaactaatgcttcatggtgtaggcccaagggtggcatttagggaaattttatggaaagttcatttgatttgggccttgaaggttgtttgaaaattcaacatttggtgatggagaaagggaatgacagggaatgaargagacatgggcacagaaatatttaggacaggccctctggggtgtgatcaggaatggaaacgatgaggccatgaatgggtgctaaggatggagccaaggtcctggagcctcgtgtcccttgcagggaatctgcaggatcactggatggcagaggggcctttgcatggactccagcagtccagtggccaggtcagccgtgcggtgaccatgtgggcctaacataaccctcatcttcactggactccagacagacttctttctgaccttcctttgcttacagcattaactttagaaagacttgaaattgcaaatcatttctctgcccatgtgagatacaaatcttctcctagattcttgccagttttacactcaggaatatttttctcaaggagctagaagcgattcctttgaaatgtaatcatctctgtgggagagtgagagcctagttttataagcaccaatcagaaaatccagatggcttaattgcattggccgacctcactcctgacatcttcccatccctctccactggctcaccccagcacttaaactctatcctgccatttgtttcagtggagttgagttcaatctctctcccctattgccccagtcttgaataaagtcttccttgcctgtttatcccacctcatgcagtttttctttgatagcagtttaagcagattaatctagcaccacagggaacagcggggaaatgaaaaatcctgaaggaaataccaggcaggagaatttatttaaaatccagccaaaattcactaaaacctaaacagtgcagtcttctggaaatggaaagaggttgctcagggacaagcataggcatgagattcagggcagcctaggggagaagtggccatcagcggcacccaaggccaaagggacctagcttagtggatc

SEQ ID NO: 694105 - DNA, 2034 bp, Homo sapiens
cagactgttacacttgctttccttggcaagctctaatcaatgagccagccacagaggatcgaaggcaactgtgatgaaatgccaccttatgaagtaattggcttcatggatctgcccagatgaatcataaaactattcatcaatatcctcagttgtgcagcagtgagctgttacatggttagctcaaggaatactctgatcaggaaagcttattgtacgattcatttggcaacctattaatcatcttcaccttagaatagaagagggtaggaaaaggaacaaataccatcatcaccattaagccagggctagcaggcacgaacttctctgctaatatagatgcaaaatctaaatgcacttacaatgttttcctgtcaagaatataggtgttacacttttctattcgaaatttgtatttccctcagccttgatttattgttgtccataaaaatttacgtgaatattggaaaaagtggctgtacatgtgctgttgtctataaggtaatgttattcgtgaaagaaattccacttgcacaaattcctgagctataaaattcaggatattctgaattaagggagaattaactgtagggggaaatgtaggtatcacagaaaattctgctggttaatgactagtcctctcatatgcaaaagcaattgcccaaactcagcaagagatagtactttacacacttgctactagagactctgaaatagtagccacatggatattgttcttgagcattttgaagtaagagctagatgacaatacattttgcttcagaaggacgttacctgaactggcacatttttgatattttaaagtatgtgtaaattccatattctaaaactggtattgacaacttagatctaactttgaagctgaaacacagagaggaagacttctccatatcatgtatttcacgccttcctttgttcttcactcattcattcatttagtcttgccatgaagacaacgagaatggaaaactaatgcttcatggtgtaggcccaagggtggcatttagggaaattttatggaaagttcatttgatttgggccttgaaggttgtttgaaaattcaacatttggtgatggagaaagggaatgacagggaatgaaggagacatgggcacagaaatatttaggacaggccctctggggtgtgatcaggaatggaaaygatgaggccatgaatgggtgctaaggatggagccaaggtcctggagcctcgtgtcccttgcagggaatctgcaggatcactggatggcagaggggcctttgcatggactccagcagtccagtggccaggtcagccgtgcggtgaccatgtgggcctaacataaccctcatcttcactggactccagacagacttctttctgaccttcctttgcttacagcattaactttagaaagacttgaaattgcaaatcatttctctgcccatgtgagatacaaatcttctcctagattcttgccagttttacactcaggaatatttttctcaaggagctagaagcgattcctttgaaatgtaatcatctctgtgggagagtgagagcctagttttataagcaccaatcagaaaatccagatggcttaattgcattggccgacctcactcctgacatcttcccatccctctccactggctcaccccagcacttaaactctatcctgccatttgtttcagtggagttgagttcaatctctctcccctattgccccagtcttgaataaagtcttccttgcctgtttatcccacctcatgcagtttttctttgatagcagtttaagcagattaatctagcaccacagggaacagcggggaaatgaaaaatcctgaaggaaataccaggcaggagaatttatttaaaatccagccaaaattcactaaaacctaaacagtgcagtcttctggaaatggaaagaggttgctcagggacaagcataggcatgagattcagggcagcctaggggagaagtggccatcagcggcacccaaggccaaagggacctagcttagtggatc

SEQ ID NO: 694106 - DNA, 660 bp, Homo sapiens
agacatcaataggtatttcaatagtccatagtcagaggacttcaatagtcaatagttcaaaggaattcatagctagataaggcattcaataattttcccccacatatttttggggtgtataaagttttatttccaccaaactaaatagctacaattacctttaataaataaccgctgttttaacaagatatatgctctttaacatttttttcataagtttatgtttcttttacatacttttaaaaatgtacgtgaaaaatgagtgtgatttttggaagtcttagaacaaattaaaatatttatcactaaaataaatgatactagccctttcactcaaactgtttctcttttaactggagcaaattaaataggtgggtacaggtgcacaaagaaggttttgcccaacatccttatgatggaagagctccgaccaygccatgtgagcacgaacgcagctgtccatgaaaacagataaagggattcacgtatgcatcagccacaagtgtgggcaccactgtaggcaccaaaacttcaattgggaggactcggaagttgagaatgtatttaactattgtcctctaggaagcaagttagtctttcagctgcagtgtttggaatgaactctgccttgctcagtcgctgagtacaaaataagaatat

SEQ ID NO: 694107 - DNA, 1016 bp, Homo sapiens
tgcggagggatgtgctttcttaaagcagaaggttgacactttcctgagccgcctattccatttcagtactaacagctgtcattagagcccatctccagcttgctcttcatctcctacgtccatcgcaaaaaaatcacattttgcaagggatggtcctatggggtctttctgcttcaaaaaaaaaaacctagtgtgtaacctcactgggttaagtggactatcacaaacaaaagtattcagagtagatttattccatgcaatattttaatggactctttagaataggaagagtggtttctgatatggagaggctgtttcaggttggaaggaaatgtgcagaggttcagaaggtccgtccttcctaagtagccagactgcttcacttgccatcttagtatccagacataaatggaggctgtcagtcatctctgtctttgccacttccatcttcacctttgtcatagagctcagaatcacttcactgtgaatctagcaagttggccaggggccctgtggaccagcgatgctttgggaacaggcacactctcggcacttctcagatacctctgctrtttgactgagcatgcaaaataaccagctggtccccaaagaacagattcctgtggaggaggctgtaaaactcctagttagtgagacatatatgcagtctgtgcttctccacgttccctctccaagaccttatcgttcaggctggaccagtcctcaagggaaaatctcagaaactaaaatttcttgtaggctgcaaatgccttgaacttacattttcttttaatgaaacatttgcctacagtggctgaacacagacaattaaaaaaaacatgtggtcaaaggacctgaatagacatttctccaaagaagacatacaaatggccaataggtatatgaaaagatgctcagcatcactaatcattagtgaaatgcaaatcaaaactacagtgagataccacctcacatctgttagaatggctgccatcataagcaaaagacaacaagtg

SEQ ID NO: 694108 - DNA, 1016 bp, Homo sapiens
tgcggagggatgtgctttcttaaagcagaaggttgacactttcctgagccgcctattccatttcagtactaacagctgtcattagagcccatctccagcttgctcttcatctcctacgtccatcgcaaaaaaatcacattttgcaagggatggtcctatggggtctttctgcttcaaaaaaaaaaacctagtgtgtaacctcactgggttaagtggactatcacaaacaaaagtattcagagtagatttattccatgcaatattttaatggactctttagaataggaagagtggtttctgatatggagaggctgtttcaggttggaaggaaatgtgcagaggttcagaaggtccgtccttcctaagtagccagactgcttcacttgccatcttagtatccagacataaatggaggctgtcagtcatctctgtctttgccacttccatcttcacctttgtcatagagctcagaatcacttcactgtgaatctagcaagttggccaggggccctgtggaccagcgatgctttgggaacaggcacactctcggcacttctcagatacctctgctatttgaytgagcatgcaaaataaccagctggtccccaaagaacagattcctgtggaggaggctgtaaaactcctagttagtgagacatatatgcagtctgtgcttctccacgttccctctccaagaccttatcgttcaggctggaccagtcctcaagggaaaatctcagaaactaaaatttcttgtaggctgcaaatgccttgaacttacattttcttttaatgaaacatttgcctacagtggctgaacacagacaattaaaaaaaacatgtggtcaaaggacctgaatagacatttctccaaagaagacatacaaatggccaataggtatatgaaaagatgctcagcatcactaatcattagtgaaatgcaaatcaaaactacagtgagataccacctcacatctgttagaatggctgccatcataagcaaaagacaacaagtg

SEQ ID NO: 694109 - DNA, 1016 bp, Homo sapiens
tgcggagggatgtgctttcttaaagcagaaggttgacactttcctgagccgcctattccatttcagtactaacagctgtcattagagcccatctccagcttgctcttcatctcctacgtccatcgcaaaaaaatcacattttgcaagggatggtcctatggggtctttctgcttcaaaaaaaaaaacctagtgtgtaacctcactgggttaagtggactatcacaaacaaaagtattcagagtagatttattccatgcaatattttaatggactctttagaataggaagagtggtttctgatatggagaggctgtttcaggttggaaggaaatgtgcagaggttcagaaggtccgtccttcctaagtagccagactgcttcacttgccatcttagtatccagacataaatggaggctgtcagtcatctctgtctttgccacttccatcttcacctttgtcatagagctcagaatcacttcactgtgaatctagcaagttggccaggggccctgtggaccagcgatgctttgggaacaggcacactctcggcacttctcagatacctctgctatttgactgagcatgcaaaataaccagctggtccccaaagaacagattcctgtggaggaggctgtaaaactcctagttagtgagacatatatgcagtctgtgcttctccacgttccctctccaagaccttatcgttcaggctggaccagtcctcaagggaaaatctcagaaactaaaatttcttgtaggctgcaaatgccttgaacttacattttcttttaatgaaacatttgcctacagtggctgaacacagacaattwaaaaaaacatgtggtcaaaggacctgaatagacatttctccaaagaagacatacaaatggccaataggtatatgaaaagatgctcagcatcactaatcattagtgaaatgcaaatcaaaactacagtgagataccacctcacatctgttagaatggctgccatcataagcaaaagacaacaagtg

SEQ ID NO: 694110 - DNA, 3338 bp, Homo sapiens
gagaaagagagagaaaagagcatgaacctttgaattcaaatttgttcatgaaaataatctggaaatttttaaaaaatacaatgaagttcacatttaatgcaaatttgcagtaaaaaaatataactatgacatgttttatgtatgcataaaatttcaaataatgtgacttctctgagattttaaaagctaaacaggartcacaataccaattctggaaggccaagtgaactataaatgccaggtaatggtgttaacattaactggctgacgaacagaaacgcagtgctactgggggaaaactagtcaagatttgtaaattttgaatgatggcatgctgtcaagaatgcatcccacatataaactgcaccattctctacaaaattcttggcccctcactggacagtatgattaagtatgtctggggtcaaatccaagcaattgtatttttaacagctccctgggattttttaagacaaatggccccatgcttcattgtttgaaaaacctctggtcctccataaaggagtaagtgcatgcattctgtaaaaaattatttgtaaacatgtattatatgctaggctatgaggacataatatgaagcaaaagtataacaaccacacagagtgtatgttctagtgaagaagttggacaattaaataagctgctattacaataaagtgcaattacaataagggtcctgtacactatgatgaggaagacagggcattatgggaccatgtgtcaggaacacttcactgaaggggatatacgagctgatacccaattgatggaaattaaccaaccaaagaggttggccattatcctaagggaaggccagggaagaggaggatctctctgagtgtagtgtggaaaatggaatgaatcagattggaggagggacagcagtgaagagagaagcttaactagtctccagcagcagtagttgaagtgagagagaataagggcatgggccagggtactgaccatgagaataaaatatttagtagaaataatctataggccatggtgataaattagatgtgaagacgaaaaaggagaagctgaaaatgattcttaagtatctggcctgggtagaaacatgaatcatggtagcatctcgggattgaggatgcaggggaaagacactgagtttatttgggaaggctgaatttgaggcatctgggaatgtccaggcaagggtggtatcagattttttaaagtgtcctgattaaagagtcatcagctgggctttaaaaccatgacaatagatgacattgctcagtgactatttgtaggttgaagagaaccctaagaaaatatcaaagaacagacaagatcgggcgtgttcagggtggtattgcaatctacccatctgacaaaggtctaacatccagaatttacaaagaacttaaacatatgcacaagaaaaagacaaccccatcaaaaagtgggcaaaggatatgaacagacacttctcaacagaagacatttacacggccaacaaacatatgaaaaaaatgctcaacatcactgatcatcagagaaatgcaaatcaaaatcagaatgcgataccatctcatgccagtcagaatggcaattattaaaaagtcaggaaacagtagatgctggtgaggctgtggagaaataggaacttttacacttttggtaggaatgtaaattagttcaactattgtggaatacagtgcagtaattcctcaaggatctagaaccagaaatactatttgacccagcaatcccattactgagtatatacacaaaggaatctaaataattctactataaaaacacttgcacacatatgtttattgcagcactatttacaatagcaaagacatggaaccaacccaaatgcccatcaatgatagactggataaagaaagtgcagtacatatacaccatggaatactatgcagccatgaaaagaaataagaacatgtcctttgcaggaacgtggatgaagctggaagccatcagcctcagcaaactaacacaggaacagaaaaccaaacaccccacattctcactcataagtgggatttgaacattgagaacatgtggacacagagaggggaacaacacacaccagggcctgttgaaggatgagggatgagggaagggaactgagaggacgggtcaataggtgcagcaaaccaccatggcatgcatgtacctatgtaacacacctgcacattctgcacatgtatcctgggttgttgttgttgttgttttttttaagaagaaattaaaagaaaaaagaagaataccaaagaaggcctacagaggaagtctagaggatgtggagaggtcaaaggaaactttggggactgtgctaagttggaagctaagagggtgtttcagggagaaacagtcaacaatgtaggaggtttctcagagtaagatgaacacccaaaagtgccttctggaattggcaatgtgaaggtcattcacagttggtccaggggtttgaatgagtgtggggagcaggcatcgactagagtagctggacagtgaggaaggcaaggtcatggagaacttgagcgtagatggctattctgaaaagtgtggctatgaaaaaggggaacagaggaaaggggcgggtgagaggcttgtttttgtacaggggtatgttaaagttggaaaagcttagacatgtttaaatggtgatgaaatgggtacgggaaaaagaggaacataagagtgttcactgaggaataagcccaggctgcaggtttggctccgctactaacatctgtttgaacttgagtgggtcttttcgtctgtctgggctgtggcatccttcactgttaattgcagggcttctctctctctctgtggttttcaaactgtacccctcaaagctgtctgagtgcccacatttcagcttcaaccacagaaactttacctctctcttatgtgtttttaattaacttaattttagcaattcaatgcatgcacatactctggaaaagcaaaatagtagtaaaagaattatggtaaaaaggagcaacttcttccagctccacatctgcctactctcagccaccctcaattcttgcggatacttttctctagtatttataccaatttagctaaattaaattcttatctcagtatttcttaaatatagacatcctctgatttctatctcaccctaccctttcttccccacccccaacacaataatatcccaatttttagttaatagtgtttgcattatcataagcacacatatattgttcactgactctgcctccttttgtgaaaaacctgtcatttctcctgccaacaatatttccctcttttgtctcattcatctt

SEQ ID NO: 694111 - DNA, 640 bp, Homo sapiens
cagaacatgatggctgccttcggagagaggcaaagggcttcgcagtgcgtaggagacccctatctcagagatcaggacttctgaaactgggtctgcccaacgttgagcctccgaggacctcattgaacaagaccttgcctgcaggtcccggccagcctgtgctcaggaataactaaggagtggagccgcatcaacctccttcccaaatccggacgtcttcctccgactcaagcccagcctgagggccattctccttgattcacccttggaaacagacaccagccaagggagctgtctcctggcgttgacraggatccgatttaggtcagtattctagttcccactccacagaggaatctgactggaggccagctgtggtcgatgagtcatccggaacacaagcaggcagctatttccgaactaaatggcatctgatctccctcctcaccttgagtccagtgccctggtctccaaaaaaagcttcctctgagatcaagccagggagagagatacagagacctgagcagaggggagccaccgtggcttcatcactcctggtgccatgcaggcagcaaaggaacatctggaataaagcaggcaattctagaagattctagaattccaggtcctgttaatagac

SEQ ID NO: 694112 - DNA, 611 bp, Homo sapiens
taaactgccttctcataatagaagagcaagatctgtagaagtaatacagtgctggaaaatggcaggatggaaaaatgaactgtatttgagcaggcatgaatttattaatttgtctacatgtggcctacttcccaagtttttctacagaaattaggggacataaagtaagctgatctgaatccctaaaaaatataatataaataataatatacaatataataatatgatatataaataatataattgtagtctctgggaagagtctcttaggaattttgaccctgaggttataagatcctatttcctcatagaatatcattatgctcttgtataacacctctctggtgattgttttcaaaatgtttacctataatataacacatcaagttcccaaagtataagaaagtattgcctagaaaagagctagggctccttaaagaaaatattaattttttctgatcagtaggatgttaacttagtaaattatggaatagtaaatagttcagggtcagaatgacattttgagtttackgttttttcctcaacattttattatgaaccttttcaaacataaaacaaaagtgaaagaattttatagtgaatacccataa

SEQ ID NO: 694113 - DNA, 666 bp, Homo sapiens
ttccatttcagacctgtaacatcctatactatctacattcccagacttttactctgcaatttccctgggtacatttctcctctttattggagctgaactcaagtgctttatgaatattcccacataacgactgaagcattatgacccttsagttatgtctaattagccaatcaatgattttggtcacttccggcccttgtataatgtactcattgtaactacaaaaaaacatgttcttaccattgcctatgtaaactgccaagaatattttcaatcttactgatttatcaagcaacttttgattgcaatctgaggagaagactgcctgggcctgttcctctgacagtccccaggagctgggcctagcaagcttctggtactatgtggtctctgaataccagggaggaatgcggtacaagtcaccccacttgggtccctgcccaactatgttggcaggtgctgtgacttttacaagaaatcttatacttccaaagattgtaacccacacagagggcatcagaccattaggaaaggctgaaaagcttccttgacatcagaccattcattcttggataactttctcattcttccatgatgccatccactgggagatttcaggaagctgaggacaagactcaagctgttgtaattacagcttataataca

SEQ ID NO: 694114 - DNA, 619 bp, Homo sapiens
atgtgtgcaaggctaatgtacaacttcacacacatgctacagaactgtacatatttctaaccatttctaaaattgttaatgttaccatttgtttaatattaccattgggtatgctgaaggaagtgagaattgactttattgtcagtaagctcatygccatcaaatactacatttaaattttattttttattgtttttttaaaaaatcaaaagttaacataagtatcaccaatttcaattttcaaataagtgtgaactggtttcatcatcatctgaatttggtaacttcaatctagcgccaattaaagcaaacaaatactgtcgcaaggaatttcaagcaacagaaatccattccctttctccaccctaaatcaggagtatttaaataaccaaaaaaaacaagatgcacaagagctctgtccagctgttaatgctaagctctgtatatccagttaggcaagcctgatttcccagcgccatccacaagacccataagaaacagagctgggtcctcctgtccaggcccattagaaaatgcagcagaggcaaggcagctctggccttcaagggtcacagaaggaagactatggctgtgtgattactatagtaaaaagatgcca

SEQ ID NO: 694115 - DNA, 629 bp, Homo sapiens
gggattayaggcatgagccaccatgcccggccatttctcttttataatatagggtatgagctttgaagttcagtaaaactgggttcaaattccaattttgatcctgtgtacctttgagcttcatttgttcataggtaaaataatatctatctcatagaatttttatgagaattaaatgagacaatcaatgtaagatacttaaagtatctgacacatagtaaatattcaataaatagaagcaattgttgttattgttattatttccttcagaatgagcatatacaggttaataaattagtatatgccataggctccaggcagttggttctaacaatagaacactaaatcacaattttctatatcaggatatactttggtacctgatcatttctacctattttagtccttcctaagttttatttaattgcaaagaatttgtgtaaaaatcttagtaagaaaaatatagtcatttaaatcaaggccaataagatactgacattgctctgaaaatactatgtgctttatctaccaataaactgaataatgtatttgtctatcttagttaaaaaaaatgtggaacttctgagagatctaaatgtgtcagctctaatatttttgtgattctttta

SEQ ID NO: 694116 - DNA, 629 bp, Homo sapiens
gggattacaggcatgagccaccatgcccggccatttctcttttataatatagggtatgagctttgaagttcagtaaaactgggttcaaattccarttttgatcctgtgtacctttgagcttcatttgttcataggtaaaataatatctatctcatagaatttttatgagaattaaatgagacaatcaatgtaagatacttaaagtatctgacacatagtaaatattcaataaatagaagcaattgttgttattgttattatttccttcagaatgagcatatacaggttaataaattagtatatgccataggctccaggcagttggttctaacaatagaacactaaatcacaattttctatatcaggatatactttggtacctgatcatttctacctattttagtccttcctaagttttatttaattgcaaagaatttgtgtaaaaatcttagtaagaaaaatatagtcatttaaatcaaggccaataagatactgacattgctctgaaaatactatgtgctttatctaccaataaactgaataatgtatttgtctatcttagttaaaaaaaatgtggaacttctgagagatctaaatgtgtcagctctaatatttttgtgattctttta

SEQ ID NO: 694117 - DNA, 928 bp, Homo sapiens
atcccagcactttgggaggctgaggcaggcagatcacttaaggtcaggagttcgagaccaacctggccaacgtggtgaaaccctgcctctaccaaaaaatacaaaagttggtcaggcatggtggcgcaagcctgtaatcccagctacttgggaagctgaagcaggagaatcatctgaactcggsgggcagaggctgcaatgagccaagattgtgccactgtactccagcctgggcgacagagcaagactctgtctcaaaaaacaaaaataaaaaaagttttggtttttgcctattcaaagccaataatgtgaaagaccagaaatatccttgtcatgataagaatgtgaagaaaagagcattttcacactactgatgagatgataaaccagactagcttatttctgaaggaaatccggcagcgtccatgagcaaaaggtcaaaaggtacatatgctttgacctaacaattctccctctagaaatatgttatgaaaatgtgcctacaagtatccatagacacagaagaaggttctctctgacataatcaaaaaactgaatgtgtatcattgaggactggttaaatgaagcataatatgtattttgtaaaattataaaatacagccacaatataaaaggagaaattgtccctacttcatgtcctttctctattatcaaattttgtctgacagagcttccattacctctttttttttttttgaaatggagttttgctcctgttgcccaggctggagtgcaatggcatgatctcggctctccgcaacctccgcctcctgggttcaggcaattctcttgcctcaacctcccgagtagctgggattacaggcatgcgccaccaagcccagctaattttgtatttttagtagagacggggtttctccatgttcgtcaggttggtctcgaagtcccg

SEQ ID NO: 694118 - DNA, 928 bp, Homo sapiens
atcccagcactttgggaggctgaggcaggcagatcacttaaggtcaggagttcgagaccaacctggccaacgtggtgaaaccctgcctctaccaaaaaatacaaaagttggtcaggcatggtggcgcaagcctgtaatcccagctacttgggaagctgaagcaggagaatcatctgaactcggcgggcagaggctgcaatgagccaagattgtgccactgtactccagccygggcgacagagcaagactctgtctcaaaaaacaaaaataaaaaaagttttggtttttgcctattcaaagccaataatgtgaaagaccagaaatatccttgtcatgataagaatgtgaagaaaagagcattttcacactactgatgagatgataaaccagactagcttatttctgaaggaaatccggcagcgtccatgagcaaaaggtcaaaaggtacatatgctttgacctaacaattctccctctagaaatatgttatgaaaatgtgcctacaagtatccatagacacagaagaaggttctctctgacataatcaaaaaactgaatgtgtatcattgaggactggttaaatgaagcataatatgtattttgtaaaattataaaatacagccacaatataaaaggagaaattgtccctacttcatgtcctttctctattatcaaattttgtctgacagagcttccattacctctttttttttttttgaaatggagttttgctcctgttgcccaggctggagtgcaatggcatgatctcggctctccgcaacctccgcctcctgggttcaggcaattctcttgcctcaacctcccgagtagctgggattacaggcatgcgccaccaagcccagctaattttgtatttttagtagagacggggtttctccatgttcgtcaggttggtctcgaagtcccg

SEQ ID NO: 694119 - DNA, 928 bp, Homo sapiens
atcccagcactttgggaggctgaggcaggcagatcacttaaggtcaggagttcgagaccaacctggccaacgtggtgaaaccctgcctctaccaaaaaatacaaaagttggtcaggcatggtggcgcaagcctgtaatcccagctacttgggaagctgaagcaggagaatcatctgaactcggcgggcagaggctgcaatgagccaagattgtgccactgtactccagcctgggcgacagagcaagactctgtctcaaaaaacaaaaataaaaaaagttttggtttttgcctattcaaagccaataatgtgaaagaccagaaatatccttgtcatgataagaatgtgaagaaaagagcattttcacactactgatgagatgataaaccagactagcttatttctgaaggaaatccggcagcgtccatgagcaaaaggtcaaaaggtacatatgctttgacctaacaattctccctctagaaatatgttatgaaaatgtgcctacaagtatccatagacacagaagaaggttctctctgacataatcaaaaaactgaatgtgtatcattgaggactggttaaaygaagcataatatgtattttgtaaaattataaaatacagccacaatataaaaggagaaattgtccctacttcatgtcctttctctattatcaaattttgtctgacagagcttccattacctctttttttttttttgaaatggagttttgctcctgttgcccaggctggagtgcaatggcatgatctcggctctccgcaacctccgcctcctgggttcaggcaattctcttgcctcaacctcccgagtagctgggattacaggcatgcgccaccaagcccagctaattttgtatttttagtagagacggggtttctccatgttcgtcaggttggtctcgaagtcccg

SEQ ID NO: 694120 - DNA, 840 bp, Homo sapiens
agaagagaagaaaggaaccaaattccacttcttttcctacctagatttaagatcatggtatacttaagacatttacaatccagccctgtattccataaactttagtcaaaggtcaatactttaataatccacactattgtccagaaaaaaatttatccttggaattttcttacatttataaaagattattgattttatcttaggtcttgggttaaaaaaatgagasgaaaaaaactttatgagatacctctctcttgcacaggtgtgtgcatttttaaatctgccaaaaaaacttccaatgtattaccaacaataacatcatttgcttattataatgacattcctttcaagaaaagccctgaaatgacttgactaaaattttgaaaatgctggagggtaaagaagacccttttacttttgtttcagacattttcaactataataggctaaaactttgaagattttaaagtacaattagtctccaacttgcaaacactaggtgaagagtgatccacctcccacccctctccttgccacccgttttggaaatcttgaaacttttagagaaactctggggtcatacaaaaaagaaaccatgcagtgcagaaggagttctgcctagggtttctcagatgctgcctctgcaggatccagaagagcagaggctgcagactggtccccagtggagtctgctggcataacctggagtgacccacagcaagcaggaaatgtcattgaactccagtggtctattaaacgagtacacactctataacttatacttctgtaattgtcttaatatttaaatattttaaattgccataaagaaaattgacactc

SEQ ID NO: 694121 - DNA, 1128 bp, Homo sapiens
tgagtgaataatgcatgtgacttatgcctcaagtttctgacaatctccatagggaagcatcgcaaaaacacacgggaagtcacacagagttaggggataatacaaggcagcggttgaagatattctgagcccaatttctcatttcagatactaaattctgaattacttgattctttccattcttggatcatggttgtacagtctgtggtacctaaaaggaagtattggcacctgatttgcctaggtggcatggatacttgagtaagctaaaagcgaaggccacatcttcacctctggcaggaaccagagaaaagcatattcacaagaaagaccccaagcccctttagcaccatactcactttgtagccctccccacacatcacttcctctgtctcaaaaattttcccaattcttttaccagctgtaaactgccaaaaactgaaatgtcagggttcttttctatagcctcttaggttaaaataactttcccttcctgactccctctttgcttagcaaatcttcttattggttttcaatcttttctttcaaaaccatcataactggagcttctctacagcttgatagttaaaatcaggcaggcagcaaattgccagacaaagaaagggttttataacatccaaggcacatatgcaacaagaacttctcaaattgggaaagaacagaaactaaaatttggcccacagctgatttgttccctagagaattttcttattcttttatccagaactgcttttccaactatagaatttactctccttccaccctaacctcgcccctaaattgaaattctgcaggttttatttctttgactcttgggacactcctttaaaatttgaaaactgaaaaattgataccattctttgtactaaatgtctaaggtagaatctttgtctcatttgtttaatgtgtccttgttaaaaattacattgtgcagaacagtaacttttaattttacttatttataagattcagattaattatagmtttatttattcctcctcctcttttttgccttttctggtcagtatcatcaaaagtaaaggaacaaaatcaccagctaccatgttaactatcatcatttgatcctttaaattcagaactccagag

SEQ ID NO: 694122 - DNA, 1128 bp, Homo sapiens
tgagtgaataatgcatgtgacttatgcctcaagtttctgacaatctccatagggaagcatcgcaaaaacacacgggaagtcacacagagttaggggataatacaaggcagcggttgaagatattctgagcccaatttctcatttcagatactaaattctgaattacttgattctttccattcttggatcatggttgtacagtctgtggtacctaaaaggaagtattggcacctgatttgcctaggtggcatggatacttgagtaagctaaaagcgaaggccacatcttcacctctggcaggaaccagagaaaagcatattcacaagaaagaccccaagcccctttagcaccatactcactttgtagccctccccacacatcacttcctctgtctcaaaaattttcccaattcttttaccagctgtaaactgccaaaaactgaaatgtcagggttcttttctatagcctcttaggttaaaataactttcccttcctgactccctctttgcttagcaaatcttcttattggttttcaatcttttctttcaaaaccatcataactggagcttctctacagcttgatagttaaaatcaggcaggcagcaaattgccagacaaagaaagggttttataacatccaaggcacatatgcaacaagaacttctcaaattgggaaagaacagaaactaaaatttggcccacagctgatttgttccctagagaattttcttattcttttatccagaactgcttttccaactatagaatttactctccttccaccctaacctcgcccctaaattgaaattctgcaggttttatttctttgactcttgggacactcctttaaaatttgaaaactgaaaaattgataccattctttgtactaaatgtctaaggtagaatctttgtctcatttgtttaatgtgtccttgttaaaaattacattgtgcagaacagtaacttttaattttacttatttataagattcagattaattatagctttatttattcctcctcctcttttttgccttttctggtcagtatcatcaaaagtaaaggaamaaaatcaccagctaccatgttaactatcatcatttgatcctttaaattcagaactccagag

SEQ ID NO: 694123 - DNA, 3089 bp, Homo sapiens
ccagggagtcatgctcccagccacccttgctaagatgagagcacatggtctagactctgctaatcaaacgcccctgctccagactttgaattggaagagtgtgacttaaggaagcatggactgcataatctactctagagacggattcatttatccaaaaccctttgtaacctcttccctttgcctgtccctactatagaggctggatgtgccaaatgagtgcttcccttatagctctagatggcttatggcacacttctggcccaaaagatgtaggtggaggcctgacttgggattttttggtaaaaccttgtcctcctgacataggagtcactctttctgtcttcttccaatttctgccttgaatgcaaatgtgatggctggagctagagcagccatcttgcaaccacgagaggacaactctgaagattaaagccaatatgctaaggatgatagagaagaaagacagatagggccaggatccctcacagattttttaaatggttgaatcaatgcttgcaacaactgacatccagatatgtaagaaagacaaacatttactattaatctattattagacagattttctgttacttgcaactttcttcttgcctaactgatacaggcaatttccagtgtccagcactagtatttcctgtggggcaaactactagtatcagagccagtggtaggggcagtgatattattctagaaccagtcctgcagcatcactttgggtatcattccttcttcttaatctccaagctcctccagcactcttggagattttgtgaaccacataatgtgccttttaatgaattctttttctgcttaaattaaccaaatcttacttctgttgcttgcaaccaagaactctgggaaatatagaaatagacaccgggagtattggtagccacatactctcagagaatggtgagaatttgagcttggttatctggtctggttgagctggaggaaaatgaaaattcagatagtgttaagacggttcatggcataaattgtcatttgtggtcacttgcggtaaaggtaacccaggacaatgaagattccattgacattaaagttttcagaaacagagtgatgctgctagacagcagtatgagggacacaaagaatttaagagctgtggggaaaagtggttgattctagcttgagaagcaaatagcaagggctgaaattctagttcaaggcacacagtctgaaaacctaggacttttgatgactttcaatgamgatgctaaaagactattttatcttttgcgaccatggccaaaagggagagcctgtgcatttctggttggttttctttatttctttctctctcttttcttttcttttctgacagagtctcactctgttgcccaggctggagtgcagtggcgcgatctcggctcactgcaaacttcgcctcccgggctcaagtgattctcctgcctcagcctcccaagtagtggggattacaggcacacacaggcacacacagccacacccagataatttttgtgttttcagtagggacggggtttcaccatgttggccaggctgtctcgaactcctgacctcaggtgatcttcccgcctcagcctcccaaaatgctggaattacagacatgagccaccgcactgagccaggtttctgattttcaacatctgttgaatgcacagccttctctggtctcttatgtgatagttcggggactgattggaaagagttggaatcaggggatggagaatggggacagatgggactaaggactcagtgcacaaagctccccttatcacagaaagcagccctttctctccgtgtgaggaggctgttcctgccttgctggaagaactatggttcttgcctgaggaagtcaagttgccttgtgtctcccacttctcattttcttcaaagacagaactagataccaacatatccctcattttataaagccaaccctggatggagaattacacaccaaaataactacaagactttgctctttattctggaaaaaaagtcttcagaatacatgtgggaatggattttaagggtgctaaaccagagtaggaggcaaagaactttgtttaccaagagattctagttcaatatgcttcctggagcagagggaggggtctgtttgtctggttcattggttgaatgaaacctggaattgatggcagcccacatcattcaagagaagctgagaggtctgaaattatcaagcataatgtagaagcaggaatcccaggaaataggaatgttgctgtggatttattgtgcaaatcccactcaccaatcccctaactggtcctggagagggaccagaagacactccctttgtcaaggcaccgagagagacactggtgagagaagtatatctcaaaagtactgtcgtagctatactctgtacatcagggatgctattgagagcggctggagatgaatggactccctcatgtttgccaggatcctgggtgccagagttcaatggcagcacaaccaccagtaagggagaggttatcccaatagaaggcaagatgatcatgaccagtctgagaatggccagtctgacaatcagaattgcctgcacatcaaagatctttggcagaaactaattgaatatgagctcttaggacaaatgagatgggcggtcctctgtggacctgcttaatatagttgacaaaagcaaaataaaaactccctagatctgaattaaaccatcccatcagagaatgttgtacccgcatccaactctcagacctgaacttggatgccaaagaagtggtaaattcctaatcccagctactcgggaggctgaggcagaagaatcgcttgaacccaggaggcggaagttgcagtgagccaagattacgccactgcactccagcctgggcaacagagcgagacttcatctaaaaaaaaaaaaaaaaaaaaaggctgggcacggtggctcacgcctgtaatcccagcactttgggaggccaaggcgggcagatcacgaagtcaggagattgagaccatcctggccaacaccatgaaaccccgtctctactaaaaaaaaaatacaaaaaaattagctc

SEQ ID NO: 694124 - DNA, 583 bp, Homo sapiens
cactgggggtccagcagcccagcccctcctttgcagatgagccgaccagaggaggaaattctcccaggcagcccagccaggcgtgcagaggcaggacaagtcccgtgtttcaggctgaccgatccgtgcttgctacagacgccacactctgacttgaagtgggtcatagtcctcattcttgctggtagggaactaagaggcccctaaaagtcgaatccaggaactagtcctccgtgctcaccaggaaagggacgtgggtgattgtaggagtaaggggcttcggctgtggctcttggyggtcagtttagtcaagacgtgtttatcaaatacctgtcgtgtggcaggccctagtctaggagttgtgaagagggaagcttctaggccttttggtgattgtaaagaagtaagaggcttaggaaacagacaaggcgggccaagggcaaggactgtgctcagcctggcctctgggccctgcgcccatggcctcagcccctggcaccggctccctgcggagctagctcagtgggctcatggccagccagagttgtgtgtgcacctaggtgtgcgcctttgtatgtgtatg

SEQ ID NO: 694125 - DNA, 659 bp, Homo sapiens
tttttttgcagtgatatttttagtcaactgttagagaaaattgcagagagattgagctaaagcccagaaaatgactgagacatcttgggataatttatgacttttcttaggatacactagagccttctattgaaaatgagaggggatataaatttttctaaaagtacccacctttatatttgtatggcaatgtctgccatagacctgcccaccaataaagaaatctgtaatatgattgtatgttctcatagcaaattcctgcattaaattacagggtttagaaaagtcacggattatttcttttctttttttttttttttgagatggagtccctctctgttgcccaggctggggtgcaggggygcgatctcagctcactgcaagctccgcctcccgggttcacgccattctcctgcctcagcctcctgagtagctggaactacaggcgcccgccaccatgcccggctaattttttgtatttttagtagagacagggtttcaccatgttagccaggatggtctcgatcacctgacctcgtgatctgcctgcctcggcctcccaaagtgctgggattacaggcgtgagtcaccacgcctggctggattatttcttaattgacatttgttttttccaccttcctctgtattttgggtttgaa

SEQ ID NO: 694126 - DNA, 1540 bp, Homo sapiens
ttgaatcaatcaagataagctagcctatcacaaacagcctactcccactcctgccagatctgctgcaacccaggcagcttctcaggctcaggggctagatagggtgggggaaacagctgagcgctgcttgctggctcttcagagcgttgtccctcaggtagagcccattggcccgagctagttaccaggtcccattcgtagctgcaaagggggtttggaatgcattcttttatctccaagaatagtagtggatggtaaaattgttgcgcactggtatagtcatgttcatatgctctaagatgcactcctgggtcccactctagggtgaccagcctttcaggaatttagttccaggtcgtttgtgcatcactcttcggggggaatactactattgtgagactcatagatttcacacctgagaaaatggagcctgtgaggtgacttgcctggatccacacagtgaattggtggtaggacctggattagaaccactaatcctgccttaacctcttccagatgggctgaaaatattaatgtcagattaatctacaccatgaaaccaatgtggagtttagaatattttagtataccatactaattaaagtaaaaataattcttcctgagttcccagggaaatatctgggcagttagcatcccaaatatctgcttatttgggatgaaggagggctgacattggattctgaagcaggttttggaagcaggcggcctctttctcccctgctgtggggtagctgtcttgctgggccaggctgattatcacttgataggatgctgtaggaaaaccagtcaaattctggactgattctcattttcttggctccaagctggactttggcctctggtaggaagtacctgcttctttttttccggctcggatcagcaggctttctggtatttcctgtaaaaccaagggacacctttttttttttttctttttctttttttggctttccccccgccccaaggatatggcagaaatgtttatttgcttatggatccaaatgattctgggtgtcactgacaaataataaaacattaccctagacttacgagtgccaaaattacttggaaaatttagaacaggccacatgtttaagatggaagtgatgacaatctcaaagtgckaatacggttaaattagtggactgatcaaccactttagattccaggaaggggcatgtggcggaagccaaagactcctgcaggcctctgccatgtgcctggcatggatcaaggagaggcttttaagaacacaattggcaggaagcttctgtttctcccaaggcatctttgagctagcattcagcagcaaaagggttaacttaaaataattactatttcaagaggcaggcgcagtggtccacgtctgtaatcacagctctttgggaggccaagacagaaggattacttgagcccgggagttcaagaccagcctgggcaacatagtgagaccccatctctgaaaaaaaaaagaaaatcgagccgggcgtggtggctcatgcctgtaatcccagcactt

SEQ ID NO: 694127 - DNA, 1540 bp, Homo sapiens
ttgaatcaatcaagataagctagcctatcacaaacagcctactcccactcctgccagatctgctgcaacccaggcagcttctcaggctcaggggctagatagggtgggggaaacagctgagcgctgcttgctggctcttcagagcgttgtccctcaggtagagcccattggcccgagctagttaccaggtcccattcgtagctgcaaagggggtttggaatgcattcttttatctccaagaatagtagtggatggtaaaattgttgcgcactggtatagtcatgttcatatgctctaagatgcactcctgggtcccactctagggtgaccagcctttcaggaatttagttccaggtcgtttgtgcatcactcttcggggggaatactactattgtgagactcatagatttcacacctgagaaaatggagcctgtgaggtgacttgcctggatccacacagtgaattggtggtaggacctggattagaaccactaatcctgccttaacctcttccagatgggctgaaaatattaatgtcagattaatctacaccatgaaaccaatgtggagtttagaatattttagtataccatactaattaaagtaaaaataattcttcctgagttcccagggaaatatctgggcagttagcatcccaaatatctgcttatttgggatgaaggagggctgacattggattctgaagcaggttttggaagcaggcggcctctttctcccctgctgtggggtagctgtcttgctgggccaggctgattatcacttgataggatgctgtaggaaaaccagtcaaattctggactgattctcattttcttggctccaagctggactttggcctctggtaggaagtacctgcttctttttttccggctcggatcagcaggctttctggtatttcctgtaaaaccaagggacacctttttttttttttctttttctttttttggctttccccccgccccaaggatatggcagaaatgtttatttgcttatggatccaaatgattctgggtgtcactgacaaataataaaacattaccctagacttacgagtgccaaaattacttggaaaatttagaacaggccacatgtttaagatggaagtgatgacaatctcaaagtgctaatacggttaaattagtggactgatcaaccactttagattccaggaaggggcatgtggcggaagccaaagactcctgcaggcctctgccatgtgcctggcatggatcaaggagaggcttttaagaacacaattggcaggaagcttctgtttctcccaaggcatctttgagctagcattcagcagcaaaagggttaacttaaaataattactatttcaagaggcaggcgcagtggtccacrtctgtaatcacagctctttgggaggccaagacagaaggattacttgagcccgggagttcaagaccagcctgggcaacatagtgagaccccatctctgaaaaaaaaaagaaaatcgagccgggcgtggtggctcatgcctgtaatcccagcactt

SEQ ID NO: 694128 - DNA, 1389 bp, Homo sapiens
acatccaagatatgtctgctcctgcctgccaccccacctcccatggaagctccccgctgatgctttcacttccatcttgatcaagggcaaggtttaccttccatgcccaccccactcagggttccagtccctcaccctctgtcggaggacctaggaggatccaggactcttgagagctgggctgtgcacaggtggtgaatcamcagcagaaagctctgcatctagtctcttcctcttggcctccagactggacgttttgcttcccaccacccaccccccgcaaccggaagactctaggaagatctcgtccctcccactgtacttttgctccaggctgagtggccattccgccttctctctgtctgtgttcctaacccggtcttgcctactgtctggaagaggagaaagtggttctgtaagtctgcctctgagaatctccacacctcttttcagaatggtctggggagtggcgggtgccagtgagacgaaagaggaggacggaggacagaggactcttagatgactacttcaaggtttaaccctgttacatctgcatgggtgtggttcaaagtctgaattatgtctttatggctgggaaagcctgggtcacatgcttgtctcctcatagcaggagaggctgggaaagtcagtaggtggtacattgcagcttctgtactgggaggaggtctctgtctttcaccaaactaaagaaggatgttcaaattattggtgggcaaaaagaatgacaaggatcctctgacgtggacatgccctgtgatcacattagctctgtttggtcacagcatgatagtggagtggcttgggcgacctatggcagtatcattgataatcatttaccatacaccacaggctgagcgtcaccagggttgatccaattccattttctaatctttctcctaacatggggtgaacatcaggaggcctggagatcttcttttgttgcttttagattctcagtttctggtcctctgagaagaactgttcaaactgttcatgcatatctctactaaacactttgcaggagcaatggaatctagaactgcattttaaagagaatactcttgtaaaggaaatagtatctacagagatgcaaccctaccaaagggtggggcactgttgactactttatcttatggagcatgtgtccctggagtcacagccttgggatgcctacatctgctttcatttgcatagctaaacagcccagtctcttcatgaaaggtaatagtctactttattcattacatttagctccatgaaagagtttgcatataacttaattgttttaagaggaaaaaatgtaccaattaaaagccaggacatttattatgcatgttcagcaatcaaaataggcttcagtgtagcctt

SEQ ID NO: 694129 - DNA, 1389 bp, Homo sapiens
acatccaagatatgtctgctcctgcctgccaccccacctcccatggaagctccccgctgatgctttcacttccatcttgatcaagggcaaggtttaccttccatgcccaccccactcagggttccagtccctcaccctctgtcggaggacctaggaggatccaggactcttgagagctgggctgtgcacaggtggtgaatcaccagcaraaagctctgcatctagtctcttcctcttggcctccagactggacgttttgcttcccaccacccaccccccgcaaccggaagactctaggaagatctcgtccctcccactgtacttttgctccaggctgagtggccattccgccttctctctgtctgtgttcctaacccggtcttgcctactgtctggaagaggagaaagtggttctgtaagtctgcctctgagaatctccacacctcttttcagaatggtctggggagtggcgggtgccagtgagacgaaagaggaggacggaggacagaggactcttagatgactacttcaaggtttaaccctgttacatctgcatgggtgtggttcaaagtctgaattatgtctttatggctgggaaagcctgggtcacatgcttgtctcctcatagcaggagaggctgggaaagtcagtaggtggtacattgcagcttctgtactgggaggaggtctctgtctttcaccaaactaaagaaggatgttcaaattattggtgggcaaaaagaatgacaaggatcctctgacgtggacatgccctgtgatcacattagctctgtttggtcacagcatgatagtggagtggcttgggcgacctatggcagtatcattgataatcatttaccatacaccacaggctgagcgtcaccagggttgatccaattccattttctaatctttctcctaacatggggtgaacatcaggaggcctggagatcttcttttgttgcttttagattctcagtttctggtcctctgagaagaactgttcaaactgttcatgcatatctctactaaacactttgcaggagcaatggaatctagaactgcattttaaagagaatactcttgtaaaggaaatagtatctacagagatgcaaccctaccaaagggtggggcactgttgactactttatcttatggagcatgtgtccctggagtcacagccttgggatgcctacatctgctttcatttgcatagctaaacagcccagtctcttcatgaaaggtaatagtctactttattcattacatttagctccatgaaagagtttgcatataacttaattgttttaagaggaaaaaatgtaccaattaaaagccaggacatttattatgcatgttcagcaatcaaaataggcttcagtgtagcctt

SEQ ID NO: 694130 - DNA, 877 bp, Homo sapiens
cgaaaaacgacctacacaccaaggtttcccactgaagccctgtttgtgagaccaaaagactagaaaacacctaggcatccatcccaggagagctgggtaygtcagttttggtgatcatgatgacgaggatgatgactgctctcctttacatgtgtattacagttaggtcctgttctaagcctcattactcaaagcacggtccagggaccagcagcttctgtcacctggtggctgtctgagaacacagactcctctgccccaggccagctgagtcagaatctgcattttaccaagatgcctgggaaaatcctacgtacattaaggcactatttttaaaaactcttcccataataacccattacatcttgtaacaacccaatggcccaaatcctctcatcacctgcatgctggatgagaaagcccaggctctgacaggttagggaaattgtccaacgtcacacagtgtgtgggtggcagagctacatggacacaaaacacatggaacaaggaagctctttaacggctgacaggaccagtctccgagataagtcagctggagaacactgtatatgccaggccaccatttatgggagaggggaaaaacagaaagccgaatctccatgtaattgctgaaatacccagagagcatctctgaaaagacagaaacagcagttgtccctgggaagtggaactcagcagctggagaagaaagtgggagggaaactatttagtgttacacatgtattgttcatagctccaaaggcaaacattgtgaaggtgtttattcaaaaataaatgaaaaaattgttttgttcataaaactggtggaaggaagaagctacacagctggaaaccatcaccactgaattttaagcaa

SEQ ID NO: 694131 - DNA, 877 bp, Homo sapiens
cgaaaaacgacctacacaccaaggtttcccactgaagccctgtttgtgagaccaaaagactagaaaacacctaggcatccatcccaggagagctgggtatgtcagttttggtgatcatgatgacgaggatgatgactgctctcctttacatgtgtattacagttaggtcctgttctaagcctcattactcaaagcacggtccagggaccagcagcttctgtcacctggtggctgtctgagaacacagactcctctgccccaggccagctgagtcagaatctgcattttaccaagatgcctgggaaaatcctacgtacattaaggcactatttttaaaaactcttcccataataacccattacatcttgtaacaacccaatggcccaaatcctctcatcacctgcatgctggatgagaaagcccaggctctgacaggttagggaaattgtccaacgtcacacagtgtgtgggtggcagagctacatggacacaaaacacatggaacaaggaagctctttaacggctgacaggaccartctccgagataagtcagctggagaacactgtatatgccaggccaccatttatgggagaggggaaaaacagaaagccgaatctccatgtaattgctgaaatacccagagagcatctctgaaaagacagaaacagcagttgtccctgggaagtggaactcagcagctggagaagaaagtgggagggaaactatttagtgttacacatgtattgttcatagctccaaaggcaaacattgtgaaggtgtttattcaaaaataaatgaaaaaattgttttgttcataaaactggtggaaggaagaagctacacagctggaaaccatcaccactgaattttaagcaa

SEQ ID NO: 694132 - DNA, 1292 bp, Homo sapiens
tggaagaagctgtgcgggcccaggttggggacatgcaaccaggttggggacatgcaaagaaaaagcctatctctgaacaggcgagctggaggaagcgtgggggatttgaagagcatttgcaagctcagggctttgttcctactggaagattgcagaattaggggaattggctcggtggacctacaygggaaggcagtgccacagccaccacccagggctcttgtcttcctaaagaggtcttgctccacttcctgctgtgatgatgatgatactaacgcaggtgaccatttattgagcacttcctgtgtgtaagacactgttgtaagtatgtcaccccctttcatccacagcacaactctgggagggagattcaattattatccccattttacagagggaaaaactgaggctctgagagatgactctttcccaaggccacatgggtagctggtggcaggatttgaatccatgctcttaatagctggggaattacatcataggggcatcttggttctaggttgaaaaacaaaacaacctgtccagaaaaatgaataaataatatattttttaaatttaaccatttaacttctgaagaatggaggctttgctgcaggaggcacaggaagaacatgtagaaacctaaagaaagcagctccgtcttgccctccactgcttctcaccctattcccttccttgctcaatgctcccacctgccatgtcctctcctctgctggaacgtgagcttccagagggcagggactcgtgtctggttcgttctggtcgatgccctcaggcatggcatgcagcaggtacctgtgctgaggagggactcagtcactcagcagcccagaagcccccaggagcaggaccccagcactagaatgggcacccccagcccaagttgcctgttgccggcagcctggcagggaggacgcctggaacgcccatccctcctccaaacacagtgctcaggcctgctgcccaaccctgcagccctcaggatccaccccatggatctcaggcaagacagcagaggcaccacagaccatgatgggaccaggtgcccacaaagccagcaggaaggaccaagagctgccggagctgagtggagaatccagataacagcctggacacagaggctgtggtttcatcctaagcaagaagctccctggctgctgggagtagatgtcgatgtcacctcccaggagagctgctcagcagtgtctaccaaagccacccatgtgtgggccctctgaccccacaattctatctctagaactttatctgactga

SEQ ID NO: 694133 - DNA, 1292 bp, Homo sapiens
tggaagaagctgtgcgggcccaggttggggacatgcaaccaggttggggacatgcaaagaaaaagcctatctctgaacaggcgagctggaggaagcgtgggggatttgaagagcatttgcaagctcagggctttgttcctactggaagattgcagaattaggggaattggctcggtggacctacatgggaaggcagtgccacagccaccacccagggctcttgtcttcctaaagaggtcttgctccacttcctgctgtgatgatgatgatactaacgcaggtgaccatttattgagcacttcctgtgtgtaagacactgttgtaagtatgtcaccccctttcatccacagcacaactctgggagggagattcaattattatccccattttacagagggaaaaactgaggctctgagagatgactctttcccaaggccacatgggtagctggtggcaggatttgaatccatgctcttaatagctggggaattacatcataggggcatcttggttctaggttgaaaaacaaaacaacctgtccagaaaaatgaataaataatatattttttaaatttaaccatttaacttctgaagaatggaggctttgctgcaggaggcacaggaagaacatgtagaaacctaaagaaagcagctccgtcttgccctccactgcttctcaccctattcccttccttgctcaatgctcccacctgccatgtcctctcctctgctggaacgtgagcttccagagggcagggactcgtgtctggttcgttctggtcgatgccctcaggcatggcatgcagcaggtacctgtgctgaggagggactcagtcactcagcagcccagaagcccccaggagcaggaccccagcactagaatgggcacccccagcccaagttgcctgttgccggcagcctggcagggaggacgcctggaacgcccatccctcctccaaacacagtgctcaggcctgctgcccaaccctgcagccctcaggatccaccccatggatctcaggcaagacagcagaggcaccacagaccatgatgggaccaggtgcccmcaaagccagcaggaaggaccaagagctgccggagctgagtggagaatccagataacagcctggacacagaggctgtggtttcatcctaagcaagaagctccctggctgctgggagtagatgtcgatgtcacctcccaggagagctgctcagcagtgtctaccaaagccacccatgtgtgggccctctgaccccacaattctatctctagaactttatctgactga

SEQ ID NO: 694134 - DNA, 599 bp, Homo sapiens
tcagcttataatagaatttaaatcacctcccaacctcaggcttacacggttcacagtgcaataytccctgaaatcagtaatgtgagggtgcttgattctggctacgtatcagatttcctgtggaatttcacacatacccatacacacacacacacacacacacacacacaccaggctctcctcttggaaattccacaattccaaaaaactgcatagttcattctgatgtgaagcatgggttgagaattactgtgaccaaatgagacacaaaaataataggtcactcagtcccaggctgtgtcttttgctgttgctgctttttaatcaaaaaggctagagaggcatctcagtgggaacattagttctgcaagtgacaagacttataatatttcataactatagaaaacagcgggtggctatgatttcaacagcagaagtaaaacatttttccataagcacaaaccaaaatatgtaaaaccctacataccccaaagaagaggaaaaataaattcaagattgtgaaacttatattctgtttacattagaataccattaattaattatcgacaatagtttagttttaaaataaaaccagaatg

SEQ ID NO: 694135 - DNA, 734 bp, Homo sapiens
cagagtgaaaccttgtccctaaaagaaaacaaaaccaaaaacagatgggtagtcatggtagcatctagaagtctcatactggtaaccagagggtcaagggactttttaatttgaccttcactcgtttcaaaacaaatttgagttagttgccaacattaacaacttggaagattttacattaaaatacattttttcttttaaaaaatgamgagtctgtcaaaacctggcctacgtttctgcatggtaactggcctatgtttctgcatgaaccggagctgagtagcacccatcccttcagatggggcactaactactccttccccacctcccataccacttcctgttgcttctcccacttaacctgctgctttgctcatctgtagcagctgtctggctcttgtgggcatttgagttttcaatgcctgctgtgcattaacagagcctcctgcatagggggcctgtgacaaatgctcaacctcaaccaattctgtgaaaacaagcgatcctgccctctcagtccaacttctgcaaggtaaaacaacttatacacagaaggatactttacaaaactttgttcttagtctagagaggaaactatcatggacaacacatacaaatagtttaacttttggttttgaaagtattgggttggtgcaaaagtaattgcggtaaaaagtaatggcaaaactgcaattatttcgcaccaaccggatacattgggtataatgactcaa

SEQ ID NO: 694136 - DNA, 734 bp, Homo sapiens
cagagtgaaaccttgtccctaaaagaaaacaaaaccaaaaacagatgggtagtcatggtagcatctagaagtctcatactggtaaccagagggtcaagggactttttaatttgaccttcactcgtttcaaaacaaatttgagttagttgccaacattaacaacttggaagattttacattaaaatacattttttcttttaaaaaatgacgagtctgtcaaaacctggcctacgtttctgcatggtaactggcctatgtttctgcatgaaccggagctgagtagcacccatcccttcagatggggcactaactactccttccccacctcccataccacttcctgttgcttctcccacttaacctgctgctttgctcatctgtagcagctgtctggctcttgtgggcatttgagttttcaatgcctgctgtgcattaacagagcctcctgcatagggggcctgtgacaaatgctcaacctcaaccaattctgtgaaaacaagcgatcctgccctctcagtccaacttctgcaaggtaaaacaacttatacacagaaggatactttacaaaactttgttcttagtctagagaggaaactatcatggacaacacatacaaatagtttaacttttggttttgaaagtattgggttggtgcaaaagtaattgcggtaaaaagtaatggcaaaactgcaattatttygcaccaaccggatacattgggtataatgactcaa

SEQ ID NO: 694137 - DNA, 1256 bp, Homo sapiens
ggaggtcccttccaatgctgatgggacattccaaatggaattgcttgccttcattcaattctatattttagccctcagtgattaaaaatgccttctttgttacagggttagggttagaggccacaagagaaagaccatattgatagtctgagaaatcaatgttgtcattgatataaagaaatcatgtgaggctgaattcatctgaatcctgattcatccttgaaaggcagctggtgtaactgcctcctacagaaagacttcatcttaagttacctagattcaaagggcaaatattctgtacccacaatttagctctgtcttccccaaaccaagatgttttcaagtgggatggcaagttactaactcatagtcttctgacagcaggaagaggggcttaagaatgtggaccacatagatgtcaataatccaacattaattttattcaataaactttttaaataaaatgcaaacatcagattactttctccctactaccaaaacttttattaaagagagaccaagagtaattttggagtttggagaaatttgtgggtgaacaggtcatggtaggatgtaggaagggcacctttgagaggactctgggtaactaaaaaaagtgagatcagccagrtgcggtgactcacgcctgtaatcccagcactttgggagtctgaggcaggtggatcacctgaggtcaggagtttgagaccagactgatcaacatggtgaaaccctgtctctactaaaatacaaaaattagccgggtatggtggcacatgcctgtaatcccagctacttgggaggctgaggcaagagaatcactcgaacccaggaggcagagattgcagtgaactgagatcatggtattgcacaccagcctgggcaacaagagcgaaacttggtctcaaaaaacagacaaacaaagtaggatcaatgcaaaggagtgggatgtcaacagagatcacctgcccacttggctgttataccaagcctgtctgtctcccatgcagcttctgaaacactgttgccggcctacatgaatattactattactactccattcagggtgtaatttggtacataaatatatgacactgatataaaaccttttattttacgaatttttcatcagagaaaatttaaataaggataaaacttaattcaattctgtgttgggtgatgtttatttcattgtattaggtgagactctgccttctcacacctcaattgtgatacagaaaacaagaatgcaaagt

SEQ ID NO: 694138 - DNA, 1256 bp, Homo sapiens
ggaggtcccttccaatgctgatgggacattccaaatggaattgcttgccttcattcaattctatattttagccctcagtgattaaaaatgccttctttgttacagggttagggttagaggccacaagagaaagaccatattgatagtctgagaaatcaatgttgtcattgatataaagaaatcatgtgaggctgaattcatctgaatcctgattcatccttgaaaggcagctggtgtaactgcctcctacagaaagacttcatcttaagttacctagattcaaagggcaaatattctgtacccacaatttagctctgtcttccccaaaccaagatgttttcaagtgggatggcaagttactaactcatagtcttctgacagcaggaagaggggcttaagaatgtggaccacatagatgtcaataatccaacattaattttattcaataaactttttaaataaaatgcaaacatcagattactttctccctactaccaaaacttttattaaagagagaccaagagtaattttggagtttggagaaatttgtgggtgaacaggtcatggtaggatgtaggaagggcacctttgagaggactctgggtaactaaaaaaagtgagatcagccaggtgcggtgactcacgcctgtaatcccagcactttgggagtctgaggcaggtggatcacctgaggtcaggagtttgagaccagactgatcaacatggtgaaaccctgtctctactaaaatacaaaaattagccgggtatggtggcacatgcctgtaatcccagctacttgggaggctgaggcaagagaatcactcgaacccaggaggcagagattgcagtgaactgagatcatggtattgcacaccagcctgggcaacaagagcgaaacttggtctcaaaaaacagacaaacaaagtaggatcaatgcaaaggagtgggatgtcaacagagatcacctgcccacttggctgttataccaagcctgtctgtctcccatgcagcttctgaaacactgttgccggcctacatgaatattactattactactccattcagggtgtaatttggtacrtaaatatatgacactgatataaaaccttttattttacgaatttttcatcagagaaaatttaaataaggataaaacttaattcaattctgtgttgggtgatgtttatttcattgtattaggtgagactctgccttctcacacctcaattgtgatacagaaaacaagaatgcaaagt

SEQ ID NO: 694139 - DNA, 752 bp, Homo sapiens
catctgttctcttcttttcctgtagcaatagaagctgtagctgggcataggttaacctatccgcaaacttcattgtgttacctcttttgcgtttaagcgtcacaacaggagtaaattcttatctatgaartgagaggaaagatatgtacaatttgtggcatatacttctaaaggaataaatacgccttcctcttctcttttctttccatcacactggcctacagacactttgggaaggcatttctgtagcatgtatgataacaaactatagcaatggcagagcaacaagatggaaaggtactacttgatggaaagatactacttgatactacccaagtgtcatagggttcctgagtggtgaccaagagagataagtttatttctattgtgattaaatcatactctttttggaatcactttttaaagcaggcaaatctgtaacctaatatggcctctactaggtaatattagttttctttctctctttgtgttatctcttgtacctataaagatttttgcaattaacatacaattataaattcgaagctataattgaaaaaataaatctgctttgaggttattttctagtacccaggttttgtatacataggtgaagcagtacatttgatttcagagatacttcagaggcttttaaattcgtttgctgtaggactagtgtgcatatagtacaatgatataggttaaacagaataaccatcatatttcagtggcactgtgagatatatttgaaa

SEQ ID NO: 694140 - DNA, 645 bp, Homo sapiens
catgaaaactgctgaaattacagaggcaargataagcatttcatggctttggcaggcctagttcagaaataatggtagatatttgcataaagccatactatagagattttgtggtagaagcatttcctcctgggcacacatattttttagcctttcttacagttagattatagccacgtgactgggttctgtctagtgggagttggcagagggaatgtactttcagacctgaccataaaattccatgcgtgattgtctacacatcctgttttgcttctgtgatgacctcgggggccacatgctgaagatggcaaagtcacaaaatggaaggactccagatccctgagttaccaaaggaaagaaagtcaacaaggaaagttgcatgactgactttgtgagtgagaagtaagccattgttattttaagtcacagagattttgttgtttgttatcacagcatatcttagcttacactaactaatatatttctatttaaaaatgacttttagtgtggtgcggtggctcacgcctgtaatcccagcactttgggaggccgcggtgggcagatcacttgaggtcaggagtttgagaccagcctgggcaacatagtgaaaccccgtctctattaaaaatacaaaaattagcc

SEQ ID NO: 694141 - DNA, 645 bp, Homo sapiens
catgaaaactgctgaaattacagaggcaaggataagcatttcatggctttggcaggcctagttcagaaataatggtasatatttgcataaagccatactatagagattttgtggtagaagcatttcctcctgggcacacatattttttagcctttcttacagttagattatagccacgtgactgggttctgtctagtgggagttggcagagggaatgtactttcagacctgaccataaaattccatgcgtgattgtctacacatcctgttttgcttctgtgatgacctcgggggccacatgctgaagatggcaaagtcacaaaatggaaggactccagatccctgagttaccaaaggaaagaaagtcaacaaggaaagttgcatgactgactttgtgagtgagaagtaagccattgttattttaagtcacagagattttgttgtttgttatcacagcatatcttagcttacactaactaatatatttctatttaaaaatgacttttagtgtggtgcggtggctcacgcctgtaatcccagcactttgggaggccgcggtgggcagatcacttgaggtcaggagtttgagaccagcctgggcaacatagtgaaaccccgtctctattaaaaatacaaaaattagcc

SEQ ID NO: 694142 - DNA, 1498 bp, Homo sapiens
agtatgtattttttttgcttttattttggcctgcattaaaatctttgaatcttttggtttatttttctttaacaagtttgttgaaggatcacaaatatcagaggtatgtttattatagtatttaaaatccatttggaataatccaataactaatcattttaaattaaaaaggtcatagaaaataggtcttaattcaatatggaatattatcatgaagcagccttgatttttttttagttgattttttatgtcatgcctttaattgtattaaattggctttatttctcatttttttctttatagtgcttttaagcagaggttggcaaactgtgcctaatgggctctccacttttttttgtaaaaaattgttttggaacacagccatgctcatttatgtaggtattgcttttgtttctcactgcagtggcatagttgagtaattgcaacaaagactgcatggcctacgagcctaaaatatttattctctggctctttacagaactttgctgaccactgctacaattgctgttattttgataytataaaaatgagcaaatgtataaatgaaagttatttaacttatagtacatattttttattatgctcgtctgatttccctaatgaaaaattcttatatctgtttaataaagttggctttctctcttaggcaacctgtgaaaagctgaacaggtccaattctgaacttgaggatgaaatactctgtctagaaaaagagttaaaagaagagaaatccaaacattctgaacaagatgaattggtaaggcttttttatttgaggagaatataagaaaaagaaagttactgagctttaaaaaattaatatgatactggttaaagtattacattattgtaaaaaatgtaaagaatacaggtggttgtagagagcaaaattttctagatccattcttttcacttcccccagatgttactgtgttaaatttcttgcatatttttatagaaattttctatatgcactatggaagtagctcatgtaaataaaaactgaataatcatgtccatagtgtatatttgtaattacttaacatgtatattaacattaaaactttttcttttgaaaaaacctgtcttaatgaaaatcttgatgtatgtgagattatttagtaaaacatgttagtggacttatcttgagcctatataacttaaatgttatgaaatattaaagttatgagatactattgttacgtaatgttcatataaaatcccttttagcatatggctaaataaactgagaaggtttcttaatttgagcttcacttatggagctaaagtgttaggttaacagtatatctaataaacatggcattttggaaactagagtttagtaaatattaattgcctgatactgtgtttctagatggcggatatttcaaaaaggatacagtctctagaagatgagtcaaaatccctcaaatcacaagtagctgaagtaagttgaattagtctagtaggtctgttg

SEQ ID NO: 694143 - DNA, 1045 bp, Homo sapiens
tggctcccagatgttagagcaggctcactkggcagagttgggctagcagggagggcttggggctgtcatcattcacggccacatggacacggctcaaccatttataattagagttataacttaaaacaatcaacaaaaaagacttggtaagtaccttcacctcccagcatacacccatcacatctattattgccacaaagaattcgtgaccaaaggaagctggttcagaagcccagccctgtgttaaggtcccgtggggtctgagcaatgtgaaaataccctgggaacagatagatctcttctgtgtcctcccaaggcctctggagttcctaggatagtcatcttataaagtggttggtgggaaataagccatgaaaacaatagaaacgtgataggtaggtaagtagatagacaaggggattggatggatggatggatgaatagatgatagatagatagatagatagatagatagatagatagatagatagatagaacacagataggaagggagggggccagactgggagttggcaaggataatgccccacagtcctgcctagctggacaggaccagggccagctaggagcagggaatggaccgagatgaggcagagctgccactgtcagaaccaaaggcccagaggctgctctgtgcaggggcttcatcatcccccaaatacagggtttgaatgtacagctaacttccccaggcagagatcttgctttgatcaaagctgtaagcccagaaagtgctggcacatagtaggtgctcaaggcacacttttgagtgaatgtgtggaaaggcttgcccacatcctaactggacttcgtaggcaaaccgtcctcccagctgccccaggcctggaagaagcagtatgtgtgccccaacttgaagggcaggtggtatcagtagcactggctgtggggcctgaggatccagtgcaaggcctgactttgctattaactgagagttcagttcaccttatacaacagccctctgaggtggacaccactatccccattttacagacaaggaaactgg

SEQ ID NO: 694144 - DNA, 2205 bp, Homo sapiens
tgccccccaggatagaattcctgtagctgtgacctttggagcaggtgagtacctgccgcctatgagctgtgtgaccttgggcaagtcactcaacctctctgtgtcttagcttcctcatctaaacaacagagataataatatccacctcagtgagctgttaagcagattaaataagtttctgatgtgaagtactggtaagcgctgcataagggtttgctgttattatttcagttgctgttgttacaggcattcactccatgttgctaactgctaaggggtttccctcctttccatgggaaaggtgatgtccattctgacctctcctgggcctccctaatcctgtgggtgggacattcagggcaggcccacccctccaatcccctactcccagtgtgggcctcgggagagctgcctgggtgctggcggagcctgggctgacctgtagttgcccttcttggaggcgatgtgcagcgggagcaagccgtccttgttggtcttgttggcgtcggcaccctgtgacagcagaaactccaccacctcctcatgctcattcttgcaggcctcgtagagggcagacgcgttgtcgctggcctgcgtgttgatgtcagcacctggggaaggagaagagatcagcaagtggccaagtgaccgggaagttgctgtcctcaatgtaacgccaccgcgtggtgggcctgctgtgctaaccacggtaatgcacgggacctttaacaacgacccttaggaaggaggagtctacctggggctacccccagcttctttcaacaacatcaagacctaggggcctggccaggcgtggctcatgcctgtaatcccagcactttgggaggctgaggcaggcggatcacctgaggtcaggagttcgagaccagcccggccaacatggtgaaaccctgtctttactaaaaatacaaaaattagctgggcatggtggtgggcgccagtaatcccagctactcgggaggctgaggcaggagaatcgcttgaacccaggaggtggaggttgcagtgagccgagactgcaccattgcactccagcctgggcaacaagagtgaaactccgcctggaaaaaaaaaaaaaaaaaaaaaaagacccaggggcctgccagcccgaacagaggcctctgagaggctacaagcagccacgatgatgctggtttttcctgagcacctactacgtgctgaacatcgtgctttccacaggctatatctgaatccacagtgggtggtcaccttgtgaggtcagtactgctcttatctccagattacagatggggacagtgaagcacagaacacctagaccacttgcctcagaccacccatttcataaagatggagccaaacttgaacccagatggtctgatggcagaggccatggtggatattctgatggtagaggccatgctcttaaccctcactccatgtaagagggcctgggctctgccctgagagaggcctcacaggtctaggagggcacagagcccctaataaaggaaaaccccaataacattattaattgcaatttgctattaatattgctattattattgctaatgttaccatgctattaatattgatccttaytgctatcaataacttctagctcttatcactagtgctccttgtgctaggtattccctgcatgcttgctaattgctaattctctgcctttcacttcaaggaataagagaattactttctgtctcctcccaagaaaatactaggccaggtgcaatggctcacacttgtaatcccagcactttgggaggccaaggcgggcagatcacttgagctcaggaattcaagactagcctgggtaacctaatgagactctgttctctacacctactgagtagcccctggccgggcatggtggcacatgcctgtagttccagctacttggaaggctgaggtgcaaggattacttgagcccaggaggttgatataggcggcagtgagccgggatcacaccactgcactccagcctggacaacaaagtgagaccctgttcccaaaacaaaaacaaaacaaaacccagaaaacattaatccatgctgctagaaggaggaatcaggcctggtgacaatctgccttcagctcagtcttctacacctgcttcatctcctcgggcagggggtgagggggagaactgatgtgcacacagctttctctgcagaaagagaattc

SEQ ID NO: 694145 - DNA, 733 bp, Homo sapiens
aaattcccaccctgaatttttctatcacatgagaatttggcccagtgtgtctattgaattaccaattattattatttataatactctctttctgttagtgttagaattccttgcaatgctgactatgctcatagctttttctgatgtggtggtttcagtcctgagagaacattttcatcatgtggagctttaaaaaagatcctcatcgctttcccagaccaatcaaatggagatctctggcattggatctggggcatgggtgtggtttttttgtttaaataaagctctcccaagattcaaacgtgcatctgaagttgaggaccactgatctcatgggttcctgtgatctcaactggagcttattgcaaagtgcatgcttgttggtgagcagctatattaatttttgccttactcagtaattacatctgcaggtccctttaatggaaattatatgagaagaaacttagaagaagagacaattagaatttgggattcatcctagggctccttcatgaccaaaacaaatgtagatgcaggttattagctgaaakcttggtaatgtcttcagctgaggttcatgctttatggaaattgttcatgcatttagaaaaatagcatgtccaagttcttgtttaacaagttacttatttactgttttttttttttttgaaaaataaggagtgaagggaagtattgccttataattgtatattaaacaaggttgttaacaaaa

SEQ ID NO: 694146 - DNA, 599 bp, Homo sapiens
taagcttctcacgtcaacctccccaaagtgctggatttataggcatgaaccactgcacctgaccaagtattcttttagacttacttatacatagatttttttcttatttctcttttttggacatatatttttataatataacattctcttacgttaacagagaaatgcaagcaaaattttagttaaggcatttctaaaactttatttcaattctaaatcgtgttgtaatcttaaaaaatatcaggtaacctgctcgggtccccttctgtgccgtggggaagctttgtcctttcgctcttcacaataaactttgctaccgctaaaaacaaaacaaaacaaaacaacaacaacatcaaaaatcattgtaaaagtcagttaaacttaacatctgagataataaccatgcacacatctcatctaaagtgatgacaatgtgaacagtatgatsaagttctgatttgctcatgcaatcacctatgccgtgaccaccacctggccaggacaattacttgtaagagttcattgactgtaaggcacatccttatttcagagatttaaagatgtggaaaaaaatgtgcatcttggtgctagagaggatg

SEQ ID NO: 694147 - DNA, 587 bp, Homo sapiens
gagtggtatattagtccgttctcacgctgtgtaaagaatactacctgatactgggtaattataaaggaaagaggtttaattgactcacagttctgcatggctgaggagttttcaagaaacttataaacctgatggaaggtgaaggggaagcaggcaccttcttcataaggtggcaggagggagtgcccaagcaggtgaaatgccaggtgcttataaaaccaccagatctcatgagaattcagtatcctgagaacagcgtgggggaaactgcccccataatccaatcacctcccactaggtctctccctcaacacytgggggttaaaattcaagatgagatttaggtggtgacacaaagcctaaccatattaagtggtagcaaggaaataaaaagagatgaatcttttaacctttgcttatgccagggaagtgaattttgggtgggagagattattaaatttttaatatatttctatactctgacttgctataataagtacgtactaaaaagatatgctctaactttatcagagtataacttacataaaatgtatcctttcaagtgaataatttgatgctctttgaca

SEQ ID NO: 694148 - DNA, 514 bp, Homo sapiens
tccactggatgctactaagtggagcctcagtatcctaaattgtaatacattgggaaaataaaaggcatttttctggttagattatatagtgtatatcatggtaaaaagtaaattaatctacatgtctttccttaccagaactatgatatcttgactattaagtttaagagataaaatgaaatgtcagtattttgataggcaaataatgcatgatataaaaagaatgtaaaaatattttcaaaggtactttttggtcagttacaaattatagaagccctcaaaattatagaaattatcataattcaattcaaatttctttaagcaraaaagggagttgtatttcctctgtgatggctttagacagggttagattcagatgccaaaaaatgcagtctcatttttatctgagttaacttcattttcagtcaggttcttcctcttctcataatagtggtaagatagccactagcaatgccaggctggtgttctactagatttgaaacacaaatatctc

SEQ ID NO: 694149 - DNA, 804 bp, Homo sapiens
taaggcattattcttctccaagaaacttcagctcttgctcttaaggccttcaactgattggttgaggcccacctacattataaaaggtacccacctttacttaaagtgaactgattgtatatgttaaacaaataccttcacagcaacaccaagattcatatttgattaaataactgggtatggtaaccttgccaagtgaaaaataatcatcatagggctcaaatggcagagcctaagttcagmccttcatagtaagtccctacagctttaggataacctccaaaagactacaactatatctgtacacatatatgtcaaatatgcaaacaaactaatctcaaacattactattcatacatctgaacactttaataagaaatattttgagcatcaacttataacatcggcatggtttttatattgtaaatacgaagttaaggaatgcagaattataagatattctttttcttcaggtaaattgggttaattggagagataagaaaattaagttgaagaaaatttggctgtgtattttttagttgagtggtatggtctctatggttagtgaataaaatctgtaatttaccttctttttaaatttgtcgaggcttcctttattactcatcacatactcaaaatattaagaaggtttaataagtgttttaacagaatttattttgatccagtaaatatatatatgtgtgtgtgtgtgtgtgtctgtgtgtgtgcgcttgtgtgtgtgtgtccaagaaccccagaaccagatttattttggtccatttaatattacgtacatattcaatg

SEQ ID NO: 694150 - DNA, 804 bp, Homo sapiens
taaggcattattcttctccaagaaacttcagctcttgctcttaaggccttcaactgattggttgaggcccacctacattataaaaggtacccacctttacttaaagtgaactgattgtatatgttaaacaaataccttcacagcaacaccaagattcatatttgattaaataactgggtatggtaaccttgccaagtgaaaaataatcatcatagggctcaaatggcagagcctaagttcagcccttcatagtaagtccctacagctttaggataacctccaaaagactacaactatatctgkacacatatatgtcaaatatgcaaacaaactaatctcaaacattactattcatacatctgaacactttaataagaaatattttgagcatcaacttataacatcggcatggtttttatattgtaaatacgaagttaaggaatgcagaattataagatattctttttcttcaggtaaattgggttaattggagagataagaaaattaagttgaagaaaatttggctgtgtattttttagttgagtggtatggtctctatggttagtgaataaaatctgtaatttaccttctttttaaatttgtcgaggcttcctttattactcatcacatactcaaaatattaagaaggtttaataagtgttttaacagaatttattttgatccagtaaatatatatatgtgtgtgtgtgtgtgtgtctgtgtgtgtgcgcttgtgtgtgtgtgtccaagaaccccagaaccagatttattttggtccatttaatattacgtacatattcaatg

SEQ ID NO: 694151 - DNA, 804 bp, Homo sapiens
taaggcattattcttctccaagaaacttcagctcttgctcttaaggccttcaactgattggttgaggcccacctacattataaaaggtacccacctttacttaaagtgaactgattgtatatgttaaacaaataccttcacagcaacaccaagattcatatttgattaaataactgggtatggtaaccttgccaagtgaaaaataatcatcatagggctcaaatggcagagcctaagttcagcccttcatagtaagtccctacagctttaggataacctccaaaagactacaactatatctgtwcacatatatgtcaaatatgcaaacaaactaatctcaaacattactattcatacatctgaacactttaataagaaatattttgagcatcaacttataacatcggcatggtttttatattgtaaatacgaagttaaggaatgcagaattataagatattctttttcttcaggtaaattgggttaattggagagataagaaaattaagttgaagaaaatttggctgtgtattttttagttgagtggtatggtctctatggttagtgaataaaatctgtaatttaccttctttttaaatttgtcgaggcttcctttattactcatcacatactcaaaatattaagaaggtttaataagtgttttaacagaatttattttgatccagtaaatatatatatgtgtgtgtgtgtgtgtgtctgtgtgtgtgcgcttgtgtgtgtgtgtccaagaaccccagaaccagatttattttggtccatttaatattacgtacatattcaatg

SEQ ID NO: 694152 - DNA, 804 bp, Homo sapiens
taaggcattattcttctccaagaaacttcagctcttgctcttaaggccttcaactgattggttgaggcccacctacattataaaaggtacccacctttacttaaagtgaactgattgtatatgttaaacaaataccttcacagcaacaccaagattcatatttgattaaataactgggtatggtaaccttgccaagtgaaaaataatcatcatagggctcaaatggcagagcctaagttcagcccttcatagtaagtccctacagctttaggataacctccaaaagactacaactatatctgtacacatatatgtcaaatatgcaaacaaactaatctcaaacattactattcatacatytgaacactttaataagaaatattttgagcatcaacttataacatcggcatggtttttatattgtaaatacgaagttaaggaatgcagaattataagatattctttttcttcaggtaaattgggttaattggagagataagaaaattaagttgaagaaaatttggctgtgtattttttagttgagtggtatggtctctatggttagtgaataaaatctgtaatttaccttctttttaaatttgtcgaggcttcctttattactcatcacatactcaaaatattaagaaggtttaataagtgttttaacagaatttattttgatccagtaaatatatatatgtgtgtgtgtgtgtgtgtctgtgtgtgtgcgcttgtgtgtgtgtgtccaagaaccccagaaccagatttattttggtccatttaatattacgtacatattcaatg

SEQ ID NO: 694153 - DNA, 804 bp, Homo sapiens
taaggcattattcttctccaagaaacttcagctcttgctcttaaggccttcaactgattggttgaggcccacctacattataaaaggtacccacctttacttaaagtgaactgattgtatatgttaaacaaataccttcacagcaacaccaagattcatatttgattaaataactgggtatggtaaccttgccaagtgaaaaataatcatcatagggctcaaatggcagagcctaagttcagcccttcatagtaagtccctacagctttaggataacctccaaaagactacaactatatctgtacacatatatgtcaaatatgcaaacaaactaatctcaaacattactattcatacatctgaacactttaataagaaatattttgagcatcaacttakaacatcggcatggtttttatattgtaaatacgaagttaaggaatgcagaattataagatattctttttcttcaggtaaattgggttaattggagagataagaaaattaagttgaagaaaatttggctgtgtattttttagttgagtggtatggtctctatggttagtgaataaaatctgtaatttaccttctttttaaatttgtcgaggcttcctttattactcatcacatactcaaaatattaagaaggtttaataagtgttttaacagaatttattttgatccagtaaatatatatatgtgtgtgtgtgtgtgtgtctgtgtgtgtgcgcttgtgtgtgtgtgtccaagaaccccagaaccagatttattttggtccatttaatattacgtacatattcaatg

SEQ ID NO: 694154 - DNA, 804 bp, Homo sapiens
taaggcattattcttctccaagaaacttcagctcttgctcttaaggccttcaactgattggttgaggcccacctacattataaaaggtacccacctttacttaaagtgaactgattgtatatgttaaacaaataccttcacagcaacaccaagattcatatttgattaaataactgggtatggtaaccttgccaagtgaaaaataatcatcatagggctcaaatggcagagcctaagttcagcccttcatagtaagtccctacagctttaggataacctccaaaagactacaactatatctgtacacatatatgtcaaatatgcaaacaaactaatctcaaacattactattcatacatctgaacactttaataagaaatattttgagcatcaacttataacatcggcatggtttttatattgtaaatacgaagttaaggaatgcagaattataagatattctttttcttcaggtaaattggkttaattggagagataagaaaattaagttgaagaaaatttggctgtgtattttttagttgagtggtatggtctctatggttagtgaataaaatctgtaatttaccttctttttaaatttgtcgaggcttcctttattactcatcacatactcaaaatattaagaaggtttaataagtgttttaacagaatttattttgatccagtaaatatatatatgtgtgtgtgtgtgtgtgtctgtgtgtgtgcgcttgtgtgtgtgtgtccaagaaccccagaaccagatttattttggtccatttaatattacgtacatattcaatg

SEQ ID NO: 694155 - DNA, 1731 bp, Homo sapiens
ctcatttattgaatattatactgcattccttgatatggccaggagtagaattctttagtttctaaggggagggagaaatggtaacactacctgatttttttcttttttttttttttagaggggcaaggattctcttgatactttggcctgagtcagggcaaggcagggagggacttagcttttagctatgtgccatcaatagcttggagtgtaaaagggatatgggagtaggagatgcagaggattgtggtttaaaaaggaagataactcgaggtcacacctcacttgtatttcagtaagcttttactgcacttgattaaaccaagttgctgtgaggaatgcaaatatgaggtcagggtgcacgtattcaggcagcttagagtccattgaagctggtacataagactgaaaattaacaaggatttgaatgaaggtgcatttactgaactttatttctactacacgccagctattgtgcgagggcctgggaaaacagctgtgaataaaacaggttaagtccttcctcttctggcattcacagctgagtggcagacaggccagctaatggtttaggcttttaaattggtcggtatttccttaatttgcaggtattttttctgctttttatgtattttgtaattatgaaaagtatgcattcttatttttttaaatgtggaaaataatagaagaaaaggaaatttagtgttagtgcagtggtttattttgcactgttacactgttacttaagaaaaggtagaaccttattaaaggcattttctataacaagctccgcccatggcccagggagcagctcttaaagtagtttaacaatttggttagaataaaagcagaacagctgatgcttttttatgtttctgacctattttcataacaaaagtacccactctgctgggcgcagtgactcatgcctgtaatctcagcactttgggaggtggaggtgggcagatcacgaggtcaagagatcgagaccatcctggccaaccaacatggtgcaaccccatctctactaaaattaactgggcatagtggcacacgcctgcagttccagctactcgggaggctgaggcaggagaatcgcttgaatctgggaggcagaggttgcagtgagctgagatcacgccactgcactccagcctgggtgacagagcgagactccgcctcaaaaaaataaaaaataaaaagtacccaccctgtagctcaaacatctgccagtcctgaggttgtgatggctctgcctccttccctggaccttaggattgggaggaataagcctctgagagacagactgccctttttcccaagaatggaatctctgctcactagggtaaggggtacactaggtgaggtccacatgccagtgctcatggctgttgaatgtcctggaaatatggcagctaaatggaattattaaatgctcagaagtatttagctataccgtaatatcttaatgacctccagtaggctcttggaaactacarctttaagcaaaacaacatacaccaggtcctcaaataacgtcatttctttcaatgtagttttgttataacattgagaaaaaaaaatactggttttggtatatgtcattttgttttaagtcacaggctccaagaactgattgacaatgttaagtgtggacttactgtactgcatcttctctgtgatattttagcagtgtggcatggaggtgggcctatgggttggcgtacagag

SEQ ID NO: 694156 - DNA, 611 bp, Homo sapiens
aaagttcctcacagaaccttctctatatcaaaatgtggctaactttggtccacatggatgattggaaatgaaagaaaaccagaattaatgacaaaatttagctaaaacttttactgccttgctaaaaattaatcttttctcaaaggtaataagccaagggtcagcagaatggacaattactgttatacattttcagcccatcatttctaacagtttgtgggacaaaaggaaaggaacaaaaggacaaaaggaaaatggttaaaaagaaactcaatgatataaaattagtcaatattatgtttaaataattttcaaaggatatattgagaaaaaaggattaagaggaaatataaaaatgttaaagagaaattatattataggagaaaaacatagggttatttttstcattattctaatttacctatttttaataatttggttatactagctccttccttccttcctttcttccttccttccttccttttacttttttttttttttttttggctaaaattacacacacttattagcttagtttgtgtcaggaatctgggcacaacttagctgaatcctgtgcctcagggtctcataaagattccaagtgtcag

SEQ ID NO: 694157 - DNA, 611 bp, Homo sapiens
aaagttcctcacagaaccttctctatatcaaaatgtggctaactttggtccacatggatgattggaaatgaaagaaaaccagaattaatgacaaaatttagctaaaacttttactgccttgctaaaaattaatcttttctcaaaggtaataagccaagggtcagcagaatggacaattactgttatacattttcagcccatcatttctaacagtttgtgggacaaaaggaaaggaacaaaaggacaaaaggaaaatggttaaaaagaaactcaatgatataaaattagtcaatattatgtttaaataattttcaaaggatatattgagaaaaaaggattaagaggaaatataaaaatgttaaagagaaattatattataggagaaaaacatagggttatttttctcattattctartttacctatttttaataatttggttatactagctccttccttccttcctttcttccttccttccttccttttacttttttttttttttttttggctaaaattacacacacttattagcttagtttgtgtcaggaatctgggcacaacttagctgaatcctgtgcctcagggtctcataaagattccaagtgtcag

SEQ ID NO: 694158 - DNA, 714 bp, Homo sapiens
tttcctaactaaatttctgataatttgtttttcagcactaaacaactaatatatcattctaaaacataggggaaatgtgtgccaggtatataggcgttttaggaccttatttaaaatgtttaaatggattttgtgatatgtatgttttttttcagacttttagaatttaatttttttcacatattcaaattgtcaattaatgatttattcgtttttatgtagtaaataggctctgaaaaaagtggctgaaacagtgagttgctaagaatattgtctgcttcttcactatgaagaaattactcaaaattatgtttacatataacaatttactagtggtacactcctccttttcctgtagttcactttgatgtaatataatgtcatctcccatcccttaattgcccttatgttccacaataaattgaatttaacagcatgaaaatcttagatgtcatagtaatctgaatgagtaggtagtaaaaagtctacagatataaattatccttagamgataaaaattacctgctcacagagttaatttaatctggtgattatgtagcaaatatatggagagacaggacttctgagttctttgtgttaaatgatatactgccattttatttttgaaaattcaaatttgacccaatatgttgaatgcaacatgctgcctccagttccacataatatcccacaatttagggaaatgagtcactc

SEQ ID NO: 694159 - DNA, 714 bp, Homo sapiens
tttcctaactaaatttctgataatttgtttttcagcactaaacaactaatatatcattctaaaacataggggaaatgtgtgccaggtatataggcgttttaggaccttatttaaaatgtttaaatggattttgtgatatgtatgttttttttcagacttttagaatttaatttttttcacatattcaaattgtcaattaatgatttattcgtttttatgtagtaaataggctctgaaaaaagtggctgaaacagtgagttgctaagaatattgtctgcttcttcactatgaagaaattactcaaaattatgtttacatataacaatttactagtggtacactcctccttttcctgtagttcactttgatgtaatataatgtcatctcccatcccttaattgcccttatgttccacaataaattgaatttaacagcatgaaaatcttagatgtcatagtaatctgaatgagtaggtagtaaaaagtctacagatataaattatccttagacrataaaaattacctgctcacagagttaatttaatctggtgattatgtagcaaatatatggagagacaggacttctgagttctttgtgttaaatgatatactgccattttatttttgaaaattcaaatttgacccaatatgttgaatgcaacatgctgcctccagttccacataatatcccacaatttagggaaatgagtcactc

SEQ ID NO: 694160 - DNA, 1426 bp, Homo sapiens
gggttcaattttaacttggcattataaaagtgttaaattgggacaaactagctccactggttaagtaaaatgtggttatgttacaatccaggcttcaaagcttacatcgttgctataacttaaaaaaaagaaacactagattgttcattagagtaaaatattggcctaccattatgaaaaatgcataacactaatcacaaatggttaaaaaaaactgccaaatttaatatcacaaatgaaaagtcaatccaaaaacacatttcatgttagcaataccatttttgaatttaagaaaaaaataacttttaatctacttggcatattgttaattgtctgtgttttaaataagaaaatggttgtttrgccgggcacggtggctcacgcctgtaatcccagcactttgggaggccaaggcgggcggatcacgaggtcaggagatctagaccagcctggctaacacggtgaaaccccgtctctactaaaaatacaaaaaattagccgggcacggtggcgggcgcctgtagtcccagatactcgggaggctgaggcaggagaatggcgtgaacccgggacgcggagcttgcagtgagccgagatggcgccactgcactccagcctgggcgacagagcaagactctctctcaaaacaaaaagaaaaaaaaagaaaatagttgttacggtatgttttagatatatttaatcaagcacatagtctgtaatgcacctatagatagatgtttattatgataatgatacagtttttgctaattttatacattggtttttagaagtctcttatactgaataaatttacattttacatagtctatattactcacattatttttaaagatttattttttacattaactgtttagtaaacagaataggtgtggaataaattctgtagtgtttctacttcgattacataaagaaacatgataacttttaccttctattacccatctgtttttacaacattcaaattataactatatattcagatattatttcagggcattaataggaaaaaaacaaaattgtccgacccaaacagaatctctcttctgttaaattaggggatccatagctatgctctttcttacagtaataaaatggtgaaaatattctaaactaaaaatatcctctaattattatttctgtgactctgaaaatatttcatgaaaaaaatcccacttcaattgaatttttctgctttgatgcagatagtcttttgctaatttcttatttctatatgtaaggaattgctaaaactcttggtggctttaaacccttatttattctatctaaagcaaaatttatgtctagtacacaaatcttcatgaaactttaatccacattattagtatcatttagttactctccagaattaatcttggaagctgaattcttttaacgaccaaag

SEQ ID NO: 694161 - DNA, 588 bp, Homo sapiens
tctcagaacactggggagagagaggcatgggtttgtgggccaatgttggaagccgggtgtgcctcccaccacagggctggcttgggaagagtgtggtttgtctgccagccacagcttctgcttggtggattcccttggytcaggacatctaattgcctagtgatctgggcataggaagtttgggacaaaactaactaattgggccagatactgagaaggagatctcttcaagggagagtggagaatgagttggtggtccccacagctgcctgctgggtaaaaatccccaggctgcaacagtttcacctacagcaacaccactatccccaaagattccccacccttggccttctgcatcaagagaccacctgtagacatacccaacaaccctttctgacattgtccagcacagaagaccagcaggttcccacagaacagcaggtctcctgacaacctagcctttggttttcaaactgccattgaaaaattataactgagacagtgaaagcgatttggcctaaccaactccatcttacttctaacctccaagctatccttattcattcctttgcaaaggtcaaactaatt

SEQ ID NO: 694162 - DNA, 697 bp, Homo sapiens
tcttctacagagtacttaattgtcttttattgaccatttgtttattccctcctaatccttcctggtattatttattataactttacaataaggcttgttacctggtacagtaagtccctccatttggctcttattttaagatgtcccaattttagccatttatttatttatttatttatttatttatttatttatttatttttgatggagtcttgcactgttccccgggctggagtgcaatggcatgatctcggctcactgaaacctctgcctccggggttcaagcgattctgctgcctcagcctccctagtagctgggattacaggtgcccaccaccactcccagctaagtttttgtatttttagtagagacaaggtttcactatgttggccaggctgatctggaacacctgacctcgtgatccgcccacctcggcctcccaaagtsctgggattacaggcgtgagcaaccgcgcccggtctattcttctttataaaactgaagatcaaaatgtcgaagttctgtgaagggttctgttgaagttttcagtggaattgaatcaaatgtaaagattaatatggaggcagctgacattaatcatatttatttttcttcttattgataaacacattagaattttctattgcagtcttcttaaagtcattcaataaagtattagaatttattttgttagat

SEQ ID NO: 694163 - DNA, 645 bp, Homo sapiens
ggctggtctccaactcctgacttcaagtgatccacccacctcggtcccccaaagagctgggattacaggcatgagccaccgcacccagcagataattttttttttttaaacggaggcttactctgttgctcaggctggagtgcagtggtatgatcttggctcactgcaacctccacctcccgggttgaagcaattttcctgcctcagcctcccaagtagctgggattacaggcgcacgctaccatgcccggctaatttttgtattttcttttttttagtagagatggggtttcaccatgttggcgaggctggtctcaaactcctgaccttgtgatctgcccacctcagcctcccaaagtgctaggattacaggcgtgagccactgcgcccagcctaaatttttaaattctaaaaagatgagttaactggatgtggtattgcacacctgtagtcccaaaggagtctgaggcggraggatggcttgagtccaagagtttgaggctatagtgagctatgattgtgccattgcagtccagcctaagcaacagattaaaaattaaactttttttaataaataaaaaatgggttgcaaacagggaagcagaatgctggtgcaggcctgcaggatggaatgaaacagacaca

SEQ ID NO: 694164 - DNA, 619 bp, Homo sapiens
cattcaaaggcccagcccagcagcagaggcccaacttgagaggccctctttggtcatgtctcacaggttggataagaaggtgcatcacgattgtgtttcagaaacagaaaacctgtcattatatttcagagaataacagaagagctctctgacaccacaaagactagacctgcgactagctttgaagaaactacattgctgaaatctggctayaccgaatagatgaaccagtgggtgatgattcacttgacctcagctgagttccctcaactattggtctcttcttggcatttgaaaaagtattcaattttcaaaaattctgtctgccaagcaaaatttttcaatcattcagaactggtccaactgcacatctcaggcctcagggattcccagtaatggagttttcagatttttttgtttccagataagtggaaattcattcatctgcatgcacagtaacaatgtactgtggacagagattgcaggggcatgaaaaataatggatagaatcaaaaaccacattttagtcagtaatttctttttttattttttttatttttatttttatgtttttttgagacaaagtcttgctctgttgcctaggctggagtgcagtgac

SEQ ID NO: 694165 - DNA, 660 bp, Homo sapiens
tcaccatcgtggtccagggtttctaattttcaagaagctggaaacctgaatttttttgtttaagtctcctgacttttgcatgaaatattattatatttaaatgttgaaactagtttaactctaaaagacaagacaagcccatgtgaagcaaacygggcagagcatggatgagtgtcctataggccactggagtatgacctctgatatgtgacatacacattggagtgactgccacagccttcctcaatgtcttagactgttttctgccgctaaaacagaatacctgagcctggctaatttataaagaacagagatttatatgctacaactctggaggctgggaagtcccaaggttgaggggactgcattttgcgggggccttcttgctgcgtcattccatggtggaaggtggaagggcagcagagagtacatgtgcatgcaagggtaggagggagagagagaggaagggcaggagagagaaggaaaaggggctgaactcatccttttatcaggaacccactcctgtgataaccagcccactcccaaaataatggcgttaatccattcaagatggcagacccctttgacctatttacctcctaaaagccccacctctcaacactgttgcattgaagattaagtttccaacatatgaacttt

SEQ ID NO: 694166 - DNA, 2088 bp, Homo sapiens
tgcagtttggtgaagaccccctgcactctcaggtgtagcatcttcctgccacatgagggataccttaataatatgaccatcagccacaagcctcagccctttccaatgtcatgtcccacagtgcataacataccagcaaatgtttatcacaacctactcaaggccagtcattcagtttccaggactctcaatgaggttgggccggaatttcctgttgctgtggaataaagcatgaacaactgccacatgatgtgttgctaaaatgaatgcagtatcattagcatggtggacactgtgatgcaccaccagatgccccttaaggagggacttgttgcccggctgctgggagtgctgaccatggggagtctatagctgccaccagcccctgcaggggtaccttggctgaagggggctgcctaggcaagggtcatgccatgcccagggatacccacatccagcgatgactgatgctggtgggggtacaatggcatagccatctcaccccacctcgggacacccctataaggttgactcatcctgaatcctgaacctcatctccatgtccccgtgtccactcctgcttccttcccattccacaggcactgatcccacgggcgctccttaataagtctcttgtaccctaaactctgtctccaagtctgcttctgggagaccccaacccatgaccatcagcctcttctagaagtacacagatgccccagcatgccacactccgggtagatactccaccctcccagggcacccaattcaccttagaaatgtgaagctgccaactgctctcagcaaggagatgtctggtacttggtgcttggaagtagtttcgttcgtctaaaaacgtaacataaatttttacattaacattttttaacctgaaaaaattgaattctagttagtgatatgtatgttagaagtatttagtgggaagtacagacatccaagtttttcttttaaatgcaccaaaagtaagatggattgagggatgcgtagagggaggtagagatggaaaaatatggataaaacaaatattgtaaaatgtcagtggtaaaatcttggtggtgtgtatgtgagtgttcactgaaaaattatttcaatttcactctgtttgaaactttttattttaaagtattgggaaaataaataggtgtgactgaataggaagagtagaccgagattgttttatgaactgatttcaaagataaagttaagcccgtcaagtacttgagattatatcagtgtaatttccctgatacatttgaacccatcgtttatttagcaaacattcgttgagcaggtacaatgagcttggatatacagtaagtgttccagggaggacaaagaaatataagagctatattctgcaagtttattgtagtagatacaataaatacatatggaaagttaaatagtaatagttcatatcaccctagacatagacttttaaaatacatggattctccttcttataggagatagctacaaagcaaaacacaaacaaaaacaaatgcatgtattggttctaccatacagataatgtttctagcaatgaataataacaattataataataatgatagcagatcttacacagtgttcgccatgtacctggcagtgttccaagggcttcacctatttcaatgcatttcatccgtacactgtgtggtggtgagaatgtatctgcagatttgcaactaaaggggacgtgactggccgagggcaccacctgctgtgctctcyaatccatcactaaatttctaagccagtggctgagcccagtggggatactaaggcaagcacattcccaaggacgcaggcggcctctgatagtcatcgctggctctgtgactcccagatggccttgccaacctttctaagccagcatggtgatctaggatgctgtccccaaccttccttcctccccactctcctttacagagacaagacctgtgtggcatcccgatggctctccccacctccctagactgcctccctcttgctccccactgtccctcccagggctaatttttggaaatagtaaaaaagactcaccctcaagcacgcctttcaaag

SEQ ID NO: 694167 - DNA, 602 bp, Homo sapiens
gtaacaaagtaacaaaggtctttgacgattccaggagctgcactggagccagggctgctgcctgactgatcagccaaggtaggagctgaagtttcatgggccagcagcccaggtgggctcatgaacacatcagtcctgggtagtgtggtggaggtggggctgcatgaatccatccccaactgtcatatcccagtgtctgatatgtctgcacagctggaggcggctaagtttgacattgcttcaattttctcactagtaaaatggggatacaaatgcgtatctggcagggttatgatgaggattaaattggaaaaaaacaactatttcaattgtgcttgacagagagcaggtgtccaggaaatttcattttccttctcttccctttctgccttttctatctgcctaacacccctcatgctgggaacttctcttctgtccatgttgctattgagactgttaatcacatgttccaaactgaccaatcagaatactcctttsttcctggtttcagtgattggtccagcagtgggcacatgacctgggaaagccaatgagagtctttcggggagggggactcgatataaatgcagggttttctctgg

SEQ ID NO: 694168 - DNA, 1779 bp, Homo sapiens
tttattacttgttgagtatttgcaattgtcctcagtaaaattctgagacatgatttttaatttaacataccttaagatttttgtttgcaggtggctgaatttcttcagaaaaattattttaagggctactcaacactgagcagttagtattcattcaggtggccattctctgatgcctgtattgcttccagctgttgggaaatgaacccagtggagaatattgtttttcttttgctaacaacaacatccgttaggacagatttccacatgtctgattgctgggccgatgacacaaacatcgacaatagcgcttcacgcgtgttgactgatgatttccaaaagcttatcttcccagtaggcagtttgccagatgcttccagaaatagatgagaatgccaatttcatcacactgttgccagcactaggtatgtccactacattttaatgctagtgtaataggcaaaggggacctgctgtctgtttcaccattcatttctttgcatggttgtcaggtgggacattgcattctcctggagaggccagatcactatgtctcccaggaggccctagcagaagctgctctggtgtccagctcctgtgtgaagcctccctggtccctgactcttggaacagacttcttttctgccytttaaacacccctaacatcatgcgtggtcctttgctatgacacagttgttccccattctgcatcgtcatgaggctgtctacaccctctctctctcctgggcagggctccggctctgcaggggatggggacgtgtgttactctgttagtcccctgccttgtccagcacagcactgtacatgccacagaggccccacagagcttgatcaaaaactaacaatgattaaaccaaaattacgaatggacaaaaaatttccatcaagaaacctcaacattttaatgttcatgaggggggaatgtagggtaaatgcacctgatagtaataagcatacccttagaatgaccctgtatggcagatgcgcctaaatgtgtgttctgtgctagggaatccaggagtggccaacccggagattgattctgtgtctatgataaacatctgagcccctggcctgttctgtggaacgtgggccgttcacgggattgaggccctgagtttgggattggatgaaggttgccagggcgaggttaccaggagggtgttaagtgaaaatggtatgtacatgacatgctgttcagaagaggttacagttttcctgcccggcccgccaccactggagcatttctgtacataaggtgatttccctgttcagcccaccatcattgaacactctccctgcacgtaagcccctaataaaaccccatggcttggttgctagctctgggtctcttcggccttcctattgagcttaataggggttcagcacaaccatggaacaaagaacaacaaaaaaattggtgatcttagctctagttttctttcctccctgaatcacttatgaagggagtcatgtggcctttcagccttatctcatttgaaaacagaggctgtaggatcaaatctcagtccccttagtcctatatttaggagtcaaactctgacttcttcatggggctgtcatcagatggcaaagcacacagggcaaggtggagcaggaagctgctggacgctctgccttccttatcgaaatagtgaggttacatggggagagctgtggtcctgattcacttgagtgttttttagggacctactatgtgccaagcattgagctgcctctgatagtgaaggtagaatg

SEQ ID NO: 694169 - DNA, 1779 bp, Homo sapiens
tttattacttgttgagtatttgcaattgtcctcagtaaaattctgagacatgatttttaatttaacataccttaagatttttgtttgcaggtggctgaatttcttcagaaaaattattttaagggctactcaacactgagcagttagtattcattcaggtggccattctctgatgcctgtattgcttccagctgttgggaaatgaacccagtggagaatattgtttttcttttgctaacaacaacatccgttaggacagatttccacatgtctgattgctgggccgatgacacaaacatcgacaatagcgcttcacgcgtgttgactgatgatttccaaaagcttatcttcccagtaggcagtttgccagatgcttccagaaatagatgagaatgccaatttcatcacactgttgccagcactaggtatgtccactacattttaatgctagtgtaataggcaaaggggacctgctgtctgtttcaccattcatttctttgcatggttgtcaggtgggacattgcattctcctggagaggccagatcactatgtctcccaggaggccctagcagaagctgctctggtgtccagctcctgtgtgaagcctccctggtccctgactcttggaacagacttcttttctgccctttaaacacccctaacatcatgcgtggtcctttgctatgacacagttgttccccattctgcatcgtcatgaggctgtctacaccctctctctctcctgggcagggctccggctctgcaggggatggggacgtgtgttactctgttagtcccctgccttgtccagcacagcactgtacatgccacagaggccccacagagcttgatcaaaaactaacaatgattaaaccaaaattacgaatggacaaaaaatttccatcaagaaacctcaacattttaatgttcatgaggggggaatgtagggtaaatgcacctgatagtaataagcatacccttagaatgaccctgtatggcagatgcgcctaaatgtgtgttctgtgctagggaatccaggagtggccaacccggagattgattctgtgtctatgataaacatctgagcccctggcctgttctgtggaacgtgggccgttcacgggattgaggccctgagtttgggattggatgaaggttgccagggcgaggttaccaggagggtgttaagtgaaaatggtatgtacatgacatgctgttcagaagaggttacagttttcctgcccggcccgccaccactggagcatttctgtacataaggtgatttccctgttcagcccaccatcattgaacactctccctgcacgtaagcccctaataaaaccccatggcttggttgctagctctgggtctcttcggccttcctattgagcttaataggggttcagcacaaccatggaacaaagaacaacaaaaaaattggtgatcttagctctagttttctttcctccctgaatcacttatgaagggagtcatgtggcctttcagccttatctcatttgaaaacagaggctgtaggatcaaatctcagtccccttagtcctatatttaggagtcaaactctgacttcttcatggggctgtcatcagatggcaaagcacacagggcaaggtggagcaggaagctgctggacgctctgccttccttatcgaaatagtgaggttacatggggagagctgtggtcctgattcacttgagtgttttttagggacctactatgtgccaagcattgagctgcctctgmtagtgaaggtagaatg

SEQ ID NO: 694170 - DNA, 579 bp, Homo sapiens
gcaatcaatccaactctggcatcttacttgcacgttgaatttttatattacattagtggagccccagtctctttgtatctttaatggatattttcttgttagagctttagtatgtgttttgtcttctagaaaattctatgctgagaggaacaatagccatttagacactggaattcaaaagagtcactggcttcctaacattaacccatttmttccttgacaaatgcagtcatggtacttttggaataattttctatcatatccgcttgagtaaatttaggggaataatcaatgtatgttcacaaaaacagcctggtgcaccaggcagcagatggtaaagaaaggaatccagaattctgtctcctgcaactggatggttaacaagccactttgtagattagtgcctctcaaatctcccaagttttgactttgtcttccccttctattgtcctcagaagacttatatttaactactctaattctggaaaatatttttgaaccatagcctcttgctctatataaataaagagtcggtagttctagtcctttgccttatcaaatgggacactgcgaccagag

SEQ ID NO: 694171 - DNA, 1177 bp, Homo sapiens
gaacataatactgtactatacttatgggtgcctagaaaatacttaagagtttgcaacaggattagcaagaacccacccatctcctgggaaaactgcttgggctcattccagattggggtcaacagtgtcacttttatttcctaaaaatacccaagcttgttaaaaacttaaaaaaaaaacaaacctctcatccgttagtttacggcttgcatccctcaaccgctgaacttgcaaaggtttcacagaagcatcatctgtaccttggggcaatccctgagagcgggtaggctgctccaatctctgctgtggatctggttttcaagacgagggaaagaaggattaggaagaccacacaccagtgacttgatgcctgtccttcgccaggttttagaatggatcattatatatttggaggcagtgggaatgcttggtctggggacaaaagactcagaggggatgakgcttacagccttaaaatactcaaagagctctcacagaggagaggaaatagacttattcaaactctgcctgaagggtgaagtttccagaaggactattttggttcaacataagaatgactgtctaacaaccacccaacaatgggtggaaaacttccttagaggtgctgagaaagggcccgggcttaggaccgttcaagcagaggacagcagggatgttgtaataagaattccagcagtgggcttgaggttcagctgatgacctccaaggttccttccagctctaagattggatgattctatatctgtaattttccatttccctattaagaagaaattttccacagtgaaaattgttttagtatttgataaaagctgtgggatgatttttgcttttgttgactttaacagggggcttactactctgccccagtggcgtaacaagacacaaacacatcagtgatatttattgggcaggggagagaggcgtttattgttgggtgggaaagtcctgcttgcttacatggggactggcatggaggtgttgggaactccaaatctttcctcacattgtttctgaaattcctctgcccaaaggacctgggcattttaccccagtcctgcctagtgggtgcagcagaggtgtctggagcctgaccgacatttcaccaatcaccttggtagttctcatagcatcctcccaatcccctacaattctg

SEQ ID NO: 694172 - DNA, 1177 bp, Homo sapiens
gaacataatactgtactatacttatgggtgcctagaaaatacttaagagtttgcaacaggattagcaagaacccacccatctcctgggaaaactgcttgggctcattccagattggggtcaacagtgtcacttttatttcctaaaaatacccaagcttgttaaaaacttaaaaaaaaaacaaacctctcatccgttagtttacggcttgcatccctcaaccgctgaacttgcaaaggtttcacagaagcatcatctgtaccttggggcaatccctgagagcgggtaggctgctccaatctctgctgtggatctggttttcaagacgagggaaagaaggattaggaagaccacacaccagtgacttgatgcctgtccttcgccaggttttagaatggatcattatatatttggaggcagtgggaatgcttggtctggggacaaaagactcagaggggatgatgcttacagccttaaaatactcaaagagctctcacagaggagaggaaatagacttattcaaactctgyctgaagggtgaagtttccagaaggactattttggttcaacataagaatgactgtctaacaaccacccaacaatgggtggaaaacttccttagaggtgctgagaaagggcccgggcttaggaccgttcaagcagaggacagcagggatgttgtaataagaattccagcagtgggcttgaggttcagctgatgacctccaaggttccttccagctctaagattggatgattctatatctgtaattttccatttccctattaagaagaaattttccacagtgaaaattgttttagtatttgataaaagctgtgggatgatttttgcttttgttgactttaacagggggcttactactctgccccagtggcgtaacaagacacaaacacatcagtgatatttattgggcaggggagagaggcgtttattgttgggtgggaaagtcctgcttgcttacatggggactggcatggaggtgttgggaactccaaatctttcctcacattgtttctgaaattcctctgcccaaaggacctgggcattttaccccagtcctgcctagtgggtgcagcagaggtgtctggagcctgaccgacatttcaccaatcaccttggtagttctcatagcatcctcccaatcccctacaattctg

SEQ ID NO: 694173 - DNA, 662 bp, Homo sapiens
cagactaagcacattccttccccttcccagtttataaaatccctgaaccccagcctcctagtgggcaacccattcaggcttccctctctgctggaggagagttttcgtctttcgcttattaaactttcgctcccacctcayccttgtgtctgtgctccttaatcatcttggacatgagataaagaactccgagtgatacctcacaagagagatcactacactgtggtgcgttggtgagactacaacaacaccagctggtccatcagaatacggggtctgaaaaatgccatcaacaccaatctcagattttaacaatagtggtggtgtctacaggagcaaacggggaggttacaaatattgtgacctccagaacaatggctagttatagtttaactacacttatatcttagcaggtgtaggcccctcccataatactaatcttacggcctttcattcgcttttttttttttttttttttactttttttcaattattgttgttttgttttgcttttttgagacagggtctcgctctgttgctcaggtgaatgcagtggtgcaatctccgctcactgcaacctctgcctcctgggttcaaacaattctcctgcatcagcctcctgagtacctgggactataggcacccactgccacacctggcta

SEQ ID NO: 694174 - DNA, 662 bp, Homo sapiens
cagactaagcacattccttccccttcccagtttataaaatccctgaaccccagcctcctagtgggcaacccattcaggcttccctctctgctggaggagagttttcgtctttcgcttattaaactttcgctcccacctcacccttgtgtctgtgctccttaatcatcttggacatgagataaagaactccgagtgatacctcacaagagagatcactacactgtggtgcgttggtgagactacaacaacaccagctrgtccatcagaatacggggtctgaaaaatgccatcaacaccaatctcagattttaacaatagtggtggtgtctacaggagcaaacggggaggttacaaatattgtgacctccagaacaatggctagttatagtttaactacacttatatcttagcaggtgtaggcccctcccataatactaatcttacggcctttcattcgcttttttttttttttttttttactttttttcaattattgttgttttgttttgcttttttgagacagggtctcgctctgttgctcaggtgaatgcagtggtgcaatctccgctcactgcaacctctgcctcctgggttcaaacaattctcctgcatcagcctcctgagtacctgggactataggcacccactgccacacctggcta

SEQ ID NO: 694175 - DNA, 596 bp, Homo sapiens
ccagatttcccctagcgcttaagctaaaggtttcaagaaattcccctccctggaaaattatctgtgacagccctttgcccaagctcctagctgaggaagactcagctctgtcaaaatcttttttctttcttttttttctttttctttctttctttcttttttatttttaatagactgttgcctatgctggtcttgaacttctggcttcaagagatccttctgcctcctgagtagctgggatcacaggcacacaccaccatacccccagctaatttttttcttttcttttcttttcttttttttttaaagagactgttgcctatrctggtcttgaactcctggcttcaagagatcctcctgcctcctgagtagctgggattacaggcacacaccaccatacctggctaattattttttcttttctttttctcttttttttttttttggagagacgacagtgtctcactatgctgcccaggctggtctaccactcaagtgattctcctgcctcggcctttcgaagtgctgggattacaggcgtgagctacctcacctggccaaaatcctcttgacagattttttttttggttccctca

SEQ ID NO: 694176 - DNA, 650 bp, Homo sapiens
gttcttccagtgacaacagaatacaggagccaaatctcatcccctttgtatttattcaaccccactacaagctctttgaaattccccatcgtgtgtgcatagtgctgactgcacagtaggagtttgtattagtttcctattgcggtataagaaatagcacaagttatttgtcattaaaacaacacctatctattatctcagttctgtgggtgagaagttcagaggaatgcacctgggctttctgattaggatctcacaggccaaaatcaacagattgggcagggacaaagattctctacttgatcaaattttggtcaggctcctgaaccttctcctaggcctgtctatgcccttccttgtwaaatccagttttagtaagaaccctgctaagtcagtttggcaagaacccctcatcctccatatctgatcaccctcgatagcagatctatctgatcgtgttcctcatcctccctcatcttccaggtgatgtccaataacttagtctgtcttcagcaaaattcctgttaggtaggtttagccagaatcccccttaatcctgatatttcatcttagtaattttttatccactgtcccccaccctgctttttggttattgctatggtttgaatgtcccctccaaaattcatgtt

SEQ ID NO: 694177 - DNA, 631 bp, Homo sapiens
tcaccatgttggccaggctggtttcaaactcctgacctaaatgatctgcccgcctcggcctcctgaagtgctaagattacaggtgtgagcccccgtgcctggccttcaggatgattttattttaaacccctagaaagcagagagtaggatcaaaacctttaggtttggaaggctctttacagatttcattgtctaactagctgctttgcttggctttgatggtcttctgtgtctaacccagagccagtagctggcactgaggggtcactcctgatggtggttaaggtgtaggctttggtatcagacctggatgtgaacttgactctgctacttagatggccctgtgaacttgaccttattacttgcattgttggtgataatttatctggaatgggcactgcatcccaaacttctcaaatggattaaacctgacttgatggtacatttcttggatccaagtgaagtcttttttttttytttcttttcttgacagggtcttactctgttgcccaggctggagtgcagtggcacaatcttggctcactgcaacctctgcctcccgggttcaagcaattctcctgcctcagcctcccgagtagctgggattacaggtgtgtgccaccatacttgg

SEQ ID NO: 694178 - DNA, 602 bp, Homo sapiens
gtaacttctttagatatcctttctttatttaactgttgccttctttatttctttttcttttcttttctttcttttttttttttttttttttgagatagagtcttgctctcttgcccaggctggagtgcaatggggcaatctcagctcactgcaaccaacctctgtcttccgggttcaagctattctgtctcagtctcccaagcagctgggattacaggcacatgccaccatacccagctaatttttgcatttttagtagagatggggtttcactatgttgaccaggctggtctcgaactcctgacctcaggtgatccacctgcctcagcctcctaaaatgctgggataacaggtgtgagccactgtgccmggttgccttctttatttctttgtagtaatcagtgaaaaaatctttgatgttttatttcaggatgtgagagagattgtaccctagtaatgtagtaaattttgaagagataggagccctaagaaaaggtacagaatgaggtacgcctgcaaaggagatgaaaacaggtagcatccttgggtctataaaggaaatggaatgaaaagaagtattacaagatgccatcccgagatag

SEQ ID NO: 694179 - DNA, 1360 bp, Homo sapiens
tgagtttcactctgaggaaaagaaaacatatcaaaaaaatctcaacaactttaagaagttttcaaacttaaaacttcatttataaggtgatcataatgttactaaataggccatagaaaatacaatgtatttatttagattgtgtgggcaccaatcatcaaaccaccatctttgattatgaagatcagtgctataatctcatctaagtttacacagtgggcttctgaacaccacactggaggaagcagagagaagaggttgtgttatatattcaccctgagcacaacaaatactcttggccactttggtttyggtttttagttggagttaggaagttttgggggaacagtttttggctgttaagaatcgaactccatgtctagatgcatagcagtaaatattgtattcttagaagttttccagctgaaatttatgttcaatgaatatttactgagcatttattacatgcaaagctctgtcttatgggctggaaatatgactaggatacaaatttagtttttaaggagcttagaattttttggtatgtatttatgtgtgggtgtgtaaaatggcaaaaaaatctttttaaatagtttaagaagttagtaccacaattatttctaagaggctgatgacttcctttggagaggaattttctgatcttctttttgaggaatataagcctatattctcagagccgaatgagagaaaggggtggggttcttgtttattcagtatgtagacttttactttgttcctcggttttaattttacctcagtgctgccctcagctgtgcctggagcacagggcacctccagttcggcctctccagaagtaaacttgtcttctgcctatcttgtgtttgttgggaggaggtgacctgggactctactactattgatgaagaatccgaaaaagtcttctattagccctgtgccacaccctacctatgaggtagactttgtctcttattcccccaaattccttgcccatttatttaccatcttccaaaattaattaacatttaacatcatttcctttactgagcttcttatgattttgggtttattagtgttcattcctttacttttgtatttcaggcttttgggaagaagcagaggtaatttcttttgcacaaaaatgtgtgcaggccgggagcggtggctcacacctgtaatcccagcactttgggaggccgaggagggcagattacctgaggtcgggagttcaagaccagcctgaccaacatggagaagccccatctgtactaaaaatacaaaattagctgagcatggtggtgcatgcctgtaaccccagctacttgggagactgaggcaggagaattgcttgaacctggga

SEQ ID NO: 694180 - DNA, 1360 bp, Homo sapiens
tgagtttcactctgaggaaaagaaaacatatcaaaaaaatctcaacaactttaagaagttttcaaacttaaaacttcatttataaggtgatcataatgttactaaataggccatagaaaatacaatgtatttatttagattgtgtgggcaccaatcatcaaaccaccatctttgattatgaagatcagtgctataatctcatctaagtttacacagtgggcttctgaacaccacactggaggaagcagagagaagaggttgtgttatatattcaccctgagcacaacaaatactcttggccactttggtttcggtttttagttggagttaggaagttttgggggaacagtttttggctgttaagaatcgaactccatgtctagatgcatagcagtaaatattgtattcttagaagttttccagctgaaatttatgttcaatgaatatttactgagcatttattacatgcaaagctctgtcttatgggctggaaatatgactaggatacaaatttagtttttaaggagcttagaattttttggtatgtatttatgtgtgggtgtgtaaaatggcaaaaaaatctttttaaatagtttaagaagttagtaccacaattatttctaagaggctgatgacttcctttggagaggaattttctgatcttctttttgaggaatataagcctatattctcagagccgaatgagagaaaggggtggggttcttgtttattcagtatgtagacttttactttgttcctcggttttaattttacctcagtgctgccctcagctgtgcctggagcacagggcacctccagttcggcctctccagaagtaaacttgtcttctgcctatcttgtgtttgttgggaggaggtgacctgggactctactactattgatgaagaatccgaaaaagtcttctattagccctgtgccacaccctacctatgaggtagactttgtctcttaytcccccaaattccttgcccatttatttaccatcttccaaaattaattaacatttaacatcatttcctttactgagcttcttatgattttgggtttattagtgttcattcctttacttttgtatttcaggcttttgggaagaagcagaggtaatttcttttgcacaaaaatgtgtgcaggccgggagcggtggctcacacctgtaatcccagcactttgggaggccgaggagggcagattacctgaggtcgggagttcaagaccagcctgaccaacatggagaagccccatctgtactaaaaatacaaaattagctgagcatggtggtgcatgcctgtaaccccagctacttgggagactgaggcaggagaattgcttgaacctggga

SEQ ID NO: 694181 - DNA, 1360 bp, Homo sapiens
tgagtttcactctgaggaaaagaaaacatatcaaaaaaatctcaacaactttaagaagttttcaaacttaaaacttcatttataaggtgatcataatgttactaaataggccatagaaaatacaatgtatttatttagattgtgtgggcaccaatcatcaaaccaccatctttgattatgaagatcagtgctataatctcatctaagtttacacagtgggcttctgaacaccacactggaggaagcagagagaagaggttgtgttatatattcaccctgagcacaacaaatactcttggccactttggtttcggtttttagttggagttaggaagttttgggggaacagtttttggctgttaagaatcgaactccatgtctagatgcatagcagtaaatattgtattcttagaagttttccagctgaaatttatgttcaatgaatatttactgagcatttattacatgcaaagctctgtcttatgggctggaaatatgactaggatacaaatttagtttttaaggagcttagaattttttggtatgtatttatgtgtgggtgtgtaaaatggcaaaaaaatctttttaaatagtttaagaagttagtaccacaattatttctaagaggctgatgacttcctttggagaggaattttctgatcttctttttgaggaatataagcctatattctcagagccgaatgagagaaaggggtggggttcttgtttattcagtatgtagacttttactttgttcctcggttttaattttacctcagtgctgccctcagctgtgcctggagcacagggcacctccagttcggcctctccagaagtaaacttgtcttctgcctatcttgtgtttgttgggaggaggtgacctgggactctactactattgatgaagaatccgaaaaagtcttctattagccctgtgccacaccctacctatgaggtagactttgtctcttattcccccaaattccttgcccatttayttaccatcttccaaaattaattaacatttaacatcatttcctttactgagcttcttatgattttgggtttattagtgttcattcctttacttttgtatttcaggcttttgggaagaagcagaggtaatttcttttgcacaaaaatgtgtgcaggccgggagcggtggctcacacctgtaatcccagcactttgggaggccgaggagggcagattacctgaggtcgggagttcaagaccagcctgaccaacatggagaagccccatctgtactaaaaatacaaaattagctgagcatggtggtgcatgcctgtaaccccagctacttgggagactgaggcaggagaattgcttgaacctggga

SEQ ID NO: 694182 - DNA, 616 bp, Homo sapiens
tgcattatcttttccccatcctcattttatgattttatcataaattctttgatacttttattagagttttccagagaactctaatagatgtttgtatctatctatctrtctatctatctatctatctatctatctatctatatctgtcatctatttattttaaagaattggctcatacaattgtggagccttacaagtccaaaatctgcagggtaggccagcaggctggagagccaggaaagtgttggtgttgcagtttgagtgagaagacactctgctggcagaattccctcctttttggggaagtcagtcttttctattaaaaattctaactggatgaggcccctcgataatatggagaataatctgctttactcaaagtctcctgattaaaatattaatctcacatgaaaaacaccttcacagaaacatttaaaataagtttgatcaaataactggatactgtggtccagtccagttgatacgtaaaattaatcatcatagtatgttatgcattttttttgaaacatggtctcactctgtcacccagtgcagtggcatgatctcagctaactgcagcctccgcctcctgggttcaagcaattctcctgtctca

SEQ ID NO: 694183 - DNA, 616 bp, Homo sapiens
tgcattatcttttccccatcctcattttatgattttatcataaattctttgatacttttattagagttttccagagaactctaatagatgtttgtatctatctatctgtctatctatctatctatctatctatctatctatatctgtcatctatttattttaaagaattggctcatacaattgtggagccttacaagtccaaaatctgcagggtaggccagcaggctggagagccaggaaagtgttggtgttgcagtttgagtgagaagacactctgctggcagaattccctcctttttggggaagtcagtcttttctattaaaaattctaactggatgaggccccycgataatatggagaataatctgctttactcaaagtctcctgattaaaatattaatctcacatgaaaaacaccttcacagaaacatttaaaataagtttgatcaaataactggatactgtggtccagtccagttgatacgtaaaattaatcatcatagtatgttatgcattttttttgaaacatggtctcactctgtcacccagtgcagtggcatgatctcagctaactgcagcctccgcctcctgggttcaagcaattctcctgtctca

SEQ ID NO: 694184 - DNA, 645 bp, Homo sapiens
gccataccaagaagcttgtatccactcagcggtgtctgctgagtgcatgccatgccctgaggtgtgtgtttggggtgaggcagaaggacttcaaggattaggctaaggatggagagagcaggaccctttccccacaggacagcacctgcagcagttctgggctgccctttcctctgtccctaagtccacccctcctggctaaaaygacagcatcggtgctccagtgcttggagttgatataagggccctgattttatggccgtgagggatcgtatgactgtgacttcatggtggtagagtactttttttttttaagcttcttggcaaagtcagtatttttgctgatggatggaaaagtcagtagttctgctgatggataagcaagaaaggggcagagaaagtgtggccagaggaaactacggtatgcatgcagggtgggctgggacaggcatgacccccccagccagaatgagtgtagtggtcccatgggaggagccatgtgctgtccaggcccagccaacctcacccgccggtggcaggagtacagaggccggcggtggcaggagtacagcacagaccaagaccacagtcttggtcccgaggagcctgtggagtcacagactgggaccaagactgcctcccaca

SEQ ID NO: 694185 - DNA, 1017 bp, Homo sapiens
cccgcccccaccactttgccggaggcgagctaaattccagccggggttcctagcagcagcttagtggcaggcgacaggaaaaagggcaaaggccccaactggctggaaggcaagcccgggggcaggacctccttgcgggacggcacgaggcaggagccggctccaggctggtctcggcctggtaataatttcacaccaccagccggtcattgttcaaagcactgtagaccattttactaatttaaccctaacgatcgccgcatttcgcagctgggccaactggtacagggttgacccgaagggccctgcgtggcgcttggcaagtatacagcaggcactaaatggctgccgacaggctcggtggtaattttgaaagttggctctgtgcagygttggggctgcggcatctgctggtggcgagtggtattacagcccagcgctggcggaccccgttgggctggggagggttgtgagattatggcctgagagccaagggggtcggttaggggtccctagagactgtggaaggcggggtagcataaaacacaatgggggactgcggaggaactaaaatttcgagactacatggttttgttgtgcaccagaagttcattagagaagttccttaattgcttctccgcccgccgcgatggcactcgaccccgcggattaatttaacaactctgatggttgctctgtgaaatttaaagaacagtggtttaagcaaagaccacaagaaagaagaattgagatcaaagaggagtgtgtgccatcgctgtggaggagtttcagttgtgaatcatgaaatgtcctgtaaaccatttcaaggagtttgatttttataccaaaaacaatgggaagacactacaggtttttggagcagcagctcagacgtgtcgaaaaagatgttttgatccctaaaataatgagagaaaaggccagagagaggtcttctgacaagttcaagattttaccaaatgttgcaagaactctggaatccttatggtagtaaaatgc

SEQ ID NO: 694186 - DNA, 1964 bp, Homo sapiens
atattgtatgacttcccatacccctctcctcttatcaaccagttctagtttatacctgcaagtactacctgaagacaaactctggcccaaaatatttgagaaaaagcagttttctctgcaactgtctctcatacggagctttcatttcttctattacacttaacaattgctttacccattccaaatagtggttagatggctaagagtgctcttaacatttccaaatttagtttgcttttacatcaaagttcatttgttttatgaatgctgtccagtattaatgatttaatgaccattcactactgtgtgctcagaacagtaccaagtaataccgaacacagtaaattaaccaagttmtgataactcaatttgtatatgtcttatgcacatgaacagctttccacttcacaccaaccctcccaactatgtctaggacaggtgacctaattaatccaaaatctctttcttatcctttgagtgcttaaggtaactaaacattcaccatattattttttcccacctgtattccccacaaaccccatttctttgggctttttttctttacaaaaactggttttggcttaggacgctcagataagcattctcacattttggagaaaatactgttttaatcttcttcctctttatccaacttttgccagattaatcaaaacacattttccagtgccccttcaattctctttacgctcaattttcaggattttattttggttattaagagctgtgctagtgatacattcataacaagaaaaagcagcaggtggccaggtgcggtggctcacacctataacccagcactttgggaagctgaggtgggaggatcgcctgaggccaggagtttgagaacaatttggccaataaagcaggaccttgcctctgcaaacataaaataacaataaaataaaataaaaataagaaaaagtaggctgggcgtggtggctcacgcctgtaatcccagcattttggaaggctgaggtgggcagatcgcttgaggtcaggagtttgagaccagcctggccaacatggttaaaccccatctgtactaaaaatacaaaaattagccgggcatggttgctgtgagctgagattgcatcactgcaatccagcctggtcaacagagactctgcctcaaaaaaaaaaaagaaaaagaaagaaaaaataaattagctggatgaggtagggcatgcctataattctagctactcaagagacaggcaggaggatctcctgagcccagaatctcaagactacagtgagccatgattgcgccactacactctagactgggttctagactgggtgataagagatcctgtctcaaaaaacaaaggcaaggtgcagtggctcatgcctgtaatcccagcactttgggaggtcgagatgggaggattgcttgaggctagcctggtctcatatataggatggtgagaccccatactatatatttttaatataaaatttaaaaaaggtataaaaatctccaactatctttgtagtctttcattattttaattactagaataaaaattgcattctattattctccacggaaatcataaagtatataaagtacattatggatcaatattacttttttttttttttttgagacggagtttcactcttgttgcccaggctggaatgtaatggtgcaatcccggctcaccacaacctctgcctcctgggttcaagtgattgtcctgcctcagcctcctgagtagctgggcatgtgccaccatgcctggctaattttgtatttttagtagagacagggtttctccatgttggtcaggctggtcttgaattcccaacctcagataatctgcccgcctcggcaggcaggtgggtcacttgaggtcagcagttcgagaccagcctggccaacatggtgaaaccccgtctctactaaagacacacaaaaacctactttgaaatacaactca

SEQ ID NO: 694187 - DNA, 1516 bp, Homo sapiens
ttatcctatgatggagaatggagcaagcacacaataatggctgaccccaactggcagtcaacacaaaaacatccatgtaaagcttgtagataaactataattgaaattttttttttttttgagacggagtctcgctttgtcacccagactggagtgcagtggtgctgatcttggctcactgcaagctccgcctcctgtgttcacaccattctcctgcctcagcctcctgagcagctgggactacaggcgcccgccaccacacctggctacatttttgtatgtttttagtagagacagggtttcaccatattagccaggatggtctcgatctcctgaccttgtgatctgcccgccttggcctccctaagtgatgggattacaggcatgagccattgtgcccggccgaaaatatctttaggctaaaagtaattttcattttctttgaaataaaccttcaggctaataaagcagcaaatgcaagtagacagtaacatgggagtttaatatggttaatagcactaaatcagacactgttgtaagaattacgtaagtcaatataagtaaaytgctaaaagagtttggcacatagtaggtagtcagtaaattttgacttattatccctatttagatgtgacaagaaatgttaatcatcgactaaagattactgacagtatttcacaagtatcctggaattttttctaagtccatggtgtgtgtgtatgtgtgtttgtgtgtgacagggtctccctctgtcacccagtgcagtggcatgatcacagctcactgcagcctccacctcctaggctcaagtgaccctcccacctcagcctccagagcagataggactacaggcccgtgccaccgcaccagctaatgtttgtatgttttgtagagatggggtttcgccatgttgcccaggctggtcttgaactcccgagcccacacaatccgtcggcctgggcatcccaaaatgctgggattataggcgtgagccaccgcacccagcctaagtccattctttgcattcagttttccttacagcctaaatttacaagggcacatcagtaatttagttaagctctccctgctagataaaaattaaagtcattttgttttagtcatttaacctccaacctgcaaaatggaggaagagagatttgtggctatttccaaaatggtaaaaatataaatggaggttcggcgcagtggctcacgcctgtaatcctagcactttgggaggccgaggcgggtggatcacctgaggtacagagttcgagaccagactggccaaaatgttgaaaccccgtctctactaaaaatacaaaaaaattagccaggcatagtggcacatgcccatagtcccagctactaaggaggctgaggtaggagaattgcttgaactcaggagatggaggttgcagtgagccacgatggtgccattgcactccagcctgggagacaagagcaaaacccaatctcaaaaaaaaaatctatacatattatatatactatatag

SEQ ID NO: 694188 - DNA, 650 bp, Homo sapiens
ctaggaataggcaagtttatactaatccaaactcatttgctaaggaaaaaaactaaaatagaccatttcatagtgcaaattatctgtccttttcatgtgaattttaaggcaatattttataaaatatgttaataactatagaagctattatgtctgaatacttcctaatcttccctaaggcaacattagaaagcctgttttttatagatatgagtkaagtctttatatagggcttatggaaaaagagaaagtagtcataaaaacttatttaaaaagggaaagaaaatttagttaagaagaacatgtatttcagcaaggggaaaaaaagaggattttataaatggagaaaatttaaactttttaatggcaacaataagccccgaaatattctccatggtataggttcactgaagtcctaaacatgtgtaaagtttaagaacccaaaactaagtaaaaataggtaataattaatatgacactaaaaaaattctctatggctattaaaattttggaaaggatattcacacttttttgacttgtacaaaagaaatggtaaatgttcctgagtttacaaattaaaattgtgaaaattggctctctcttcacgtgttttgccacaagattatataatcctataatataaataccat

SEQ ID NO: 694189 - DNA, 601 bp, Homo sapiens
aaggggagacttacaatgatgattcaaatgaaggaaactaaaaagtaatgaagcaaggcagaggaaaaagcagtattcacttgagtacatcccaaaagaataacatttcaaatgtaactagaaaaaagtatgctgaagttcgcaatacagaaataattattaataagatagctttaaagccctgctcagcttttgaatgttgggaattgacccagaggtggctgtaacctaagatggttccttcagtaatgaccattttttctttttcaagatgatgattattccccaccttctaagagacaaagaccaacgatccaccacagccaccagtcccagaacccgccaatgctggggaatggaaaatgagggagttcaactctggtaaggtctcagcgaaatccatgaccttttcctttatcttctggactctcagtgtgactgatgaaagttatcacakgctctgcagggggaaatggtttagcatgtgttactacatcttaatcacatctttgtaaagccgggagcattttacaagtcacgttacagacattgtttaaacatagtctgtatttaccaaagtataggacattgtatcatctca

SEQ ID NO: 694190 - DNA, 592 bp, Homo sapiens
attacattcccctctttcagagacttgtacagcatacatcagcaaagtaaaggctgtgagaagttgaaacagttaagaaatgtgtgtgaaatattttatcctgctgttttcagtacttcaccatgaatttttttttaaagcaaattttacataacctgtaacatccctttggggaattctattgtaaactaatagcttactttaggctagcagggtgtatttgaacttactatctattaacttagaatgaatgatttgtttatcaaggggaaaatgtttagttgtacaaactgacatactcattagcattttatggaaatgcattgaagaaagtattttaacctttgattaatttggggaagtcagctttctcttctgttaaaagatggggttgaactagaagagttctgtaatgcttcttccagttccattatggaaaaactctaacttgattgaagataaatgttaytttctttcttttattttaaattattattatacttcaagttctagagtacatgtgcacaacgtgcaggtttgttacatatgtatacatgtgccatgttggtgtgctgcacccaataactcatca

SEQ ID NO: 694191 - DNA, 657 bp, Homo sapiens
gacctcagcagtggggtgagaggccagcagagcagcacagacagcttctgccttgctcatattcctgcacgccaaacacagatgaagctcatcatcttccgccagcagccgcttgcagagggccaggccaatgccactgggaggacaattcagacacaagatgtgggttatctgggatggcatcaggtagaggcatttctctctsgttcagaaaactgtgtcaacttgacctccaatgagaagcccagatagaaagaaaagactcaacaattatttaagaagggaggaatcctacactccaatagtcacttgcttgagacacagcctagtttgtgtttttctcgttttgaaaaacttcagtgacaaaataactggactgaaaacaagaattgttctttagtttttctactactgggctttatcctgccagtggttttcattttgtacttattatgccactcatgaaaatgatttaatatatcaccagtaagggctcaaaagagcatcttattagctgtttcctatgtgcattttgactttgctctctaggctcctcaggggcaagggctctaccacctattggtatcataaacaccataaggagcaccagaaatctctgataaaggaagagatgaatctttcaggatgaggcatcag

SEQ ID NO: 694192 - DNA, 657 bp, Homo sapiens
gacctcagcagtggggtgagaggccagcagagcagcacagacagcttctgccttgctcatattcctgcacgccaaacacagatgaagctcatcatcttccgccagcagccgcttgcagagggccaggccaatgccactgggaggacaattcagacacaagatgtgggttatctgggatggcatcaggtagaggcatttctctctggttcagaaaactgtgtcaacttgacctccaatgagaagcccagatagaaagaaaagactcaacaattatttaagaagggaggaatcctacactccaatagtcacttgcttgagacacagcctagtttgtgtttttctcgttttgaaaaacttcagtgacaaaataactggactgaaaacaagaattgttctttagtttttctactactgggctttatcctgccagtggttttcattttgtacttattatgccactcatgaaaatgatttaatatatcaccagtaagggctcaaaagagcatcttattagctgtttcctatgtgcattttgactttgctctctaggctcctcaggggcaagggctctrccacctattggtatcataaacaccataaggagcaccagaaatctctgataaaggaagagatgaatctttcaggatgaggcatcag

SEQ ID NO: 694193 - DNA, 911 bp, Homo sapiens
cagctcactgcagcctccgcctcccaggttccagcaattcttctgttttagcctcctgggtagctgggattacaggcatgcgccaccacgcccagctaatttttgtatttttagtacagatggggtttcaccacgtttgccaggctggtttcaaactcctgatctcaggtgatctgcccacctcggcctcccaaagtgctggtattacaggccaccacgcccagctctctaaaattaatctttaagtgcccaagaaatgcggtcttcagataagttccccaggaccttttaatgctaacctgttgtgcatacctctgtaggggttgagagaggggaatcggggcaaggtgagagggagccactcaggcaacaaaacaccctaaattctgcatgcttgctctttaagaccatggtccatgcctggcttttggccagtggagaccaaaggcttgggattctgcagaaacagtcacttggccaccaacaaactagaagaagaggagaaattccactaccttgttgaartgagaaccctctgaacatcattgcttccccacaggacatggccagggacagacaggtatggggagaactgcaagatcagcctcacagcacctttaatccatttaattcccaaagcagataaagcccctctatccttcatgtttgcaaaggcagatctcccccttgtaaagaggcaaagcaaaattaggctcaaaactacagaaaaccaactggttttacattgtacagaagtctgttgctattagggagatgagaggcagctaagaggtgtctctttggaaggagcagtatgactctaccagaatacattattctaaactaggtctcttcctaaaagcttgcctgtgagttcaacgatagttaggtcataggcagtaagttgaaaa

SEQ ID NO: 694194 - DNA, 908 bp, Homo sapiens
cgaggagaggccattggtcccacacatccctgcaccttggggtccagcagagattcagcatcatccatgttccttgtttcctcttctagactattaacactcctaccttttattaaaattcctgttactctaagtctttttgttgttgttgtttactataacatgctatagccctccttattgctgtcttctactcatgccctgggcttttcccctcatttaccgaaaagtttccagttaggttctctccagctatcctccttccatgccaattctgatattatcctcagagactttaaggcacaacaccatgactgcttggtttcttgacaggcacaatgagaggtgttgtacctctcattcccataagtctaccatgaatctggctatcatctgcaaaattatggattcaagaatttctctgaagttttctatatttctctctttccttagctacctttccccttgaatcacatttgcactttctctttcttcctgtcattctgcctactcctattttttattcctttccttatcctgtttgtatttcatcattttcaataccctcaactctctygaccttttattcttttcccaaacatatctagtaaaaatccaaaaccatatgaattcagactggcatctcatgcttgcctgccctcaatactgctggaggaaaccacgaaacagattgtggagtaaaatgaagtcactattaatttgtggtcaccaactcacctgagcactcaacactgtctttaaatctgactacatacatctctttaggtatcatttttcccatcatcctcagtgccatcaaatctcaagttttcctacctctcactttaatctcagcagcaaatgatctctttagtctcagcaaatgatctctcacgcttcctcacaga

SEQ ID NO: 694195 - DNA, 1203 bp, Homo sapiens
ctttagtacattttctattcattaatatgcagacataataaccgaaatatatgaaatagattactttatgattggtcaggacatgggttgctctgattcacagcatatggatataatattgaagtcatgaattttacatagacataaatgtcagaagattcaaataattaaaatttacaataaaattatatatcatttcttcaagagtctttcataagccttcaagtcaataagacttctgtaagcctttgaggtcatgatcrtgaatataaattactgatcttcagttttgtgaaaataccaaacaagaattacagaatttcaaaatgacaaaacatcagacgtatgtgttcaattcagcccttattgaaaacacacttactctgcggactgctacttgattgttgcaaacaagtacacctcctacaaattcagcttgaatcccctcccgtaagagaacttgcttgaagtctgacagccttggttcattcataaaaactgactgatgtccaggaaccttagataaggtcaaaggggaaagaataacttcaagtaaaacaccagacatacaactgtactgaataaagtaaaatactacattatctctaagagattttctattattccctgaagtcctttgacagatcatttcaagactgtaaatcacattccaagttgttattctaaattttaccccattatttaacattatttaacaaagcccttcacattttctgtttcacaatcagttttgttagtcatgcctcatcataacagagacgtttggtaatgttaggctcttcactcacccacttgcataatggggtcaactagcgtgccatgggcaggactgaaccaaaaattcattttctagatcccagtcatttgcttacttcaaaagacgtttcctccccaatcccattttccctgtccctccttcctcagagcaaatgtaatggatgccataggttctacaatcagtaacgaaagtggttcttgcctaatgctgctgctttctgctttgacattactttgaagagcattagctttagcacagaagaaaaaaatattcttattcctcctcccaattttgagggttgtactagaagggaatccaacaacagaggctgtctctctattcttaatttcatagtagggctgaagacatcacttgacatgcatgtaggattcatagttttaata

SEQ ID NO: 694196 - DNA, 1203 bp, Homo sapiens
ctttagtacattttctattcattaatatgcagacataataaccgaaatatatgaaatagattactttatgattggtcaggacatgggttgctctgattcacagcatatggatataatattgaagtcatgaattttacatagacataaatgtcagaagattcaaataattaaaatttacaataaaattatatatcatttcttcaagagtctttcataagccttcaagtcaataagacttctgtaagcctttgaggtcatgatcatgaatataaattactgatcttcagttttgtgaaaataccaawcaagaattacagaatttcaaaatgacaaaacatcagacgtatgtgttcaattcagcccttattgaaaacacacttactctgcggactgctacttgattgttgcaaacaagtacacctcctacaaattcagcttgaatcccctcccgtaagagaacttgcttgaagtctgacagccttggttcattcataaaaactgactgatgtccaggaaccttagataaggtcaaaggggaaagaataacttcaagtaaaacaccagacatacaactgtactgaataaagtaaaatactacattatctctaagagattttctattattccctgaagtcctttgacagatcatttcaagactgtaaatcacattccaagttgttattctaaattttaccccattatttaacattatttaacaaagcccttcacattttctgtttcacaatcagttttgttagtcatgcctcatcataacagagacgtttggtaatgttaggctcttcactcacccacttgcataatggggtcaactagcgtgccatgggcaggactgaaccaaaaattcattttctagatcccagtcatttgcttacttcaaaagacgtttcctccccaatcccattttccctgtccctccttcctcagagcaaatgtaatggatgccataggttctacaatcagtaacgaaagtggttcttgcctaatgctgctgctttctgctttgacattactttgaagagcattagctttagcacagaagaaaaaaatattcttattcctcctcccaattttgagggttgtactagaagggaatccaacaacagaggctgtctctctattcttaatttcatagtagggctgaagacatcacttgacatgcatgtaggattcatagttttaata

SEQ ID NO: 694197 - DNA, 1203 bp, Homo sapiens
ctttagtacattttctattcattaatatgcagacataataaccgaaatatatgaaatagattactttatgattggtcaggacatgggttgctctgattcacagcatatggatataatattgaagtcatgaattttacatagacataaatgtcagaagattcaaataattaaaatttacaataaaattatatatcatttcttcaagagtctttcataagccttcaagtcaataagacttctgtaagcctttgaggtcatgatcatgaatataaattactgatcttcagttttgtgaaaataccaaacaagaattacagaatttcaaaatgacaaaacatcagacgtatgtgttcaattcagcccttattgaaaacacacttactctgcggactgctacttgattgttgcaaacaagtacacctcctacaaattcagcttgaatcccctcccgtaagagaacttgcttgaagtctgacagccttggttcattcataaaaactgactgatgtccaggaaccttagataaggtcaaaggggaaagaataacttcaagtaaaacaccagacatacaactgtactgaataaagtaaaatactacattatctctaagagattttctattattccctgaagtcctttgacagatcatttcaagactgtaaatcacattccaagttgttattctaaattttaccccattatttaacattatttaacaaagcccttcacattttctgtttcacaatcagttttgttagtcatgcctcatcataacagagacgtttggtaatgttaggctcttcactcacccacttgcataatggggtcaactagmgtgccatgggcaggactgaaccaaaaattcattttctagatcccagtcatttgcttacttcaaaagacgtttcctccccaatcccattttccctgtccctccttcctcagagcaaatgtaatggatgccataggttctacaatcagtaacgaaagtggttcttgcctaatgctgctgctttctgctttgacattactttgaagagcattagctttagcacagaagaaaaaaatattcttattcctcctcccaattttgagggttgtactagaagggaatccaacaacagaggctgtctctctattcttaatttcatagtagggctgaagacatcacttgacatgcatgtaggattcatagttttaata

SEQ ID NO: 694198 - DNA, 1203 bp, Homo sapiens
ctttagtacattttctattcattaatatgcagacataataaccgaaatatatgaaatagattactttatgattggtcaggacatgggttgctctgattcacagcatatggatataatattgaagtcatgaattttacatagacataaatgtcagaagattcaaataattaaaatttacaataaaattatatatcatttcttcaagagtctttcataagccttcaagtcaataagacttctgtaagcctttgaggtcatgatcatgaatataaattactgatcttcagttttgtgaaaataccaaacaagaattacagaatttcaaaatgacaaaacatcagacgtatgtgttcaattcagcccttattgaaaacacacttactctgcggactgctacttgattgttgcaaacaagtacacctcctacaaattcagcttgaatcccctcccgtaagagaacttgcttgaagtctgacagccttggttcattcataaaaactgactgatgtccaggaaccttagataaggtcaaaggggaaagaataacttcaagtaaaacaccagacatacaactgtactgaataaagtaaaatactacattatctctaagagattttctattattccctgaagtcctttgacagatcatttcaagactgtaaatcacattccaagttgttattctaaattttaccccattatttaacattatttaacaaagcccttcacattttctgtttcacaatcagttttgttagtcatgcctcatcataacagagacgtttggtaatgttaggctcttcactcacccacttgcataatggggtcaactagcgtgccatgggcaggactgaaccaaaaattcattttctagatcccagtcatttgcttacttcaaaagacrtttcctccccaatcccattttccctgtccctccttcctcagagcaaatgtaatggatgccataggttctacaatcagtaacgaaagtggttcttgcctaatgctgctgctttctgctttgacattactttgaagagcattagctttagcacagaagaaaaaaatattcttattcctcctcccaattttgagggttgtactagaagggaatccaacaacagaggctgtctctctattcttaatttcatagtagggctgaagacatcacttgacatgcatgtaggattcatagttttaata

SEQ ID NO: 694199 - DNA, 1460 bp, Homo sapiens
catggcgaaaccccatctccactaaaaatacaaaaattagctgggcatggtggcgcatgmctgtaatcccagctacttgggaggctgaggcaggagaatcacttcaacccgggaagtgaaggttgcagtgagccgagactgtgccactgcactccagcctgggcaacagagcaagacaccatctcaaaaaaaaaaaaaaaaagaatgtaagatgaagcaagcagcaatggcctactatattaaagtgtaaaacacccaaaattagtggaatatttacagcctcatttatccacttagctctttgttcatttttctttttttttttgagacggagtctcactctgtagcccaggctggagtgcagtggccagatctcagctcactgcaagctccgccttccgggtttacgccattctcctgcctcagcctcctgagtagctgggattacatgcacccgccaccacgcccggctaattttttgtatatttagtagagacggggtttcaccgtgttagccaggatggtctcaatctcctgacctcatgatccgcctgcctcagcctcccaaagtggtgggattacaggcgtgagccactgcacctggcctcatttttcttttagagtatatttttctaatagatttgtacgaggtctttacatacagacatatgccagtgagtgccagggatagctagctatgtactgactggcaaaaagaagccaatctttacacactgttccacaaaagttaaattcaaaccagctaagtttcttcttatacaaaaactgatggtcacataatatttttttcaaaaatactaaagttaaccaatctcttatgaccaagaaaagtgctaaacagaatacagtcattcccactaccatgcatttccacagctccttgaaaaggacattatacattgggtacaacattcacgattctggagacggatacagtaaaaggccaaacttcaccactgtgcaacgtatgcattaagaaacctatacttgtggccgggcgtggtggctcatgcctgtaatcccagcactttgggaggccaaggcaggtggatcacctgaggtcagaaattcaagaccagcctggccaacatggagaaaccctgtctccactaaaaatacaaaaattagctgggcgtggtggtgcacacctgtaatcccagctactcgggaggctgaggcacaagaatcacttgaacccaggaggcggaagttacagtgagccgagatcgcgccacttcactccagcctgggtgaaagagcgaaagtccgtctcaaaaaaaaaaagaaacctgtacttttatgtacttatattccctaaatatacaaaaagttacaaaataataataataataaggacgtgaaagaatacgtactcagaagctgctcatctctctgttttcttctaggctgtacatatgtagcattgaatgaatctgtga

SEQ ID NO: 694200 - DNA, 631 bp, Homo sapiens
catggcactgcagcctgtgtgacagagcaagaccctgtctcaaaaactaaaataaaataaaataaaatgaaaaacaaaaaacagagagaagattaggacagagacaggcacagaaggaagaccacacaaagacagagggagaagacagccatctccaagccaaagagaaaggcctcaaaagaaactaaccctgccaacaccttgatctcagcctttcagcctccagactgagaaaatacatttctgttgtttaagcccccagcctgtggcattttgttatggccaccccagcaaactaatacagatgggattttgaagatggtctagactgactgtctgcccctcyataaattgccttaggattaccagaagccaatctcgcagcctcctgtctccttctccgcataccactgagctgaaaatacagacacagcatttcactctgtaagcccgatgaagtaattctcaccccaccaggtaaactcaaaaagagtctcccacaagcaaagtcaatagggaaacatgtaataacctctaatgatatctcaaatgttagccagacctgtatggtccagatgagaccagatcaggccaattaattacgcaaattatgttaattacccacatctct

SEQ ID NO: 694201 - DNA, 2240 bp, Homo sapiens
ttggtacacttttatccaatggacatcatctttaatttgacttgctggctttattagaatattgctattgttaacattcaggcaaaacttaggtttccacttctattcttcctgcttttagatgaagattgcccatctttaaaaggtgacaacttcaggcagttaattttgtccactttagtttagtttgctagcttaagctctcagaaattattcaatattcaatttaacggaaggaggttttactgaggtggaaagcctaactctgcctcagtgtgtgagaaaagaaggattaaaagataatctatctccatttatctatattgtattacctccaaaaacgaaaaaaaaattctatttgtaaaactctgtgaagagcatgggtatactaggcattctttcctgttttttgatttgggtcaaaatgtatgaatgcatgtgagctatatggacataacaactttgagaaaattccgaataagttttattctcccagatcagagtttgtcagtgtgtagtccccagaccagcagtgtcaacatcacctgggcacttattggaaagggacattactgggatacatctcagacttttgggatcataaactgtaagaggagagtatggcctagtgatctgtgttctaacaaaccttttagatcattctgacacacgttgaagttttaaagccgcaaccctagttaactacatatagactttaaaaacaaaytccctactaattccaattaattagggataaagatccaaatcaatcatgtagtatagtggcttaaaactcacaataacagaggattcttttcatgataaatttgtgatcatgcacaagaagattcttttcatgggcaatggaaatctgaagaatggagatggaggaaaagaaatcaaagagagaaactatttgcctggaagagagcaaaagtgtgtggaggtcaagagcccaacatgtgcacactgaaactcatgaaattttccccataatcagctatttctctggacctgcagggttctgtttttttatctgtatgcacagtctctaaactttggagtcctcatttcttgtattcaccttttcctttttcttctcatttaaacttcagttattttttaaattagaactcctgttctaatttaaactcctgttatttcatatatggatgtctgtatgtgacagattgtatttttcaaaagtggctgcagcaagatttcccatctcatgtgttcttcttatactgtgatcttgactcttcttctcttgagaggtgaggtctacttttcctcccgttaaacacaaacagacttgtataacagcttcaacaaagaacatacagtgaaaatgacttccaaggttagatcataaaaataccagacatatccaggttgctggtttgggatacctgcttttgaaactatgctgtgaaaaaattaaagcagcctggaggcaggcccataatgaaagagaccaagaccttgacctgcaaacccagccaagcttccagccaacagccagcaccaactttccagcaatgtgaatgagtcatcttgataatggatcctctagtccccagtagagccaccacatgtgacaactgtggagcagaggcaggccatacctgctgaactctaaccaaattacaaatttctgggcaaaataaatgattacagttgttttaggccactaaactttggaatcttttattatgcagctacagataatacattatattagcatttttgtaatctcctcacttctaatgtatcttgcaatcttgcacactaagttcataatactacattacccaatgaataatggtaacttatttagtgtacagttgtttcagccaaattcaacatgacgctaggcaattttataattgttatacttcttcagtttcatcattgatttatttacacatttattcctttagtaaaatatatttaataaatgttgattattataataaaatgtttgagttactggagagaaattcataaaaaagaacaaggaagaagaggaggagagaggggagaagaaggaagaggatgagaaagaggaggaggagagaaaaaagcagattctcaactaaggttgtcacacaacttgacaattttgcaaatgtgaatgggcattttttaaattagaatgcccaaaagatacacggttgtgagccatggattttgagcaatacttaatttcactgagcaggcctaaacaaactgtgcat

SEQ ID NO: 694202 - DNA, 1492 bp, Homo sapiens
attaatcctgtcttcatatttgtgctttgttactgatccttttgaattttgtttattgtaatattttaaaatattccattaaaatattattttgtctgattactgagttttttgtctctcccttacattttacaccagaggtaagtgtcttgctcctttcatactaatccttgccctatttcctatattattacaattactggctttcttgatgttcctggtcaaatttgaaaacaaaaaagtgttttttttttgttctgatcatttcaactgtaaaatagatagggcatgtagaaaatagattttaataaaggtatacatcttgaagttttaatacaaagcaagtaaatgcacgtgtaaccaccacctagatcaagaaagaaacattgccagcatctcatgcaccctcccaataaagatccatttctccttctgaaaggttgacttgtatcctaacatttctggtaattgttcccaygacttatttgattgctgtctatctaagtatgtgttctcaaatattatcttacctggtctatttaaaaaaatgatacaaatagagagatgcacatacaatatgtattcttttatgtctctttattttatttaaaattaggttgtgagatttacataagttgttatagctgtagttcatttaatttccttgctgaatagtaattcagtgtatcaatacaccacaacttattcattctaccattgattaattttgaatttgttttcaatgtttggctattattagcaatactactaggaccactcttgaataagtctctcgggcacgtgtggtatatgtgcttgcatttatattaggtacgtgcttgagagtggaattagtattagtgctggttttctgaaaatgttttatcagcttttacctgttaaactaattttttaaatttaatagtgtatcaggaaattactttgtattttctatatacataatcatgtcaactgtatttgtgacatttggatttcttcctttcaaatctttcgacatattattatttccttattacaataagaccatcatcttcacgacatgttggttagaaaagtctgttatgttcccaggttcacaaggaaagcttttgacatttaataatcagatgagttctttgctataacattggtgtaagggccatttgtcagattaagaaaggtccttaatgtttttaaacatgcatacatacatcaaataatattttcttatatcaaaaaatttttgtacatttgttgagatggtcatatgagttttctcccttatttggttaatatgataaattatattaatgattttctaatgttaagccaaacatatgcctggggtaaacccaaattagacatggatgcagcatcttattatatattctggggtagttttctattttttttttttttgcttaggacttctgcatctatacgtataaagaggctggctgacttgcaatttttttcttgtgattattatttc

SEQ ID NO: 694203 - DNA, 650 bp, Homo sapiens
ctttcaagtggaattcttcagatcatagagaaagcagatggatagatgactatcaagaaataacagcaaagattacaagggcttttgcttcatgcttatttacgatatttattttaaagatttataaacattcatatttatatgaacttacatgtggatcttatgggtttatagataaagacaatgttagasttaatattacaaatacatttagactgtgagtaattttctcgaattttaatgaaatcctatataatagcttacttcaagttgccaaacaaaatgtaaatttcttcctactaatgttgcaataacattattctgaaaatctttttacttgatttaaattgtttcttttccattggcttcattatttttttatgttttacccatgataacactaaaagggacaaattggcctactagttttctcactactctccccttcaacaatttctctacagaaaaggtttctttagttatttagttaattgcattctgttataaagtcatcaagataattttataagtttgaatcaaatgctaatattctctattctggacaaacaaatgttgcacatgtagggtgggaaatgggatctgcatttatgatccctaaatggcttaatattaaactttctgattattat

SEQ ID NO: 694204 - DNA, 1275 bp, Homo sapiens
gatccatcaatgcagagcttgcatatgatctctaagccatataagagaattcgctggagaaaaagcatttcttagcagaaaagaacacatagcattgcagcactatggcaaatgaaggagcagaaagagaactgctcagagatcagaggggttggcagaagggggtctcagcatctggaaccccagctgggtgcctgctgaactgcatacttcatagaatgcactgctacaggtaggggcatgagagatttgtctgaactcagggctgccacattaactgtgcaattctaggagaacacatgtgaatgatgccctctggaggtgtgcaatgagacggccctgggaaaatcagacatgggtgcgcagtgtttggcctgtaatgcaggctgaggagggtaggcaacagtggagtcacgtgctttccccatatatggcagcacaaagatgcctaatggtttctcctgggccaagtaggcactggatggggtcagaagctacatcaaagccttcagaaaaaagccttccccaagaagtccatccacttgagaaaaaaagttcagggtacactcaaggcagaagctgagaggccgggggtgtcataagagaccagccagggagggcatcatccatgtctgtagaggaaagtctgggggtcttcacagggtggccaagaactcacaaaagctggacacctgcaagacagagactatttcatgactagaaagaaccataagaagcaccagctaagyaaaacacccttgctttctagtcaccttctccctgccccttgactgtggtggagccaaaagcagcaaagccagcaggaaaggagtgtgcacaaggagggaaaaggaacagccacggcccccgccttccctttcccatggctgatctgcagtgtctcaggccaggcctggcctacagggaaaggagagctttgtgattttgttttgttgttgttgctgttgttgtttgagatggagtctccctctgtcacccaggctggagtgcaatggcgcgatctcggctcaatataaactctgcctcccgggttcaagcgattctcctgcctcagcatcctgagtatctgggattataggcacccgccacaatgcccagccaattttttgtattttcagtagagacggggttttaccattttggccaggcaggtcttgaactgccgacctgaggtgatgtacccacctcggcctcccagagtgctgggattacaggttttcttgtttggttttgttttggacagggactggctct

SEQ ID NO: 694205 - DNA, 1525 bp, Homo sapiens
acagaaaaaaggttgaagctctctggtcaatccgcatttactgatgaacagtgggagattctcaagtcctgcaggataacgcatgaaatggtttaagcaacagtggaatccaagagaaaaagaagaagcaagtctcccacatcgatgacaggagatactccctaagtactagcgagaataaaaaactgaacttgatagaccaagacaaagacaccaaaacaccggaagacccgttcagatgaacactcgagttgtcacagccaatggatgcaaaagaagcaactccacacaaagattaagattacaagacgccaccaatgctgttggaaaatctccctcaggaagtacttgttcccactttgtcactggctacgtcttaggatgaaactgggatggaatcagattcgacagaagagtggacactcaagatgtttgcgaatgaaacaaaaaagacgattccagcaatgaaagcaataacgtgctaaataatattcaggcagtgagacatccgttggctggaaaaatttatgccttgcatgacgctactgaaaacttaacacaagcagttggaaacagattcaaagtgatcgatgccaaacttgaggaattgcaaagggatatctcttttatgcactctagatccacccaaagcaggccacctattgtgaagctatatcccacttttttccctgatgcctttaatccaccaccagctgttgctgtggcttcagcttttcctgcctgcatttattctcatccaaacaaggaatggagtgattggtgactgtgatactatgacacaagtattgacgtatcctacaaatgaaaaattgcacaaaatctacctcactggtgaattctttgtgctgacaatcttaaatggaaaactgatttatagcatcattgtgaaaactactgggacaatgcgctatatatatcaatggataagtccctttgccttctggagcatttacaatgaatcttgtctaagctcaaagacaattgaaagaccaaaatatgtttacacattacagacccaagaagaccacaatgaatgtgaccagaagcaccatgaccacatcaattcagaatgagtgcagagcccagccccaggggcagcctcaatgcacagaatgccaaactttacagcattagtcctttcacttacctaaaaaaaaattactttaaaggctcaccatagtagacttttttacttttttatttattttattgtatatatatttttctttatactttaagttctagggtacatgggcacaatgtgcaagtttgttacatatgcatatatgtgccatgttggtgtgctgcacccattaactcaamatttacattaggtatatctcctaatgctatccctccccactcccccatcccatgagaggccccggtgtgtgatgttccccaccctgtgaccaagtgttctcattgttcaattcccacctatgagtgagaacatgcagtgtttggttttctgtccttgagatagtttgctcagaatgatggt

SEQ ID NO: 694206 - DNA, 1148 bp, Homo sapiens
cagtatgcctagcagttgaatgactttgctgatgccacattccactcaataaactctttgtgagtttattgagcttttaagttctcacaaccaggagagatctaacatctgtttgaagacactaccttgtgttgtagaagactctcactgttgcaaagttgggttttctactgataactacagtttttggtagtgcctgtcaatatatctttttatctataaaaagaagtaaaaaatattaactacaaaaagtatattaaatctatttatctaatttgacaaaaaatacattctgtaattagaggaatttgacctgaaagccctgttaagattttagatgttaacttataagatatttcttgcgcatcacaatctactttgactcaaaaaaaaactttactatgttctgtattacttttacgtagattggaacattacttttctgatgacataagtcaatatttcttttttgtccttaatattactctcttttgtatgccaaatccaatgtcaatctgagtaaaattgaaagtttaaatcagaaaggatattcgaaagccttgaaacaatcttcatttctcaattatatattagatgactttagttttattaggttatgactgtgttccagattgaatagtatatttaatggaagagagactgggggctatcaagcacagataacattctgaataaggaaagtttattgcctctgccgctttatcttctttcatttctgtctctttattttcccaccacccactcaatatagagaggcaatcattgttttcattttgattttgaattaagagttccaaaactcttgattactgttagttctacttcataaggaacacttcaatgaccgtagttttcttatcattatttggacatcgtgttgtagtatatgtatatgcctttggcatcattaatgtgccccagaaaatatgccagagcctcatstcatataaatgtattaatctctaataatttcaaaggatgaagatcttaaaagttaaaagcaagaggagagcaagacagtactatgttgattcacaaatatagttctttgttttctaggaagactttatgaagtgcagtgggagatgaaccttattctactgcctgcttccccttgtgtcacatga

SEQ ID NO: 694207 - DNA, 1148 bp, Homo sapiens
cagtatgcctagcagttgaatgactttgctgatgccacattccactcaataaactctttgtgagtttattgagcttttaagttctcacaaccaggagagatctaacatctgtttgaagacactaccttgtgttgtagaagactctcactgttgcaaagttgggttttctactgataactacagtttttggtagtgcctgtcaatatatctttttatctataaaaagaagtaaaaaatattaactacaaaaagtatattaaatctatttatctaatttgacaaaaaatacattctgtaattagaggaatttgacctgaaagccctgttaagattttagatgttaacttataagatatttcttgcgcatcacaatctactttgactcaaaaaaaaactttactatgttctgtattacttttacgtagattggaacattacttttctgatgacataagtcaatatttcttttttgtccttaatattactctcttttgtatgccaaatccaatgtcaatctgagtaaaattgaaagtttaaatcagaaaggatattcgaaagccttgaaacaatcttcatttctcaattatatattagatgactttagttttattaggttatgactgtgttccagattgaatagtatatttaatggaagagagactgggggctatcaagcacagataacattctgaataaggaaagtttattgcctctgccgctttatcttctttcatttctgtctctttattttcccaccacccactcaatatagagaggcaatcattgttttcattttgattttgaattaagagttccaaaactcttgattactgttagttctacttcataaggaacacttcaatgaccgtagttttcttatcattatttggacatcgtgttgtagtatatgtatatgcctttggcatcattaatgtgccccagaaaatatgccagagcctcatctcatataaatgtattaatctctaataatttcaarggatgaagatcttaaaagttaaaagcaagaggagagcaagacagtactatgttgattcacaaatatagttctttgttttctaggaagactttatgaagtgcagtgggagatgaaccttattctactgcctgcttccccttgtgtcacatga

SEQ ID NO: 694208 - DNA, 603 bp, Homo sapiens
tactggtcctaccagcagtttcagatgaaagtcctgggcatagaccaacgctgttagcggtagacagataaggtcctggagccaaggtcacaccccggagcctcccattgaccctgayttcctgcactccattcttccttgactcctatattcctttcctttacatatttctatcctgggtttttttccttgaaccttcagaaattccattctcattttctttcatgataaaaattgatgcattaaaaaacaaaatcccaaacatcagcatatgagaaacaggttttagtttcgattgtgctgaatcttcaaacgcttccttggggtgacaagagagatatgatgcaactcatgctggaagtgtcatctgtgtgagaagacttccctcctataatgagtttaactcttaaattataatgcctattaggacaagagcactgtctgctctgttgagtaatggatcctcagtacctagaagtttctgtcaggtagtagtaactcaataaatatttgttgaatttatgaataaatggattattatacaatacaggtaactaaaggtggaaagagaacatagttaaatttccatattaaaatgtgttg

SEQ ID NO: 694209 - DNA, 603 bp, Homo sapiens
tactggtcctaccagcagtttcagatgaaagtcctgggcatagaccaacgctgttagcggtagacagataaggtcctggagccaaggtcacaccccggagcctcccattgaccctgacttcctgcactccattcttccttgactcctatattcctttcctttacatatttctatcctgggtttttttccttgaaccttcagaaattccattctcattttctttcatgataaaaattgatgcattaaaaaacaaaatcccaaacatcagcatatgagaaacaggttttagtttcgattgtgctgaatcttcaaacgcttccttggggtgacaagagagatatgatgcaactcatgctggaagtgtcatctgtgtgagaagacttccctcctataatgagtttaactcttaaattataatgcctattaggacaagagcactgtctgctctgttgagtaatggatcctcagtacctagaagtttctgtcaggtagtagtaactcaataaatatttgttgaatttatgaataaatggattattatacaatacaggtaaytaaaggtggaaagagaacatagttaaatttccatattaaaatgtgttg

SEQ ID NO: 694210 - DNA, 612 bp, Homo sapiens
ccctttgacatggagaaacggcatctctctgtggtttcctcaggaccagcacaagtctgactggtatcctccatcaggaccttggctgaagagagggaccaccggggaaattgcttcccttccaaaaacagcacaaatgcacacatttgctctcacagctgtttttgagtgtgtcgtgtggggagctgtgcaagggactaaggatatgagatgcaggtgaccatcagtggattaatgaaggagacgcacattaaagagcataacctccatgcagtccacccacggaggagagccatgttccttcttaaacaggggtccgtgacccagttgggtaggaggacttgactagcagagggagggtgctggggggtgagggaggtgcaaggaaagggaacagcatgtgtgaggggccctgaggctgaaaagaacaggaacttaaaggctggagggatgcagcggaggttgatgtggtcagaactgtgctctgaaaggagggcttgctctggctggagggataggtgtgtgaggaggaaacccacaagggcaccatggagtactycaggggagaggcaaggcaagcttggggacgtgagggtggcggtagagagaagc

SEQ ID NO: 694211 - DNA, 789 bp, Homo sapiens
caggccttgcctaaaagttactcaaatataaaccttaaaaaggctgtgtgggtcaaccaacacrcatctgattagtcccaggagctggttgtttctgggatactggttgcctagagggtgtgtttttatcatctctcaggatttggttacctgtccccaggcctcctttgttctggtctgagggtcttgtgctgagggcaagacccactctgtccagcctgcctcggagggtgtctcatgcattgcctctgaactccagaagaagccatttggatgggaaggaagacttggggtcagggtagcttcaagttatggcctgagcagagtgggtttgtgggctcatgagaaatgccattagtttcctccttacggtcctggagtcaggcatgggtaaattccaactctgctgcttacaagtagtatagctttaggaggcaaattgcttggcctctctaagcctcattttctacctttgagaatgggataatgataattgagttttcatgagataaaataaaacaatgtaggtcaagcacttagcacagtgcccagtgcatagtaagcacgacattagcattaaccatggctgttgggacttagagactttctagatgtgccatggcgaactcctgaaattaattgcaaaatgctgtgttgatgtgtactttgttttttcctgctctattacccttcatcagattctaaatatggaccaagatagaataggaactttgatgttaagggaagctgagtaagttgttacagaactcagatgtttgagaattgaca

SEQ ID NO: 694212 - DNA, 1155 bp, Homo sapiens
tacagcaaatgtccccctccccaccggtcccctcggttgggtttccttttgattggcagagaccctgtgatttccgcctggattgcctgacagcccccctccgcctggtctaattatgccagggctgttcttgggccacagcgaccccaggaaggctttatcagattgtccaactgaccgtgaccagatctccagcacctgcctcttttgctgactgaggatggaaggtgtttacacacagcggagctggcagctgattgactggccagggtcctgggctgaggacggccagtctgagtgtcagtgatgaaaaatggggtctgcctctccacccagcctcattaacacccctctggctccaggcggtatcaggtggggtgtgtgcaggcacacagcctgctgccagtgttcagggcctcctgacagatttctggctgcagtgctggacttgggtccatctcttatcattttaatttatttacaaatatttatttattttataaatgttcctatgtgtgtttaagccctccgctttctccacctctctggttacagttacccatcccctgcttcttgttcatccgtcaacaactcaccctaagtatgacctcctcacctctgtcttccactctcacaccttttcttccagcgtcagctttcatggaagccagtcaataattmctgtttgcaggccgatttattagtgtgattaaagttctgtttctgaatagaagctttggtgctgcctgccttttccaggtacccaagggtgattctggttatacaaagaggttctgtaaggcagctcagacattggggccaatccttctggtcactctggcaaatggcccattttgataagaacattaaatcatccaaatcctttagggttacacgggggtcatttgctcattaatcaccagtggcctgagaagctaaaggtttcccaaagctgagccatctctgccctacaggatgatgtgacgtggcccattgtctcagttcagctgagcatccctgggctgagcccagttcttctatctgagacatggattgggccttacagcccagagtgaggtctctgcaccagcagcatcggcattacctgggggctcgttagaaatgcagactctcaaaagccccaccatagacctc

SEQ ID NO: 694213 - DNA, 1155 bp, Homo sapiens
tacagcaaatgtccccctccccaccggtcccctcggttgggtttccttttgattggcagagaccctgtgatttccgcctggattgcctgacagcccccctccgcctggtctaattatgccagggctgttcttgggccacagcgaccccaggaaggctttatcagattgtccaactgaccgtgaccagatctccagcacctgcctcttttgctgactgaggatggaaggtgtttacacacagcggagctggcagctgattgactggccagggtcctgggctgaggacggccagtctgagtgtcagtgatgaaaaatggggtctgcctctccacccagcctcattaacacccctctggctccaggcggtatcaggtggggtgtgtgcaggcacacagcctgctgccagtgttcagggcctcctgacagatttctggctgcagtgctggacttgggtccatctcttatcattttaatttatttacaaatatttatttattttataaatgttcctatgtgtgtttaagccctccgctttctccacctctctggttacagttacccatcccctgcttcttgttcatccgtcaacaactcaccctaagtatgacctcctcacctctgtcttccactctcacaccttttcttccagcgtcagctttcatggaagccagtcaataattcctgtttgcaggccgatttattagtgtgattaaagttctgtttctgaatagaagctttggtgctgcctgccttttccaggtacccaagggtgattctggttatacaaagaggttctgtaaggcagctcagacattggggccaatccttctggtcactctggcaaatggcccattttgataagaacattaaatcatccaaatcctttagggttacacgggggtcatttgctcattaatcaccagtggcctgagaagctaaaggtttcccaaagctgagccatctctgccctacaggatgatgtgacgtggcccattgtctcagttcagctgagcatccctgggctgagcccagttcttctatctgagacatggattgggccttacwgcccagagtgaggtctctgcaccagcagcatcggcattacctgggggctcgttagaaatgcagactctcaaaagccccaccatagacctc

SEQ ID NO: 694214 - DNA, 505 bp, Homo sapiens
tggggtgaacccgggaggcagagcttgcagtgagccgagattgcgccactgcactccagcctgggcgacacagcgagactgtgtctcaaaaaaaaaaaaaaaaaaagttatatgtttaggtgcgttcttaattaattctttatgaaggacatactaaattctaggaagtgcaccagagctcaggttacaggagaaaaaaatactgtgtcagtactctttgagttcacagttggggaagatacgtgggcaaataggtcaataaagtacagttgayccttgaacagtgtgcggatcaggggtgtcgacccccacacccgtgtagttgaaaacacgcatataacttttgacccctcccaaacttaactgctaatagtctacttttgactactggatgctgtaccaatgacatctgtggattaacacataatttgtatatgtattatgtactgcattctttccataaagtaagctagagaaaatgttaatcaaatcataggaagaaaat

SEQ ID NO: 694215 - DNA, 2126 bp, Homo sapiens
aaatatatctaatgttaaatgatgagttaatgggtgcagcacaccaacatggcacatgtatatatatgtaacaaacctgcacattgtgcacatgtaccctaaaactgaaagtataataaaaaaaaataaaaaataacaaaaagagttattctggtcctgtacaaatgaacttcttcctgtatgttgtgttaaacagggtatcactgagttttatctcactaatttgcatgcatatttataaaggtaaccggcatatagtagatacttaatatatgatgactgaataaatgaatgaagtatgaggaattccataagaagacacactggggatcctttagactaagcaggatcacagaacccttagcctaactcctccaagggccactgctcctccttttgagccctgggatatcagcccagggtttccagcgggcacctctaggtcttgtgatatcctgggtcctttgacccatattttccttctggagatggtgtggcttagactttggctccctgtttctcccttagatatggcttccaccctgatgacttggccttgcctcatcaacctcttttcacctgcaagtattctcccctgcttcccagataagtctgagagactaggtctccactcctaagctttctgctctctacattcattacgtgcaggatagagactcttgtacatttgtggcacctgcaggctctgagattaacctctcagcctgtcagtccatgccttctctacccattaacaccattatgcacagaggaaaacagcccccagccaaggccatgcaggaggatggtcatagcactcttaaatattttgaaaactgatgtctatcacattcttctcttgattctcttataatactcagcaataacatacataataacggcaatagcacctgttaaatgccagctcaggggtctacataattattctcggacttaatggcctccttagggaccatcttccattgatatgcttatttacagtcactacaccatttacaagccccaagtggagagggggagcagaaaaaaatcagttttggtcaattttgaggtcctttggtcaattttgaggtcattaccaaagtctggctcatcttcgagccaccagaacatgtatctatcgccctacagttcccctaacacattytaccaacctcagcagcctcaagaactataaacttgggctgataaccaatgaccatatacatttctactcaatgtttctcctaatgttatcatattaaaaatattccttgacgctccatgcccattgcactctatgtgtataatatccctaggaatcaaacacagcagcagcctctgttgctccactggcattgaaaccattggtagccaaacttgagaataaactacttatgataaatatttaatttcagcaaaagactgtcacactgaatgtatcatatatcccacaattttcctataggtctcagaatttgtagtctgtcccagagctagtattttgctcgcctagtaaggcctgtgggattcctggactctacccagaagccagcagccaagcaaagccttcctgacatatgtgggaagtaccaatgctcccagtacactagtagtaccatagacactatcatcctggtgctaagagctgcatttctgatgggatgtttccatccatcccagaataagagatccaggtaccctgagacttccttctaaccaatctatgacagtgctccaactgaggatatgcatcttttgatacatactgagttggagtatgcatcatattccagatgattgcctcacaacttcaggcacctgacctgctctcccttataaccctaaattgctgctagcaatgctggctctttgctgagttgaataatttaaaatatgagattgtaaaggtcaattctgcagaataacccccgctcaagacattccatgatatgtgtgattgggcaggccactgagttccaacagtccttaacatttttggggtatgtggaatattatgggatagacatggaacatatatgtagtttccaccatatttccctagcctgccttccaagtttaccaaactgcttaaggaaaacaagccaaacattctaaaacactca

SEQ ID NO: 694216 - DNA, 645 bp, Homo sapiens
tttacactcaatttacaatatgtctttactccaggaacatgttggcttctgaattatagaagttgcatgtctctgagaagacttgtgtgtgtgtgtgtgtgtgtgtgtgtgtgtgtgtgtgtgtgtagcctgtatattgcatcttatttttgtttataagtacagaagcttttgtagatataaatgaagtagttttcaaaatgtttgctaactggttgtcatacaggaaagtcaccatgcagaactctctagctataatcatytttccgtaatccttttggcttttcaagacacacaattctataatcagaaaataaggacaattttaccttaatttcccaagattcgtgcttctttttaaactaaactagtcacaacttaaaggaaaatgttaaataaatattgtgaaatatggtataatcctacaatggaatattattcggccataaaaataatgaagtactgataaatactacaatcatggatgaaccttgcaaacattaagtgaaggaagccagtcacaaaaaaacaaatagtgtatgattgcatttatacttaagtccagaataaagaaatctatggagacagaaaatagattaatggttgcttaagggtgaggtagagggaggaatgtggtggggaagg

SEQ ID NO: 694217 - DNA, 921 bp, Homo sapiens
caaaattcaaaattcatcaacagttttttatgacaacagctatcttaacagcagatcttctaatattatatctttgatggcttttatgaaaatccccagttactgaaaaagatatactatttttcatgcgattaatttaacaaaagtctgtctcaacatttttgaaacattaaaagctttctcacaaagaaatcaggataaagctgttgcaaaaacgataaaaatatctataagatcacttaacctattaaacaactacgtaattgcataatttcttagtataataaacataattatatgttcttgatgccattaattgtgtcagccccattaattaacactaaatactatagggaaaacaatctatttatattaaaatttataaaagaacaaaaatcttattttaaatccccaataaacaccacacatcctcagtcacagaattccaatggtcttaattgacctagttttagttaaaagtaaaaactacacttaggttcaaccacagaaaagaagaggccgcttttctagattaattattatgcttcagttatctgggagctgttagttcagctctcataattctagsaaagagtcctaacaccgtgtcacagaaaccttaaattatattctagtccacgcttagaactgtcttactgtcccttccatacttttaaaagctgcattcaacacttgtctgtgtggtcttttgctaaggatccaggaggcccacaggtctgaacaaacacattgtggtcttccaactggtacctggtttctgctcctggatttaccaagtgactcctcctgtgactctggaagccttgaaaaacttggcatcattccttcctctgtagattaacaataactttacccatcttctttcccacaactatggaaaggctctgaaaaaaaacagaa

SEQ ID NO: 694218 - DNA, 657 bp, Homo sapiens
agaaaagttcccatatcttaccaagttgatagctagcttttaaataactgcagcacactggtagacattatgtaagtgaatctgtacttccaaataggcatgttttacacttctgaatatgtgaataaaggaattgttctaaggtattcactacacacacatgtggacgcgcacacacacacacacacacacacacacacmattttcatcattggcaactttttcctggattcctcaggcttgagtcaagtgtgttcaccgctctgcctttcaccagtgccatcttttcatacacccataactatctggcacagggtgaaatcatgatttagcaaaagggcaagtaggaggcaaaatggagtgctatcttccctaattgctatttaaaggaaacaataaaaaggatgaaacaaattaaattagcaaagaagcaagagcatcccaatgaactggccaagataatcaacttggaaaattagctattaaaccttcatgcatactcattttcataattttttgtgtgtgcttctgaaacgcaacgccccattgaaatggctgggatgaagttgcttcatttctctgagataagtcatttgcaattggtcttaatgaaattagaggtgaggttttttaaatgccctggttcatcatttccca

SEQ ID NO: 694219 - DNA, 657 bp, Homo sapiens
agaaaagttcccatatcttaccaagttgatagctagcttttaaataactgcagcacactggtagacattatgtaagtgaatctgtacttccaaataggcatgttttacacttctgaatatgtgaataaaggaattgttctaaggtattcactacacacacatgtggacgcgcacacacacacacacacacacacacacacaattttcatcattggcaactttttcctggattcctcaggcttgagtcaagtgtgttcaccgctctgcctttcaccagtgccatcttttcatacacccataactatctggcacagggtgaaatcatgatttagcaaaagggcaagtaggaggcaaaatggagtgctatcttccctaattgctatttaaaggaaacaataaaaaggatgaaacaaattaaattagcaaagaagcaagagcatcccaatgaactggccaagataatcaacttggaaaattagctattaaaccttcatgcatactcattttcataattttttgtgtgtgcttctgaaacgcaacsccccattgaaatggctgggatgaagttgcttcatttctctgagataagtcatttgcaattggtcttaatgaaattagaggtgaggttttttaaatgccctggttcatcatttccca

SEQ ID NO: 694220 - DNA, 465 bp, Homo sapiens
aaaggaggagagctctcaggacatgctcctccataacggtcttgcaatttccagtgcgagctggagcagtgcgatgtggtgtgtggttggaaaagcagtttgttctctgctaatgacagctgtggatactgaaatgaagcacagcaggtgggacagcggtactcaattttcaaaatctgtgccctaaaatgtgtttgcttaaaccttgtctcaccaccctttaggggcctccacatccatcaaaaccagaccccaggaaaggaattcaggcttctatttctcactagcgctttcacaatcgctgctatgattcagaggttgtctggaaagttcagtagccaaaagttccctccttcttcctagagtgataaattaaatcacttccagttcccagggtgggtggaggggggactggccttgcctaggtagccacaataactttgaaaaggacatasaattcctcac

SEQ ID NO: 694221 - DNA, 960 bp, Homo sapiens
catcgagacaccagagcgccgggcgacaaaccacagactccgggtgacagtcgccctgcgcctgcgcacgagcacgcgctgggtctctccgcggggcgcgtacctggggcgkggggagtctggtggcagaggggctggaaggccgtattctccggataactgccgcaactaagtgcagaccctcctcccctctgttacaggtggccggccaagtagttacagtacactgcgtctagactaattctgaatgctcttttagtctctcttgcagggggtaaaaacccttcaaaagtatcagatgtggatcaacagtaaacactcaacgaaaatttcattccgcaatgcctcaggcttcttacattttctgaacccagaaaacaccaaacaatacttttcagattgagaagtttcgtttgtttgttttaagaaaaatgttgacatatcccaaaaagtagcaagataagcagcttggggattggggaaagcacaaggtgtttggagcctaaaagacttgatttccaattgtaggattcctagaaatgacgaccccccccccccccaccaacacactcactccttattgtgtgtcttggaccaattagatgacctccctgaacctgatctctgtggatgtgtagctagcaaagagctagttttcggtaaatggtagtcattattgtataacagaagcaaatcattatgatcggtttaagcaaagaaattacgtattgaactttaatagattaggaaagaagaactttgaattatttttctaagtgcttggtctgtatctttttaaatttcttttttttttttttcttatttttatattttggtaaaccaggtatagtggttcacacctgtaataccagcactttgggagcaggtggaatgcctgagcccgggagtttgagaccatgctgggcaacaaagtgagaccctctctctacaagaaaataa

SEQ ID NO: 694222 - DNA, 638 bp, Homo sapiens
tactgctgaaataacagatggttgaggttttcgtttaacaaagaaagaaatgcaaaatttcctgaaaatttgatttagagcattaccaagtcttattaaataccataattagattatttgtaccctggaatgaaggttcaagtgacttttatttgctctaaaccttggctaatcctgaatataaacatgatggtatttgttctttgtgtcatcacagacctgaaaatcttctgtagtgagttttatactcagtaaaaataggaatccaaagattaggacttcagtgaactgcctagggagggtgaaacttayatgtgagaactgattacataaagttattgagaagactaggagccgaaacatctgattgagacaatttcacctcctttcaaggatgaggctcatctgcatctctacccattgaagagagtaggaattcctagaacctatgtggcagaggtcaaaaaagctgtgacttaggtaccaggaatggagtaactggggaagtgatgaggcaagactgtggggagctcttctcccagtttcttctgcataactctttattctctctaagctcttttctcgctccagcctctacatttctcgttattgattgatttattccattaggctaatgt

SEQ ID NO: 694223 - DNA, 1060 bp, Homo sapiens
aactgaacaatcgacatatttggagatggtcttgtacactcctaaacttggcaacattctatgcccaagaattctagaagcaatgactcttacccttattcaccttatattctctgatctgmaatcatataaatgaaaacaggaaggaaatgatagaaacagccaaaaactcttgcttttttccagacattatatatacattttaaaaagaagtattataactttaagtgacaatcaaacataatattaagatagtccctctacgtgaaatcattctaatatcaagggaaacagcaatttaacaagtaaattttaggaaatgcagcgttctaatttaggtaccaaaacttattttaaatgacattttcagccaaatgagagaaaaagaaactcaccatttttttctcatattattctaatttcatccctgtgcagtatagaagccagattgtcactgtgccctgggaagctttgcaaatatggcaaatgccacagtcagcatgaccctgacttatactttaataactccttgatttagcagacaaagcttttctctgcctccaatacaccccttaatctagcacttgtccccatgctgtcccatggttgctcaaagccatcttatgttagtttcatccattgttccataattttcctcagctctactttcctataacaactaacctgctcctgttatttctctctgtagtcaagtgtttctcagagaaattaatgccacagtgctaataattgatgttacctgccattaacactataacctctatagcatgttatccctttcagatatcaatttgttaaaataatgaaagaaacgagtcctctggttatttctatgtaatgaatcactctaaaacttagtggtttaaaataacaacaatcattgtattatgtctcacagtatctgtgggtcaagaattcagaagtagcttagcaggaagttctggcttgtggttgcagtcaaaacagcaggtggctgaaatggttggaaactggcaaggaagcattctgttcatgtagatttctggcctctccatgtgga

SEQ ID NO: 694224 - DNA, 1060 bp, Homo sapiens
aactgaacaatcgacatatttggagatggtcttgtacactcctaaacttggcaacattctatgcccaagaattctagaagcaatgactcttacccttattcaccttatattctctgatctgcaatcatataaatgaaaacaggaaggaaatgatagaaacagccaaaaactcttgcttttttccagacattatatatacattttaaaaagaagtattataactttaagtgacaatcaaacataatattaagatagtccctctacgtgaaatcattctaatatcaagggaaacagcaatttaacaagtaaattttaggaaatgcagcgttctaatttaggtacyaaaacttattttaaatgacattttcagccaaatgagagaaaaagaaactcaccatttttttctcatattattctaatttcatccctgtgcagtatagaagccagattgtcactgtgccctgggaagctttgcaaatatggcaaatgccacagtcagcatgaccctgacttatactttaataactccttgatttagcagacaaagcttttctctgcctccaatacaccccttaatctagcacttgtccccatgctgtcccatggttgctcaaagccatcttatgttagtttcatccattgttccataattttcctcagctctactttcctataacaactaacctgctcctgttatttctctctgtagtcaagtgtttctcagagaaattaatgccacagtgctaataattgatgttacctgccattaacactataacctctatagcatgttatccctttcagatatcaatttgttaaaataatgaaagaaacgagtcctctggttatttctatgtaatgaatcactctaaaacttagtggtttaaaataacaacaatcattgtattatgtctcacagtatctgtgggtcaagaattcagaagtagcttagcaggaagttctggcttgtggttgcagtcaaaacagcaggtggctgaaatggttggaaactggcaaggaagcattctgttcatgtagatttctggcctctccatgtgga

SEQ ID NO: 694225 - DNA, 597 bp, Homo sapiens
ttttctacaaattttgtttatttctgtagtccctgcaccccaggcagtgctttaatataatcgtaatgcatattctgcaggttcttacttcaaaacaatttcaacattcttatctttcccatcagtcccaatattcttcctatgcaggtatataatgagaaagtgttttgtttcttttaaaacaaaatttcaatgagtctactaaataaataaacaattaattttttcagtacatttgatgggaaataataatatggaatwatcacaaattactgcttaatgaaatttctctcagaaatatagatcattcaccttttcatttccccccattttaactagtctttagagattacttattgtaaaatctgacgtgaaataaactgaagaacttttcactcagtttttcaaatttagagaatctagtctaaagaggacctgatcgttgttgctattttactgacgattttgttatttttgattataatgtaataatatgcaaatctttcccaatgccctaatacaaaaatagccagtgttaattttctatgtttgtataagttaatgctaattttaaaattccattttcatacttgcttg

SEQ ID NO: 694226 - DNA, 597 bp, Homo sapiens
ttttctacaaattttgtttatttctgtagtccctgcaccccaggcagtgctttaatataatcgtaatgcatattctgcaggttcttacttcaaaacaatttcaacattcttatctttcccatcagtcccaatattcttcctatgcaggtatataatgagaaagtgttttgtttcttttaaaacaaaatttcaatgagtctactaaataaataaacaattaattttttcagtacatttgatgggaaataataatatggaataatcacaaattactgcttaatgaaatttctctcagaaatatagatcattcaccttttcatttccccccattttaactagtctttagagattacttattgtaaaatctgacgtgaaataaactgaagaacttttcactcagtttttcaaatttagagaatctagtctaaagaggacctgatcgttgttgctatttyactgacgattttgttatttttgattataatgtaataatatgcaaatctttcccaatgccctaatacaaaaatagccagtgttaattttctatgtttgtataagttaatgctaattttaaaattccattttcatacttgcttg

SEQ ID NO: 694227 - DNA, 597 bp, Homo sapiens
ttttctacaaattttgtttatttctgtagtccctgcaccccaggcagtgctttaatataatcgtaatgcatattctgcaggttcttacttcaaaacaatttcaacattcttatctttcccatcagtcccaatattcttcctatgcaggtatataatgagaaagtgttttgtttcttttaaaacaaaatttcaatgagtctactaaataaataaacaattaattttttcagtacatttgatgggaaataataatatggaataatcacaaattactgcttaatgaaatttctctcagaaatatagatcattcaccttttcatttccccccattttaactagtctttagagattacttattgtaaaatctgacgtgaaataaactgaagaacttttcactcagtttttcaaatttagagaatctagtctaaagaggacctgatcgttgttgctattttactgacgattttgttatttttgattataatgtaataatatgcaaatctttcccaatgccctaatacaaaaatagccagtgttaattttctatgtttgtataarttaatgctaattttaaaattccattttcatacttgcttg

SEQ ID NO: 694228 - DNA, 568 bp, Homo sapiens
tatacaattttttttaaaggaggctctttctgrtgttagaagagtatagttttctattcagctagaagaacacctgcatatatttgcatatgataaagtaagatgatcctttatgatgctggagtgaaaagaaataaacaataagatacacagaccacacagaatataaggtgttgaaatatccccgaaaatgcaatttttagaaatggtaaatatactagtctcttctcacactgttataaagaactacctgagattgggtaattaataaagaaaaaaggtttaattgactcacagttctgcaggctgtataggaggcatggctgtggaagcctcaagaaacttacaatcatggcagaaggtgaagggtaagccagtccatcttacatggtggaagcattagggagagggagtgaagaaggaagtcctatgcactttcaaacaaccaggtctcgtgagaactcactcactatcataagaacagcaagggggaagtctgttcccatgattcaatcaccttctaccaggtccctcccacaacactggggattacaattaaacatgagat

SEQ ID NO: 694229 - DNA, 568 bp, Homo sapiens
tatacaattttttttaaaggaggctctttctggtgttagaagagtatagttttctattcagctagaagaacacctgcatayatttgcatatgataaagtaagatgatcctttatgatgctggagtgaaaagaaataaacaataagatacacagaccacacagaatataaggtgttgaaatatccccgaaaatgcaatttttagaaatggtaaatatactagtctcttctcacactgttataaagaactacctgagattgggtaattaataaagaaaaaaggtttaattgactcacagttctgcaggctgtataggaggcatggctgtggaagcctcaagaaacttacaatcatggcagaaggtgaagggtaagccagtccatcttacatggtggaagcattagggagagggagtgaagaaggaagtcctatgcactttcaaacaaccaggtctcgtgagaactcactcactatcataagaacagcaagggggaagtctgttcccatgattcaatcaccttctaccaggtccctcccacaacactggggattacaattaaacatgagat

SEQ ID NO: 694230 - DNA, 568 bp, Homo sapiens
tatacaattttttttaaaggaggctctttctggtgttagaagagtatagttttctattcagctagaagaacacctgcatatatttgcatatgataaagtaagatgatcctttatgatgctggagtgaaaagaaataaacaataagatacacagaccacacagaatataaggtgttgaaatatccccgaaaatgcaatttttagaaatggtaaatatactagtctcttctcacactgttataaagaactacctgagaytgggtaattaataaagaaaaaaggtttaattgactcacagttctgcaggctgtataggaggcatggctgtggaagcctcaagaaacttacaatcatggcagaaggtgaagggtaagccagtccatcttacatggtggaagcattagggagagggagtgaagaaggaagtcctatgcactttcaaacaaccaggtctcgtgagaactcactcactatcataagaacagcaagggggaagtctgttcccatgattcaatcaccttctaccaggtccctcccacaacactggggattacaattaaacatgagat

SEQ ID NO: 694231 - DNA, 568 bp, Homo sapiens
tatacaattttttttaaaggaggctctttctggtgttagaagagtatagttttctattcagctagaagaacacctgcatatatttgcatatgataaagtaagatgatcctttatgatgctggagtgaaaagaaataaacaataagatacacagaccacacagaatataaggtgttgaaatatccccgaaaatgcaatttttagaaatggtaaatatactagtctcttctcacactgttataaagaactacctgagattgggtaattaataaagaaaaaaggtttaattgactcacagttctgcaggctgtayaggaggcatggctgtggaagcctcaagaaacttacaatcatggcagaaggtgaagggtaagccagtccatcttacatggtggaagcattagggagagggagtgaagaaggaagtcctatgcactttcaaacaaccaggtctcgtgagaactcactcactatcataagaacagcaagggggaagtctgttcccatgattcaatcaccttctaccaggtccctcccacaacactggggattacaattaaacatgagat

SEQ ID NO: 694232 - DNA, 571 bp, Homo sapiens
atgggttgtccaggactgccactcccgctgccacaccaccatctgcatgctcgatggctttggttcgaagtagatgccccacgtgcttgttcatcacgagtgtcttttcctgcctatagaaatggaggcaggggacacacatcacctggactcagccccaaacccaggaccttccctggacccagctgagcagtacctgggtaactgtctataccaagaaagtgctaggattttagagtctctatgcctctctggagtctccttctagtcctaggttgtcaaaccatgtgttctgagtcctcttggtgctatttggagtttccttcacggttgcaaaggacttctcatcagggcttcatctgataccctggtraggtgggcaggtcttgggtccttggcctcatttaatagataaagaaacaggtaataaagctagtgattggcagagctggcaccgaagcccaggattcctgactctttccagtgttcccctctaggctggctcacttggctggcactcttgcaagcaggtagtggaaagagcttctcctgattggctcacctgacatag

SEQ ID NO: 694233 - DNA, 669 bp, Homo sapiens
caaccaccgaaactggctggcggccacccccaacacagcaggaccctgacctctgttggaagggaacagcgtggtatacaggagtgaacactggctggttctagctcttaacaacttccatgtgcacaaaatagaaagcttgacaaagcatttccattgccactctctcttttgattcccaacacaatggcattattctcacagtaaggaagcagaggcttggagaggtgaaatgacttgcccgaggtgatgactggtatagcctggacttgaacccatgtctctgractcccagcctaaaggctcttcattggagaaagaagcactaatatcagatgtgactggggcaagttccttcccttcccagagctacagattccctaactgtgaaacaagaagaatcggatagatcagtttccaaacctggctgaacattctggggagctgggaaagaatacagattcctgggccccatcccagagactctgatgcaagaggcctgatgggaaggaggggttgaggctttgtatttttttttttttgatatggagtctcactcagtcgcctaggctggagttcagtggctcgatcttggctcactgcaacctccgcctcctgggttcaagtaattctcccgcctcagcctccctgagtagctgggattacagg

SEQ ID NO: 694234 - DNA, 669 bp, Homo sapiens
caaccaccgaaactggctggcggccacccccaacacagcaggaccctgacctctgttggaagggaacagcgtggtatacaggagtgaacactggctggttctagctcttaacaacttccatgtgcacaaaatagaaagcttgacaaagcatttccattgccactctctcttttgattcccaacacaatggcattattctcacagtaaggaagcagaggcttggagaggtgaaatgacttgcccgaggtgatgactggtatagcctggacttgaacccatgtctctggactcccagcctaaaggctcttcattggagaaagaagcactaatatcagatgtgactggggcaagttccttcccttcccagagctacagattccctaactgtgaaacaagaagaatcggatagatcagtttccaaacctggctgaacattctggggagctgggaaagaatacagattcctgggccccatcccagagactctgatgcaagaggcctgakgggaaggaggggttgaggctttgtatttttttttttttgatatggagtctcactcagtcgcctaggctggagttcagtggctcgatcttggctcactgcaacctccgcctcctgggttcaagtaattctcccgcctcagcctccctgagtagctgggattacagg

SEQ ID NO: 694235 - DNA, 632 bp, Homo sapiens
acacatgcttaaatacaaacaacctgctttattaaagcttctggttatggtttctggatggaaattcaatcccttaggcacaaacaaatatgaaactaaaattctgttatgttatatttctgtagcccaattatttcaattatgatggcctttcaactatttcaattccaaatattttaattatgatagcatatataatagtctatgataaaaattccaagactaacacattctaaattctatttcgcttagcagaaactctttgtaaagaaatctttctccaaaatttaatgttrtatacttggttgcctaattttagcagaaaataatcaaaaagtagcaaaataaaaattatgttaaagtaaaaatgttctgttgtctaaaaaagggcaatggcaaatcagtgtcaccactagatcaatgccacaacactcttttaacaattatgctctctggcctcccttttgactgaagtttacaccttgcaggtataaaactgttctccacacttattctgaaatacgcttctgaaagaaatgtcgtttcaataaattgactccaagtaaccttgtgagcccacgatcaattataaaattttatttttgaaaaatataaaatttgcttttaaaaag

SEQ ID NO: 694236 - DNA, 646 bp, Homo sapiens
aattaaatggtatattttaatgtctatgatctatttagtcacgttgtgtgccttctagccatgtgctatacaaaggtgttcctcctgaattttttttaaactttgattttaggtttgcagggacatgtgaaggtttgttacataggtaaactcatgtcatgggggttcgttgtatagattatttcaacaatcagatattaagcccagtacccagtagttatctttcctgcttctctccctcctcccaccctcccttgtcaagtagaccccagtgtctattgtttccttctttgtgttcctaagttcttatcatttagctcccacttataactgagaacgtgtggtatttagttttctgttcctctgttagtctgctaaggataatgacctccagctatatccatatccctgcaaaagacgtgatctccttcttttttatggctgcattgtrttacatgatgtacatgtaccacattttctttatccaatctgtcactgattggcatttaggctgattccatgtctttgctattgtgaatagtgctgcagtggacatcgaattgtccactgaattgtccattgaacagtgctgcagtggacattgaattgttttgatttgccaccaattgtagccaattaatctctt

SEQ ID NO: 694237 - DNA, 939 bp, Homo sapiens
aagaatgaacaatgggctattctttgaaaactcaaaacaaatgatttacacaaagacatatctataacataaaggtgaatggaccatgttattcttattcttaagtacattttgcttttccagataagtcaaatgtttcctctctcctactcctctgatataacagtattgaatgaatgttggctacaaaatcaattcttggtgttgttatgaatctcaatataaaacttttggaaaggttctgctagaaaagccaattctaccaggcttgaaatatggattcgaagatgtcttttgtctcttttgatttttcactcagagctaattttaagggaagtcttcaggagacacaaaagatttacaattgcaagaaaaattacatctttagctcttaggttgctttgcaaaataattaaatgttggccttttacttttataaagacccagtttaaatgacttagcccaggtcacctgaaaatcattggtaaaaatgacrtgtagtcaagctgtgcttccagagttacgcccttgagatcaagggagtgagaatacatcttattccataaacttcaggcaatgttgcaagggtttgtgaagacttggccagctctccgttgacaatggccaaggaatagaagctctagacctcccttatttctatcgtgaaaacagaggtatatccaagtgagggactacaacagtaataaagggaaaaaagtatttaattccaaaataaaattgaaaataacctcctgtctcagcctctttttgggaatatctagaaggagtggaaaaccatctctggctatgagacttgtatcactacccctttctccctggggcgacaggtagaggctgttgtaaccattttgaaccttgtcctggagtggcttgttgcttttcagttaaagagcttgagtgagcctgtctgggcctctg

SEQ ID NO: 694238 - DNA, 625 bp, Homo sapiens
gacctgagaatccagctgtcttctttaagctattaaagagattcataaaacaaacacaaagccactgatagataaaaacctgtgtgaatatatccccttgggatcctcagttacttctaacagtgtcaaggggtcctgaggccaaaaagtttgagaaccgctggtttagactttctcaaaagacagaaaagtatttactttcaacagctactatttccacagacccactagcccctgaagctgggaaactaagattcagagctgattcctttcctacagtgatgcgaagagaggggctggcagacagagggaaaaaaacaaacaaaccaaaaatggaaacaacaaagctcagactttcacctcagtagatatcctcggctcacatacttatcaggcaatgaacatgacaggctgggaggasggtagggtgtgtatttcattttccacacccagataatagccatttaaaaataagtggccaccactggtaataaacagcactcgccattcccacttacaactcactcggcttattcattccttcagttaagagctattgagggcctgctatgagcagggaagaaatggagtgttatcctcaccaactagcttacagctaggaaga

SEQ ID NO: 694239 - DNA, 639 bp, Homo sapiens
agacacattttcataagttataaatttctgttttgtttggcataaggacygtatgcttaagcccttaaccagagatgagtgtccggctgtaaaagccaaacacaatgaacctaaaccaatgcaaaagcacacccatttgaaaattgccaaatctgaagtgtaattattaacccttaggaggtctgtaatttattacattgtctatgaagaaatagttgactcaataaagtgtgtgtgctcaggtgtttcattggcttaattaacatattttaagtatttttaatatctgccaattacaaattaattttatctattggttaaagcttcctggaaaaattttctctcactgttgaggtaaattgatattaacctaattaattgcaagaagtcaactatgctgattttgaaatatatttaatgtttttagtaaatatggctacctttgtctcagttggcctgtactaatgtagttttactggaattctaaggtattacaatctataaatttacgacagaaagatctattgccaccatattagaaatattttccggtgatttggagttcaaattaactattttgggggaaaaacactacaagcatagctcagagaaatactcaaaattatcctccacaatcta

SEQ ID NO: 694240 - DNA, 639 bp, Homo sapiens
agacacattttcataagttataaatttctgttttgtttggcataaggactgtatgcttaagcccttaaccagagatgagtgtccggctgtaaaagccaaacacaatgaacctaaaccaatgcaaaagcacacccatttgaaaattgccaaatctgaagtgtaattattaacccttaggaggtctgtaatttattacattgtctatgaagaaatagttgactcaataaagtgtgtgtgctcaggtgtttcattggcttaattaacatattttaagtatttttaatatctgccaattacaaattaattttatctattggttaaagcttcctggaaaaattttctctcactgttgaggtaaattgatattaacctaattaattgcaagaagtcaactatgctgattttgaaatatatttaatgtttttagtaaatatggctacctttgtctcagttggcctgtactaatgtagttttactggaattctaaggtattacaatctataaatttacgacagaaagatctaytgccaccatattagaaatattttccggtgatttggagttcaaattaactattttgggggaaaaacactacaagcatagctcagagaaatactcaaaattatcctccacaatcta

SEQ ID NO: 694241 - DNA, 639 bp, Homo sapiens
agacacattttcataagttataaatttctgttttgtttggcataaggactgtatgcttaagcccttaaccagagatgagtgtccggctgtaaaagccaaacacaatgaacctaaaccaatgcaaaagcacacccatttgaaaattgccaaatctgaagtgtaattattaacccttaggaggtctgtaatttattacattgtctatgaagaaatagttgactcaataaagtgtgtgtgctcaggtgtttcattggcttaattaacatattttaagtatttttaatatctgccaattacaaattaattttatctattggttaaagcttcctggaaaaattttctctcactgttgaggtaaattgatattaacctaattaattgcaagaagtcaactatgctgattttgaaatatatttaatgtttttagtaaatatggctacctttgtctcagttggcctgtactaatgtagttttactggaattctaaggtattacaatctataaatttacgacagaaagatctattgccaccatattagaaatattttcyggtgatttggagttcaaattaactattttgggggaaaaacactacaagcatagctcagagaaatactcaaaattatcctccacaatcta

SEQ ID NO: 694242 - DNA, 702 bp, Homo sapiens
aattattctcttacctatgggttatacacagctcttatttgtctgtcttgtggttgtgagtcttttggagttcaaggattcctttgagaagctgttatatactttctaatgaaaattaatatgtccataactgcaaaattttttacatagagaatgtgtgtattccctgacttcctcagatccccagattagaaactttggctctgaaattttgtataaaactaggctatttctgcacttacaatccaactagaaaaaaacagcaaatcaactgttccagagaagacagggtaaaggattcacaaattgatccaccaaaaaagagaatatcacacataacacaaagtgattsaggcagcaagccccatgtgtgttagacatttatttaaaaattggattagagggtgggtgtggtggctcatgcctatagttctaaagcttttggaggacaaggaaggagggtcagttgagactaggagtttgaaaccagtctgggaaacatggcaagaccccatttcttaaaaaaaaaaaagaaaaaaaagaaaattaattagctggacgtggtggcatgcatctgtagccttagctatcccaggaggttgaagtgggaggaccacttgagcccagtaattcaaggttaccgtgagctgtgattgctccactgcactccagcctaggcaacagagtgagaccctttctcta

SEQ ID NO: 694243 - DNA, 702 bp, Homo sapiens
aattattctcttacctatgggttatacacagctcttatttgtctgtcttgtggttgtgagtcttttggagttcaaggattcctttgagaagctgttatatactttctaatgaaaattaatatgtccataactgcaaaattttttacatagagaatgtgtgtattccctgacttcctcagatccccagattagaaactttggctctgaaattttgtataaaactaggctatttctgcacttacaatccaactagaaaaaaacagcaaatcaactgttccagagaagacagggtaaaggattcacaaattgatccaccaaaaaagagaatatcacacataacacaaagtgattgaggcagcaagccccatgtgtgttagacatttatttaaaaattggattagagggtgggtgtggtggctcatgcctatagttctaaagcttttggaggacaaggaaggagggtcagttgagactaggagtttgaaaccagtctgggaaacatggcaagaccccatttcttaaaaaaaaaaaagaaaaaaaagaaaattaattagctggacgtggtggcatgcatctgtagccttagctatcccaggaggttgaagtgggaggaccacttgagcccagtaattcaaggttacmgtgagctgtgattgctccactgcactccagcctaggcaacagagtgagaccctttctcta

SEQ ID NO: 694244 - DNA, 2159 bp, Homo sapiens
gaaagagaaaaaaaaaagtctctagaaaaatgtgtccaaaactatcttgtctacttccaactagagatagttttcttaaacaaagygaaagagtaatgaccatagaggaaacagctaatcaattggataacattaaaaataagaacttctgttcaccaaaagacacaattaaaagagtaagaaagtaagccacacagtgggaaactatatttttattacatgtacctgacaaatcactcctacaaattaataagaataaaaaagatgctccaatagataaatgagcaaaagacttcaactggtatttacaaaacaggacaactatatgaccaataaacatttgtaaagcacaaaaaggaaatgataaccacagtgaagacaccactatacaaccaccagaatgactcactactggcaatgcccattgttgacaataatgggaaacaattataatctacgtacactgtcagagagagcaaattagcaagatcattttggaaatttggggtagtatatacttaaagccagattcatgcctactgtacatttctcaaatatgtacccaagagaaatgagtgtatattttcaccaaaaggcaggagcataaaaatgttcagagcactattatttgcaaaaaccaaaatccagaaacaacacaaatgtctaaccacaggggaatgaatggacacatagtactttactcatacaatggaatactatgcaataatgaaaataaaagagctacagctacacacaacatggaaaaaattcacagacacactattgagtaagagaaatcagaaataaaagtatttatagtgcccaattccatttgtacgaagttctaaagcagacaaatgtaactataatattagaagtcaagattgatgattacttttgggaaagaggaattgtatggattggaagaaagccttaagaggtcttctgaggtcctggttatgttcagcttcttggcctgagtggtgatcatacgggtagcttcacttcaggataagtaagccatgcactatgagttatgcacttttctgcatgaatgctacatttaaatgagagagtttgaaagcaaataaagtgtaatgagtgctttgatagattttactgaggactcatgtgggaggaaaccctgacactgatttagatgactggggaaaagttcctggacagctacactgaatcctggaagactgataggagtgagctctgtcaatggcagtaaagagtactccaagaaaaaaaaaaaaagctggaggtgagagagattgtagtgccttccaggtactgcagctatttcttgtggctgaaacacagggctttggcgttatgagacaggagtaagaagagaagaaatgggagggctaagggagttgagattataaagggcctcctaagccttgttaggaagtttgggtttgctctttgagcaatcaagagttggtgttgaatagggagaaatatgattaggtgtgcatgtaaagtcatcagtgtagctataatagagtattgaggatagagatgagagcttctggaaaaaaatctaagctaaaggaaataaaatcagagagatagaaaggagtggaggctaataagggcatattttacagtaggctttggtatgtgattgactatgtggcatattccatattttagcctgaggtagatggataggtctaggacaatttccatattttagcctgtgccatcttctgagaggagaacacaaaaggacaaacggtttgggtgaaaatatggggttaattgaccagctataactggtacttctgcatgttaacaccacagtgagattctaaacaccccaaacagactcttattctttattgcacttttctaaatctcttagcagtttttataagtcatttcatttcagtccctcaataggctctaacatggtcagccaggcattattgttccacagacaatgacttcagcttgtagacttgtgcggccatttagagttggcaagccatgatgcaggacatggaagggtgaagttgaagctctactattattccttcagggccacattgaggaaccccagggaaagccactcttcaacaccatacctctcgctctgtggctcttgcctgcaccaacataaaggtcaaccaaagcaatgcatt

SEQ ID NO: 694245 - DNA, 1517 bp, Homo sapiens
tattttgagacagaatctcgctctgtcacccaggctggagtacagtggcccaatctcggctcactgcaagctctgcctccygggttcacaccattctcctgcctcagcctcccgagtagctgggactataggcgtctgccaccatgcccagctaattttttgtatttttagtagagatggggtttcactgtgttagccaggatggacttgatctcctgacctcatgatccgcccgcctcggcctcccaaagtgctgggattacaggcatgagccaccgtgcccggcggtaagtagtattattaatcccattgtacagatagggaaactgagggttagagtagttaagcaatttgcttaaagtcacacaatgagtgaggcattgagtcagtactcaaacttaagtctgtctaattcctgagttcacgttctaggaagttctttataactaatagatctcctgtgcttagttcccaaatctccagtaaaatcactgaaactgcctcaaagctgagagccacaagcctgagagtggccaacacactgtgattcttagttctagttcttagccttcaagaccacgtgagcttccagagatattagcccagaggaattccaacagtatggttaagcaacataagaatgaaaagcaggtaggcaagcctaaccacttactctggttttgaaggcaatacccacagagggaagtttccactctccattttggcttatctaacattgtccagattcatcatctactatactgttaagattttgaagatggactctcttaattcctaacattttaatcactaaatccttcaagttcttcaagtttgcctttgggaccctcctcttttttttttttttttctttttgagagggagtcttgctctgtcgcccaggctagagtgcagtggcgcgatctcggcttactgcaagctccgcctcccgggttcacgccattctcctgcctcagcctccagagtagctgggactacaggcgccccccaccacgcccggctaattttttgtatttttagtagagacggggcttcaccgcgttagccaggatggtctcgatctcctgaccgagaccgcgccttcctgaccgcgcccggccgaccctcctcttttttctatttgttttttctctttttatcattatcaaaagcccattgtcccatactttctccttcctaatttcattcaaaacctttcctcttaggaaaagaatgtttaaaattattcactccacggtgtgaataattgttcatcccaaggttatctctcctagcagcctttgcatttgcattgaaggaaaaccttcatttaaatgactagatttctaattatgggatgttaggcattagccaaggaggcatttagtagctatggaagcttccagttgaggtcattctgagaaattctttgttatcactgcctgccttgtttatgtctagccctattcggaagaaactctctttgtgttcaagtactgacactttccccatatcca

SEQ ID NO: 694246 - DNA, 1517 bp, Homo sapiens
tattttgagacagaatctcgctctgtcacccaggctggagtacagtggcccaatctcggctcactgcaagctctgcctcccgggttcacaccattctcctgcctcagcctcccgagtagctgggactataggcgtctgccaccatgcccagctaattttttgtatttttagtagagatggggtttcactgtgttagccaggatggacttgatctcctgacctcatgatccgcccgcctcggcctcccaaagtgctgggattacaggcatgagccaccgtgcccggcggtaagtagtattattaatcccattgtacagatagggaaactgagggttagagtagttaagcaatttgcttaaagtcacacaatgagtgaggcattgagtcagtactcaaacttaagtctgtctaattcctgagttcacgttctaggaagttctttataactaatagatctcctgtgcttagttcccaaatctccagtaaaatcactgaaactgcctcaaagctgagagccacaagcctgagagtggccaacacactgtgattcttagttctagttcttagccttcaagaccacgtgagcttccagagatattagcccagaggaattccaacagtatggttaagcaacataagaatgaaaagcaggtaggcaagcctaaccacttactctggttttgaaggcaatacccacagagggaagtttccactctccattttggcttatctaacattgtccagattcatcatctactatactgttaagattttgaagatggactctcttaattcctaacattttaatcactaaatccttcaagttcttcaagtttgcctttgggaccctcctcttttttttttttttttctttttgagagggagtcttgctctgtcgcccaggctagagtgcagtggcgcgatctcggcttactgcaagctccgcctcccgggttcacgccattctcctgcctcagcctccagagtagctgggactacaggcgccccccaccacgcccggctaattttttgtatttttagtagagacggggcttcaccgcgttagccaggatggtctcgatctcctgaccgagaccgcgccttcctgaccgcgcccggccgaccctcctcttttttctatttgttttttctctttttatcattatcaaaagcccattgtcccatactttctccttcctaatttcattcaaaacctttcctcttaggaaaagaatgtttaaaattattcactccacggtgtgaataattrttcatcccaaggttatctctcctagcagcctttgcatttgcattgaaggaaaaccttcatttaaatgactagatttctaattatgggatgttaggcattagccaaggaggcatttagtagctatggaagcttccagttgaggtcattctgagaaattctttgttatcactgcctgccttgtttatgtctagccctattcggaagaaactctctttgtgttcaagtactgacactttccccatatcca

SEQ ID NO: 694247 - DNA, 387 bp, Homo sapiens
aatataaatacatattggccagtcacggtggctcatggttgtaatcccagcactctgggaggccgatgcgggcagatcacctgaggtcgggagtttgacaccagcctgaccaacagaagaaaccccatctctactaaaaatacaaaaattagctgggcgtggtggcgtatatgtgtaatcccagctacttgggaggctgaggcaggagaatcacttgaacctgggaggcagaggttgcggtgagccragatcgtgccattgcactctagcctgggcaacaagagcgaaactctgtctcaaaaaaaaaaaaaaaaaaagaaaaagaaaaccttcatagctactttattcttaatagccaaatagataggagataggacaaataaattg

SEQ ID NO: 694248 - DNA, 1155 bp, Homo sapiens
ttgccagttcaaagaaatcatgactggtttcttagaaaagcacttgtttgaaaaaaaaaaaaagccaaagaagcctttctcatggtttcctctctctttccttctagttgcttcaaatatagtcctgtgtttggtcccccagtataatgactgttttcaggccccttgtgagcattcagaacagggtgcattaaccaaatctagttggacagcgttggttttctcccgtctagtgcaagctttaatgccaagctttctacttaggacctgtgaggaaaagacattggaatttcttggggcgttgtcatttgtcaaggactgattcttaagtcyagaatttcagcaaacagcatggattgatttttttacactcccttcccccctacaagttaagatttattgaagcagaaaatgtaatcatacattatgtcgactttgctttttttaaattttaggtgtatttttgtacaatggacatccaataaaacaggtagatgtcttgggaactgtcattggagtgagagaaagagatgctttctacagttatggaggtaagaacaattgtgtctgaaatgaagttgatgtagaaggctgacccttctgggctgaaagttggatttcagcagccccagccatttagagtagctggggaccctcactaagggcatgtactttctctatggggtgccccttatagccccagacacgggctaagaataaaatgaggcaacgggtaggaatgatactgatgaattcagtgaagtgacagctgctgaggtgctaagaagtggaagaattaaaatacagccccctatgagcatcgatggacgggcaggggggcacctgatgccaaagggtatatctgtaaatagcaaagcgtggtaatatgtggttatgtggatcactttaaaaagcgaagaccagattaatgttaaagtagattctttaacaacacaggaagatgtgaaaaataattttaaaatatttatatccagaacagttaacaaaaagccttttgatacccaaaggggtaaatacccattatcagaaagtttattttccctcatgatggaagcttaataaagggtttctatattttggacaccagagaattgctcaaatgtgattttagtgtaataggtctttcttttttca

SEQ ID NO: 694249 - DNA, 611 bp, Homo sapiens
tacatatatatacatatatatatatatwttttttttttgattctgaaaaggatcatcctgtcagaaattcccatactgaatctcttctctgctttattttaccaaagatattggtcctttttttctccagacaactcaacaaatatttactaagttcctacagtgtatccagctatgggcagtacactgtggtatatagtacagtgcttcctctccaaatgccaacaacgaaataatagcgtctttcagtttgtaaagcacttttatatgcataatttcatattattctccctctagtcttttgaaacagaaagtacaggtattatttccattttgtagatgagaaaactaaggcttagtaacttactcaagattccactgatggagatttgtgggtccattctgtttactgactccagtgtgttctgtggtctccatataactcagtttgatttttctctcctcctcctttcttccatcccccacccaccaaaaaaaaaaaaattaactgcatttgatttttagttttctgtttttcagatcaaataaatgagactgtttgaggactttaaaatcctggccctagaaccaggctagatattaagcctgtg

SEQ ID NO: 694250 - DNA, 611 bp, Homo sapiens
tacatatatatacatatatatatatattttttttttttgattctgaaaaggatcatcctgtcagaaattcccatactgaatctcttctctgctttattttaccaaagatattggtcctttttttctccagacaactcaacaaatatttactaagttcctacagtgtatccagctatgggcagtacactgtggtatatagtacagtgcttcctctccaaatgccaacaacgaaataatagcgtctttcagtttgtaaagcacttttatatgcataatttcatattattctccctctagtcttttgaaayagaaagtacaggtattatttccattttgtagatgagaaaactaaggcttagtaacttactcaagattccactgatggagatttgtgggtccattctgtttactgactccagtgtgttctgtggtctccatataactcagtttgatttttctctcctcctcctttcttccatcccccacccaccaaaaaaaaaaaaattaactgcatttgatttttagttttctgtttttcagatcaaataaatgagactgtttgaggactttaaaatcctggccctagaaccaggctagatattaagcctgtg

SEQ ID NO: 694251 - DNA, 1150 bp, Homo sapiens
caaagaagttgccactacagattgaatgcatttgggccatccacaggttactgggttaaggatttttgattaggaaggctacgggttgtcagtggccttagtgctttcaggctatacccttgtttacactgacaacaaggtggtattggagcgttatagggtcacggagaagaccttcaattaytaattataggttttaaatttaccctggcttttaaacaaatataatacactcttttctctttactacttctctctctctctctttgactctgtctctttctctttgactccctctttgtctttctctttctctctctctttgactctctgtctctttctctctgacctcctctccccgtttctctttcctctttgctggtctttccctgcctctgccagctgcttatgctgccattctcccctctccttccccttccctttcccctaggggagggaccagcgggagtggaactactctttcttcccccgaggggaaaggaaaggggagttctgaatgtttttcttactaccagaggtttgtatgaggttcaaccccctgaaatttgcagaaggctcaaccccttaaaccaggggtgtcttgccttgctgctctggaaggttgacctgtttcctccctttccccctctgaaggtcccttgcacacttcccactcatgttgtcctctctggctgctccccaaagggagaattaggcccctcttagtgttggctcactggtataaatcccacagaaggatctgccctaagccacaggaggcttacagaaccgcggagaggacccactcactccatccagcagtaggacttgtcataatccacacgaacgacacggcaagtagggttgtttgtgatcattcatacacacacatttagccctccagaatttgaccaccaaggaagtactttaccggctctgcggcttctccttccctggtctacgcacagtcatcactgcagtatgtgagaatcctttaagtcaggttgctagccagtttctttctgcgttgctgagagcgccggttactcctcacactgggtgggtcccacactgggtgggtcctgatttctcacctctgaggccaccacaagggggcggggcatgccttctcatgagagagaaccagagc

SEQ ID NO: 694252 - DNA, 1150 bp, Homo sapiens
caaagaagttgccactacagattgaatgcatttgggccatccacaggttactgggttaaggatttttgattaggaaggctacgggttgtcagtggccttagtgctttcaggctatacccttgtttacactgacaacaaggtggtattggagcgttatagggtcacggagaagaccttcaattactaattataggttttaaatttaccctggcttttaaacaaatataatacactcttttctctttactacttctctctctctctctttgactctgtctctttctctttgactccctctttgtctttctctttctctctcyctttgactctctgtctctttctctctgacctcctctccccgtttctctttcctctttgctggtctttccctgcctctgccagctgcttatgctgccattctcccctctccttccccttccctttcccctaggggagggaccagcgggagtggaactactctttcttcccccgaggggaaaggaaaggggagttctgaatgtttttcttactaccagaggtttgtatgaggttcaaccccctgaaatttgcagaaggctcaaccccttaaaccaggggtgtcttgccttgctgctctggaaggttgacctgtttcctccctttccccctctgaaggtcccttgcacacttcccactcatgttgtcctctctggctgctccccaaagggagaattaggcccctcttagtgttggctcactggtataaatcccacagaaggatctgccctaagccacaggaggcttacagaaccgcggagaggacccactcactccatccagcagtaggacttgtcataatccacacgaacgacacggcaagtagggttgtttgtgatcattcatacacacacatttagccctccagaatttgaccaccaaggaagtactttaccggctctgcggcttctccttccctggtctacgcacagtcatcactgcagtatgtgagaatcctttaagtcaggttgctagccagtttctttctgcgttgctgagagcgccggttactcctcacactgggtgggtcccacactgggtgggtcctgatttctcacctctgaggccaccacaagggggcggggcatgccttctcatgagagagaaccagagc

SEQ ID NO: 694253 - DNA, 594 bp, Homo sapiens
atttttgtaataaatwaattcttttttttttttttttttgagacagagtctcgctctgtcactaagtctggagtgcagtggtggtgatcttggctcactgcaacctctgcctcctgggttcaagtgatcttccccctcagcctcctgagtagctgtgactacaggtacatgccaccacacccaactaagtttttgtatttttcgtagagacggagtttctccatgttgcccaggctggtcttgaacttcctgagttcaagcaatccacccccttggcctccaaaagtgctgggattacaggcatgaggtaccgcacccaggcataaattaattctttatgaaaccttctcttaatgaaacaaggagcatatatatacacagaattacatctcaaaacccccccaaaatttatatatgtccacagcaagagccagttagcatggaaacacaccaatagccaactttctcctcctgtcctacgttgattaataatatcagcccatcacatagcctatttcaactttactattagcagcacaggattccatatacactaaagacaactcaaggtgcccatgaactatcagttgcctt

SEQ ID NO: 694254 - DNA, 594 bp, Homo sapiens
taacagagaaaatcctaaaaaccatcagtctatgaaaaggtgctaaaaataaccggtagagaaaaaaaaaatagagaactggatcatgccaagtgttggcaaaaatgggataaagcagtggttctcagctgcagagactccccccaccccaggggatatttggcagtgtcaggggacattttttactgttacaactggggagggaggtgctactggcatttggtggatagaggccaggcatgctgctaaacgtcctacagtgcacaaggtacttcccctcagtcaagaattatccagctccaaagggtaacagggtcaaggctgagaaatcctgaggtggaggaactgtgcagccaacgtgtcaagagtaatctggtactattttgccaaattatttatacgtatatcctgtgaccccataayttccctccagcatatatatatatatatcccttagaagttctcacacagctacttaagggacctgttcattgtacagggctgttcactacagtgctgtttgtttgtgggagttggaagcaagctggatgtctatcattggaaggagggctaggtgcagccacaccatggagt

SEQ ID NO: 694255 - DNA, 1379 bp, Homo sapiens
aaaggaaagaggttgaatggactcacagttccacatggctgacacggggaggcctcacaatcatggcggaagatgaagaaagagcaaagggacgtcttacatggcggccagcaagagaacttgtgcaggggaactcccatttataaaaccatcagattttgtgagacttattcactaccaygagaacagcatggaaaagacccacccccatgattcaactaccttccaccaggtccctcccatgacatgtgggaattatgggagctacaattcaagatgagatttgggtggggacacagccaaaccatatcactgcctataccttcccacatcttaaatttcctgagagaagctactctcaaacttctctgtgcattagaatcaacagggtagttttaaaaaagtatagttgcctggggcccctctagagaaagtgattgcaaggtgtagcccaggttgaaaacttctagactgaaatgagccttctccagctcccctggacttaggcattttctttgatttgcatgtatttcttgacttgaatatacatttatatattcatataaagcacatgccatttatataatgcaatgaattataactgctggctacctagcagatttttccccactagactttaatttcttgggaacaaggacattgtctcattcattttttgtatttccagagtctaatgggcgttgaacacatattaggtatttttttgtataaaatagtctatttcatataacaaaataccaatgctccaagcttctactgctaccttctctagggattttatttttattttattttattatttttttttttgagacaaggtctcactcccattacccagggtggaatgcagtgatgcgatcttggttcactgtagccttgacttcctgggctcaggtgatcctcccatcttagtctcttgagtagctgggactataggcatgcaccaccattcccagctaactttttgtatttttattagagatggggtttcaccatgttgcccaggctggtctcaaactcctgggctcaagggatcacccgcctcagtctcccaaagtgctgggattacaggcctgagccattgtgccctgccacagggtcttttcagtcttagctgagtgtgttccctccctcctctgtgctcctacagcatttatttattctgttaaggtagtgccttgaacttatcaatatctttgaagtcttccactaaagtttaagttccattaaggtaggggttgtctttttataatcgcacattataagtataattatataatcagttaacatagtacaagaatgaaatgttaaattcttgtttatagaatcaattatacctcaaactagtatacaaaaaa

SEQ ID NO: 694256 - DNA, 1457 bp, Homo sapiens
gaataaacaagcaatcaatcatttatttaaaaattttaaaaaatagcctatcttagttgcgataaggacaaaccaagtcaaatggtttttttgggccagtaagaaaaagatagttatgggttcctaatatccaggtgcctataaaggggacattcataggagagtcccatgaagacaaatagtctggggtgggagtccagacctctttggacagctgccctggttctctccttccctttgctgccccttctcagggttgttcctctcaaaatatgtttcttgatgcatgaatgacattgcatttaatttaagaggcaattctctgataagaaagtcctgccttttccccacttcctgccccaacctgctcccagacctcctggggttatagcctggctatctggatttctcyctgcctactaatttgcttgtcatcaaagatccttcccactgaaagccccccttgatttttttcctggtacctgcttctggggcctccctcaatgacctgccctgccctgaagttctgtccagctgccagctctcatccacccccaaaccagtcccatgctaaactcttccttttgcctttctagaggcactctccatcctttcccagccctctctggacctgggagatgaacacaaatggactgcatcaaaggctctcttgtcctctggcttctgtttgtgtttaaccaaaaggagatatcagaagattaaagagcaggaggatgctggtatatgattcttccagatccctccctgctgggctgccatgaaagggctacatccctttttgaatgccatagctatggtcaagtggtcctttccccacagccaccttctcagggtcttggtaactatgcccttcccttggcccttggggcctaggagtaatatggttgtctgctgttgctagctgaggggtatgcactagcccttgttggtctcccttcactctgtccacacctttgcaaataggtccttaattaaacccttctgaaattaatcaagtctacatatgccaggactgtgactgatacaaatccatactattgtcaaaagagccctagttagtatctatttttatgtcttgtttccttcacataatggaaagcttcttgaaggcaaggcccatctcttatctgcagagtgatagacacaaggaaaatagtgagtttttaacactgactcttagaagtaatcctgacctcgatcacctcttcctcaaaaggcattttttaggagggaaggggtatccaacgaaatatagctgcagacgatgtaaatgtctgggaaattaaagcagccagataaaggaaatcaccagcttgaagacatggtagtgggggagtctggacaaatgccagttaaagataaaacaacctgttcaaactttgactaaactatacaaaataaagtatgttaaacaatgttggtcaaaaagtgtctaa

SEQ ID NO: 694257 - DNA, 631 bp, Homo sapiens
aaattactttaaataatagttttaactctggtcgtaggtagaaaaaaagcatcttttttgcttggattcatctataaatataaacrtataccttaaaaataacacgttaaatgttctgtattctacaactattggttcatgcttattacttgttagaaaattcttggcatacagataacatcgtattttatttacttgctatgacatttcttcagaatgtctccatgaggattatcttgggagtttgcaagagataccatccttaattctgtctgacatttctagatgaataacagggaaattgggtaccctattcaggtccaagcaacaagtgcagagctttctccaacacattgtttgaatttacaaaaccaaatatgaaactcggtggataaaaataagcaaatctgcatttatccctgcatctctgtttgcagagctccatggtggactttggccgcttggtgtctcctaaaattggatcaaatatagttactgaagcaatgtagtaagacaggaaaaagggggaaaggctaatatatgttcatgtcaaacaaatgccttcaagggcgtagttgtgcagcgaggatagtcctttacttttgcctcatattctcttactggtgggaaa

SEQ ID NO: 694258 - DNA, 631 bp, Homo sapiens
aaattactttaaataatagttttaactctggtcgtaggtagaaaaaaagcatcttttttgcttggattcatctataaatataaacgtataccttaaaaataacacgttaaatgttctgtattctacaactattggttcatgcttattacttgttagaaaattcttggcatacagataacatcgtattttatttacttgctatgacatttcttcagaatgtctccatgaggattatcttgggagtttgcaagagataccatccttaattctgtctgacatttctagatgaataacagggaaattgggtaccctattcaggtccaagcaacaagtgcagagctttctccaacacattgtttgaatttacaaaaccaaatatgaaactcggtggataaaaataagcaaatctgcatttatccctgcatctctgtttgcagagctccatggtggactttggcygcttggtgtctcctaaaattggatcaaatatagttactgaagcaatgtagtaagacaggaaaaagggggaaaggctaatatatgttcatgtcaaacaaatgccttcaagggcgtagttgtgcagcgaggatagtcctttacttttgcctcatattctcttactggtgggaaa

SEQ ID NO: 694259 - DNA, 675 bp, Homo sapiens
gccaaagtggcgatatgctaatacacctgcatcaggatctttattcagaacattacactgaacacgttagtaactatttcatatgtttaccattggaaatgtcaagtagaaagttatttatccatttgggatggagcgaatatatgtgtggatggctgccaaaaccaagaattaatcacaagttattaatcaatttggaaaatataaacagataaattttcagaaatgcaaaacattcggagcatgaaacatttttatggcctaatgactttgaaagccagcaaattaygtttccaataaataagccctcaactttgtaaaactctatagtattttgagttaccttaggtaatggcacataattctcaaagcaactttaattttatagcacttttgtttttcttatacattatattttaattatcaagagagaagctattgcaaagtaaatgtgatgccataattctttaaaaagttgaaaatttatcttttatatgatgtacgtagattgtactgtgtttttatttctaaatttcttggaatggtagtattgagagtcgctcttgaattcttcagaaataccttagaaactactttttctcattttcctcaaaaccagtaaacttttacttggactttttttgtgtgaattattgtagattaatttgatattta

SEQ ID NO: 694260 - DNA, 1620 bp, Homo sapiens
tgggttttgttcatgttgatgtccatccactttcctaagaaatctatcagattccaactgttctttcttaattaatttttttagagacaggatcttgctatgttgcccaggttggagtgyagtggttattcacaggcattgttatagctagctcactgcagcccccaactcccacgctcaagagatcctctcgcctcagcctcccgaatagctaggactacaggtgcacaccactatgcccagcccaactgtccttttaagtaaagattgagattaaacacaatctgcagcagttagctttccatgatatctaagagagaagaatgattttcttcttttctctgttttcttttacctatctcccttcatgtactactacttcttccatttgaaattatcttgtttgacatctacaaataggtttgacaatcattttcaattaactaaacttattctcacttttttatggtgacattttcttttgaatggcacatctccactcaaagaataacttctttctgtaatagttgctgtccttcttaaggcattgcctcttaaattctttaagattctttaagaatttaagattcttacattattttttcttcagagacactaggttatcttgctttctttgaatgaaattattgaagacacttactggagcaaaaaaaaaaaacaaaacaaaaataaaaagcaaaggaaggatccatgaaattttaaggaaatgtggattaattgcaaaatatggataatacaaaacacagtacaattagatgacaaaaaaaacctaaaaactcagtaacagcataaaatcaaaacttctctaagttccagttttttcatctctaaaatgagataatattccctaggggattttcaaggatgaaatgaagtcatatatatatagccacataagcttggctgatcctatttatatttgtttatggtgatatggaacactgtagatatatgtcaattgcctcactcttaccaaattctatacttggtggagaaagcttttataatcaaaagagaatgaaatgccatgggaattgggattccctaaggattgaagggcttccaaagggagtcagaccaccagtgtggacaaagtgctgacatttactgccatctgttgggtgatgagcaaactgtcccactctttaaaacacagaaatacgcctctgaaagatttcttcctcaattcaaaaggcatccttagctcatcactgtttgcatctgctatgaaataaatatcagccccactcctagagggacaagaccagtcgctgtttcagtaaagagcgtaagttaagtcgcaaccctaaacagccacacctgaaggctgcaaaagaaaacataaattccagggcctgctataagctcagctacatttgccactacagggcacatacccaaggctcaattcaatatcccaaaggttgggacccatgtggtcatgccctgggctctttcaaagcactgcctctagaccagacaacgctattggcttcctgactaccaaaccaataattacaaaagacctctccattatgtacaacccagaccaaagttaaagaaaataacaagaagtgctttggggggtggggggaaagg

SEQ ID NO: 694261 - DNA, 1620 bp, Homo sapiens
tgggttttgttcatgttgatgtccatccactttcctaagaaatctatcagattccaactgttctttcttaattaatttttttagagacaggatcttgctatgttgcccaggttggagtgcagtggttattcacaggcattgttatagctagctcactgcagcccccaactcccacgctcaagagatcctctcgcctcagcctcccgaatagctaggactacaggtgcacaccactatgcccagcccaactgtccttttaagtaaagattgagattaaacacaatctgcagcagttagctttccatgatatctaagagagaagaatgattttcttcttttctctgttttcttttacctatctcccttcatgtactactacttcttccatttgaaattatcttgtttgacatctacaaataggtttgacaatcattttcaattaactaaacttattctcacttttttatggtgacattttcttttgaatggcacatctccactcaaagaataacttctttctgtaatrgttgctgtccttcttaaggcattgcctcttaaattctttaagattctttaagaatttaagattcttacattattttttcttcagagacactaggttatcttgctttctttgaatgaaattattgaagacacttactggagcaaaaaaaaaaaacaaaacaaaaataaaaagcaaaggaaggatccatgaaattttaaggaaatgtggattaattgcaaaatatggataatacaaaacacagtacaattagatgacaaaaaaaacctaaaaactcagtaacagcataaaatcaaaacttctctaagttccagttttttcatctctaaaatgagataatattccctaggggattttcaaggatgaaatgaagtcatatatatatagccacataagcttggctgatcctatttatatttgtttatggtgatatggaacactgtagatatatgtcaattgcctcactcttaccaaattctatacttggtggagaaagcttttataatcaaaagagaatgaaatgccatgggaattgggattccctaaggattgaagggcttccaaagggagtcagaccaccagtgtggacaaagtgctgacatttactgccatctgttgggtgatgagcaaactgtcccactctttaaaacacagaaatacgcctctgaaagatttcttcctcaattcaaaaggcatccttagctcatcactgtttgcatctgctatgaaataaatatcagccccactcctagagggacaagaccagtcgctgtttcagtaaagagcgtaagttaagtcgcaaccctaaacagccacacctgaaggctgcaaaagaaaacataaattccagggcctgctataagctcagctacatttgccactacagggcacatacccaaggctcaattcaatatcccaaaggttgggacccatgtggtcatgccctgggctctttcaaagcactgcctctagaccagacaacgctattggcttcctgactaccaaaccaataattacaaaagacctctccattatgtacaacccagaccaaagttaaagaaaataacaagaagtgctttggggggtggggggaaagg

SEQ ID NO: 694262 - DNA, 657 bp, Homo sapiens
gccaggcatgatggtgcacacctggagtccccactaccaggaagtctgaggtggagggattccttgaagcctaggagttccaggctgcagtgggctacgattacactactgtacccagcctatgtgacaacgcaagactatgtttcttaaaactaactaaataaataaataaaataaataaaaaatcctgaaatcaaaggatctgtgttggcccacctcttccaacgtttctcttttgccctaacacagtggttctcagccaggggcaattttgtaatgtctggacacatttttggttttgctgcaaatcaccccccaaaacaaagaattattttgmcccaaatgccaatagggccgaggtcgagaaaccctatcccaacagatgtcagggaggcagaaggagccagccatgggcaattccttacactttttacccccaaccgcccgcatccctgtcacccaagaacacatctgagactttgcaccacatactgaaatacgtgcctactctcatgtggacacaaatagataccagaagcctggcctagccccaacagaaacatgacacatcttccacgaacagcaaaatcttcctgaatttcctccgttctaattatacattttcccatattttaagttttctgaaaatggaatgtg

SEQ ID NO: 694263 - DNA, 938 bp, Homo sapiens
cctctcactggaggctgggaaggattctcaatgcacaggaaagttctctgcccctcatccatctcccaaaaaaggaagaggacacacttctggagaggttagaactcttcaaagaaaacatgccacacgtactgacgacgccctcatcttcacacagctgcccccatcataacttccctttggttttctacagcctgccactcaatccttaagaaagagttcttttgggtgcttggggttttcaaagcaaggaccctgatatttcggtctttatataaaaacacatcattgggggagacctcaattttaaaacctgcctcttcccattttcaaggaggtttatattacttgttcctctggttatcaaggaaaataattgaaaagagaataagtgcactctgacttctgtcacttttaagctatgcagatgacaggaacatctttttttccagttttgatttggcttcctggcaagcttcttgtttttcttaacatatacattctttaagtcaatatgcgtgctctcagctcatacatatgatccctggtgatcttttaagtgtctattcaatctgcatatcccaaggcagaattaatcatccgtggtaatctgaaagtcaagattgggtcatttattcacttaacaaatgtctattatgtttccactatgagccatatyggaatgctgttagaaaatgggtgaattgcattcctatgagccattctttctgaggcaaacgtaatagcctaatggaaaatttctctccatacttacctaatggacagctaatatattctacaccttctccagggcccagagctttattgtcttctatgccgggacccatcccagttagacttctttagggggttgctttcaccactcttcatagaatatgacagttagcaaaatgccttgcagtgggcactgaacactg

SEQ ID NO: 694264 - DNA, 683 bp, Homo sapiens
aatttaagcaattgttataggaatctgtaactcagtagagataaacatttgggcgtcttcacctgagatgtagtgtttagagccaatgggataaagggtcaaaattcaatgctagtacacaggtgggcacacttagccaccctgccatggcaccctcctctcacacaggtgccaaaatctaaaaaaacagcacccaacttattttaacagtttagtaaaagaagaatacattatgaccaatatggattattttaggaatacaagaatggttgaaaatcaggagctctattaataggttaggaagaaaagattttcttcagatgttgaaaagttttcaatgaaaatcaatatcattcctaaatttttaaaaatgtaagctatttttaaaacgtttctatagaactggaaggatagtctctttccatcataaagaaatgctgtcacaaacacaaagcccaagatatcataattttaagaggaaaggcattcccattaatgtggtgaacaataatctattgcttttatgctattaggttgttctataaattcatctaggtataatttttttacctggaaaatctcaaaaaatgtcttagaataaatayatgagctcaacagggtggtagtttttcaaatcaacaaatcaaaactcagtgagtccctaaatcagctgtagttaaaca

SEQ ID NO: 694265 - DNA, 683 bp, Homo sapiens
aatttaagcaattgttataggaatctgtaactcagtagagataaacatttgggcgtcttcacctgagatgtagtgtttagagccaatgggataaagggtcaaaattcaatgctagtacacaggtgggcacacttagccaccctgccatggcaccctcctctcacacaggtgccaaaatctaaaaaaacagcacccaacttattttaacagtttagtaaaagaagaatacattatgaccaatatggattattttaggaatacaagaatggttgaaaatcaggagctctattaataggttaggaagaaaagattttcttcagatgttgaaaagttttcaatgaaaatcaatatcattcctaaatttttaaaaatgtaagctatttttaaaacgtttctatagaactggaaggatagtctctttccatcataaagaaatgctgtcacaaacacaaagcccaagatatcataattttaagaggaaaggcattcccattaatgtggtgaacaataatctattgcttttatgctattaggttgttctataaattcatctaggtataatttttttacctggaaaatctcaaaaaatgtcttagaataaatacrtgagctcaacagggtggtagtttttcaaatcaacaaatcaaaactcagtgagtccctaaatcagctgtagttaaaca

SEQ ID NO: 694266 - DNA, 683 bp, Homo sapiens
aatttaagcaattgttataggaatctgtaactcagtagagataaacatttgggcgtcttcacctgagatgtagtgtttagagccaatgggataaagggtcaaaattcaatgctagtacacaggtgggcacacttagccaccctgccatggcaccctcctctcacacaggtgccaaaatctaaaaaaacagcacccaacttattttaacagtttagtaaaagaagaatacattatgaccaatatggattattttaggaatacaagaatggttgaaaatcaggagctctattaataggttaggaagaaaagattttcttcagatgttgaaaagttttcaatgaaaatcaatatcattcctaaatttttaaaaatgtaagctatttttaaaacgtttctatagaactggaaggatagtctctttccatcataaagaaatgctgtcacaaacacaaagcccaagatatcataattttaagaggaaaggcattcccattaatgtggtgaacaataatctattgcttttatgctattaggttgttctataaattcatctaggtataatttttttacctggaaaatctcaaaaaatgtcttagaataaatacatgagctcaasagggtggtagtttttcaaatcaacaaatcaaaactcagtgagtccctaaatcagctgtagttaaaca

SEQ ID NO: 694267 - DNA, 640 bp, Homo sapiens
aaaattggtcgagtgtggtggcaggtgcctgtaatcccagctactcgggaggctgaggctggagaatcgcttgaacccaggaggcggaggtcgcagtgagctgagatggcgccactgcactccagcctgggcaacaagagggaaactccatctcaaaaaaaaaaaaaagagcaggaagacagaggactctctttccacatgtgtgcacccaggaaaggccatgtgaggacacaatgagaagatggccctagtgtgcaaaggcagagggagagggagcatttgactgtcagcaaattgttttctggtgaattgacccacagcccagaaactggctcttgggtggattgatcaatttacagatttttcattttctccctcacacttagttgytatttttattacattcttctttcagtcttctttatgttactgtgttgagtgctgggttaatttttccatttctcctcatgtcacaatgagagcatttaaggcgatgtgtttccctttgagcacagctcttgcctctcttcccccatgaaactgttgcagtacaaaagaatttattcagcttgggccccaaagtccaaattctaatgggatgatgtggggtctgtggtagtaatgaggcctggcccttctg

SEQ ID NO: 694268 - DNA, 638 bp, Homo sapiens
tgattgtttttgagtgcctccttattttctggcactacaaaatactccaggctcctcttgcatatttctgtcagaggcatagaattggccatttctccaaggarccctggtacctttcactggagagtgttattagaaaccaaggtctgggtgctaggtatgctttttgctactggggtgctgtttcttttagtccttctcagatgacagagcaaggaaatattcatgtgtatactaacctgtgaatatcacatatctatacatatttctatatggaatcttctgcccctgtattaagctagacatgagttcatactgatgcctccaactccgctctgttaccaagtggatcattctagcctcctcccctggcttatctgtaaacttgcattccaacagtgagcaacctggcttctaccatccgccatttgtttaattaattttcgatttcagtatgcacgtatcagaattgttaatgcatatccccatgagaacaaactttattaaatagagtaaggtacaaaactcatatgagagaagaggccttggtgactgaccatagatggggttatcttagcctgcttgtgttgttataaaagaatacttaaggcttggtaatgtataaagaaaataggttt

SEQ ID NO: 694269 - DNA, 638 bp, Homo sapiens
tgattgtttttgagtgcctccttattttctggcactacaaaatactccaggctcctcttgcatatttctgtcagaggcatagaattggccatttctccaaggagccctggtacctttcactggagagtgttattagaaaccaaggtctgggtgctaggtatgctttttgctactggggtgctgtttcttttagtccttctcagatgacagagcaaggaaatattcatgtgtatactaacctgtgaatatcacatatctatacatatttctatatggaatcttctgcccctgtattaagctagacatgagttcatactgatgcctccaactccgctctgttaccaagtggatcattctagcctcctcccctggcttatctgtaaacttgcattccaacagtgagcaacctggctyctaccatccgccatttgtttaattaattttcgatttcagtatgcacgtatcagaattgttaatgcatatccccatgagaacaaactttattaaatagagtaaggtacaaaactcatatgagagaagaggccttggtgactgaccatagatggggttatcttagcctgcttgtgttgttataaaagaatacttaaggcttggtaatgtataaagaaaataggttt

SEQ ID NO: 694270 - DNA, 638 bp, Homo sapiens
tgattgtttttgagtgcctccttattttctggcactacaaaatactccaggctcctcttgcatatttctgtcagaggcatagaattggccatttctccaaggagccctggtacctttcactggagagtgttattagaaaccaaggtctgggtgctaggtatgctttttgctactggggtgctgtttcttttagtccttctcagatgacagagcaaggaaatattcatgtgtatactaacctgtgaatatcacatatctatacatatttctatatggaatcttctgcccctgtattaagctagacatgagttcatactgatgcctccaactccgctctgttaccaagtggatcattctagcctcctcccctggcttatctgtaaacttgcattccaacagtgagcaacctggcttctaccatccrccatttgtttaattaattttcgatttcagtatgcacgtatcagaattgttaatgcatatccccatgagaacaaactttattaaatagagtaaggtacaaaactcatatgagagaagaggccttggtgactgaccatagatggggttatcttagcctgcttgtgttgttataaaagaatacttaaggcttggtaatgtataaagaaaataggttt

SEQ ID NO: 694271 - DNA, 619 bp, Homo sapiens
agagattatacagagccactggtcccacaacctgcatcccacttgcyccagcctccaggtccttgcaaagcagcctccaggtccttgcaaacaggaagatccacaaagtgccaggggacacacaggggcgagggaccctcagagaaacacctgacaggctgaactatggagcaggaggcaaaaccaactcaccaacagccaatcactagaaggtttctagtgtggcagaaaggtattaggttggtgcaaaagtaattgcagtttctgcccatacatacatacatacatacatacatatttatttgagatggagtctcactctgtcacccaggctggcgtgcagtggtgcgatcttggctcactgcaagctccacctcctgggttcacgccattctcctggctcagcctcccgagtagctgggactacagctgcccgccactacgcctggctaatttttttgtatttttagtagagacagggtttcaccatgttagccaggatggtctcgatctcctgacctcatgatccacctgccttggcctcccaaagtgctaggattacaggtgtgagccaccatgcctggcctctgccattacttttaatggcaattacttttgc

SEQ ID NO: 694272 - DNA, 663 bp, Homo sapiens
tatgtgcacatggttatttataaatagtttcaggttggttgtctatgttgtccccttgtaaaattgttgagattcgggcccataacactttatgccttcctgaagcaatatccaccttcaactctgcaaaatctatttgtgcatgggtctcacctgcccttctaggacaataaattcacccaggaaaaattcatgtcttcttcctttctgaatcctcagcgttgcacatagtaggtccttataaaggtaactgctgaagggacagaggaaagaacatctaacagattatctacaaacctgagggtctgtgtttgtgtgtgtttgaaacaatactgtgttttatcactaccaacagaagtggccttcaaggggtggtcggtacacygagttcaagggatgtgtgggctgtgaagagaaatggaaagtagggggctagaaggaaagggagtaggtctggaggccaggctcaagggcacctcagattctctcatgggcatggccagccgggatgaaggagtcagggcaagccacagctacaccatcagtaagactgagaaagtcctgaaaatctagcctgcccatcacagttgaagtccagtttcttcatcatgcagtcaagggcaccagagcccttctggttctttgtgaaggcaaccagtacag

SEQ ID NO: 694273 - DNA, 591 bp, Homo sapiens
tttgctgtgaacccaaacctgctctaaaaaaaaatcaagcctattaataaaacacataacatggtaatactataaacatatttaattggctaacaaggatctaatgtaatactgggcaattcctatctctatgtgaattcatcatggctgcctagaatggatcggagttttggagaagcgaggagacaatttacgaattgtgagcgtgaatctctgtggcagactggacggcatggggtgcatgggtagcagaagggcccttggggcagcagaggagagaacggccgacaggaaggtgtagacagacgaacacaactctggactggccatcagagacattggaaacagwtctcctcttccgaggagaactcccaagacctggaatttgggctggaagtatcagtcccctggttcaggttaaatagaacagctctggggccacacaactgaaccacacggactggggtcacacagaaggcgtgggaaagccaggggctgccctggggctgctggggtgtgtacacagtgtccattgcctcagcctccagctctgatatcagagcctggggaacgagtttcctccctaaccct

SEQ ID NO: 694274 - DNA, 591 bp, Homo sapiens
tttgctgtgaacccaaacctgctctaaaaaaaaatcaagcctattaataaaacacataacatggtaatactataaacatatttaattggctaacaaggatctaatgtaatactgggcaattcctatctctatgtgaattcatcatggctgcctagaatggatcggagttttggagaagcgaggagacaatttacgaattgtgagcgtgaatctctgtggcagactggacggcatggggtgcatgggtagcagaagggcccttggggcagcagaggagagaacggccgacaggaaggtgtagacagacgaacacaactctggactggccatcagagacattggaaacagatctcctcttccgaggagaactcccaagacctggaatttgggctggaagtatcagtcccctggttcaggttaaatagaacagctctggggccacacaactgaaccacacggactggggtcacacagaaggcgtgggraagccaggggctgccctggggctgctggggtgtgtacacagtgtccattgcctcagcctccagctctgatatcagagcctggggaacgagtttcctccctaaccct

SEQ ID NO: 694275 - DNA, 1421 bp, Homo sapiens
tctggctatcttgcccaggctggtcttgaactcctggcttcaagctatcctcccacctcagcctcccaaagtgctgggattacaggcatgagtcatcacgcctggccccaaatgttttaaaaagtggaatgtaacagggtgaagctttgaagctttgaagtctgtcatgccacctgggactagatctacctcctgcacctgtaaaagatgaggctggggacaaatgtgtttatcctaatcaccctcatatcttatataagtgaatttgtggggctttgggtacctcaaagtgaagaatgcagctgacatccctgctctgaaagaacttacagtgyggtggggaggacagtcagtagtaaccagtcatcactagggcagtgctggtcacaaagtaagtgctatagagtggatggcagggagttcatgtagactcgcctgagatagggttctcaaattcattggaatcacctagggagctttaaaaatatccccgtggctgggccacaaccgcagactaattgaagcaggatgtctgggctgggagaggcaggcagcagactctttaaacacccacgtgattccaagacacagacatgtttgggaacagtggcgtggcaggtctgtggtggctggtgagggcggggtgggggaccaggaaatatgcatcccaatagctgatagaagccaagtttctaaaattcaagtaagctgttgtttcacacgacgcaatggccgagtgagggcaaagacaattttctgttgcctaaatatagaatggagcttgcaggggcaagacacgtaactctattgattttgcctggcctgaacacgtcaccagctgagagggctcatgaggcatggttttgtggtctgtgtagtcgggcgggtcttccacacacagacacggggtgcggcaagtgtcgccaagagtcctccttaggtttgcttggttcagggaatcccaggtgggacaagccaccccttctgaacgtatctccccatctcatcaaaccatggaatgcaaaatcacttttataagaaatgctcagtttgttaatagctttctaggagttttcttccccctctgacttttctcatggtttcgtaattcattcattgtgtcatgaggtgaattgcgtccctcaaaattcctgtgttgaagtcttaacgtcctgtacttcagaatgtgaatacctttcaagaggtaattaagttaaaatgaggtcattggggtggaccctgataccgtatgcctggtgtcctcatcagaagaggagatgaggacacagacacgcacagagggaagaccgggcaaggacacagggagaagatgctgtccacaagccaaggagagaggcctcaggagaaaccaaccctgcccacacctgggtctcagatatctatcttccagaatggtgaga

SEQ ID NO: 694276 - DNA, 1116 bp, Homo sapiens
agttgcatctataaaccccaaactattcaacatttttttttttcattcaaaatctttgttctatgtcatcaaggtttttcttcctgcctgatttgtttgtgctcttctcctatcccagaatgccctccctctttttatctgaagtccaatcatccttctaggctcagcttcctggattactctgatccgtgtgggtctctcccttctaggaaactcktatgacctcaagtcgatagagaaaccgtatgttccttttatttccccaggtcagaggataagctccttagatttgcctgtgtgtaattcctttgaatcctccctaacacccaggaccggactgggtacacagaccatggtgtgacccagggtcccctctactttcctccagccggtcggaacaggcgatgcagctcccactaccagccacgagaggtcgctcatccacacacatcttgccctgcccaggttccgtgctgcacgtagattactcgagcctctggaagtagggcaggctaatttatctcctctccaacacagcctcgggccatcagagcctctgatgtcagggtccctgccgtgcaagctgcagaatgaaaacactgcaaataagaaaggtcactgcatccgctctgcacatttacttctcacctgaaatctctgcctcgctagcaacatgccagctcaggctcggaagattttcccaactcagtattccagcaggagggagaagaaatctgtgactactgcatgtattatgggtgtgcttttacagattattgcatcaagtccatggtccagcaatgtgccaagaaagggttccatgctctttcttctgctccgatccccagggagtttctgaccagagcactgatactccgactctgttctgcttttgctactgctgttctccactaataacaacactgaccttttaaaacaggccttctcgaatgagccagccttaaagtagaggtagtggccaggtgttatttcagagatttgatgaatccaaagcagcaacatgaagggagcacactaattccaaaaatgggatagatgccacaggaaggtgggagagcaaaaaatgtaggtacctaaggtaataccaaccacgca

SEQ ID NO: 694277 - DNA, 616 bp, Homo sapiens
agtgaaaccatctaggaaatgagagatgataatggcttgaaccaagctggacatggaggtgatagagtgaagcggatggattttagatcaactttcaagttaaaacacagaattgctgatagtctaacagtggaggttgaaggaaaggaagaaattaatggttattttgcaggttttatacrtgagtgggtggtggtggcatttactaagaagcaaagaaaatgaaagaagtagactgggctagggaaagaagggtttggttttgcacatgatacatttaatatgaatattagacatccaaatggaaatatcacataggcacttgtctatacaaatttgaagttcagagaggggctgggtctgaacatgcaaacctgagggtcatcagcaaatagggatctagagccaaatgcccgactgagattatttcagcaagaaggtgttctggatacattacgtagccatttacctgggatggggagtatgattgagctcgctgataaggaagtctcacaagagcttctactagagtcaatttcttactcctagctcagatgtgcagacccacactgaagatgagggagaaccagagaagaggattgtctctattttgttt

SEQ ID NO: 694278 - DNA, 1502 bp, Homo sapiens
ttgcttacatctctaaccaaggagcaatattactgactactaagtaatcttcacttttagtttttctccattcttgaaatggattcttttttttttttttttttttgaggcaggatcttcctctgtcacccaggttagataggagagcagtggcacaatctcagctcactgcaacctccgcctcctgggctcaggtgatcctcccacctcagcctcccaagtagctaggactactggygcacaccaccatgcctggctaatttttgcatttctttttgcagaaagagggttccaccatgttgtccaggctggtcttgaactcttgggctccagtgagcctcctactttggcctcccaaagggctaaaattacaggtgtgagccaccatgcccagacttaaaatggatattttaaactgggttgaaagacactagttcccccttaaatctaccctcaagcacttactaataactttaaaatgttaattgagtgaataaaagatgaatgaatgaatgtgtgaaataaaaatggaaaaatattcatggtataatgctaagtaaaaatgtagaatttaaaattatagctatgagttaatcattccacaaatgtatacatatatcagaacatcacaatgtatgcaataaatatatacaatgaaataagaaaataaaataaaattacagctataacattgctgacaatgtataaaagttaaatacacataagggcaaccttaaaacataacatggacaaatgaaaacattgattttgttatgcaatcagatcaaaaaatgtttcatgttataattaacattcttattgcaacaaaatgatattctaaaaatgaatgaatctgatcacacataaaactacatatggaggattatgagataagaaagctaataatataacaagagatgatcaaaagatttaaagtatgctttcaagatatcaacctcaatcgacctaaccgaaaattgtaaataaactgaaatccatcttaactgtcctctttggataagcagaccatcctatattttattttaataaaaacttttaataagaaaaagtaaaaataaaatattggcaaggttaaaaagaaaaaaacacactttcataaaactgtgtgatacagacctcaagagtaagcataaagtttaattgtcagggccaacagtaacggaagaggtgaagatgcgtctggtgtgacttctgcaacaagggtaataggagtgtcagattttcttttttaaaaaaacttttaagttcaggggtacatgtgcaggtttgttacataggtaaacttgtgtcatggggttttgttgtacagattatttcatcacccaggtattaagcctagtacccattagttattcttcctgaccctctccttcctcctatcctcctccctccaaaaggcaccagtgtgttgttcccctctatgtgaacatgtgttctcatcattcagctcccacttataagtgagaacatgtggtatttgg

SEQ ID NO: 694279 - DNA, 1590 bp, Homo sapiens
ggacatgacaaggaaatggtaacaggagtaagcagctgtcctgggctcctagctggagttcaaagtctagactgccacttgtcggggaggttatagaagggatttgatctccaaggtcctcaactgatactatgacattgaatctgggattagggagcccccacagtatgtactggagttgccagtcctctgcgtcagagaagtgataatacatctcaattttccagtgcttagcacaagcatggcttagtaaatattgaatgaatgaatcacaggtgataggagtgatggtaggaggttggcaccatccctaatgggctgtcctagagttccatctactttcttagagaagggctctcactccgtcacccaggctggtgcacagtggcaccatcatagctcactgcagccttgaactcctggtctcaagcagtcctcctgcctcagccttttaagtagctgggattagaggctcgaaccaccgttaccagctacattccatctacttcaagctttccctaatgtggtgggagtagaaggtgttagtagcagatgggtggcgtttgtgttctacttgaggaaataatgtactgggcggtagggctgactaaagaatcacgcatgaaaatagttgccaacctaagacgactgtcagagagtccatgcattatggacagagtrgctggatggggacgtggaagcacacagcatccacctctctgactgcctctttccactgacccaccagataagcagggtggctggaacagggctgctagcaccttcctggccactaggggagctctgccccctctaacaataaattctcacacctgggtcaagctcttcacttttagcgctaccctaggcaggagtgtcccaacccaatcaagagcggtgcctacccgaggcagcctcaagttgggatttttctgcttgctaatggcttcaatcagttttgtggccatagttctcttaggctcagacacttacaggcatattatttttagcaaagcttcttttgaaaatttgaatttggtcaaggactggatttgttgacataccctgagtagctatgaagaacagaatgtcctggtagccacaaggaactgtggtagctgctgtcccagcagcagcagaacgacactttgtgaggcttaggtgctggccagggaggtgaggataacaggagtatgacttctcaggcacaacttccccattggataactttagggtccgggtgcaaggaggaagggacctcaggtgcagactgccagtcttcccctctcccatttcaagctggatcaagctgggtgacagaattcaaccccactgtctctcctactgccctgggagaaaacttgtatctcccttgaagccaggcagaggttgtaggtagaatcatttttattggagcatgacctgtttggggcttataactctgcagcccctatgggtagctgggggtgggggaagatagtatcaaaaaacggtgaagagagctgatgaggctgtggggactggccggaagctgctggcagggtggagtgggctggggccccggcagattcagatcgaggtacagcagcg

SEQ ID NO: 694280 - DNA, 843 bp, Homo sapiens
tgaaaataggctttgatttccgcagccacactgtggtttatctcttttggtaaactttcagttaatagctccatttttacttccccagaaacttgtaacaaatccatatgttggggataaggtggagtgccatggtgtcttatacacatcctccatctttattagccaacygtgaacttagcaccagccctgggcatctcaggcgtgtcctctgtcaaaaggagacttcattcacctgggcattccttcagtctctggggcaggttttggctcctttctccatttgaaattatttgacttggtatccaattttaagtttaaagctttcttttcattgactctttcagaaaagccatcggatccctttgcgaaaggaaaaacttctagtggctcaactgagcatacttggtttcttcccaatagcacgtttatgagagtgtcttcctgagagcttcatgataaatactatcatcaaatagtagccaaggactaaggtccaattcaaactctacccttccaccaactggcccacatgagcatatgttcctggtacagcactaaccttagaacaatcatttatctaaccatttatctctctttccatttcctggccataagagtatgagaagtcatgctatatttttaggaaatgttacaaatatatttattagactaaggaagttcttgaataaagccatcacaacttatgttggatgaaaatgtaagagaacatgtcaaatatatcaagttcaatacacttttagttttgttttgtttcattctttttccagataaatgaaaatttagaaatttattacatcagagctacaattcaagggcctg

SEQ ID NO: 694281 - DNA, 1285 bp, Homo sapiens
cgctctgagacattggctacaacagggacacatcattgatggtaggaagatggtaaacccacttccagtgccctgatcttgtttctctgttgttctcttccatgtttaacgatgccagaagggagatgattttggcttacttagaagaaagacaggaaagaatgaagtcaggcaaacacacacacacacacacacacacacacgcacacgagttaggtagagcaagacagaagaagaaaaacagagaaacagaaaaatagcaagagaaaaggaaaggagaggtgaggggaaagggaaaagagagaaagaaatgagaaaggcatgagaggtgtagagcaacagagagggagagggagaacgtgagaaagggagtgagctggggagagccaagaagagaaggaggaggaggagcatatacttagagaggatacagagagagacccacacacacaaaggaaaagtgggagcttttgtgaggcaactcaggcctcgagaaaggctttgataatctcttctgaagaaaataaacccagctgttcattaaaaatcaaaaccaaaacaaaacaagacaaaaacctgtatacctctgacggtctctgagcattataaatgttgacatacacctactgtgtatggatttttagggacaggtattagcgagagtgaacaggggactgctatggcttcagcagctggcagttcccacatcttgagaacaccctcccccaacacctctcttgttacctctttattttggaaggctgatctgatgtccctcatcttatatctatcttccagttcctcagctgaaatcttagctggttgagggttggcctgtgacctcagcctctctgagtgtcacctctgccatttgaaagaatagtgatgttggcatyccacattgcatatgggaggagtcaatgaagcaccgagtatgcctagctcatggctttagacacagaacaattattgctcaatgaatgttgatttctttctccaacttgcctatctctccaccatctcctccttcttcatagacttctctctcatgtaaatgtgctgtaatagttagcacagttgtagaatcttaatgattttgaatcacagggggctaatgttccaaaagcttaatattaatcttaaagcatcttattttcaaagagatttgggctaaagggcagacagctttggagtctgcctccttccttatctaacaatttcccctctgtagcttcaaatggccctatgtttggtaatgattccctgtttatattttgtttattcc

SEQ ID NO: 694282 - DNA, 1110 bp, Homo sapiens
tataagaataagtgggccaggaatgaaggccaattacatctgtttaatgtaaccctgggttcatattwaaagtgacaggatatatccagagctgataatcaaattaatcagtctattggcacatatgaaaaaataactgggtgtcaacgtgattagatttaaaggtactgcaaaatgttttctctggccacaaagccctaccgtcatgcccttttagaagaaacaaattgctaaggtcttttattgcaacctaaccatttcacattacagtataggaagggtgggccctctgttatgaagtttcatagatgacggatttaatttctgattgtgataggtatttatggatacttatatggaacctagaaaccattttttccagagattaccagaatagaattggatatgtaaattatatgctgaagtaaatgggaacagatataggttcatgacacacaggaaaacaaagctgcattagtttttaggcttaaaagtgggacacttcttaacttagaaatggcttggtttaatttcttccagtgcgctctgtagcatctggtaagagtcatttagtaaccattcaaagtcatttcatccaagtctccagggcaattgatttatgataagagagaaagagccttcctttttatttcttcagacttaattgattaaatatgttaattactctgcttaaacttttcctgtgatactgtatgtttgttaaggtggatcattggggcaattgtaaaaaaaaaaaaaaaaaaaaaaagcttcctgctaaaccaggataatgaatattgacattcttggcttttacaaccaatggaaatcacatttccaagtccccgtttccatgaggcttgcttaataaataacttccccaaccatctgtgttatggagatggactctcaggaagtatgaagtgaataaaatgtaaaagctgcttatagaatcacatcagcatctgtacagggtgagcctgtgactgggagtcgggagataaaagcagacctgactctggagtcattaactggaaatctcttccccctgctgggtctgccccattaaagtcaagaacattaccacgttaaatgtggccggagtccctg

SEQ ID NO: 694283 - DNA, 1110 bp, Homo sapiens
tataagaataagtgggccaggaatgaaggccaattacatctgtttaatgtaaccctgggttcatatttaaagtgacaggatatatccagagctgataatcaaattaatcagtctattggcacatatgaaaaaataactgggtgtcaacgtgattagatttaaaggtactgcaaaatgttttctctggccacaaagccctaccgtcatgcccttttagaagaaacaaattgctaaggtcttttattgcaacctaaccatttcacattacagtataggaagggtgggccctctgttatgaagtttcatagatgacggatttaatttctgattgtgataggtatttatggatacttatatggaacctagaaaccattttttccagagattaccagaatagaattggatatgtaaattatatgctgaagtaaatgggaacagatataggttcatgacacacaggaaaacaaagctgcattagtttttaggcttaaaagtgggrcacttcttaacttagaaatggcttggtttaatttcttccagtgcgctctgtagcatctggtaagagtcatttagtaaccattcaaagtcatttcatccaagtctccagggcaattgatttatgataagagagaaagagccttcctttttatttcttcagacttaattgattaaatatgttaattactctgcttaaacttttcctgtgatactgtatgtttgttaaggtggatcattggggcaattgtaaaaaaaaaaaaaaaaaaaaaaagcttcctgctaaaccaggataatgaatattgacattcttggcttttacaaccaatggaaatcacatttccaagtccccgtttccatgaggcttgcttaataaataacttccccaaccatctgtgttatggagatggactctcaggaagtatgaagtgaataaaatgtaaaagctgcttatagaatcacatcagcatctgtacagggtgagcctgtgactgggagtcgggagataaaagcagacctgactctggagtcattaactggaaatctcttccccctgctgggtctgccccattaaagtcaagaacattaccacgttaaatgtggccggagtccctg

SEQ ID NO: 694284 - DNA, 2833 bp, Homo sapiens
tcctctttgcccctcttttccaagggagggtttagaagatgaattatactcaagagttagtgtttctccagaagatcagaccacaagttgtagaaagcacaccagaactttgcacttctrccctttatcttaattcctagcccatgcttaagccttttaggatctatctacatccacctcacataaccatctagaattctcccaaaatcttgtttcagtagcctgggaatcatggcagttatatctgcatttgtgtgtttcctggccatatagtaaaaatggcaaaagagatttatatggtcaaatccctagcctttccattcctttgctttataaatgaataacagtgatctaaaagcgaaagaatgtagctaaccagtgtcatttgggatcttctgaagtagtacggaaactccacattcttcagaccaacttgcggcatgccagcacattcctctccgatgaggtggaggaatactggtggctggcctgggacttgtaggactggggcggggagctgctgtttaaaaatacatttaattatattccttctctgcagtaacattgataccatttttagcccattacaaatactgtgattttcatttaaatcacgtccattatcttattgacctagtttttattttgtaatcaaaatgttctatttctggatagcctcacccagaatctttttttttttaaaggttacagaccctttgtgcagttttttcctttcgtatctgcgtacagatgggctgcatctgtgttcacacagcagaaaatggtactatattgttccctttaagagtgtgggttttctctacttaatctcggactcttcatggagacacagctggcaagatgccacgagacctcgcatttggtaactgttttggtgaatggatattgggagagttaagtaatcctatttctattcgaaatgagaatcctgattctcttcttccatttttgctctttctctgttcgtctgctagttccctctgtgagccttctctttcctccccgcctctccagccgtccactatgaacctcacgtagccctgtcttcattcatgccctctcgggtgctccctgctgcttgtaagatcccacttatttctggcctttgctttttctacatttctttctctcctgtttccttctttccctcttaccttctcttccttgctgtcagccatgtatttctgcactctggttggaagctcaccctgcaaagaacaccccggaggtgtttccagggctcagctgtttttcactcatgtctaggcagggccttgaggcccctgaggaactttcaactttgccctcaagacttcctcttaatattattattattattattattattattattattattattattattattatttgaggcagagtctcgccctgtcacccagggtggagtgcagtggcgtgatgatctctgctcactgcaacctccatctcccgggttcaagcaattcttctgcctcagcctcctgagtagctgggattacaggtgtgcgccctgacgcccagataatttttgtatttttagtagagacaggatttcacgatgttggccaggctggtcttgaactcctgacctcaagtgatccacccaccttgacctcccaaagtgctgggactacacacatgagccaccgtgcctagcctctcaatattgtttttcactgtccttcttgacacatgaaaataggctgtgcttctcttgaggcaataattggatcagaattttaggatttttgcatgaccagccattttattttgtaggcgaggaagcagaagacctgagaatgacttcccctaagattctgaggcaatggagtggcaggaccaagtcagccaccccatcttccccttcccactatgtggttctcctcttactgccctctgtcttagccggggaatcttacagatgttgcatctggtgcttcctggtgttcatttcttccaaccaccatttgcccttgcaaataccattcggtatgaaagtattttagagcaactgagtcttcagtgtgtcactttattgccaaaagaagacacaaacgatggagtacaatggtaggagtctccggctgggttctcagggattttctcaggaattatgttttgctccaagtcgtttcagttgacgtattcattcctcagaaccggtagatgactatgacatataatacccaagcttgagctctttcctgtctaactggagtctcccttttaatcaggaaaccacatttaaagctgtgtcctgaactctgcccagcatgtcagcttggccaggaaggacagggaattcctactggtagtagccactggggactgagggagtcacgggaggtcagatgggagcttagcaagaaagacagcagcagcacagggtacattcaggctgctaggattgtctttttgtttgcgaaactccctccctggttgaggtcaggaaaaacctaggatagcaaccccctgggccggtgaccccacactaggattttgtgatctaaccatttaaaaaaaattgtttttaattgaggaggtttaacatagtgtttagctttgatcttgagaagtaaggatattaaaaacagcaatgttgagattgtcatgtaatgttacagtcctttcatgaaagaacaggcacttcagaatcagaagtaggaagaataaaatctcagaatgaaggctagtcctctattctgtacacacgtagcttcaggaaaaacttgtactgtgttatccagatatttcctatttagccacaggtcagcaaaaattctatcacagaagcagtgttggtctgtga

SEQ ID NO: 694285 - DNA, 1225 bp, Homo sapiens
gacatgagacatggcttttagtaggaatatcccgcacaacactggatgcttcccttctctgcactagatcccccagcctggtccaagcatagcccagcttgccttagaaatataatttttgaaaaacagaaaacccagcttgtttgtgtatctcccagttgcaaacaactttcttgacacctggagcccaaagcaggctgaggtgtcctttcctgtgtgacagggacaggttgagttagaggcgcctgcaygtccactgcccaagcccagaatgggggctgtgctgtgcagggctgtggccccacaagcagctcacagaagcatctgtgctcccccgtgtgtttggctggaagccatgcttggtcacagcagccctgggaggccttcagctccctcctggtactaagcgggcacctttctctgggcctggatatttatgatgcttggcaggcagaggagagaagagatgtctgccatttcctgccagcttcctgggaggctctgtgccacagagacacagagaggcctcctgtgagcctttccaatagccctatccagtctacacttgctcttagccaaaaggccgagaagcgatagccctatccagtctagacacacttacccacccagagaagggctgtctgcacacctagagccaagacgtgcgccacctggcagtggtggggaaaagactgccatcctctgctgcttcagagagccttgtcctccagacctaaggttgttagatttttagtctctgcaaacacaatcttatcctgaaaccaaatatgaaatagatcagtgctctgcatggagcagagtggtgggcccgggaccacacccacctgaccttagcatcagggggagctgaaagccttccaagggcatcacagagcttcaccaaacagatggtgggaagacacagccccttctgtgacttcccccagagctctataaagagcctcatttgcgagccactgctctctgccttggccattcagatctcaggaacatcactgggccatccctggtacctctggcaggaggtgctgccagctcatctttacctcatagaggagactgggtcagcagccccctaatgagaaatgggagacaactcaaatgtccaccaaaggatgaacatggctcaaaaaaatgtggtgtatccaaacagtgaaagagcattcagcctttaaaaagcaaagaagtaccaacctatgcgatg

SEQ ID NO: 694286 - DNA, 541 bp, Homo sapiens
aaaaaaaaaaaaaaaaaaaaaaaaaaaaaaaaaaaaaaaaattagctgctttgccttgttaagaacagacaataatttaactggagattttaaagatgtttgatgcctatcaagaattcatttagcagaggtgagcactggtttacacctaccctcttttagccctagataattagtggaatcaagwttgaaatccagatcagctcatagaggtacaaagactagttaacaatggttgtccctggggaggggaccaattgctggagaataccttcctcatacctcccagagaagatctgactgaaaatgagctgcctcactcaccataaagccctctgttttaaaaatgttcagatgtcagccagataactgtatcctctacagcagcttcttgtaaacatgtgaggtatacggcagtgccgagtggagggaaccatggcagactgcaaacaagcatggttttcctagacactcagactcaaacacagttacagatggtgctgggccaacagccagttaagaccccaagattgcaaagaga

SEQ ID NO: 694287 - DNA, 541 bp, Homo sapiens
aaaaaaaaaaaaaaaaaaaaaaaaaaaaaaaaaaaaaaaaattagctgctttgccttgttaagaacagacaataatttaactggagattttaaagatgtttgatgcctatcaagaattcatttagcagaggtgagcactggtttacacctaccctcttttagccctagataattagtggaatcaagattgaaatccagatcagctcatagaggtacaaagactagttaacaatggttgtccctggggaggggaccaattgctggagaataccttcctcatacctcccagagaagatctgactgaaaatgagctgcctcactcaccataaagccctctgttttaaaaatgttcagatgtcagccagataactgtatcctctacagcagcttcttgtaaacatgtgaggtatacggcagtgccgagtggagggaaccatggcagactgcaaacaagcatggttttcctagacactcagactcaaacacagttacagatggtgctgggccaacagccarttaagaccccaagattgcaaagaga

SEQ ID NO: 694288 - DNA, 639 bp, Homo sapiens
atggtaaatgacagcagcagggataagtgttaaggctctactaaaatctgccatgtttgaaggccaggtgtagtggcccacacctgtagtccccgcactttgggaggccaaggtgggctgatcatctgaggtcaggagttcgggaccaacctgaccaacatggagaaaccccatctctactaaaaatacaaaattagccaggtgtggtggcacatgcctataatcccagctactcaggaggctgaggcaggagaatcgcttgaacccagaaggcagaggttgtagtcagccaagatactgccattgcactccagcctgagcaacaagaggaaaactctgtctcaaaaaaaagaaaaaaaaatctgccatgttcaaatcaggaataagtaacagttaaagttcaaaaaactgtagtcttcttttttctttgttgtagaggcctctttttccaacaactcacaatgttcagttctctttctatttggtctaaagcgccatgatagatatcagctaacaacactgagaactagaagttcctctataactttgcacaatacccaaaaaattgwttataagaccaggttatcctttcttatttttatccagtctcataggatgatggcatttttcaaattagca

SEQ ID NO: 694289 - DNA, 644 bp, Homo sapiens
gaaattgacaggttggcaaactcaccaagtggtatacagcttttcacatgtcaatcatacctcaataaagtggtttaaaaagaagacaarttgattccaaaatttgcacgacaatgcagatgatctaaatatttaaagtgtgctgtctgggcagtgcggtggctcacgtctgtaatcccagcactttgggaggccgaggtgggtggatcacaaggtcaggagatgagaccatcctggccaacgtggtgaaaccccatctctactaaaaatacaaaaattagctggtcatggtggcacgtgcctgtaatcccagctactcaggatcctgaggcaggagaatcgcttgaacctgggaggtggaggttgcaatgagccaagatcacaccactgcactccagcctggcgacagagcaagactccgtctcaaaaaatatatgtatattaaaaataaaaaataaagtagtgctttcctatggaattttctgtgttaatgaaaatattctttagctgtaccattcagtatgatagctagccaaatgtgacttaaaaagtggctagagcaacaagaactgtttaggaacttttagtttaatttaaatgtaaatactctcatgtggctagtggctattgtgttgaacagtgca

SEQ ID NO: 694290 - DNA, 629 bp, Homo sapiens
gatgatttttatttgttttagggtatgtctctgtgccagactgtcrtcgtgggctctgtagtcattcttctgtactcttccagagcttgttataatttggtggtggtcaccatatctcaggatacattagaaagtccatttaattatggctgggataatctttcagataaggtaaatacctaccacgtattgccagtctaacaatgtgataattaacttaccctcatctagaagaacactgtagtgtttgacttacaaacacatttatggaatctctgtctactgtcagtaatcatacttaaagctttgtgtttaaaaatctttatgtacgtgtgacatttgaaatcattcttcacagagaacttctctcaaaggagtattttctctctcttttttggtaaataataatagtgccacaagcctctcggtcatatgctaattttacttatttttgttaatgatgatgtttaaatatttctagataaatgaattccctattattagccagtgaatatggtctttgttaggaggaaagtaactctcccctacccaagaactacatatactcttaatatttggttcaggttaacatgtttaaataatggctttcataaaaatctggctttgtc

SEQ ID NO: 694291 - DNA, 923 bp, Homo sapiens
attagctgggcatggtggcacatgkctgtagtcccagctgctcaggaggctgaggccggagaatcgcttgaaccggggaggcagagattgcagtgagccaagatcacaccactgcactccagcctgggtgacagagcgagactccatctcaaaaaaaaaaaaatgtcctgccccttcctgaaatatggagtaggagatattcttaactacaaccacaggtagcagggctgctaagggagtataagggtggcaggagtttcaatggatgaagacagctcagtaaaggaaagacaagaagattctcggaaatccatgccatctgacaactcagataagcctgccaacctgatccctgggagagagtctggcaaagatggtggcaggaccagttctagaaaccagagaacaaagcatgttactagaatagaatctcaggctcatgcctgtaatcagcactttgggaggccaaggttggtaggtctcttgagcctgggagtcccagatcagcctgagcaacatggtaaaaccctgtctcaactaaaactacaaaaaaaaattagccaggcatggtggcatacgcctgcagtccccgctgcttaggaggctgaggtgggaggatggcttgagcctgggaagtcgaagctgtggtgagctgagattgcaccactgcactccagcctgggcaatgggagtgagaccctgtctcaaaaaacaaaaaagaatagagcctcaggaaagggctaaggtaaaatacagttaatagacacagaacaggatccgggaaacaaagcaaaatcctattacctcaactaagaccaaagacaggtggcaacctggaacagggaggactggatgttgtttcaggatgtgctaaggctgcctaaataactactacatggaacaatgcgggtaagggggaaaat

SEQ ID NO: 694292 - DNA, 923 bp, Homo sapiens
attagctgggcatggtggcacatgtctgtagtcccagctgctcaggaggctgaggccggagaatcgcttgaaccggggaggcagagattgcagtgagccaagatcacaccactgcactccagcctgggtgacagagcgagactccatctcaaaaaaaaaaaaatgtcctgccccttcctgaaatatggagtaggagatattcttaactacaaccacaggtagcagggctgctaagggagtataagggtggcaggagtttcaatggatgaaracagctcagtaaaggaaagacaagaagattctcggaaatccatgccatctgacaactcagataagcctgccaacctgatccctgggagagagtctggcaaagatggtggcaggaccagttctagaaaccagagaacaaagcatgttactagaatagaatctcaggctcatgcctgtaatcagcactttgggaggccaaggttggtaggtctcttgagcctgggagtcccagatcagcctgagcaacatggtaaaaccctgtctcaactaaaactacaaaaaaaaattagccaggcatggtggcatacgcctgcagtccccgctgcttaggaggctgaggtgggaggatggcttgagcctgggaagtcgaagctgtggtgagctgagattgcaccactgcactccagcctgggcaatgggagtgagaccctgtctcaaaaaacaaaaaagaatagagcctcaggaaagggctaaggtaaaatacagttaatagacacagaacaggatccgggaaacaaagcaaaatcctattacctcaactaagaccaaagacaggtggcaacctggaacagggaggactggatgttgtttcaggatgtgctaaggctgcctaaataactactacatggaacaatgcgggtaagggggaaaat

SEQ ID NO: 694293 - DNA, 985 bp, Homo sapiens
atacccagctaacttttgtatttttagtagacatgtggtttcaccatgttggccaggctggtctcgaactcctgaccttaagtgatctgcctgcctctgcctcccaaagtgctgggattacaggtgtgagccacttcaccaagcctaagaaggtagtttctaggtgaaactggcagctttccgacatcttgcatgcacattaaaagttgaaatagttcaaatgacttaaactcatgtattttactgcaaaccctagagctctgcctatcactgccaagtagacatgtagtaaaagtcaacaacccatctgagatcctgatggacctgagaagctctaattctagtatctacaacatgtcacatgtacatattaatacaatctccctcctaacctgaaagcttttttttttttttttctttttctttttttttttttttttgagatagattctcactctgtcgccaggctggagtgcagtggcgcaatcttggctcactgcaaatccagctcctgggttcaagtgattctcctgcctcagcctcctgagcagctgggactacaggcgcgtgccactacgcccagctaagttgtttgcatttttagtagagacagggtttcaccatgttagccaggatggtctcaacctcctgacctcgtgattcgcctgccwtggactcccaaagtgctgagattacaggcgtgagccaccgcacctggccaaaagctctttttcatattcctatatacaggccccagttatcctttttagggccagacccaggtcatgttctccctgtcttaagtcgtcttcctggtttcctcctaacccagttccagtctctcaatgatttcaattcagtaaacttactctgtgacaagctgagcttgacatttgggatacaaagatgtataaggtccagttcctacacttggagagacatccatggaacttagtatgtactttttaaaaaatatttaattgac

SEQ ID NO: 694294 - DNA, 1203 bp, Homo sapiens
accaactcaatctgatctggatcttttgaggaacatatggaatgcccctcagaattttctactctcagatcaatacaaataagcatttattttcagctctcatactccattagttgaaggttgccccagtgggacatcaaggtccttatgtttctgagatgcacatttatgcttcctgagccagttcccaccagagaactaagccttggaggagtcaaaagcctgggacggaaagtaaacaatgtgcagcaatatgtgcttaaaaccaggtgccatcaccttgaagtgagctgaagcccaaacagaactgtttgtcacagcccacagccacagcttgactccagagtaaggcagatagaaggatgaggttgcgcaccacaggtgtcaaatacagtacccatcacataggtgtgctgtgaaaattaagtaagataggcaaaatcttggaagaggcctgacacataaagctaaataaatgatagctattatcattagattagacactgaacttagactatggtaatggcaatgatgagcaagaaacaaataaaggaggtattaatatttcagagttataactgacacaactaggagagtaagttggtgggtggggagaatgtgaragagaggaagaagtctggatgtttctaactagagtcctggcagaatagtgaatggcatgccactaaataaaacatggggccaggtgaggtggctcacgcctgtaatcccaacactttgggaggctgaggcgggcagatcacttgaggtcgagagtttgagaccagcctagaaccaatatggagaaaccccatctttactaaaaatacaaaaattagtgggtgtggtggcgcatgcctgtaatcccagctacttgggaggctgaggccggagaatcgcttgaacccgagaggtggaggttccagtgagccgagatcatgccactgcactccagcctgggcaacaagagcgaaagtccgcctcttaaattaaattaaattgaattaaattaaaaaataaaacatggaaagctggaagaaaaagtattattaacctcagagtctaaggtgcctgtggactatccaaatgttttgtgtttagtgggctgctagaagtgataagaaactcaagaaagggtcttgaaaacctgaaagagatgtaggctgaaaatagggcctggatactagttcaagcaatgataac

SEQ ID NO: 694295 - DNA, 1359 bp, Homo sapiens
taacaagatttattctataatatgcctataagtattattgctacagcattttgtatacatggtaaaatttaattctgaattgtaataccaccacttggacttgttctagtgtctaggagtttccctaacctttaagctaagaatcatagttcttgatccctaattaatctgggtgtaaaactttttcaaagggaatgattaagaactaaattttatatttttgttattcaaatcctatatggataaaacttcacattgctacatagtgtattgttagaatagaaagtcaggtggtccagtctaaaaatatatttgaatggcagttcctgtcatcattaatatgaggagctttagtgaggtgatcataaatgctcctgtctgcatttrtgtcttggttctccaagttcttccacacaaactgcaaagcaaaaatatttcttgtgtctcagagttatcatgtccaaaattaacctggatctatactgggacatagttgtgtagtacaacagttcatttactttcttttatatatactaatggggggaaatcttaactctgatgtcttgtttttaggatcttcctgactctggacttttttcaacttaacagctgaatctatgtccttctccagatatggggtctattctacttgcaggcaggggacatagccttcatgtgtccacccttatttctgacctaagaattgcattcccatatcctgctatggaagtttatttttaacttgttctacctttgctggaatctatttgttagtttcctctctttttaggattgggacaacatcttgttcttgtcagtctctcacacctggacagcttccaaacacctatgactaaggccctccttcctaatgtggactgctttcatgggtatctaaatattatcagttcctagatgctgtgttgccatagcccagtcgcctgcctggcaggacatcctgggtgcatatactggatttcctttaggccaaatacatgcctgcatttgcacctgtctaaggatgataacaggagcaataacaacagttattataatttctacccaaattctaattcatcaacatattttgtacattacactacatcaatagttttcattctttgctttagttttaggtaacataatatatgaaaacatatattttctcacatttccactgatttttttttatttaacaaataattccagagcacttttattttgccaggtcatatcctaggaattatagacattgatttctatccttaaggagtctaaatactacttggagaacagaatatagtgaaataaaatggtgctaaaagcatacaagaattccctaattaaggaaaaaagaaa

SEQ ID NO: 694296 - DNA, 1359 bp, Homo sapiens
taacaagatttattctataatatgcctataagtattattgctacagcattttgtatacatggtaaaatttaattctgaattgtaataccaccacttggacttgttctagtgtctaggagtttccctaacctttaagctaagaatcatagttcttgatccctaattaatctgggtgtaaaactttttcaaagggaatgattaagaactaaattttatatttttgttattcaaatcctatatggataaaacttcacattgctacatagtgtattgttagaatagaaagtcaggtggtccagtctaaaaatatatttgaatggcagttcctgtcatcattaatatgaggagctttagtgaggtgatcataaatgctcctgtctgcatttatgtcttggttctccaagttcttccacacaaactgcaaagcaaaaatatttcttgtgtctcagagttatcatgtccaaaattaacctggatctatactgggacatagttgtgtagtacaacagttcatttacttwcttttatatatactaatggggggaaatcttaactctgatgtcttgtttttaggatcttcctgactctggacttttttcaacttaacagctgaatctatgtccttctccagatatggggtctattctacttgcaggcaggggacatagccttcatgtgtccacccttatttctgacctaagaattgcattcccatatcctgctatggaagtttatttttaacttgttctacctttgctggaatctatttgttagtttcctctctttttaggattgggacaacatcttgttcttgtcagtctctcacacctggacagcttccaaacacctatgactaaggccctccttcctaatgtggactgctttcatgggtatctaaatattatcagttcctagatgctgtgttgccatagcccagtcgcctgcctggcaggacatcctgggtgcatatactggatttcctttaggccaaatacatgcctgcatttgcacctgtctaaggatgataacaggagcaataacaacagttattataatttctacccaaattctaattcatcaacatattttgtacattacactacatcaatagttttcattctttgctttagttttaggtaacataatatatgaaaacatatattttctcacatttccactgatttttttttatttaacaaataattccagagcacttttattttgccaggtcatatcctaggaattatagacattgatttctatccttaaggagtctaaatactacttggagaacagaatatagtgaaataaaatggtgctaaaagcatacaagaattccctaattaaggaaaaaagaaa

SEQ ID NO: 694297 - DNA, 1359 bp, Homo sapiens
taacaagatttattctataatatgcctataagtattattgctacagcattttgtatacatggtaaaatttaattctgaattgtaataccaccacttggacttgttctagtgtctaggagtttccctaacctttaagctaagaatcatagttcttgatccctaattaatctgggtgtaaaactttttcaaagggaatgattaagaactaaattttatatttttgttattcaaatcctatatggataaaacttcacattgctacatagtgtattgttagaatagaaagtcaggtggtccagtctaaaaatatatttgaatggcagttcctgtcatcattaatatgaggagctttagtgaggtgatcataaatgctcctgtctgcatttatgtcttggttctccaagttcttccacacaaactgcaaagcaaaaatatttcttgtgtctcagagttatcatgtccaaaattaacctggatctatactgggacatagttgtgtagtacaacagttcatttactttcttttatatatactaatggggggaaatcttaactctgatgtcttgtttttaggatcttcctgactctggacttttttcaacttaacagctgaatctatgtccttctccagatatggggtctattctacttgcaggcaggggacatagccttcatgtgtccacccttatttctgacctaagaattgcattcccatatcctgctatggaagtttatttttaacttgttctacctttgctggaatctatttgttagtttcctctctttttaggattgggacaacatcttgttcttgtcagtctctcacacctggacagcttccaaacacctatgactaaggccctccttcctaatgtggactgctttcatgggtatctaaatattatcagttcctagatgctgtgttgccatagcccagtcgcctgcctggcaggacatcctgggtgcatatactggatttcctttaggccaaatacatgcctgcatttgcacctgtctaaggatgataacaggagcaataacaacagttattataatttctacccaaattctaattcatcaacatattttgtacattacactacatcaatagttttcattctttgctttagttttaggtaacataatatatgaaaacatatattttctcacatttccactgatttttttttatttaacaaataattccagagcacttttattttgccaggtcatatcytaggaattatagacattgatttctatccttaaggagtctaaatactacttggagaacagaatatagtgaaataaaatggtgctaaaagcatacaagaattccctaattaaggaaaaaagaaa

SEQ ID NO: 694298 - DNA, 580 bp, Homo sapiens
ctgtgtgtgtgcctgtgtgcgtgtgtgtttgtgtgggtctgtgtgttaaactttttttatctttttcagggactcaaatattttgcaaattttaaataataaatctatgaaaattaatttaaccctagactcaaagaaattatccattactattcaactttatctaatatataattaattttgcacattgtttctaaatagttgcaggtttggattatgatttcctgaaaatgcttcctttgatatttgcttggatgagaaagtgagaactcactcactgtatgtttgctaaacagacctatgtagttaaagagaagctgtccaaaaagattctctatttcagcccaatggagcatattcaytatcagatcaaagtgataggattttttttatcttctcctaattgggggtaggcaatttccttactcactttggcaaatcgaaggaatgtcttattgtagagaaagaggctgtgatccctaaatgtcaatgcaaaaaccttcatcacatcactcttgtcccatgtagcacagagaatccattccattaaggtgaattctggaagctggctgaatttcaa

SEQ ID NO: 694299 - DNA, 1100 bp, Homo sapiens
atagaatcaaaatataaatcaatagaatataactgagactccctgagtaaatcctcacataatggtccattgtttttcaacaagaatgccaaaacaattcagtagaggaaagaatgctgctagaatgactgggtatcctcaaggaaaagaatgaagttggaccctctatctcacatcatatataaaaattaacacaaaatgaattcaagacctaaatgtaagagccaaaactgtaaaactggattagaagagaatttagggatgcattttcatgaccttggtttaaggcaatagtttcttggatatgaaacaacaagcacaagcaagaaaagaaaaaacatagataaattgaacttcatcaaaattaaaaacttttgtgcttcaaaggacacaagaaaatgaagagctggcccacagaaggagagaaaatatttgaaaatgatatgtatgataagggtctcatacctagcatacataaagaacttttacaagtcaataatagaaagacaaagagctcagtttaatcatgagggggacatggatggtaggatgtaagtatatacaaggggaaactgacatgtctttaggaagttagatatctattaaaaggactagcataatacttgtatatcccttgtttggaaatgtgatattcttattgattcctttggtctacactgatcaccacttttcaatatattagaatattgcaaaaatcacaccactaacatgattcaaaacaaactcytatgtattgagtcgataatacattcaaagcattatattggaccttgcagaatttaaagaccttgcagacattaagatgaatacacacaccacacacacacacacacacacacacacacagattttttcttgaagtaatgtttagttcacagaatccattcctcaggccacccatatcaacactgcttgaaacttaacaagtacattctcaggacccaccccacccaccaaccagatctactgaattagaacctcgctctggtgaggtggggttgagggagtcccagcaatacacgtcccacatcttgttaagtcctccaggtgattctgatgcatgttaacatctgagaacc

SEQ ID NO: 694300 - DNA, 1100 bp, Homo sapiens
atagaatcaaaatataaatcaatagaatataactgagactccctgagtaaatcctcacataatggtccattgtttttcaacaagaatgccaaaacaattcagtagaggaaagaatgctgctagaatgactgggtatcctcaaggaaaagaatgaagttggaccctctatctcacatcatatataaaaattaacacaaaatgaattcaagacctaaatgtaagagccaaaactgtaaaactggattagaagagaatttagggatgcattttcatgaccttggtttaaggcaatagtttcttggatatgaaacaacaagcacaagcaagaaaagaaaaaacatagataaattgaacttcatcaaaattaaaaacttttgtgcttcaaaggacacaagaaaatgaagagctggcccacagaaggagagaaaatatttgaaaatgatatgtatgataagggtctcatacctagcatacataaagaacttttacaagtcaataatagaaagacaaagagctcagtttaatcatgagggggacatggatggtaggatgtaagtatatacaaggggaaactgacatgtctttaggaagttagatatctattaaaaggactagcataatacttgtatatcccttgtttggaaatgtgatattcttattgattcctttggtctacactgatcaccacttttcaatatattagaatattgcaaaaatcacaccactaacatgattcaaaacaaactcctatgtattgagtcgataatayattcaaagcattatattggaccttgcagaatttaaagaccttgcagacattaagatgaatacacacaccacacacacacacacacacacacacacacagattttttcttgaagtaatgtttagttcacagaatccattcctcaggccacccatatcaacactgcttgaaacttaacaagtacattctcaggacccaccccacccaccaaccagatctactgaattagaacctcgctctggtgaggtggggttgagggagtcccagcaatacacgtcccacatcttgttaagtcctccaggtgattctgatgcatgttaacatctgagaacc

SEQ ID NO: 694301 - DNA, 2607 bp, Homo sapiens
cgggttcaagcaattctcctgcctcagcctcccgagtagctaagattacaggcatgcaccactgcacccagctaattttgtacttttagtagagacagggtttctccatgttggtcaggctgtctcgaactcccaacctcaggtgatccgcccgcctcagcctcccaaagtgctgggattacaggcgcccggctgcttttttcataaattgcaaattcttgatttaaattctcgattttcatcttttgtgcataatttcttctatttttaatgtattcataatcagtacttcaacatccctcttgactaacttcagaatatgaggcatctctgggtctgcctctattgtccatttttccttctggttactttttcttcttctttgaaggtcacatttttttaaaattgtgtgatgactgtttggtgtaagagatccataaaggctatagatgatgctattttccaccagagagttttcctctttccccagcaattgggctggatcatggctggggtggaccttacgtaggttcagcccacctctggtttatatctggtctttgaacatggccctcctggatgtaaagtttctctatttcctcaattctatgaacgttagctcatcttgtcctttgttgattccacagcttttcaatgtctatagagtataattttggtaacttttccatttttttcctaattgttacagcaggaacccaggctgctgtgacctactgcattctatacagaggtgaaagttggacaagccattttgttgttgttcattgctgttttcccagtacctgggagaatatttagcacacagtggatgctcaaaaatattattggattgagtccaaatattggactttgaatagaaaactcagatttaagttttgattctagctctggggaccatggaactgttatttcacatctctgaggctcagtttcaccatctgtaatatggtggtaataatatctttctgcctatagagttgtgaaaagaataaaaagagagcttatatataatgtacttagcacatcggagatatcaagcaaattgaatacctaagatgttacttattctacttttcctactctgccatgcatttaagttatttgagtgtaatgatgactgtggtggtgaagacaaagggtgtgagacataattaaaagatagaattggagatgttgagataagggagaagcagaagctgagtataaagtccaactttctgcaccgtggcctcggagctggcattccctgggccagttatgggtgggtttcacacttttctattgcctagggttccttggcctaatgacagagttcatcaacactgtacaaatgcacgtgcaatggagtggtgtttccatttgtgtggtcacagtggggagtggggagagaaattctaagagataaaccccggcatctttttttaagatgacttgaaacccatctagtatgcagactgtgggggccaagtgctattagccactatcaggaattattcatcaagtctagtcatgtgagaggggcttggaagcccttgcagtttctaatcaccactggtgtgtgaaatagattttaattagcatacaggttgtaggagtctttgatcagtcctgccatttggatcatataactgacccaacagtttgagattctctaagccctagtaataaatagcagggagaagaagaggcttagaatgtaataatcatggctcagcctcgggtttgggatgataaagcttcttgctgaatatatgcaggccttcttgatcctgggcattaaacaacttttctctctctcttctctctctctctctctctctctctctctcctctctctctctatctcactgtatgtgtgtaaaataagtttggggaattattttctaaatatcaacatttagggggctgggggttatttgttaaatatcaacatttccaaaaaaatacaggtgtcttcaaatcaaccatttttgatagccagagatcacagtgtgctggcagtatgatgggttttcttagcaawctgaggtaatcacactaaccactttcatggcatttcccaggggaccagcgtttccggaggcatcaggcggaaggcagagatctaggatctgattgaaaaaaacacctgcaatcaaatgcattctcaaaccatttatctaggtacaggtgtgagcatagatttaggtgtaggcataggtataggtatatgtatagatatagatgtacctaaatctataatccttggagattctttgtcatctctgaatctctgccttctcatctctaaagtgggtttaataacagtctctccctgatggagttactgtaaggattaaatgagataccataatctaaaaatcctggcagagtatctttcctctttcatgtttttcatttttgttgttgttgttgttagattgtttgtttttgagatggagtcttgctatgttgcccaggctggagtgaagtggcgcgatctcagctcactgcaacctcccgtgttcaagccattctcctgcctcagcctcccaagtaactggtagccgggattacaggcatctgccatcacacctggctaatttt

SEQ ID NO: 694302 - DNA, 2607 bp, Homo sapiens
cgggttcaagcaattctcctgcctcagcctcccgagtagctaagattacaggcatgcaccactgcacccagctaattttgtacttttagtagagacagggtttctccatgttggtcaggctgtctcgaactcccaacctcaggtgatccgcccgcctcagcctcccaaagtgctgggattacaggcgcccggctgcttttttcataaattgcaaattcttgatttaaattctcgattttcatcttttgtgcataatttcttctatttttaatgtattcataatcagtacttcaacatccctcttgactaacttcagaatatgaggcatctctgggtctgcctctattgtccatttttccttctggttactttttcttcttctttgaaggtcacatttttttaaaattgtgtgatgactgtttggtgtaagagatccataaaggctatagatgatgctattttccaccagagagttttcctctttccccagcaattgggctggatcatggctggggtggaccttacgtaggttcagcccacctctggtttatatctggtctttgaacatggccctcctggatgtaaagtttctctatttcctcaattctatgaacgttagctcatcttgtcctttgttgattccacagcttttcaatgtctatagagtataattttggtaacttttccatttttttcctaattgttacagcaggaacccaggctgctgtgacctactgcattctatacagaggtgaaagttggacaagccattttgttgttgttcattgctgttttcccagtacctgggagaatatttagcacacagtggatgctcaaaaatattattggattgagtccaaatattggactttgaatagaaaactcagatttaagttttgattctagctctggggaccatggaactgttatttcacatctctgaggctcagtttcaccatctgtaatatggtggtaataatatctttctgcctatagagttgtgaaaagaataaaaagagagcttatatataatgtacttagcacatcggagatatcaagcaaattgaatacctaagatgttacttattctacttttcctactctgccatgcatttaagttatttgagtgtaatgatgactgtggtggtgaagacaaagggtgtgagacataattaaaagatagaattggagatgttgagataagggagaagcagaagctgagtataaagtccaactttctgcaccgtggcctcggagctggcattccctgggccagttatgggtgggtttcacacttttctattgcctagggttccttggcctaatgacagagttcatcaacactgtacaaatgcacgtgcaatggagtggtgtttccatttgtgtggtcacagtggggagtggggagagaaattctaagagataaaccccggcatctttttttaagatgacttgaaacccatctagtatgcagactgtgggggccaagtgctattagccactatcaggaattattcatcaagtctagtcatgtgagaggggcttggaagcccttgcagtttctaatcaccactggtgtgtgaaatagattttaattagcatacaggttgtaggagtctttgatcagtcctgccatttggatcatataactgacccaacagtttgagattctctaagccctagtaataaatagcagggagaagaagaggcttagaatgtaataatcatggctcagcctcgggtttgggatgataaagcttcttgctgaatatatgcaggccttcttgatcctgggcattaaacaacttttctctctctcttctctctctctctctctctctctctctctcctctctctctctatctcactgtatgtgtgtaaaataagtttggggaattattttctaaatatcaacatttagggggctgggggttatttgttaaatatcaacatttccaaaaaaatacaggtgtcttcaaatcaaccatttttgatagccagagatcacagtgtgctggcagtatgatgggttttcttagcaaactgaggtaatcacactaaccactttcatggcatttcccaggggaccagygtttccggaggcatcaggcggaaggcagagatctaggatctgattgaaaaaaacacctgcaatcaaatgcattctcaaaccatttatctaggtacaggtgtgagcatagatttaggtgtaggcataggtataggtatatgtatagatatagatgtacctaaatctataatccttggagattctttgtcatctctgaatctctgccttctcatctctaaagtgggtttaataacagtctctccctgatggagttactgtaaggattaaatgagataccataatctaaaaatcctggcagagtatctttcctctttcatgtttttcatttttgttgttgttgttgttagattgtttgtttttgagatggagtcttgctatgttgcccaggctggagtgaagtggcgcgatctcagctcactgcaacctcccgtgttcaagccattctcctgcctcagcctcccaagtaactggtagccgggattacaggcatctgccatcacacctggctaatttt

SEQ ID NO: 694303 - DNA, 2607 bp, Homo sapiens
cgggttcaagcaattctcctgcctcagcctcccgagtagctaagattacaggcatgcaccactgcacccagctaattttgtacttttagtagagacagggtttctccatgttggtcaggctgtctcgaactcccaacctcaggtgatccgcccgcctcagcctcccaaagtgctgggattacaggcgcccggctgcttttttcataaattgcaaattcttgatttaaattctcgattttcatcttttgtgcataatttcttctatttttaatgtattcataatcagtacttcaacatccctcttgactaacttcagaatatgaggcatctctgggtctgcctctattgtccatttttccttctggttactttttcttcttctttgaaggtcacatttttttaaaattgtgtgatgactgtttggtgtaagagatccataaaggctatagatgatgctattttccaccagagagttttcctctttccccagcaattgggctggatcatggctggggtggaccttacgtaggttcagcccacctctggtttatatctggtctttgaacatggccctcctggatgtaaagtttctctatttcctcaattctatgaacgttagctcatcttgtcctttgttgattccacagcttttcaatgtctatagagtataattttggtaacttttccatttttttcctaattgttacagcaggaacccaggctgctgtgacctactgcattctatacagaggtgaaagttggacaagccattttgttgttgttcattgctgttttcccagtacctgggagaatatttagcacacagtggatgctcaaaaatattattggattgagtccaaatattggactttgaatagaaaactcagatttaagttttgattctagctctggggaccatggaactgttatttcacatctctgaggctcagtttcaccatctgtaatatggtggtaataatatctttctgcctatagagttgtgaaaagaataaaaagagagcttatatataatgtacttagcacatcggagatatcaagcaaattgaatacctaagatgttacttattctacttttcctactctgccatgcatttaagttatttgagtgtaatgatgactgtggtggtgaagacaaagggtgtgagacataattaaaagatagaattggagatgttgagataagggagaagcagaagctgagtataaagtccaactttctgcaccgtggcctcggagctggcattccctgggccagttatgggtgggtttcacacttttctattgcctagggttccttggcctaatgacagagttcatcaacactgtacaaatgcacgtgcaatggagtggtgtttccatttgtgtggtcacagtggggagtggggagagaaattctaagagataaaccccggcatctttttttaagatgacttgaaacccatctagtatgcagactgtgggggccaagtgctattagccactatcaggaattattcatcaagtctagtcatgtgagaggggcttggaagcccttgcagtttctaatcaccactggtgtgtgaaatagattttaattagcatacaggttgtaggagtctttgatcagtcctgccatttggatcatataactgacccaacagtttgagattctctaagccctagtaataaatagcagggagaagaagaggcttagaatgtaataatcatggctcagcctcgggtttgggatgataaagcttcttgctgaatatatgcaggccttcttgatcctgggcattaaacaacttttctctctctctyctctctctctctctctctctctctctctcctctctctctctatctcactgtatgtgtgtaaaataagtttggggaattattttctaaatatcaacatttagggggctgggggttatttgttaaatatcaacatttccaaaaaaatacaggtgtcttcaaatcaaccatttttgatagccagagatcacagtgtgctggcagtatgatgggttttcttagcaaactgaggtaatcacactaaccactttcatggcatttcccaggggaccagcgtttccggaggcatcaggcggaaggcagagatctaggatctgattgaaaaaaacacctgcaatcaaatgcattctcaaaccatttatctaggtacaggtgtgagcatagatttaggtgtaggcataggtataggtatatgtatagatatagatgtacctaaatctataatccttggagattctttgtcatctctgaatctctgccttctcatctctaaagtgggtttaataacagtctctccctgatggagttactgtaaggattaaatgagataccataatctaaaaatcctggcagagtatctttcctctttcatgtttttcatttttgttgttgttgttgttagattgtttgtttttgagatggagtcttgctatgttgcccaggctggagtgaagtggcgcgatctcagctcactgcaacctcccgtgttcaagccattctcctgcctcagcctcccaagtaactggtagccgggattacaggcatctgccatcacacctggctaatttt

SEQ ID NO: 694304 - DNA, 1274 bp, Homo sapiens
tgctcttccggatttattcttcccgccaataggagcacttaccacgttccaagcatcgtcctaggcactgaggatacagcagtgaataaaactgagtgctgggtaggaagtcaataaccaagctagtaaataactgtatattgtcaagcactggtaagtacaagggagagcagagcaagcaatgggcctgatgaggcttgctttgtctcctctgcactcccacactgctttgtatctgcttctcatttctcacgatgggtccaagctttgggcaccaggtctccctggacattccgcgctggcactgcgcctagcacccagcggctgctcaggaaacgtttgtcgaacgaacgaattcacttcttagttccccattcaacaaacctttcctgatcctaggcccaacaggttaaaaggctggagggccaacgaggctggaaactcagaggcggccgggggcggtggctcacgcctgtaatcccagcactttaagaggccgaggcaggaggatcccttgaagccaggagttcgagaccagcctgggcaaaaaagtgagacatcgaccccccgcccccgccgccaattccgtctctacaaaaaggaagaaaaaaaaaaaaaacccagaggaaatcacacaggcaaaagcgctttacaaattttaaaaatgaaaactgttctagagaaataatcgcgcgccggaggcggaagccccagagcctcagctcccacgtggcggcggagccagggaaagtccaggagccaaggctacggcccgagcgctggaaccccggtcaggctccggctccccgccacgacgaactgcatgcggccgcggcgctccggaggcgcccggggacgctcacctaagctgggagaggcggatacccgcccggcctagccccgctacctcccaagagaccaacacgacaagcgcgcgcccaccgcattgccatggcaattcaaccgccgctgacaccggaaccggaaacttcatcaggaggtgaccccttcccggcgttccgcggaacgggcgagtcccgcgcctctcccagttgtctcggcgtagtccagctggcctcattggctcacaggaggaaagtcgtcttccctcttgttttgcctctcgttgccctgcaagcgtgaccctgatggacatccagtctctccaattaactaacaaagcrgttgccgacgaccaatagtaaggcagtaggatgaggctccggcataaggcccacctcctacctgccgggcgggacgagcaacatgattgg

SEQ ID NO: 694305 - DNA, 2056 bp, Homo sapiens
ccagcaggcttgtgaatgagtataagcacaggtaaaatagtaattgggtttatttagttttgccacacaggtgtgacatgaaaagacaggatgaaaggcattttggattttggcaatactgtgatcgaagtggtccatgaaatctcagccaagtaaggacagggcttaaagaacagggctgctggagaaagtggagatgtcagtggattgcagtcctcacgaggtggggtatttaaagcaagcagtgtggaaataaaagaggtcacgaataagaaatgttgaagaaagagcagcctgtgataatgaattggtgtaagatgtgatagtgggaatggggatttagaatggaaaaggaggtggagatactgaaagtcagccagtgtattagtctgtttgcacactgctgataaaaacatacctgagcctgggtaatttataaagaaaaagaggtttaatggactcacagttccacgtggctggggaagcctcacaatcatatcggaaagcaaaagacacgtgttacatggcggcagacaagagagaatgagaaccaagcgaaaagagaaaccccttataaaatcatcacctctcgtgagacttattcattaccacaagaacggtatgggggagaccacccccatgattcaattatctcccaccagatccctccacaacacgtgggaattatgggcgctacaattcaagatgagatttgagtggggacacagccaaaccatatcacccaggatggaggcaaagcttggggtggggaagagacagttcctaggagaggactgtataactacatgcatgggctcaaaggagctctgtgtgtgtgtgtgtgtgtgtgtgtgtgtgtgtgtgtgtgtgtgtgtgttttaaatcaagaatatggaggaatatgtccccaaactggcagttgggggagaagagtgaaacagtgaggcagtcagctttatttcttcctgtgttgctctttgtaattgtatcccactagggattgactttgtaaaataaatcattcagatattaaataatcatttttctagacatttgttcatattaattcagaagtttcatgttcacatctctctccatatcaactcagaataatgtaaggtggataatctctaacctcagcctagtattaaacagtagctgtagtatacataattgcaaatttaaaatatgaaaactttagtgaaaatgctcatggacagttttccagtaaatgtatagaaaataagatattgttagtatggaaataaattattgccaaagtgttaaattataaagtgttactggattagaaacctagatttgaattagtggatttrgacagagcacgaccctgcctcaataataaaataaaataaaataaaataaaataaaaagtaagttcatgttttacagagttcgtatagtgtggttgaaaagctgtcattaaatggagattcatgtctacaatgcttgaaataattctcttaattgtgcacactcaaaaaatactatcatacatgtgatcataatgtattctttgccaggtatctcacatgtacatttatttttttgaatatttaaaggtcagtcagtggattttaaagttgtacttgtttattgttctattgcaataaaaatcctgacaatgactagaagttagctacagaaatagtttggagattaagttgctgtttcatggaataggaaaatattttgttgtttatagcactagttttattcataggattaaagaagatgtttattcaggccacttggtagaagaccttattaattgtgattaaagagccaaagaatacatgtgtgtatagaatgatacctaggggatactcactctttattctaccaccatatgaagaagttaataaagcgaaatgcttttcatgatttcatttctcttttaccctgtgttgcgaacttcttcccagttgtgaaagtttgaggcactggttgaaagacagtttgcagcaatccatgtgccttcaatgctgctactgtatcaacagaaggccaacctaggatcaagtataactgtaca

SEQ ID NO: 694306 - DNA, 893 bp, Homo sapiens
tgtgctgactgctgtggtcactgtgttaggtgctttgtgaacgaacattttctckcttattcttgtgcctgtaacaaacataccatcttcttcccttttcagttctttgcaattgctatttcctctcctagaagccattttttaagtcctcaagaagggctcccttttctgctaacaagcacgtatagtttacaaaccattcttcttaggtgaacgctgttagattggttaccccctctcctctcagtggtgggtagggtgtcagggacaggaattagctgaagcctggctgagattctttgacttcctttctcttcctgtttgcctgtctgtctaactgcacccccagtacatcgaatcctgtcactggatgtcccaacttagtttactaatttttattataattgctttatttctacctcattataactcatagtgtcatctagactgtacctctcctaggagatgtgggattgaatttcttgactagctttcttcttgaggtcaggctaacccatcatttttaacagattgttttgctcttcataacttatcagtaaatcaggcctttataaactgatgtgtgtgtgtgtgtatatatatatatgtgtgtgtgtgtgtgtatgtgtatatatatatgtataggtatatatatacatatatacatacatatatacgtgtatatatatatacatatatacacatatgtatacatacatatacatatatacctatacatatatacatatatatacatatatatacacatatatacacatatatatacttaatagtaaaaattccatgtatttctacagatttaaagttaaaacagtatatccaagtgttcatgttgtaatatacagtaaattcttaccttttaaagtgttacc

SEQ ID NO: 694307 - DNA, 893 bp, Homo sapiens
tgtgctgactgctgtggtcactgtgttaggtgctttgtgaacgaacattttctcgcttattcttgtgcctgtaacaaacataccatcttcttcccttttcagttctttgcaattgctatttcctctcctagaagccattttttaagtcctcaagaagggctcccttttctgctaacaagcacgtatagtttacaaaccattcttcttaggtgaacgytgttagattggttaccccctctcctctcagtggtgggtagggtgtcagggacaggaattagctgaagcctggctgagattctttgacttcctttctcttcctgtttgcctgtctgtctaactgcacccccagtacatcgaatcctgtcactggatgtcccaacttagtttactaatttttattataattgctttatttctacctcattataactcatagtgtcatctagactgtacctctcctaggagatgtgggattgaatttcttgactagctttcttcttgaggtcaggctaacccatcatttttaacagattgttttgctcttcataacttatcagtaaatcaggcctttataaactgatgtgtgtgtgtgtgtatatatatatatgtgtgtgtgtgtgtgtatgtgtatatatatatgtataggtatatatatacatatatacatacatatatacgtgtatatatatatacatatatacacatatgtatacatacatatacatatatacctatacatatatacatatatatacatatatatacacatatatacacatatatatacttaatagtaaaaattccatgtatttctacagatttaaagttaaaacagtatatccaagtgttcatgttgtaatatacagtaaattcttaccttttaaagtgttacc

SEQ ID NO: 694308 - DNA, 893 bp, Homo sapiens
tgtgctgactgctgtggtcactgtgttaggtgctttgtgaacgaacattttctcgcttattcttgtgcctgtaacaaacataccatcttcttcccttttcagttctttgcaattgctatttcctctcctagaagccattttttaagtcctcaagaagggctcccttttctgctaacaagcacgtatagtttacaaaccattcttcttaggtgaacgctgttagattggttaccccctctcctctcagtggtgggtagggtgtcagggacaggaattagctgaagcctggctgagattctttgacttcctttctcttcctgtttgcctgtctgtctaactgcacccccagtacatcgaatcctgtcactggatgtcccaacttagtttactaatttttattataattgctttatttctacctcattataactcatagtgtcatctagactgtacctctcctaggagatgtgggattgaatttcttgactagctttcttcttgaggtcaggctaacccatcatttttaacagattgttttgctcttcataacttatcagtaaatcaggcctttataaactgatgtgtgtgtgtgtgtatatatatatrtgtgtgtgtgtgtgtgtatgtgtatatatatatgtataggtatatatatacatatatacatacatatatacgtgtatatatatatacatatatacacatatgtatacatacatatacatatatacctatacatatatacatatatatacatatatatacacatatatacacatatatatacttaatagtaaaaattccatgtatttctacagatttaaagttaaaacagtatatccaagtgttcatgttgtaatatacagtaaattcttaccttttaaagtgttacc

SEQ ID NO: 694309 - DNA, 1199 bp, Homo sapiens
tcccccaaaaaagagtagacagaaaggaggacaaccaccttctcccagtctttgcagaatggctgtgttgggggacactgtggttgcttagccctgctgtttacaactctactstagcctcatttcctgcttgtgctgagccgaaagttcagctaaagggtcttttcagatcttttctgagcatgcttcctgccctgggcatatatgcatgactttctaaattcctaaccttagtataagtggacattgttgaatgcccaaatttccaaaagaaactttctcccagcttttcctctcaggctgttggtgtgtctgtttgcttcaactgaaatcttttgccccaggtggctgcagattatttgccttacaagttttttgagcaataccctctgaagagacacctctctgccctgttccaagttagggaaagcaaagaccaatgtcttgtgtcagtcctttaggtaacccgcaggctcaaaacaggcaaacgcaattctttcagaatttcttcctctggaagcagggactaaaggagtaggttcccagactgagaatgcaggctgctgtcttcaagactgccactggggaagggaaagagagagggcaagtcaaaatgctgcaaagcttttctactgtttcaagttgcttttttattcagtttgctgagttgctataaatgtattttctggagttgtgacaaagctgatctgacagtttttgcttgattttttagtcatctgtggagggatgggccattggagttacctgcctcaccatttttactgatgtcccttaagaaaggcttttgctttgtttttagagacaaaacaaaaatgttttgtgctatgttgcttcgaactcctggcctcaagtgatcctcctacctcagcctcctaaatagctgggactataagtgtgtgccgctgcgcccagctcccaagaaagatttttgaaagttatattatgatacgttgctttaatgagtagcgttaaataaattatattaatgtttataaaaattatcaacaggatggaatccgacgtggtaggcccagagcagatactgtccgcgatttaataaatgaaggagagcattcatccagcagaatccgttgtaacatctgtaatagggtgtttccacgggagaaatcgctccaggctcacaaaaggactcatacaggtaagttgagcaaatttta

SEQ ID NO: 694310 - DNA, 620 bp, Homo sapiens
acttggcccacccgccagctgaccgtagccacatgagtgagtccaggaaaagccattatagaataactgctctgctgagttgaatcctaactgctgacagaattatgagctaacaaatgcttgttgttttaagccagggatgcaaaaacttactctgtaaagggccagatagtaaacattttaagctctgtgggccatgtggtctctatcacaactactcaactctgtcattgtagcacaaaggcagccacagacaacaagtaaataaatgagcaaggctgtgttccaataaaatgtcatttacaaaaacaggcagcaaaaataaataaggaaacaaataggcarcatccggacctgatccataggcaacagtttgctgacacttgttttaagccagtaaggtctgggagtgtttgttatatatcaaaacctaactgatactttgatcaagatgagcttattaaaattctgtcattagaagttgcattataagtgaaatcagcattacagtaatctagtttatgtcccgcaaaaatataaagctttcatcactgaatagaataagaaatgcttgcatttctccaaatttattttcaatgcaagtgatcatgtaaaacttt

SEQ ID NO: 694311 - DNA, 1416 bp, Homo sapiens
tggctacattacaaaataaaatgtaaaattcatgtgaatatttgagaggaaatcataaaatttcacaaaagagcaacttgtgtggctgccttggaagcttggaatggcagctagttctgtctcattcatggcagtatccccaggtcccatcacagggctgtagacagaggacaccatgagaacatttgattttaaatgaaatgtcaactcatattttaattaattaattaattaattaatttttgagacaaggtcttgctctatagctcaggctggagtgcagtagcgcgatcatagctcactgcagcctcaacctcctgggctcaagtgatcctcccacatcagcttcctaagcagctgggactactggcacatgctgccacgcctggctaatttatttttattttttatttttagtagagacagggtcttgtcctgttgcccaggctggtctcaaactcctgggttcaagcaatcctctcaccttggcctcccaaagtgctgagattacaggcatgagccacggcatccagccttcaacttttatttcagatacattcagggagtacatgtgcaggtttgttatacgggagtattatgtgatgctgaggtttggagtatggatcctgtcaccctggtagtgagcatagtacccaataggtagtttttaacccaccctccccctcccccatagtaggccacagtgtctactgttcccatatttatgcccatgtgtgctcaacgcttagctcccacttataagtgagaacatgaggtatttggtcttccgttcctgggttaatttgtttaggattatagcaagaatagtgttttgaatggatgaatgaataattgaatgagccaatgggtagagttcatgtttgctccaagctcacctgcactttcctcttcccttagggcccttttttgggaaaatgtcagggaatattgtcccacagtgtttctgactcaggggcatttcctgagcccaggccttctagagggagtggctcagcccctgaggattggcgccagcctgggtgatggtcaagggctctcctgcccttctctaggctccactgtactccagcctgggcaacagagcaagaccctgtctcaaaaaacaaaaaacaaaaaacaaaaaaccagcatgacaataaacattctattgtaatttcccagatttcaaaggaatctttttactcattattttaaaagcctgcacaaaacttcatctattcagccagtctccctatgtttcgtttcktttcttttcttttcttttttgaggtagggtttcgttctgtcacccaggctggagtgcagtggcacaattatagttcactgtatcctcaaactcatggattcaagtgatcctccttccacttcctgagtgcacaccaccatgccagacta

SEQ ID NO: 694312 - DNA, 1416 bp, Homo sapiens
tggctacattacaaaataaaatgtaaaattcatgtgaatatttgagaggaaatcataaaatttcacaaaagagcaacttgtgtggctgccttggaagcttggaatggcagctagttctgtctcattcatggcagtatccccaggtcccatcacagggctgtagacagaggacaccatgagaacatttgattttaaatgaaatgtcaactcatattttaattaattaattaattaattaatttttgagacaaggtcttgctctatagctcaggctggagtgcagtagcgcgatcatagctcactgcagcctcaacctcctgggctcaagtgatcctcccacatcagcttcctaagcagctgggactactggcacatgctgccacgcctggctaatttatttttattttttatttttagtagagacagggtcttgtcctgttgcccaggctggtctcaaactcctgggttcaagcaatcctctcaccttggcctcccaaagtgctgagattacaggcatgagccacggcatccagccttcaacttttatttcagatacattcagggagtacatgtgcaggtttgttatacgggagtattatgtgatgctgaggtttggagtatggatcctgtcaccctggtagtgagcatagtacccaataggtagtttttaacccaccctccccctcccccatagtaggccacagtgtctactgttcccatatttatgcccatgtgtgctcaacgcttagctcccacttataagtgagaacatgaggtatttggtcttccgttcctgggttaatttgtttaggattatagcaagaatagtgttttgaatggatgaatgaataattgaatgagccaatgggtagagttcatgtttgctccaagctcacctgcactttcctcttcccttagggcccttttttgggaaaatgtcagggaatattgtcccacagtgtttctgactcaggggcatttcctgagcccaggccttctagagggagtggctcagcccctgaggattggcgccagcctgggtgatggtcaagggctctcctgcccttctctaggctccactgtactccagcctgggcaacagagcaagaccctgtctcaaaaaacaaaaaacaaaaaacaaaaaaccagcatgacaataaacattctattgtaatttcccagatttcaaaggaatctttttactcattattttaaaagcctgcacaaaacttcatctattcagccagtctccctatgtttcgtttcgtttcttttcttttcttttttgaggtagggtttcgttctgtcacccaggctggartgcagtggcacaattatagttcactgtatcctcaaactcatggattcaagtgatcctccttccacttcctgagtgcacaccaccatgccagacta

SEQ ID NO: 694313 - DNA, 623 bp, Homo sapiens
tttaatttttttttttttttgagatagagtctcgctctgttgcccaggctggagtgcagtggtgccatcttggctcactgcaacctctgcctcccaagtagctgggattacaatcatgcgccaccacgcccagctaattttttgcatttttagtagagacagggtttcaccatattggccaggcgggtctcgaactcctgacctygtgatccacctgcctcgacctcctacagttttgggattacaggtgtgagccaccacgcccagcccacttttcctcttcttctaagagcaccagtcttattggattagggccccaccctacttcagtatgagcttcactgattatatctgtactatgtacctgcaacaactatatttctaaatgagggcacattcacggatgtagtgaatcagaacccacattaaatacaccttctatttggtttaagttatggccatgttggctcctgtcctaagtaacacacacacacacacaggtgatcatatgatgtatctagtcttgttccttagagagccttcatgacaggactcagacggtagaactatcagaaaactgttccaaggaaaccatgtgccatgcattctgcctgcagcttggt

SEQ ID NO: 694314 - DNA, 589 bp, Homo sapiens
tctcacagtgggagttgaacaatgagaacacttggacacaggaaggggaacatcacacaccggggcctgtcatggggtggagggaggcgggagggatagcattaggggatataccttatgtaaatgacgagttaatgggtgcagcacaccaacatggcacatgtatacatgtgtaacaaacctgcacattgtgcacatgtaccctagaacttaaagtataaaaactctgatgaatatcaaatctgccattttgttgtaatagccattttttaaaagttttgtgcataatgagcatgctttctgccttctattttactgataagaaamtgagaagatggaaaaacttcctatcatactgccattaaccattgtatggtattcaatcagctataaatccaccccagcagacatcaacattccttcgtgggcctcacgtttaaatattcctagtaaaagtcctttgacatgactgaataattaatgaaacagctaatatacaataatcactacatggatctgcagctctgatttgcaatgtcagataagaccatcgctgatgagctgcgcagattatgggtgtgaaacaatg

SEQ ID NO: 694315 - DNA, 606 bp, Homo sapiens
ttgatttacaagaaacaatagacaagcttctaggattgcaagattgttcaagcatgacccaatgggctctaacaaattcagactcagagattattgacagataatccagtctcctatactatgttcaagactaggtaaatggcaaacacrtttttggtatcatggcatgtatttttctcactcagggtgatattaacagattatgcccttttctgcacagctggattgctttatatcttttctactgataaactcataagggaaataatagattcttcctgtttcagaccatttattggataaaaagctgacagagttgtagttgtctttggaaaaaataatttaaaaaaatagtttgtgtttggcagtgaaacagagcactaaggtgtgggtacttccactgtcagagaaaaatctgcactcggtaggaccactcactctaggaagggagtgacgggggtctcaccagaggccagatcagccaagcatgtggctggatggagtaggtgaggtcaacggctgtgtccactattttaaaatcccgtttctctccttgagatataactggaatcttggcctcctgttgagtcattcacagcttatttc

SEQ ID NO: 694316 - DNA, 564 bp, Homo sapiens
tttcctaacctggaacagaaggttagaatggaataagcaggaatattgacttgttgacaaattatctacctggctgacctaggaatccttagatgtcttttctactaaggacagatttggtaacaaaatatgggacacagctgcactgtyttacattagaaaattctctgatcagtggaagttggcttcagcagatacaacacattgttttcacaattagatcacaccaaagctaattcaatatacttgttactatatagtttgggataactagaaagccacccagaaaggtgagtaaatatagatccctcccttacactttgtatcagcatacattctgaagaaattaataataggtaaaaaaaaaaatgaaaaaagaaataagaaaagtactaaaatcatttaaggaaaatgtttcaaacaccctttgaatgaagaatcatcagctattatccaaagctcagaacacttttataaactgagatacatgaaagtcaagtatttctgcatggaaaaagccattatgaacaagtcaaggaacaaatggcatactaggaaatgaat

SEQ ID NO: 694317 - DNA, 859 bp, Homo sapiens
tttgttcccattttaggtttaacttttaggtttaactgggttaaacctgaattaacatgtactttcaatccaccctctatcttaaaaatggtactttctctttttatcactatagaacaagttgggagatacagctttgcatgctgctgcctggaagggttatgcagatatcgtccagttgcttctggcaaaaggtaaagtttgtgctgagtttatctggtctttgcttgccctgaaaaatagtctatatcaacttacgccatttgaaatggtaggaagaataatagtcttatttcaaaatagggtttaacctttgctctgcctgtgtatcatggartagttatgataaaataaaattattgggggttggtttgtgttagtttttaatataaactaaaaccatggcaagctttaacattacatatattacttttagtaagaactgtattgtatgtttctgcaggattatagagccttagaaacaaagaatgtatgtgtacacgtgtgttggggagatcctgtctgagaaagctgtataggtaaagttgctgaggcccctgttctcacagggaagtcttgacagataagcaagaatgatgcggctgcaatgtcctgctttgagctgagcaggtgctagatgtaaagtgaacgagagaggatatcttgatcccctgtttttataagtcagaggaaacagtgaatttataaactgactatccctttatccttttgtcccacaaatattagtttactcttagagaaggccaggcagatcacctataccatactctagtccagaagcctatcatgtaggatgcttgagtccccaagacacttgtcatggaattaccctcattag

SEQ ID NO: 694318 - DNA, 859 bp, Homo sapiens
tttgttcccattttaggtttaacttttaggtttaactgggttaaacctgaattaacatgtactttcaatccaccctctatcttaaaaatggtactttctctttttatcactatagaacaagttgggagatacagctttgcatgctgctgcctggaagggttatgcagatatcgtccagttgcttctggcaaaaggtaaagtttgtgctgagtttatctggtctttgcttgccctgaaaaatagtctatatcaacttacgccatttgaaatggtaggaagaataatagtcttatttcaaaatagggtttaacctttgctctgcctgtgtatcatggaatagttatgataaaataaaattattgggggttggtttgtgttagtttttaatataaactaaaaccatggcaagctttaacattacatatattacttttagtaagaactgtattgtatgtttctgcaggattatagagccttagaaacaaagaatgtatgtgtacaygtgtgttggggagatcctgtctgagaaagctgtataggtaaagttgctgaggcccctgttctcacagggaagtcttgacagataagcaagaatgatgcggctgcaatgtcctgctttgagctgagcaggtgctagatgtaaagtgaacgagagaggatatcttgatcccctgtttttataagtcagaggaaacagtgaatttataaactgactatccctttatccttttgtcccacaaatattagtttactcttagagaaggccaggcagatcacctataccatactctagtccagaagcctatcatgtaggatgcttgagtccccaagacacttgtcatggaattaccctcattag

SEQ ID NO: 694319 - DNA, 1522 bp, Homo sapiens
tagaacagaaaaagggcattattaggaaaactgatgaaattagataagacttataatttagatcagggattgattgactctggcctgctgctgcctgttttttaattaaagttttattggaagacagccaagatcattcacttatattgtctatggctgttttctccaatggcagagctgagtagttaggacagagactgtaaggcctgcaaagcctaaaatatttgctatgccaggatcagcattaggtgaggcaagcaggacacctaggtctaaggaaatatcctctctctctccctctccctctctctctctctctctctctgtctctctcaaatttctgtacatgcgcaaccctaaatgttagtgcctccttaaattttgcatcctacacaccctacttgcctcattctagtcctgactctgtctatctagtcctttacaaaaaaatgtttgctggaccatggtagggttaactatagcaatgttaattttctgattttttggtggtttgtgcttgcgatcggtggctgcgtcactctggtaaaggtgtgcagttttgggccatgatctctgggctgggatgatccaggctctcggtagaggcaagggagcccagctatagccatggccagtacaatggtagcagttggactgaccattgctgctgcaggatttgcaggccattatgttttgcaagccatggagcacatggagcctcaagtaaagcaagtttttcaaagtctatcaaaatctgccttcagtggtggctattactgaggtgagtttgaacccaaaatgacaaaacaagaagcagcattaatgctaggggtaagccctactgccaaaaaagggaaaataagagatgctcattgataaattatactcttaaatcatagcagccaaaatcagtgaagctagaaatttactagaaggtcaagctaaaaaatgaagtaaatgtatgatgaattttaagttcattttagtttatgtatatgagtaccaagcttttataataaaatgcctcagagctataattttttttaatttctgattttgatcattatactttcattaggtatgatgttaacataaagggaagctgggttaagggtatataggaactctgttgtactatttttacaacttttctgtaagtcaaaaattattgcaaaataaaacatcttaaaaataatgcaaactcaaggataggataagtgtactaagttccaagtgcacagtaacactgtgggggccaaaacaacagccacaaccacaaccaccacaacttagcgctctgcaccaggcactgttcaaagtactttatatatcacgtattatttaatccccacaactctgtgaggtgggtactatttacttccatttacaggttagaaaactgaggaatagaggccgggcgcggtggctcatgcctgtaatcccaacactttgggaggccaaggcggcggatcacttgaggtcaggagttcraggccagcctggacaacatggtgaaagctca

SEQ ID NO: 694320 - DNA, 1899 bp, Homo sapiens
tacttgtacactgttttaaagtctattaaaattgtcatttgacttttttctgttaacttacattgtttaaggtatataatttttaagtcttacagaatttgtacagcttcgaatgctatagtattagatgctttctttctcatactacatttcttcatttggtttattacattagtctcaccagaccagtacttgcaaaaccctgatggtgctgatcgtagcaggtgatgcatcaccaccaagcatttcaaaaactatttcagccattctaggctagaggcctgagcaagtaaaacatggagaaaaggcagggcagggcctaagaaggatgtgacatgtcctatgataaaggaccaggagtttgggatttgagagagaacaggaagtggtggatagtgaaaatccatctgatgcaaaggctgggttaactgaaaatctgttctgggatgctaggtctttcaagtctgaagactgcagaccacatttggtatcaactttctgaggctgacctgagaacctacttaagccattaaaggttttgagggcgaaagtattactgaagaggccagcagtgtaccccttaaaatgtatgtgtaacttggtcgggtgcagtggctcacgcctgtaatcccagcactctgggaggcctacacgggcggaccacctgaggtcaggagttcaagaccagcctggccaacatggcgaaaccccgtttttactaaaaatacaaaaattagtcgggtgtggtggcggcacctgtagtcccagctatttgggaggctgaggctggagaatcgcttcaacccaggaggtggaggctgcagtgagccaagatcgcgccactgcactccagcctggtgacagagcaagactccgtctcaaagaacaaaaaagtatatgtaatgaataaagctttagcaatttcctgttcccagttctgcctccctccccagcaaactttctaggtagacctgtcctgtatattgttagcactagagaaattacctgtaagatgatatcctcaaaatattacaaaattaaggaacattctatatatgcacaaattgaagaagtcaggtagttgatacttttaaaggtacatagtcaatttaagtggtcaaaaggtatttggcaaaacctaatttaactcaagccctatgcataacgttattgctgaaccactggctaatgcagcatgtactgtatttcactgattgtaataccctaattaatgtcacatggtttaattagcgtttttttttgtagtggtacataaaatgacggtggaccttcaatcaatggtgttttacataatccccaactaagctttatttgaaacacaacttctgacctgtaatctagaaaggggtgggggagtatgtatatgtatgtacaccaaaacctctcccccaaagatctaaagccattctaggccttcagctcaaactaggatactagtagaaagtacagaaaaatggtctaatgacctccccaccttttgaagtgactgtcaaatgagactattaaaaaccacttgaaaacttttaaaaagcaagaatagcctgagacctcctagaaatacagatttaattggtgtaaggtggggtttgtgcagagtattaaaaacgcccccaggcgattcaaaagtatagccagatttgagaaacacccttagctggaaaagaattgaggagctctgttttgatgacttttaacatacactccttagggctggcttaaaaaaggaggttaacttacattagcctcaattcccaaattttacctagaaatgcttcataaattaggtaatttggggttcataagcaaatacagcagagtagggagytatcaaaatagagtgaattcttcagcaaaggaggacaaaactaccataaggca

SEQ ID NO: 694321 - DNA, 1707 bp, Homo sapiens
ttttctgtaggtatttttttcttcaatgaatagtttaataaacacaaaaaagaaaatatggtcatcttatctttggacagtctctcaaatgttttataattaattaaattctttaacttatgtatttagttggcctgttttttctttgaatatgcatccagatatcccaggtcacaggaatttcsacttatacttaggttacaaaaccatgctgatgcacacatttgaattttgttgatctactttttctggttccctttccctagagtgttctctttttttttctctgtagctgaagtcaacctattaattttaaagtatttgattaaacagaatcttctttatgaagcccgtcctgggccttctatgtggaattggccattctattgttcatgttcctatggtacaaagcacatctttcatctgatcctacagcattttagtgaacttctttgactccaattactagataataagctcatttgatgctagaggttatgcttaatcatctttttatcccaagtccccagaaaacatagtaaatgcctaataatttgttgaaggaatgtgcaagtgaatggaaatgtatgcaacttgtaactgcgtaatgcaattttcaatcatgacttaatatttgtcatagtttacagtaaaaacacattattttaaatggagagtctaatatcatttaaatattccacagaaataaagacagttttaggtctctggttaaattttttagtaaattagggatgaaataacagatttcaaagactcactttttaagtagtatttttctgtcactcgatgtctattttccttctttctacttttaaaatggcagctgcacttttaaatttatattatttccatcataaataacaaatgagtaagttcttactcattttcttgcatctcctgaataagagttattaagttaaacacaaatatcaaattataaaaacctacaaccaactaattatgtttttttttccttttgttttaaagaaagtactcaaattcaactttaatttgtggcattaatttattatagtggtgtggctgaggtaatgtaaacaggagaacttttctgcctttctttccttatttttccaattctcgttacacatttctggaggcaaatcttcatttaaaaggtgctgcaaactcaagcttccctcatgaatggcatgtgttaaatgtgagatactccgaaagagttctcacacatcactgctgtacagagcaaagtacactatcacgaatgcattgatttaataaaagggcagaaagtgaacgaatgaatcggtcaactcgggaacctggaagagcaaagccgcagcaggcgctgctctcacccatcctgccctcagcttcagcctgcaacgtgtgcattttccgccctgtgctctgctgctgaagggccttcgtcagaggatcgcctcctccaggagggctgttctcctgcttccctcctaggactgagctcttgactccaggagcagctaaccacacagtgtgacttgctgtcctggtctccctgcaagctcaggctgagtctgtggttgcgcttgaacctcctgctgttgagtgtcctcacttcctggccagttggtttctcctggaagaatttatttcacaaacacttgcacccaaaccctcgcctcaaattttgcttctgggagaactcgacctaagatggaaatg

SEQ ID NO: 694322 - DNA, 658 bp, Homo sapiens
cacattcatcacaggtaggaatcttatccttcagctgcttctagataacgtcttagccctttgcaaatctccaaatgacatgtttagttgttttgcactgcattttcacttatgaactgactcaatcccttttataattggaaagcgtaaaaaaactttcaaaattagacaagtctaccattttatttatgccatgactggatgtcaggccgtgccactcagcacaggaccagtctctcctgctcaggccaatgctcaatccacactcagacagaatctctctcctaggcaccagccactcacaaagggtcaggaagagacattactgaagcaaagacagtggtgatgttaaaagtagagagaaaggaaatggaaatccagcacacaaaaaaagtatttctcctttagtcctaccatctccatcagcttgggaacagcaytgggggctcatgcttgctttcgctccccagtgggatcatttcaggcaaccctggtggcaagctggctttcctgtttccttgtttccaacagggtgtggcctcaaggaaaaatgttcctcactaggattcttgtttaatcgctctctgatttgagttcttttcaggcgttttttttttttttttttttttttttaaaacagagacttgctctgttgccc

SEQ ID NO: 694323 - DNA, 1153 bp, Homo sapiens
tctgtccacagagatgtgacaagatcattttggtatttttgaaatctctttgtggcaatagtgtaaagtgatacaagttcagacaggtagcccagcttggtgataagagaatgggtccctgagtgctactgtgtttgaaaactgactctgctgcttattagctgtgtgactggtgtgtgttgttatgtaactcctctgtgcctcaagccccccatctgaaaaggggagatcattgtagtagcctttccacagggctcttttgagtattaaataaactgataaaaagcacttagaatagtgccagagtaggacatggtggctcatgcctgtaatcccagcactttgggaggctgaagcaggtaggtcacttgactccagcagttcaaaaccaacctgtgccaacataatgagacccacacttgacccatctaccaaaacaaacaaacaaaaaaaccccaccaaattagctaggcatgatggtgcacacttgtagtcccagctacttgggagagaggctgaggtgggaggatcacttgagcccatgagttcaaggctgtagtaagccataatggtgccactgcactccaatctgggtgacagaccccatatcccaaaacaaaaaaaacaaaamaaaaaaaccaacaaatagtgcctgtctcagaggaagcactatattattatatagtgtataataattattattcatggcaaaaaatacttctagtgtaattttgaggatgataattttgttatgattctgctacatataacacaagaattataggaggagagcatacaatataccttcctcatttatgaaaaggtataaaatagaatgcaaggcaaagaaaacaattctgaggaaactttttttaaatggagacaattataaaaatatgcctggagggaattcacattaggatgaaaattatgagttatttaatttgacacatttttatcaaatgtcttgaactagaagtcatagttaaatgtacccatgatgaaatcttgtcatctgaaaatacacagaaatataatagtaaaaaatacattttttcattttcaaaaacagatgtcctgagttttgaaattatttgtaccaatatattacttgagaatattaacattgtccactccttacatgaagagaaat

SEQ ID NO: 694324 - DNA, 589 bp, Homo sapiens
gagtaacattaagattttaaatcttagaaatactacactaagctttcttagttcaactaggcagagacatcttaaattgttaaaatttgtgtatcttcctctggaaaaaaaaaaggtacaagagagtgtggaatcacaaatgaatataattttcatcaaacttcacttataaaaaagtctcaagatagtacctcttaatacaatcatacgtgtacatttgggaaatttctctcttgttttttctcttttgacaaatatttcagatggaattcagatttttctactggttgacaatgttggaagctttctaatatgtccacatataatttwaaaaaagtaactacttttatgtttattttaaaatttttatttaaatgacttggtctttctgcaagcatctttgccctcctaattctccacatagcagccagagtgatcttttccaaatgtaaaccatatcatattgcttgtctgcccaagacctttcatgttttcccatcacattctttattatgggctcttcatcctccttaccctctgcctacctttgctccaacagcctgaccccttggttcttccttgattatgg

SEQ ID NO: 694325 - DNA, 643 bp, Homo sapiens
tcgagcatccatggattttggtatctgcaggggtcctggaaccaatccctcacagataccaagggatgactgtatgtgtataaagatttctatagaagatcaaatgggggaataattagataaggcaagtatatacaagtgctaatccattttaaatgactctatgtcatttaaaacaatgatttatgtatgctttaaaaatacaactattgaccaggcgctgtggctcacgcctgtaatcccaacactttgggaggctgaggcgggtggatcacaaggtcagtagttcgagaccagcctgaccaacatggtgaaaccccstctctactaaaaatacagaaattagctgggcatggttgcacacacctgtaatcccagctactcgggaggctgaggcaggagaatcacttgaacttgggaggtaaaggttgcagtgagctgagatcagtccattgcactccagcctgggcaacagagcaagactccgtctcaggaaaaaaaaaaaaaaattacaactattggccaggcacagtggctcatgcctgtaatcccagtacttcgggaggcttaggcaggtggatcacctgaggtcgggagtttgagaacagtctggccaacatggcaaaaccttctttctattaaa

SEQ ID NO: 694326 - DNA, 643 bp, Homo sapiens
tcgagcatccatggattttggtatctgcaggggtcctggaaccaatccctcacagataccaagggatgactgtatgtgtataaagatttctatagaagatcaaatgggggaataattagataaggcaagtatatacaagtgctaatccattttaaatgactctatgtcatttaaaacaatgatttatgtatgctttaaaaatacaactattgaccaggcgctgtggctcacgcctgtaatcccaacactttgggaggctgaggcgggtggatcacaaggtcagtagttcgagaccagcctgaccaacatggtgaaaccccgtctctactaaaaatacagaaattagctgggcatggttgcacrcacctgtaatcccagctactcgggaggctgaggcaggagaatcacttgaacttgggaggtaaaggttgcagtgagctgagatcagtccattgcactccagcctgggcaacagagcaagactccgtctcaggaaaaaaaaaaaaaaattacaactattggccaggcacagtggctcatgcctgtaatcccagtacttcgggaggcttaggcaggtggatcacctgaggtcgggagtttgagaacagtctggccaacatggcaaaaccttctttctattaaa

SEQ ID NO: 694327 - DNA, 604 bp, Homo sapiens
tcttctcctctctgaccacaaattaatacatgtctgagatccagatcttgttcttaccagattctccacctaccaggtttctatatgtggaaatcactaacttaaacaacaacaaactgtctgagtaagaaggtgccttagctagagctgttgcctaattattctgtcaaattcacctgcagcacttctgatgaataatatcacaggctcttcttggtctgttcattaggagggacttcgtcgtcttaaaaaattcattctagtgcaattcagcactttatgacattctttctaatactaagccaaaatatattactttctaacatgtttgtgagatattctctagaagatcatattacaaatctaaacataggccatccacatctgaataggactttctgataattcaagttacctgacatttataattcttcaggagtatccttcatgcagagaggaaataagaagcacttaatgaataatragaattggcaggagaaagaatccaaaaaaatcattgtctttaatcacatccaagttaaggaacatcaattagactagtattgcatttaagacacataaatgtataagacattatgatttc

SEQ ID NO: 694328 - DNA, 621 bp, Homo sapiens
gtagaatcagtgggagccctgagcttgttttcctgcaactagacattcccatctgggggtgatgggagacagcgacagatcatcaggcatgagattctcataaggagtgcacaactcagatccctcacatgctcagttcacatcaaatgccatggctgatctgacaggaggtgcagctcaggcagtaatgcaagcaatggggagtgactgtaaatacagatgaagcttcattygcttgcctgctgctcacctcctgctatgcggccctgtgtgagtcagtggccccgggaatggagacccgtgttctataccactgtaggataactatagttaacattaatatagtttcaaatggttagaaggaggatattgaacattcccaacacaaagcaatggcaaatctttgaagatggatatatatcctgacctgatcactgaacatatatatggaaacaccattatgtacttcatgaatatgtacaattattatttgtcaattaagcaaataaaattaaaaaaagaaaatctatcacaaaccatattagtagctactatagctcccatgccctattcctatttatgtccttagcccccttttaaacagtgacgaaccctataaag

SEQ ID NO: 694329 - DNA, 2411 bp, Homo sapiens
tgttatcattctgtctaaagtagttttctcgcccccctacatttccatgctgcacattgctatttccccttcatagcacctaccacaatttgtaaggtacttacttgtttacttacttttctttttgtattccaccccagttaaactagaagatccacaaggactgggaccatcactattttgttcacaattataaacacagtaccatgtagttgtagaatgcatgtgttggaatgctgatgaatatgtgattttaaaaagtatagactcttctgttaacttgcttttcattgcacttaaatcagaggcctactcctaggtggggaaatcaacaatgggaagttagaaagggttgctggcatgctttctcgtgggctgaatattcaccatatgctaagtctccttttcactttctatagttctcttttcacttactaaataatcagttcttcttcctttgctgctgcagaaattatcttcctcctcaaaagttcagtggcactccatcctatattgccaatcagtctgagtgtccatgttactcttcccaccccgcctaccaatatcacctccatcattttttccacctgcttccaacacgctatcaagaaataccactcatctttccttctgcctctctccttctatagatgctttacaggacaatttatgctatttcagaaagccagaacaagctcccatctgccatctgttaaaccatcatttctccttcattaaaaatcttcctaaattcaagctcatttcagaaaaaaacaggagtttggaaaggagtgagataccttacatttagattcatgtgtctgagacatacaatgctctgtatatctacctggatttccttaataaaaataatatgaaaagtaaagtccagaatagaaaaagcaaaatcatggtatttatatatttaaaatacatatgactatttgtgtcatgctgcaatttggcaaagtgataggacatcaaagggatagtaatctaaagattcacaataagcacacaaatatattaatatcataaatacagctgcatacaaattatctgtgtatatatgtacataatataatatatatatgaagtttgaaaagagtttcaggctggaattttttgacataaccactggctttcttctacttattaagaaggtatctgtgatggttaattttaggttctcatttgactgaattaaggtatacctacaaagctggtaaagcattatttctgggtacgtctgtgagggtgtttacagaggagattggtatgtgagttggtggactgagtgaggaagatctaccctcaacgtaggcaggcactgttcaatcagttgggggtccaggtagaacaaaaagtcagagcaaagacaaattctttccctcctggagcttggacaaccttcttctcccacctttagatatcagaaccccaggctctctggcctttggcctctgggttctcatgcctttggcttcagacctaatgctgttgggttccctggttctgaggctttcagacttggactgagccttgctcctggcctcccaggatctctggcttacagaggtctactgtgggactcagcctccataattgtatgaaccaattcccctaataaatcctatctcatctctctctctctctctccccaccccctaccccaccattggttctgtccctctggagaactctgactaatacagtatctttacatcacaatatcaagtggactgaaatacagctttccttttcctgaagtatttaaacatttaatgttcttaatgaggccatctacaccaaagtaaaataaataaatttgacagttttccaacagtggtacaatatgttattcatgtcaggctggaagaaaaggaagatttcttgccggttatctctaatcatttgtgtcctaaatcaaactcaactaattgttgaagacactaggtagacattgagaccgcatatttttaaagttggaaatgataacagatcatgagtttgttatgagtcagtaatgggttattttaaaccacagttggctagatgagaaccagcaatgataccctttacaatcatgcactatataacaatgtttyagtcaaaaacagacacatgtatagtggtggtcctataatattataagactgtattttactgtatcttttctatgttagatatgtttacatatgcaaaggctttccattttgttacaattgcctacagtattcagtacagtgacatgttgtacggtttgtagcctaagagcaataggctataccatatagcctacctgtgtagtaggctgtaccatcttagtttgtgtaaatacactctatgatgtttgcacaactaaattgtcaaatgacaaatttctgagaacatatttctgtcatttaatg

SEQ ID NO: 694330 - DNA, 598 bp, Homo sapiens
tgcttagtgcttgatacagacatagacaagratgaaattatagatatgcatatctatatgcatgcatagattaggcattcatggcttagtgtaagtacatacattttctcagctctgtccactgacagggcatagaggcaataacaaccccttgcaaacaagcatacctaacacccagaaacacccagacatgatttctactctccaaaaaaaaataaataaataaaccagggctccttagagaaatagctggcctaggactggggcaagaaatgtataagaggagcctacagaatcttatagtgccagaaagtcaagagatactaaaataataataatgatgatggagtatgtcaaagggacacaggggtcaatctgaaagagctcctaatgtccaaagctggaacaattttatcagcaaaataaataacatagtgttggattataacctaaagtacaaaataaatatccataagcctatactaacataaatggagaagagacaaatatcctgtacagaagaattccaactcatttatatacatactcctcctccctcttcaaagaagtggagcttaactcccaccccttgatcttg

SEQ ID NO: 694331 - DNA, 670 bp, Homo sapiens
attctcatgacagcgaataactctcacgagatctgatgggtttatcaggggtttccgctttcgcttcttcctcattttctcttgccaccgccaggaaagaagtgccttttgtctcctgccaggattctgagaccttcccagccatgcggaactgtaaacccaattaaacctytttttctccccagtctcaggtgaaatcagcagcgtgaaaatggactaatacaacttctcaaccattatctaaaattcttgaaagtcacagctcctaacagtgtctggtaagttattagcactgtcaactgaagttgaagacaattccagattgtctattgagtaaaaacaataagggtgttttcatttatcctgtatttcctcattttaaagagtacatatttcatagtatgatagctaatattccactatgtcattcccaacagtgcacaaaagacctctattctacaatacttaggatacctaagtattatactctataataattaggatacctaagaatcttggaaccaagacgtgctgcaaaaaacaatatcagaaaatcctttttttttttttgatatggagtctcgctctgtctcccaggctggagtgcagtggcgcgatattggctcactgcaacttccgcctcttgggttcgagcaattctcctgcctca

SEQ ID NO: 694332 - DNA, 1432 bp, Homo sapiens
gaatggataaaaaaccaagattcaactacgtgcagcttacacaaaatacactttaagaacacacataccctgggaggctgaaacaggagaattgcttgaacccaggaggcagaggttgcaatgagctgagactgcatcattgcactccagcctgggcaacagagtgagactctgtcttaaaaaaaaaaaaatagctgggctacactgagaacgaagagctctgagggagaactggccctactagatattacaccctatttcaaagcctatataggtaaagcagttggtattagtacgagaaaaaaaccgcacacacattgtaatcagtcaaaagatggtattaaattgaaagaaaatatttgccacatctattacaaatacaaacaatggttctaacatacaaagacctttttaaaattgagagggaaaagaccaaaattctagagaaaaatgggtaaaagacacaaattaggcaacttgcaaaagatgtaaattggtctgtgaacatgtcaaaaatgctcagttgtatttataataagagaaatgcaaactaaaaccacactaagataccatttcttactcattagaatagcaaaaattttcaacttaatacactgttgacgaagtgtgggagagacactcatctatgccaatggggtggtgggaatgcaaaatcgtacgacccttttggaagagaatttcacagtatttaacaaaactatgtgtgtgtgtgcgtgtgtgtgtgtgtgtgtgtgtctgtatacacacagttagaaatagtagagacagggtttcgccacattggccaggctggtctcaaacttgtgacctcaggtgatccgcctgccttggcctcccaaagtactgggatttacaggcatgagctactgcacccagtcaaaatttctggattttaaaaattatttgcaacattataataagatgacttcaccctgccayttttattttctccctcagtgagtgaagtcaggataaacaacatcccttttttgttcctcctaccatgaacaaagtaacaagaaatagctggttggaaaaatgaacatctcgtaataatatgaaatacatttaaaagccttctatttcctacacctcttggtggtttttttctatggttactgtgaaatatgtggatttttaaaaatagctctagcagttaaatgatgctgtaaaaccccaatatggtaagtgtaaataattctaacagtaatttcttgttactatacctttcaaagaagtttattctataatttagtaaggtctcttaacattaatgtttttactcagcaacagatatggaccttctcaaaaagaatcacagaacaagagaattaacaatcttaattttcttcttacctattgattggtaagaaaatgagctgtgctgctcattttcaaccttttggattca

SEQ ID NO: 694333 - DNA, 668 bp, Homo sapiens
gagcgtgcctgtagtcccagctacttgggaggctgagataggaggatcactcgagcccaggagttcgaggctgcagtgagctatgatcgtgtcattgcactcygggctgggcaatggtgtgagaccctatctctaaaaacaaacaaacaaacaaacagttgtgccaaacagaaaaatattgtttaagaactttaaatatacaagacacagtatctcttaaaaatctctaatagagttgtgtttttccatcatataattcttataacatttgcttatcaaaacacatattggccattaatatatagcaatatttatactgcatatcatcaaacctggtttctgctcccactcccaccccaataaattaatttcttttcagttggttctccgatcaagcaaacatatcagggagattcacccaagaatttatacatagaaaattccaaactatatgaatttttgaagagaaattctctttctaaaaactagcttacttagagacaactcctgtttacactggaaatgcaatgaatgattggaaattcaatattatcaatcatcaattaatacactatctccttgtaataaaagtggctggaaattgcttttttaaagctttcaatactataattattctataaatatacttaaaataggttaatatacaa

SEQ ID NO: 694334 - DNA, 674 bp, Homo sapiens
caggcgtgagccttaattttaataaacataattattgttgaaattgttagttgtgataatggcatggtggttaggcaaaaaaaagttgtcagaaacacattctgaagaaattataaaccttgagtggtggctaacacctaatcttagcactttaggaggccgaggtgggaggattgcttgaagctgggagtttgaaaccagcctgggaaaacaagtgagaccccgtctctacaaaaaaaaaaawtttttttaataacttacagataattgttatgatgtctgagacttgatttaaaatattccagccaaaaagtaaggcaagataggtaaaaataagattagcaaaatattgataattgttaaagttggttgataggtacatagaggtttattatacagtttactgttgtgtatgctttaagctttctataataaaatattttaaaattgcatactgttattttgctgttcttattatatcacgtttttgcccctcctcaatcatactcccatggcatatatcctattggagaaattctccttgaatccttattccagggaaagaaagaaagaaccaaagagcccatgtggattcagccaggagccaaactccaggcgctggtcacttctttagcttccaacttcctgctaagccacaggtgtttcatgaggac

SEQ ID NO: 694335 - DNA, 1031 bp, Homo sapiens
cacaactactgtatgtaagagatagcattatttccaatttgctgatgaggaaaatacattatttaacaagtccaggaatatacaggatattcagcggcagagccaggattccgaacaatatttaactggccaaaatgcctttccctacattatatttttagactctttcactatacatctctagctccattcctccataaatctactgacatggttatttattggatcttacaattatcctaaattcctcctcctgtaggtgtttaaactctccagttccctcttttttttttttttttttttttgagatggagtctcactctgtcgcccaggctggagtgcagtggcgtgatctcagctcactgcaatctctgcctcccaggttcaagcgattctcctgcctcagcctccccagtagctgggactataggcgtcggtcaccatccctgtctaattttggtatttttggtaaagacagggtttcaccrtgttggccaggctggtcttgaactcctggcctcaagtgatccgcacatcatggccccccaacgtgctgggattacaggcgtgagccactgcgcctggcctgcagttccctcctgactagggctttctgtgccctgatgtcctcgcttcccatccctgtcatgctctcctccctctcatgaccttcaatcatttctcttatccactgcctcaccatcatggtctgctgaagctgcatgtctgccttcatctacttgagagtcctgcagtgtgtttaatgtggggcagacccaacatgctgtgcataatttgcagataggttagagcaaagataacactggcttaatttgcttgcaagatgataagacacatttacaaatgagaggtcatctttgagtgcaaccttgtcccctcaatgatccaatgccatcaagcaacatgcaggggccaccttcaaatgtctgctgtcatcccttgttctttggtcatccattcttttggcgctacagtattttctgtaaaatcacaagctgatgggatgttag

SEQ ID NO: 694336 - DNA, 1031 bp, Homo sapiens
cacaactactgtatgtaagagatagcattatttccaatttgctgatgaggaaaatacattatttaacaagtccaggaatatacaggatattcagcggcagagccaggattccgaacaatatttaactggccaaaatgcctttccctacattatatttttagactctttcactatacatctctagctccattcctccataaatctactgacatggttatttattggatcttacaattatcctaaattcctcctcctgtaggtgtttaaactctccagttccctcttttttttttttttttttttttgagatggagtctcactctgtcgcccaggctggagtgcagtggcgtgatctcagctcactgcaatctctgcctcccaggttcaagcgattctcctgcctcagcctccccagtagctgggactataggcgtcggtcaccatccctgtctaattttggtatttttggtaaagacagggtttcaccatgttggccaggctggtcttgaactcctggcctcaagtgatccgcacatcatggccccccaacgtgctgggattacaggcgtgagccactgcgcctggcctgcagttccctcctgactagggctttctgtgccctgatgtcctcgcttcccatccctgtcatgctctcctccctctcatgaccttcaatcatttctcttatccactgcctcaccatcatggtctgctgaagctgcatgtctgccttcatctacttgagagtcctgcagtgtgtttaatgtggggcagacccaacatgctgtgcataatttgcagataggttagagcaaagataacactggcttaatttgcttgcaagatgataagacacatttacaaatgagaggtcatctttgagtgcaaccttgtcccctcaatgatccaatgccatcaagcaacatgcaggggccaccttcaaatgtctgctgtcatcccttgttctttggtcatccattcttttggcrctacagtattttctgtaaaatcacaagctgatgggatgttag

SEQ ID NO: 694337 - DNA, 2274 bp, Homo sapiens
caaccacagacctttggccctctctaccattatttagagggcctggatggaatgagcgccctggatgacacagaagggcactgggtgattatattggaccagaacagcaggaggacataactcgttgagtatcctgatatgagtcaaggacactgcactagagactttacagcaagatgttactgagcaccttacttatgttcaaatgtaagaactcaggattatgaagaagcaggaagctagagtcctagacgctctggtctgagcctggtctcctgtggtcrtgtttaaacagttcatacctgagtgtctcttttacaggggatttcatgtgtttggaaggattctttctcctaagcctgttatcttaaaagtgtcttgatttctcaagcaaacctcaatccataatatttggaaggaagggcctcttggctccttatgcacttcaccctcccagtttcccaatgctggatcctaatctagagaatctgttccttatagtgcaagttaaatgaaaccagctttaaattaatgcccaaagattggcaaccaaacaatgcttctcaaagtgtggttctgagatcccctgccccaagagctggaggaacttgtttaaaaggtggatttggggattccattccacacccattgaatctgaaactgagtctctgagagaatagccgcacctatttattttattttaagaaatcccatttatttttggctattggagcaatgtcatcttttcagcaagtttaacacattatagaaatctcaaatgtaggatagaacaaaaccaagtgtaggggtaggggaagcaacagcaaaaagaagatatgagatgttgcagaaaagatggaggagggttcccctctcctctggggattgattcaaacactgtggcagtatacaccatcacacatagtcagggatgttaattccttttcgggataagaaaaggtggggattaagacatttctggaggcttagggaccaaggatggtctcttttccccacttgatccctttctctgatctgcgatgtacttgaagagcttctggatgaccatgttgacaataccagtgaatgacattttcaggccatgagatgggatgtcagactgttcttgacgttgttggagatccattccacaaagtagctgctgtttttgttttgcatatttaacattttgtcattgacgtccttcatggatatctgaccagtgaagacagcagccaaggtgaagtataagccatggcggggttcacaggcagccatcatgttcttggcattgaagacatgctgggtgaattcagacactgtgagcttgatactgctggcttccatggctggtgagaggggaagagccaggcataaagaaatggagatgtgggaaggggaccatgttgactgccaacttgtggaggtcggcattgagctggccagggaaacagaggcaggtgatgacactgttcatggttgctgagacgagggggttcatatccctgtaggttggtgtggtccgcttcagagtgtgggagcagatgttatacagggcttcattgtcaatggaatacgtctcatcagtgttctctaccaactgatggacagagagggtggcactgtagggctcgaccttggtgtcactttgggtgaaggcactacactgaagatgttcacaatgcaatcagggtactcttctcagatcttgctaatgagagtgcccattccagagcctgtgcctctgcccagtgagtgggtcacctagaagacctgcaggcagtcacagttctctgtctccttccatactgagagaaagaaaagaaaattattatgattacctagaattgctgtttaagctgaaataggcttttgataactgcacccccaccccccaaagttgaagttaaagaatattaactgcttctctgtgaaacattaaccatatctctgctctgcatattttgtaagctctgtaagttcctgtttttcttgctgtgtagcgcaaggtcacaagacagataagtgcgagctgcaaaacgtgttttctaagatttaagacctgtcacatgattaatggcttttgttctcgcttctgtaagcctgctttctgcttcacgtttttcctcccttgagatgcttaaaagggcctgtgtccctctttgttcagggctcggactttctggatgcgagtccactgagctggtgtacaccttaatcctcctgtaaccctattggtctcttcagttctgatttcccaatactttttctggg

SEQ ID NO: 694338 - DNA, 1046 bp, Homo sapiens
ttttgtatttttagtagagacggggtttcaccgtgttagccaggatggtctcgatctgctgaccttgtgatccgcccgccttggcctcccaaagtgctgggatyacaggcaggagccaccgcgcctggcacgatttcttaatattactatgaaactagtgttgacctctgaaatccacactttgaaaacaatcgaattaaagaggtattacaaactcttctcttagttttgctgatgacagaatctaaacaagagactcctagtcagcacctcatggctctgagggtatgcatgatacatgcagatgcataaggctgccatggctggtttcagtatgcaaggggagtgataggtgcaaagaagtggaagagttgaatggaaaaactggatgatacataagagagcaaggggaagtttgttcctggagtaaggttattttactgttcgccagcatgtgcgttccctctctgagagaggactaagctgctcttccctttgaaattagatacagccatgtgacttgcttaaagcagagtgatgtgtgacacttccaggaagaagctgtaagagccagtttgctgtttgccacactctttttccctcttggtaaccaccaatgttctatgtggatattcgctgccctatcaggccgggacccagagtgagggcaacactgaccagaaacaaagttcacagctaactcttggatatagtttggatgtttgtcctctacagatctcatgttgaaatttgatccccagtgttggagggtggtgcctggtgggaggtgtttgggctaagggaacaaatccctcaggaataggttggtgttatcccctaggtgacaagtgagtttttactgcattagcttatgcaagagctcgttgtttaatgtgacttccctcctctccccatgtcatgcctgcttccctctgccttctaccataattggaagcttcctgaagccctcaccagaaacagacgctggtaccatgcttcttatacacccacagaaccataagccaaatgaacctattttctttata

SEQ ID NO: 694339 - DNA, 599 bp, Homo sapiens
taagctattgattatacacttttctctataccataaattccaggaacatgaagataatgagtgaggcagctattcgggaacaagatgcatttacacarttgcccccaggtattgggggtaggggagtatgactgaagtcccatactcatgattctctgggcctgaagttttacctatacgccatagctcagactgctcggttaatatatagattgcttttgttctatggtatcaaaattatgctagtttcataaaataggtcacctttttgtttaggcattttctttatgcagtgtatcctcttatcagtctgagtctaaactgggaaaacaaagcacttcaggtattcaaaatctacgttatcctgaggatgatggtggtgatgacagagtatagatacggtaaggaaactgataaattaatagctgcaggggacccactactgcccctgggcttggaagagaggcagccttagaaaacacagggttgggtttgcaaggtggcctgagtcccagagagaactgcctgagcaaagtggtaagagaaagaataccctggcctctccctttctctccacccataccaggcctctccctgag

SEQ ID NO: 694340 - DNA, 573 bp, Homo sapiens
ccccagcccataaaagagacaaacactggcagagagatggtcccaggagagcagccgggaggaggcactggagttcagggctccagtcccagctctgctcatctggctcctatgacgagggttgtatccagygtgtggacgtcccctctcctcaggctggaaaccctctgaggtcagtgcagagcctcggaatagcgacattgacatctgtctggcacataatggccttcaaggtgtcctaagtttacaaagctctttcccaggcatctctcagttgtctcccataacaagccttggggcccagtaaagcaggctgtattaaccgcagtttacggatgagggaaccaagacttagagacacaaaagtgacaggccccactccaagtcactcaacaaattggtcacaaagttcagcacaggaccatattatcccctctccttcagccagagcctcatttttgcctcttttatatcttctgtttcccaggtagattttgcttgataaaaaggggtctgctgctttaaaaggtttgaaagctccagaataatgtttccaaattccccgcgaatact

SEQ ID NO: 694341 - DNA, 573 bp, Homo sapiens
ccccagcccataaaagagacaaacactggcagagagatggtcccaggagagcagccgggaggaggcactggagttcagggctccagtcccagctctgctcatctggctcctatgacgagggttgtatccagtgtgtggacgtcccctctcctcaggctggaaaccctctgaggtcagtgcagagcctcggaatagcgacattgacatctgtctggcacataatggccttcaaggtgtcctaagtttacaaagctctttcccaggcatctctcagttgtctcccataacaagccttggggcccagtaaagcaggctgtattaaccgcagtttacggatgaggraaccaagacttagagacacaaaagtgacaggccccactccaagtcactcaacaaattggtcacaaagttcagcacaggaccatattatcccctctccttcagccagagcctcatttttgcctcttttatatcttctgtttcccaggtagattttgcttgataaaaaggggtctgctgctttaaaaggtttgaaagctccagaataatgtttccaaattccccgcgaatact

SEQ ID NO: 694342 - DNA, 573 bp, Homo sapiens
ccccagcccataaaagagacaaacactggcagagagatggtcccaggagagcagccgggaggaggcactggagttcagggctccagtcccagctctgctcatctggctcctatgacgagggttgtatccagtgtgtggacgtcccctctcctcaggctggaaaccctctgaggtcagtgcagagcctcggaatagcgacattgacatctgtctggcacataatggccttcaaggtgtcctaagtttacaaagctctttcccaggcatctctcagttgtctcccataacaagccttggggcccagtaaagcaggctgtattaaccgcagtttacggatgagggaaccaagacttagagacacaaaagtgacaggccccactccaagtcactcaacaaattggtcrcaaagttcagcacaggaccatattatcccctctccttcagccagagcctcatttttgcctcttttatatcttctgtttcccaggtagattttgcttgataaaaaggggtctgctgctttaaaaggtttgaaagctccagaataatgtttccaaattccccgcgaatact

SEQ ID NO: 694343 - DNA, 917 bp, Homo sapiens
gggcctggcgggtgggcttggagggacagtcagtactgctcagatcctgccgctctgtaaatgctccactaggcaggaatggcactcatcactgctgggcagggagggtgtgacagagcaaggagcatgccatttatggccagttgagactgttgaactgggaaccaggaggctgggctgtgcctgccctctctgagctcagtggcctccttcttgcctcccagcaagcttgggaggacacccagaccctcctgcctcccagaacaggccggatggaggacctccctggatggcaaaatctgcctgtggtgcctccctgagcttctcaagctcattgagctcgggatggctcatctgacagagcctgactcagccccggagggctctgcaggctgcaggacagggaatcacagactctcagatgtcagtgtctcctgagccatggagtccattgcagtaatatcagttgcaaacatgacgggagctggtgttgctgctttacgcatctcaactcctttagtcctcggaacaccctactgaggaaggaaccgttatcagccattttacagaagaggaaacaggacagagaggttaagtaacttgtgcacaatctcagagcaagtgagtggcgtggctccaaagcccgtgttgttcatctctgttctacacagtctctacgagaggagactgaagtgcggaragggaaggtcactgagccaggcagcaggagggtttctttcctctagactcagggctcctccctcaaccagatccagcctgacagctcctctgtctccacctggcctccctgccaggcctcctcagagttaacagcggcctggcctcacccttggccagcagttgcaagtccaaacaggcttcgcccacattccctggctgctctccagcccgcagca

SEQ ID NO: 694344 - DNA, 591 bp, Homo sapiens
aaagcacaggacagtgaaatgaccttttttaaagtgtatcaatctagaattatattaaccggaaaatattcctcataaataaaggttaagtaaataaatactcataaactgagcagatgcatcttaaaggaaaacctaaggaaattcttcagaaagacagaagtaaaggcttacaaaaagaaatataaaaaacaaaaggagtaaaactattgataaatccaatgaatatggaagtctaaatcaataatagtaatatcttgtgggatttaaaaatatatttatctaatacaggatgtaaggtctccaaactaaaawttacaaaacactattgaaagaaagaaggcttaattaaatgatggcatatgtgtctttaccagttaaaatactcaatactgtgccaattgtcactcaaagtggtctaactttcaatagattcctgatcaaaattgcagaatgtttcttgtgtagaaatttaaagcctgattctaatatttctacggaaatgcgtagaacccaaaatactcaaaacaattttgaagaatagtgataaaactagaggatttccactaccagatattaagacttattata

SEQ ID NO: 694345 - DNA, 591 bp, Homo sapiens
aaagcacaggacagtgaaatgaccttttttaaagtgtatcaatctagaattatattaaccggaaaatattcctcataaataaaggttaagtaaataaatactcataaactgagcagatgcatcttaaaggaaaacctaaggaaattcttcagaaagacagaagtaaaggcttacaaaaagaaatataaaaaacaaaaggagtaaaactattgataaatccaatgaatatggaagtctaaatcaataatagtaatatcttgtgggatttaaaaatatatttatctaatacaggatgtaaggtctccaaactaaaatttacaaaacactattgaaagaaagaaggcttaattaaatgatggcatatgtgtctttaccagttaaaatactcaatactgtgccaattgtcactcaaagtggtctaactttcaatagattcctgatcaaaattgcagaatgtttcttgtgtagaaatttaaagcctgattctaatatttctacggaaatgcgtrgaacccaaaatactcaaaacaattttgaagaatagtgataaaactagaggatttccactaccagatattaagacttattata

SEQ ID NO: 694346 - DNA, 1821 bp, Homo sapiens
caaaattctaacctctagccctaaccattccactgagctccaaacttattaggctaattgtttaattgatacctgtacttgggtgtctaataggggtctcagaattaacattgccaaagtagttttcctaattctttcctccccaacctgttcctacctggtcatctgcagtctagtaaatggcaatactgctgactctgctgctaagtcaacaatcctggcaagtcctatgacctcttttttcagaatgtccttgctgtctttcctcactgctcctactctagtccaagccactgttccttctacctgttcctctcatctggtctttattctgtgattaagagaaatttgaaaatgtaaattggattgtgtcattccttgcacagcttagaataaaattccgacccattaacaccaccagcagcaacgcatctctatttgtcaaaccggccagtcttgtcttgttcactggcacagccactgcacctaaacactgcctggcacttgagaggtacgctgaattatgaaggatggtgattgcaggtgtgtctgcagagttgcaagtgacattggggataaacagatctgttgctgctttttgggcattgctttggggacctcaagtgaactgggtcattgtttcaatgaactgggtcagtgtttcagtctgtctgagctttagtcatgtacaagaagcttttttgtgtttttaatgcctgggtcttgggttagaagaaccctaatgcccaaagtcccatccataccttgtggtgatggctggcctttctcgattgcacatttctgaacagcatctctgcgttcccgagctcaactctgctcatcttggcagggtctcctgctgtgcatgtatatctgatagtcccatatgctccctgttttgatggggctcccattttagaaacatgcggtttgtgtgcgattgctccctttagctgatgagcagcgcagtaattgcaatcaccccatggcatatgtgtgtcactttccattttggtaacatagtggagagagtctcttgttttaacccgtgttgtcataatgaagttcacacggatggttgtgatttatgatctctcttctagctcttcctgccagtggcacatttctttataatttacaaagttctttcaatagcctcatcgtatttagagcctcctgaggtaggcagaagtggtagcaggtgccccattcaacacaaggggaaactgcgtggaaacaagtggcctctaagtcacttgtttaagttccatygtttgtaatcagtgggcctagatcttgaatctcagtgtttggattctaaagggggctttctggcatttctcattcctgtctacacggttttaggtgtgcagtgattcctttaataggttgtaacactggttatgagagagaactgcctggaagcctctttgtattgaatgttaagaattcagaaatgtgtgcctgagcgattggttgtattagagctcttcagagaaagaatcatggagcaaatagaatgtatacgctatatatgtatatatgcataacatacacatatatacatatatgtgtgtgtgtgtatatatatgataagagaggtttattttaaggaattggctcatcaactgtaggaactagcaagttcaaaacctgcagggtaggtgagcaggtcagcgacccaggaagggctgatattgcagctcaagtcccaagtcagtctggaagcagagttccttcttcctctgaggacctcaatctttttctctgaaggcagtcaactgattggatgtggctcacccacattatggagcataatca

SEQ ID NO: 694347 - DNA, 3214 bp, Homo sapiens
ttggaaaacatgattaaacctgtctctcaaaatcaagcctctttttcctttaggtcctacagtgctgctgtgctcatggcacctgctgaccaagggctgaggtgacagggttggtcagtgtaaactctgatgacccaggacatttttagggcccaagaacttggaaaatttttttagatagctcagaagcaaatgttctgctctcccaggcctctttgttcctccatgcttatgatgcctagtgttgctttttccccttttaagttttcctgaataacattattgcttttcgttagtgcactcctccctactttgaccagctcctccccactggctgaaaaatgtttcacattttcctgaggtcagctcctggctgactggccaggaacctcaacagcagaaagcaccmaaacagcctttcactaaaagggaaaacttttagtgaaaggggaactgaagttttaaagctgagtgcaaatagagactgaccacaaaattcttgttgctgtaggtgtggcacttcacttgttttcctgagtgtgagtgtgtgtgtgtgtgtgtgtgtgtgtgagagagagagtgagagatagagtttaacgtatctgtgtttagtatcttttatcctctatttgtattcatttactcattcattctcatcctctctcttttacatggcctcagaataattttttcctgttattttcatcattaaaacacaatcagaactgatggtcaggtggtcctcagtggcacagctatcatgactgttaaatatagaaatacttctgtacctgacagcaagtaactgttgccacaagtcccacctgagtgctcctctgatgccaagggatcccctagccctcctcacagtccagcttctgaagggctcatatgcggcatagtgagaggagtgtcctccaggatcctgctttggcgcaccatctgcctgcacccacccactcttaggtggtgccctctgtgctgtactagttatcacatatttggatcttcacctcctgctaataacaatattaacccagactgtatggctatttagccaatcttagttctggaattcagccaagattcaggaagaaaacagaagaaatcccagaaccataagaatagatttcacaaagtccaagcattgtgctcatacatgttcctcataaggaaggacactgggacaacttagagacaaaattctttttttctgaaagagaacgaatacaacataaacctgtaattatgaaactttatcttgaagcactgctcatccatggcaatggaagatggtgtgggaggcaatgacaagcatgcatgtgggatatcaggatgtttgggagggaagtggtttgatttggggaatacgcagttggtctttgaaagtatgacaacagtggagggaggatttattttctgggactgcattgaaatggaaggaattcctgagactgatgagtcagtcattactatgggttcctctggaaggacctaagtccttagcacttctggttctcctgaatttggagtctgggtgaaatggctccagcaggccaggggttagtcctctgcctgtgaggcctattggaagtgaaggatacagtagctacaagattacagagaactggtcaaagggactcaggggaatctgagttgaaaatcagtgtggctcctgcaggggcctccggcaagttagctaacttaagtgtgctttggttttctcctctgtaaatggagaataaaatatgtccctactgcagtacctgcacccaccccatccccctcctttttttttttttttttttttgcaatttaaatctctgtggttggccctgacaaatgtcagtaatgatttttgctcagagaactagaaataaagtggcacctgggaaaaagaaacatcctaagggcatatagccatgagataccctggagccccacatgctctctgaccaagcctggctgaattgtctttcttaaattttttaaattaaaaaaagtttttaaatgcttgaaaaaaaattggaaaaaaaaacacccagaaaaattaacatccatatactgctctcctagatttaaagctagcagcatcttcacacacacacacacacactcactcactcacacatttcctttcataagccatctgaaagtagtatgcaggcatcatgacacatcactcccatataatgttcttattcaacaatcacaattgaatagggatatttcacatctaaggaacattaattcaaaaatacccaacacatagtcaataaataaatttactaaattgttttcagaatgtcattagagtcaaggttaatgcattacatttgcctgctatgtttctttcatagcctttagtctagagcagctttcccttctccctctgttctttctcatggaaccttttaagtgtccaagccaggtaccttgcaaagcactccatggattccagtcactgtttcctggtaagattgcatttctgagccagcttttctatctatggtgctgtgggtcatggggttggctttgatgctgtggcctgaggatcttcctaggtatttggggttagacttagagaacaaagagcaaattttgtataggtttgaagactcaaacttattaatacgtctctgaaggactctaggtttattcagtccttactcaccaccaccttaacttatacaaaatcagtcagactcgctacagaatgacctctgagatcatttctaaaattcacagcagaaaaggaactgaagtgtttgattcatttttcttctgcactgatgatgtgggctaactctcaaggcaccaaaagtaaaatagaggttgattgtagacttggaagaagaggatttgttgtttctgtcttgagtatttatgaagaaatctcctcagcctccagcttccccataacagactgaccaggctataaattgggctaagactttgaagtgtgaaatgttggggggtgggtagacagaaaaatgggctatcattgccacaagccacccagcactcagacagctcctctcatttctcaagaaatctataatcatggagcgagaagagatcattttggagatgatgaaatggaggctcagagagacagagatttgttcaatgccacccagttcgttggtgggcatgacattaaagcctgtgtcttaaattcagcccagtgatttgtctatgatccacaatgatg

SEQ ID NO: 694348 - DNA, 1729 bp, Homo sapiens
agcctggccaacatggtgaaaccccgtttctactaaaaatacaaaaaataagccaggcatagtggcatgcttgtaatcccagctactcaacttgggtgcctgaggcacgagaatcacttgaacagggaggcagaggttgcagtgacccgagattgcaccactgcactccagcctaggcaacagagcgagactctgtcttaaaagaaaaaaaaaagcaataatatgcatttccctccttaattaaatggtgaataaacttcatttattctataactaaaattagtggcatttgccagttgtacatatgtgtcatatgattctttcagggataatatgaggtatcgaatgttaataaatgtagaaatatttataaaaatcaatgtaatacttagagcaacatcataaacacatttatagtagttttgatgagttagtcacaaggattgtgcctttgtgatatcaaaggatcacaaagctgacagccttccggaagattatggctagttaaaaatcaatagctatatttaggctggccacgatggctcatgttaagtccagcacttttttattttttgagacagagtctcgctcttgtcaaccagrctgcaattctcctgcttcagcctcccgagtatctgggtttacaggcgtgcgccaccatgcacagctaatttctgtattttttgtagagacagtgtttcactgtgttggccagggtggcctggaactcgtgacatcaggtgatccacccacctcggcctcccaaagtactgggtttacaggcttgagccaccactcccggtctgtaatcccagcactttgggaggccgaggccggtgcatcacctgaggccaacagttccagaccagcctggccaacaagatgaaaccacgtctctaccaaaatacaaaaattagctgggcgtggtggcgggtgcctgcagtcccagctactcagaggctgaggcaggagaatcgctcgaacctgggaggcgtaggttgcagtgagctgaaatcctgccactgcactccagcctgagcaacaagagctagattctgtctcaaaaaaaaaggaaaaggaaaaagaaaaatcaatagctatatttaattttgacacaggtcattttatccctctgctttactggtatttgaaaaccaatcacaaaagtttaaggatatcccattaatttcccagacagagtgaattatataacaagattagattagattaaaacagtggtattcaaaaacatctgaactcaggaattttcgtggggaacaaatcaccacttatattttatccatataatttttatcctgttttaaaattgatgtatgactttataatatttttctactgtaacatttgtgtcagtcgcgataactgtgttttatccacaaggataataaatactctaaagaatttctttatagtatttcctacttaatagaaaataagtatcactacaagaaaaagcagtcttaatttttatttattagaaaaggttttattatattatttatgtaaataatgataaatacaacatttaaactataacatatttgatagtcttagcagcatagtctttttgtaacataagggtccccctaaagcattccaatttaaaattttcctcaaagcaaaaagctctatgacttaattctgaggattgacacttcaactgggtaacatgtcaaatgaattagagaaagtgggaaaagagagaata

SEQ ID NO: 694349 - DNA, 644 bp, Homo sapiens
gggctggagtgcaatggtgcgatctcggctcactgcaacctcygcctcctgggttcaagtgattctcctgcctcagcctcccaagtagctgggattacaggcacctgccactatgcctggctaatttttgtatttttagtggagacggggtttcactatgttggccaggctggtctcgaactcctgacctcatgatttgcccgcctcagcctcccaaagtgctgagattacaggcgtaagccaccacacccagcgcctggctaatttttgtatttttactagagacaggatttcgccatgttggccaggctggtctcgatctcctgaccttgggtgatctacccaccttggcctgacaaagtgctgggattacaagcataagccactgcgcccacccttctgccctattttgcaagtagctagagccggacatgagacaccttagaaccagagtgaagaatccaaactccctcccgcatatggcgtctatacataaagacagattggtggccaggcatgaaagctcatgcctgtaatctcaacacattgggagatcgaggcgggaggatgactggagcccaggaggctgaggttatagtgagccataactgtcccaatgcactccagccggggctacagagtga

SEQ ID NO: 694350 - DNA, 644 bp, Homo sapiens
gggctggagtgcaatggtgcgatctcggctcactgcaacctctgcctcctgggttcaagtgattctcctgcctcagcctcccaagtagctgggattacaggcacctgccactatgcctggctaatttttgtatttttagtggagacggggtttcactatgttggccaggctggtctcgaactcctkacctcatgatttgcccgcctcagcctcccaaagtgctgagattacaggcgtaagccaccacacccagcgcctggctaatttttgtatttttactagagacaggatttcgccatgttggccaggctggtctcgatctcctgaccttgggtgatctacccaccttggcctgacaaagtgctgggattacaagcataagccactgcgcccacccttctgccctattttgcaagtagctagagccggacatgagacaccttagaaccagagtgaagaatccaaactccctcccgcatatggcgtctatacataaagacagattggtggccaggcatgaaagctcatgcctgtaatctcaacacattgggagatcgaggcgggaggatgactggagcccaggaggctgaggttatagtgagccataactgtcccaatgcactccagccggggctacagagtga

SEQ ID NO: 694351 - DNA, 644 bp, Homo sapiens
gggctggagtgcaatggtgcgatctcggctcactgcaacctctgcctcctgggttcaagtgattctcctgcctcagcctcccaagtagctgggattacaggcacctgccactatgcctggctaatttttgtatttttagtggagacggggtttcactatgttggccaggctggtctcgaactcctgacctcawgatttgcccgcctcagcctcccaaagtgctgagattacaggcgtaagccaccacacccagcgcctggctaatttttgtatttttactagagacaggatttcgccatgttggccaggctggtctcgatctcctgaccttgggtgatctacccaccttggcctgacaaagtgctgggattacaagcataagccactgcgcccacccttctgccctattttgcaagtagctagagccggacatgagacaccttagaaccagagtgaagaatccaaactccctcccgcatatggcgtctatacataaagacagattggtggccaggcatgaaagctcatgcctgtaatctcaacacattgggagatcgaggcgggaggatgactggagcccaggaggctgaggttatagtgagccataactgtcccaatgcactccagccggggctacagagtga

SEQ ID NO: 694352 - DNA, 644 bp, Homo sapiens
gggctggagtgcaatggtgcgatctcggctcactgcaacctctgcctcctgggttcaagtgattctcctgcctcagcctcccaagtagctgggattacaggcacctgccactatgcctggctaatttttgtatttttagtggagacggggtttcactatgttggccaggctggtctcgaactcctgacctcatgatttgcccgcctcagcctcccaaagtgctgagattacaggcgtaagccaccrcacccagcgcctggctaatttttgtatttttactagagacaggatttcgccatgttggccaggctggtctcgatctcctgaccttgggtgatctacccaccttggcctgacaaagtgctgggattacaagcataagccactgcgcccacccttctgccctattttgcaagtagctagagccggacatgagacaccttagaaccagagtgaagaatccaaactccctcccgcatatggcgtctatacataaagacagattggtggccaggcatgaaagctcatgcctgtaatctcaacacattgggagatcgaggcgggaggatgactggagcccaggaggctgaggttatagtgagccataactgtcccaatgcactccagccggggctacagagtga

SEQ ID NO: 694353 - DNA, 644 bp, Homo sapiens
gggctggagtgcaatggtgcgatctcggctcactgcaacctctgcctcctgggttcaagtgattctcctgcctcagcctcccaagtagctgggattacaggcacctgccactatgcctggctaatttttgtatttttagtggagacggggtttcactatgttggccaggctggtctcgaactcctgacctcatgatttgcccgcctcagcctcccaaagtgctgagattacaggcgtaagccaccacacccagcgcctggctaatttttgtatttttactagagacaggatttcgccatgttggccaggctggtctcgatctcctgaccttgggtgatctacccaccttggcctgacaaagtgctgggattacaagcataagccacygcgcccacccttctgccctattttgcaagtagctagagccggacatgagacaccttagaaccagagtgaagaatccaaactccctcccgcatatggcgtctatacataaagacagattggtggccaggcatgaaagctcatgcctgtaatctcaacacattgggagatcgaggcgggaggatgactggagcccaggaggctgaggttatagtgagccataactgtcccaatgcactccagccggggctacagagtga

SEQ ID NO: 694354 - DNA, 644 bp, Homo sapiens
gggctggagtgcaatggtgcgatctcggctcactgcaacctctgcctcctgggttcaagtgattctcctgcctcagcctcccaagtagctgggattacaggcacctgccactatgcctggctaatttttgtatttttagtggagacggggtttcactatgttggccaggctggtctcgaactcctgacctcatgatttgcccgcctcagcctcccaaagtgctgagattacaggcgtaagccaccacacccagcgcctggctaatttttgtatttttactagagacaggatttcgccatgttggccaggctggtctcgatctcctgaccttgggtgatctacccaccttggcctgacaaagtgctgggattacaagcataagccactgcgcccacccttcygccctattttgcaagtagctagagccggacatgagacaccttagaaccagagtgaagaatccaaactccctcccgcatatggcgtctatacataaagacagattggtggccaggcatgaaagctcatgcctgtaatctcaacacattgggagatcgaggcgggaggatgactggagcccaggaggctgaggttatagtgagccataactgtcccaatgcactccagccggggctacagagtga

SEQ ID NO: 694355 - DNA, 3795 bp, Homo sapiens
atcgtggattggctagcagtctccttttctatcaaaagtaaaagtgaatgttttttgttctggtgtccacaatcatactggctaaaggaagcaaagagaaagatgctgagaatatcagctgctatttcccttgtatgtcatctgtgccagttgtatgcatgggaaggagtgctggatttcagagttactggactgagagtagccggatcctacctttgatttgctgggcagtcttagaccagtcagttaacttttccgggaagctttgtctacagattgasagagttggtctaaatcagtgttatcaaactgctttctgaatgaacctcccgtaggtgcccaagaagggtgtcaaggtgagcaggcaagaccccaggtctccctccccatttcacccagaggagctctggagaacctttattttgaagaaatgtgtctacaaataaacagtttgaaactaccagactagatagttttgaagttcctctttagtttaaaaattacttatttcgaattctgattctattagcatcctgtttatgctagttataaaagcatgcattggaaggaataagtgctaataaacttgactcattctagtttttctaaatagcaccctagtatttctaaagaataaaccaaaattatgaaagcttaatatttttgcagcctaactaccagtagagagaccacagtctttggtgatactttcattgtcaggccttggatgaaaaaggacatccatatcctaagtgttggagggcagttgcagggagacccacatttgacccgaaaaaattgcctgacacaggtgctccaacaatgttcatgcagtaaatgaatggcctgttctgggcttagatattcctaattaggccaatgttaataagttacaaatagagaattaacgatttcaggaattgagcagagagatcccaggcgtggtggctcatgcctataatcctagtgctttgggaggccgaggtgggaggattccttggggccaggagttcaataagagagaataggggtattttatattaagcagagagaatgggggtatttcttactctaaatgtagtatgtagcattggtcctgtagactaaagttcttaactctaaaaattagacagcaaattgaggggatcgatagccttgtgtcatgcctgctgtttttgttttgttcagaaagtccattgcattcagaagcaacgaacttcttaggaagctcagagctgctggtgttggggataggccagtggtttggatatcacatagcatgggaggtaagtgtggcttcaactttgtgaagtggccattgtgatgttattttcagccactgtggccaacctaaagttattttatctttccattttacttaatagcggctcccttaccccccctgctaaattaatctgtgtagctatggctaggacttttaaaattactactcttgttccatgctgttcctttctctagaaaagggcaacctgttacaaatcatctaagagggatatgggtttgacagcgtagtgctttcacatagcggtaatgaataaacatgagaagcagcccgtttcatatacacccacctcgtcaacatgcctcagcattcttgggtggccccaggggtgcccctttattcttcctgctccccctcaccattgcagtctatggtcgctttagtgcccacagtcccagactctgggtgcctgctcacaccaggcccagagctgctgaggtacaggtgtgatcaagtgtctgttcttggggtcctagtggttgcttatggaatggcctcccctgtgtgcgactcccccagtccactttgaaattttcaccacccaccttgcagaaggcctttctgcagcccgtggcctagtttatctgatgaagcactcaggattgcctctgaggtggggatttttgctgagacaaaggtgggtgtagcccttcgtgtcctcaaagacctactgtcatcatcctttagatctttgtgtttcattatcggttccaaagccggggcagggggatggaagaaaaggtgcctccagaggaacagttcccatgaaagctgtgttctccatgggggactgtgtgctgtggaatagtagcactgtcctgacagtgtggtcatcagcggtctgccatagcaggctgagagaccagccacaccacgctcatgtcctgagggagctcccagctgggcatacctcatgttcctgcactgggacagtagatcctgtgagacaaggctctgccctacaaatgagtttctagaatccctgtttgtaggcttgcactataaggatcaggagtattattaagtgttttaaggccttatttcttatactactgtacagagaattgtttaaaccattttttttaaaaagaaagcatctctttttatgtatttcttgtttggccttttctttttttacagtaataaagggaaggaaaatagcttatgcattgtttttttcccttgtctgtggctaggtcttcttgtcaaaaagatgctgttggaagcctctacgaagccagaaatgagtactgttatcaacaataccagaggaataattttttatagtgtccctcatcatggatcacgtttggctgaatactctgttaatattcgctatcttctcttcccctcgttggaagtcaaagaactcagcaagggtaatactttttgtcataaaggaaattggggttatattaacatcagttacacagagaagaagaaaaagtttcttccttgaatgtattatctcattttataatttgtatataattgtgtttagactattcatggaaattttgggttgggcttgatttttctttgataatttctcattttgttcttaagccattatttactcaagcattgtaataattttaatattatcttaaatacttaaaattagaaaaataatcagataatgttttgcttttaagtattattccaaattaccaataaatggcttttttcccccatgagtggagaatcatcaactgttaaaatgtaaatgaaactttgagattgttagtattaattttaaagtactctggtttgataagcagttttctctctggaacacctgttaatcggaatttggattccctggctcgagcctaaatataccaggtgtctttttgctcctattttctctttgttctactttatggagaatctcttgatttcttctaaaccttctgttggactttcctttcgtggagtcagattgtgttttccgtacgtgccttctttcctgtgccctggtggttctgcactcatgtcctcttcttgttttgtggctcctttatcttttcaaataattctaaagatcctaagtagaaggtttgtgagttcccttctactcctcatctagctgttttttttctgtggccagcttttctgtttgcttatctgatccatctcttttaggtcataggcctatctggtgcctcttggttgctctttcatatgtgagggtgagggatgggaagggacaggcattctgtgattgtagacaggctttgttggtgggaggctgggctttggggtgggtgttgtggtgccatcatcacattggaggacccctgtggtcccacacaccagactgccctgggaactgcttcctgcccccagtaatgtgataaaccctctcctgctgctgactgtcctgtcgattcttggttttagctttttccttgaatcttagtggcttcttggcaggggagaaaataaacatgtgtactcaagccaccgtcttgaatcagaattctaatttc

SEQ ID NO: 694356 - DNA, 934 bp, Homo sapiens
tttctcaagcatagccagacttgtttcatgttggctcagaacatccaaggtggtgtccccagaaagagagccaggaggaagccgtgttgctttttatgatccagcctcagaggtcaggaaatgtcacttctgctgtgttctgttgatagaggtaattgcaaacgtctacccaggttcaagggaagggaacatagcctccacccctcaatacaggaatgtcagtgtcacgtcagaagaagagcatgtgggatgcgatatatatttgtgcatcatctttgtaaaaatacaatcaaccacaattgttttatttaatcatccttcaccgtaaatgaagttgcttcgatatatcattatcccaattttacatttaagtgaaagcagaaggaaacattaaagatcttcttacgccctttcggtgtcatactagagcattgcctaataagctgtcaaaagtgtcatctgtacacgattctcagtcttggcgctattgaaattttggtctgggtaattctttgccgtgggggctgttcagggcgtaataggtcatttagcagtatccctggcccctgcccaccagayaccagtagcacaccttcatccctttagttgcgatagccacaaatgtctccagacattgtcagatatctctggggtgaggagagggcaaatgttcccccagttgggaagttttacaggaagaaagttactttgattatttgctattgatgaaggtgagactcttgtaaagttaatgttaacttgtggaggatcattatgttgcaattcatttctgtccagtaggaaatataaatcctacagattatagttgtgttgttttataatttaccagtttcaacttcacttgcagtcttattccagcattctttttgttcattgactatatatagtaatttttcttctccttcttcattca

SEQ ID NO: 694357 - DNA, 934 bp, Homo sapiens
tttctcaagcatagccagacttgtttcatgttggctcagaacatccaaggtggtgtccccagaaagagagccaggaggaagccgtgttgctttttatgatccagcctcagaggtcaggaaatgtcacttctgctgtgttctgttgatagaggtaattgcaaacgtctacccaggttcaagggaagggaacatagcctccacccctcaatacaggaatgtcagtgtcacgtcagaagaagagcatgtgggatgcgatatatatttgtgcatcatctttgtaaaaatacaatcaaccacaattgttttatttaatcatccttcaccgtaaatgaagttgcttcgatatatcattatcccaattttacatttaagtgaaagcagaaggaaacattaaagatcttcttacgccctttcggtgtcatactagagcattgcctaataagctgtcaaaagtgtcatctgtacacgattctcagtcttggcgctattgaaattttggtctgggtaattctttgccgtgggggctgttcagggcgtaataggtcatttagcagtatccctggcccctgcccaccagacaccagtagcacaccttcatccctttagttgcgatarccacaaatgtctccagacattgtcagatatctctggggtgaggagagggcaaatgttcccccagttgggaagttttacaggaagaaagttactttgattatttgctattgatgaaggtgagactcttgtaaagttaatgttaacttgtggaggatcattatgttgcaattcatttctgtccagtaggaaatataaatcctacagattatagttgtgttgttttataatttaccagtttcaacttcacttgcagtcttattccagcattctttttgttcattgactatatatagtaatttttcttctccttcttcattca

SEQ ID NO: 694358 - DNA, 649 bp, Homo sapiens
tggtgactgaatttgagacacacacaaaaaaagaaacacttgacaaaacacagagataagccatatttattcaaagtaagaaataagggccatcaataagaaacaatgattttayccatttaaattatattcttcaaaatcagaacacttaaaaatggtaccattcattgcttctcagcctttcagctaagatcaagtgaaaaataattcagttcaagaatattatagaagtactgagaattaacaaaatactttggtaatgaaaatgaagcatctctatctgagcagataatgacttgataatttcatagaaaaatattctaattttccttttatgtatttatctaataatattttttcagggaagggtctacaaaccttttctctttttaataaagctattacactgagtcaaagttgttataatatttaacatcttttattgtttttagtcatttttattatgtatattcatattcacaatcacagtctctgtataaatttatatatatgagtttagacatatacaaatacatagttatttagatacatgataaaattaaacaatgactttaactttaaaatataattgacattatcaacatattatctaaaataatgtatattttttattcattatttaatatta

SEQ ID NO: 694359 - DNA, 618 bp, Homo sapiens
atatgattaagtgttaattttatagtgatcttttgcatatacgaactagatcactttccctcaagaaattcccataagtgtaagcatatttattcagatcattcatcttaatcttccaccaaagaaaaataatgttgcatgtgagagtattttaaagtgactgatgagtakattgaaagaacgataaattgttagtcctaatgaaaatatattgatgtgctaagtaaaaatctgtctgtagtagccctactttattcagaaaagggagaatgaaagggcataaaaaacaagaaccccaaatctccataccctgaccaaggcacatgcctcctatgaaaagccccactagacagtgattccaatggacagagccagagcaaagtgacatgggtttggcaagcatactgccatcctattctcagcatgcacctgtaaattccagtatattttgtcaatataacttatcccacaaatgaaagaaaatgtgaatttcttttctttcaaaccataatgatttggctcctggtttgctctctctatcaccttcctctcaccagcaacatatcatgagaacttgtcccagtttctttctttaaatgcacccatggtgcgtccacc

SEQ ID NO: 694360 - DNA, 618 bp, Homo sapiens
atatgattaagtgttaattttatagtgatcttttgcatatacgaactagatcactttccctcaagaaattcccataagtgtaagcatatttattcagatcattcatcttaatcttccaccaaagaaaaataatgttgcatgtgagagtattttaaagtgactgatgagtatattgaaagaacgataaattgttagtcctaatgaaaatataytgatgtgctaagtaaaaatctgtctgtagtagccctactttattcagaaaagggagaatgaaagggcataaaaaacaagaaccccaaatctccataccctgaccaaggcacatgcctcctatgaaaagccccactagacagtgattccaatggacagagccagagcaaagtgacatgggtttggcaagcatactgccatcctattctcagcatgcacctgtaaattccagtatattttgtcaatataacttatcccacaaatgaaagaaaatgtgaatttcttttctttcaaaccataatgatttggctcctggtttgctctctctatcaccttcctctcaccagcaacatatcatgagaacttgtcccagtttctttctttaaatgcacccatggtgcgtccacc

SEQ ID NO: 694361 - DNA, 791 bp, Homo sapiens
ttgacaccagcctggccaacatggtgatatcccgtttctaccataaaatagaaaaattagccgggcgtggtgccgtgcgcctgtaatccyagctactggggaggctgacatgggaaaatcgcttgaacctaggaggcagaggtttcagtgagccgagatcacaccactgcactccagcctgagcgacagagagaaactgtctcaaataaataaaatttcctataagcacatcaaatttgacatattgaaaccaaactcttccagcctgtttcttctgtaatctcagtgagcagtgaaactatcttctgttaaccaaaccagaaatttacctctgaaactccccctaaacatcacttcttccagaaaaaccttccaatctcctgcatttggtgcagcatcttacccctaacttcctctttcaacttaccatgtaattcctagtttatctgtctcctctactgactacataagctttccaagatgatcctgttacactgctttatgcacagctcctagcacattataggcagttatgaatgaacaccaatattctttatggccagtgcctagcacatttgaatgagtatgaatatattcttctggagccaagggatatagagtttcctgcctgaaggctctatctagagtaagtttaggagccaatcttgagaaggtaattgcatgcttctgctgagtggccaaacagaatctgtcccctgaggagtcctcattatagctactcatatgattatctactcatatgagacagacagagactaagaataatgaat

SEQ ID NO: 694362 - DNA, 2443 bp, Homo sapiens
  misc_feature 2343, 2344, 2345, 2346, 2347, 2348, 2349, 2350, 2351, 2352,2353, 2354, 2355, 2356, 2357, 2358, 2359, 2360, 2361, 2362,2363, 2364, 2365, 2366, 2367, 2368, 2369, 2370, 2371, 2372,2373, 2374, 2375, 2376, 2377, 2378, 2379, 2380, 2381: n = A,T,C or G
  misc_feature 2382, 2383, 2384, 2385, 2386, 2387, 2388, 2389, 2390, 2391,2392, 2393, 2394, 2395, 2396, 2397, 2398, 2399, 2400, 2401,2402, 2403, 2404, 2405, 2406, 2407, 2408, 2409, 2410, 2411,2412, 2413, 2414, 2415, 2416, 2417, 2418, 2419, 2420: n = A,T,C or G
  misc_feature 2421, 2422, 2423, 2424, 2425, 2426, 2427, 2428, 2429, 2430,2431, 2432, 2433, 2434, 2435, 2436, 2437, 2438, 2439, 2440,2441, 2442: n = A,T,C or G
cactttgggaggccgaggtgggtggatcacaaggtcaggagttcgagaccagcctggccaacacagtgaaacctcatctcttctaaaaatacaaaaataagccgggcatggtggcgcacrcctgtaatcccagctactcaggagtctgaggcaggagaattacttgaatccggaaggtggaggttgcagtgagccacgatggtgccactgcactccagcctgggtggcagagcgagactctcggcaaaaaaaatagagataaggaaaaaaagaaaaggttaatcaagagacagtgcagtatttaacatactgctgaagaccggatatacctgtatcagctaaacaagcaaaagcagcaattactttcaaataagttgtacctcagttttcgagtattataactccactcccaaggttccttgattgtattacaagttatgtctaaaacaatactttgcttttaacagaaatggaatttcatttcaaccatatatgaaagctacacatttgaaggccattcaatatcatacttttatacttaattacctctgagaaaatggagcaaattttgacattcttccaccttaaaaacattttctcctacctacattctaacaccccttactcatataatattaccagatatgttgttagtaaaaatcagtagtgctggccagcgttttaaaacaaacatcactaactacaaagatactctacttgaaatcaggtcacaaaaaaccaacgctgcttttcaattaaaactcaaaaagggccaggagctgtagctcactcctgcaatcccaacacgttgggaagccaaggcagaaggatcccttggggccaggagtttgaggccagcctgtgcaacatagcgaggccttgtctctactaaaattaaaataaatgtagctgggtgtggtagtatatgcctatagtctcaggtactcggaagcctgaagtgggaggatcacttgagtcgaggactttgaggctgcagtgagccatgactgcaccactgcacttgagcctaagtgacaaagcaagaccctgtctcaattaaaaaaaaaaaaaaaaaaaaagcctaagaaatagatgactattttctttatacttttctgtattttaaaatattttgtaacaattataagtcaagaaaaaattttaagtgtagccctaaactccagctccgttttgcaaaataaggcataaattaaaaattgtgtgcaaaatcgtaatcgatgcttggtcttaagtttgactgttgtggtacttgaaggataatgagtagaaattcaatgactcaatgaaaatgacaaatgctaaacatacacccaaaacaaaacaaaaaagctaattaaggagttacaataaaaatctttatttaggtttggtcagtacaggtaagatatactggagtcacagagcaatatgcattaacaggatacaacagttcataaaaactgagtaactatgcacacaaatttcttaaacagtcacctaaagagaaaatgcacagatgtatggtggaaaaaactgtatctaacactgaaactactacaggactccatcaatgagtccaacttttagtgataaaaaactactgtactgggcaaacttggcagtcataaacccacatctactctaacaagtctgaatggtgcataagtacagtaacagcatgagtacgaatgcccttacacagcacagattctaaacagacagatttatacagacatcattgtgttgtattttaaggaaaaatttccatttacaatttcacattaactcatataaaaataacttgaccctacacaaaatgtccttttagcaacattcaaagtaattaactgttacaatttccaaagcggcagaagtattgaagcaaaaaaaaaaaaaaaaaaaaaaaaagaaaagaaaaaaaaaacaaagaaaaaaaacaacaaaaaaaaaccaaaacgtacacccacaaaaaggcaaattgtgacaaaagtatgcattaattttctggacagtatcctctcccaaattaaatgacactgtataaaaatttgctgaaaaaatattacaaaactgaaccctgtacatttacacttgagtccaagccattctgaacgtggcgggaacccacagttcgattacctttcccactcactgctttctcctcttgagggtcatgactggagtctgtgtcatttgattggtgtgtgagagagttttccctgcccgtgggagagtctacactttcataccccgcactgagttgatttacgtaaccactacctcctctgccagttctctcctctgagctgttggaggacttattaccattccctggagaagaannnnnnnnnnnnnnnnnnnnnnnnnnnnnnnnnnnnnnnnnnnnnnnnnnnnnnnnnnnnnnnnnnnnnnnnnnnnnnnnnnnnnnnnnnnnnnnnnnnnt

SEQ ID NO: 694363 - DNA, 1350 bp, Homo sapiens
tgaacagtggttttaaatataaggacatatctgttttacctaataaaaagtacaagaactggcagtcccttggtgagtctggaagattaacaaggtcatcccggacccagggactttccattcttgactctgaattcccagcagcctgctttcattttccaacttgttgcctcatcgtcacaagatgtttcctataggtgcaagcagcacagcctctcacagcctagtaagagacaacaaggaagggagggggaaaacatttcacctcatgtgcctctcyccggaaggaaaatttttctcagaagccccgagagatttcctctgatcccagccagaactgctcaactggccaactctgcctgcaagaagactgagcaccatcactatgtggtaaagaccatgacagccatgcttgccttagaccagcagttctcatcaagggcatgacgggagggggcagtattgaaaatatagaaagggacactttcagctgtcacatatacagagaggtgctattggcatctagtgggttggtgtggggatgctaaatgtcctaaaatgcacaagatacttttcacacacacacaaattgtcttgtccaaaattccagtagcacacttgttgagaaacactggcttacaccagccataattcatctcctggcctgaagatactatgactcaaacacaatttagaagttcctagattgtgcaagaggaggaacatggctcccagtagtgtgtgccacaataccccagcagatgttggaaggagtacagcaatgcctagtcattctggcatgctaaatccttttcagaaagctgctattatttgtactgaatgggcaactaggaaagaattacagggatcaggacagggaaattacatgcaaaaggtgcctttatttttcctaatgaagggatttttttccagtagctggacaagcctgtttccgagaataattgactctgagctacccatacctctgttacctctgttgaccaacagatgctccttactcccaccaaggagttcagaatgtttaaaacctaactctatctttatttttttactataattattttagaattagagacagggtctcgctgtgttgcccaggagggtcttgaactcctgggttcaaggacttctcccacctcagtatcccaaagttctaggcttataggcatgagccactgtgcctaaccataaaattattatttttatttgacacataataactgtacatattctggagtacactgtgatatttccatacatgtatacaatgtgtagtgatcaaatcagggtaattggcacatctatcaattcaaatatctattatttctt

SEQ ID NO: 694364 - DNA, 1350 bp, Homo sapiens
tgaacagtggttttaaatataaggacatatctgttttacctaataaaaagtacaagaactggcagtcccttggtgagtctggaagattaacaaggtcatcccggacccagggactttccattcttgactctgaattcccagcagcctgctttcattttccaacttgttgcctcatcgtcacaagatgtttcctataggtgcaagcagcacagcctctcacagcctagtaagagacaacaaggaagggagggggaaaacatttcacctcatgtgcctctccccggaaggaaaatttttctcagaagccccgagagatttcctctgatcccagccagaactgctcaactggccaactctgcctgcaagaagactgagcaccatcactatgtggtaaagaccatgacagccatgcttgccttagaccagcagttctcatcaagggcatgacgggagggggcagtattgaaaatatagaaagggacactttcagctgtcacatatacagagaggtgctattggcatctagtgggttggtgtggggatgctaaatgtcctaaaatgcacaagatacttttcacacacacacaaattgtcttgtccaaaattccagtagcacacttgttgagaaacactggcttacaccagccataattcatctcctggcctgaagatactatgactcaaacacaatttagaagttcctagattgtgcaagaggaggaacatggctcccagtagtgtgtgccacaataccccagcagatgttggaaggagtacagcaatgcctagtcattctggcatgctaaatccttttcagaaagctgctattatttgtactgaatgggcaactaggaaagaattacagggatcaggacagggaaattacatgcaaaaggtgcctttatttttcctaatgaagggatttttttccagtagctggacaagcctgtttccgagaataattgactctgagctacccatacctctgttacctctgttgacyaacagatgctccttactcccaccaaggagttcagaatgtttaaaacctaactctatctttatttttttactataattattttagaattagagacagggtctcgctgtgttgcccaggagggtcttgaactcctgggttcaaggacttctcccacctcagtatcccaaagttctaggcttataggcatgagccactgtgcctaaccataaaattattatttttatttgacacataataactgtacatattctggagtacactgtgatatttccatacatgtatacaatgtgtagtgatcaaatcagggtaattggcacatctatcaattcaaatatctattatttctt

SEQ ID NO: 694365 - DNA, 651 bp, Homo sapiens
ccacaaacatcatatgtgagagtccaatgcaaattttgactcttttccttaagaaaaaaataaaataaaacaaacaaaataagaaaatcttcccctggataggaaaagtcagtagtattttggtggacaaataatttatttctccttgcatgatctacagatagctttactttctccttcttttctgataggctgggatgaatagttggtctcttcctaacattcaatccccaaaatccagtcttattattttttgtttgaagatcacattacttacaattttattagctagatagctaataaagtattycttcattccaatgggttccatataattttgactgccagctctgttacatataaaccgtgtatagcttctctgaatgcctgtaagatgtagttttgcttttacatggaaatgctagaaagttttttaccttagttctccactgagaacacatttctcccattagaaacatactattatagcattactcaacccccatcttcaggatctcatctcccctccagccctcagagcagctcaggttctgttcctgttgagcaccatgtcatgcggtgttgtgaacaatcaaagttagacaatgcttgcactttaatcctggcgtcctcccttactttttttgtcag

SEQ ID NO: 694366 - DNA, 598 bp, Homo sapiens
caaatgcaagaaagcacccagacactctgagcttttggtgttataactgcaatttataccatttgactgacccaccctcttttttatatgtccatgcccctagtaaccaccattccgctgtctacttctataagtttaactttttaagattccacatataaatgagattctgcaatattagtcttttttttgtctgactcatcatcagggtaatgcaaatcaamactacaatgagataacacttcatacctgagatgatggctactatcaaaaaagataagagataacacaagtgttggcaaagatgtggagaaacagcaaagattgccagaaaaccactagaaacaatggtaaaagcatgaaacagattcttcctcacagcccttagagggagccaaccccgggcccggggcggtggctcactcctgtaatcctggcactttgggaggctgagggagacagatcacgaggtcaggagatcgagactatccaggctaacacagtgaaaccccatctttattaaaaacacaaaaaattagccaggcctggtggcaggcgcctgaattcccagctactcgggaggctgaggcaggagaat

SEQ ID NO: 694367 - DNA, 598 bp, Homo sapiens
caaatgcaagaaagcacccagacactctgagcttttggtgttataactgcaatttataccatttgactgacccaccctcttttttatatgtccatgcccctagtaaccaccattccgctgtctacttctataagtttaactttttaagattccacatataaatgagattctgcaatattagtcttttttttgtctgactcatcatcagggtaatgcaaatcaacacyacaatgagataacacttcatacctgagatgatggctactatcaaaaaagataagagataacacaagtgttggcaaagatgtggagaaacagcaaagattgccagaaaaccactagaaacaatggtaaaagcatgaaacagattcttcctcacagcccttagagggagccaaccccgggcccggggcggtggctcactcctgtaatcctggcactttgggaggctgagggagacagatcacgaggtcaggagatcgagactatccaggctaacacagtgaaaccccatctttattaaaaacacaaaaaattagccaggcctggtggcaggcgcctgaattcccagctactcgggaggctgaggcaggagaat

SEQ ID NO: 694368 - DNA, 598 bp, Homo sapiens
caaatgcaagaaagcacccagacactctgagcttttggtgttataactgcaatttataccatttgactgacccaccctcttttttatatgtccatgcccctagtaaccaccattccgctgtctacttctataagtttaactttttaagattccacatataaatgagattctgcaatattagtcttttttttgtctgactcatcatcagggtaatgcaaatcaacactacaatgagataacacttcatacctgagatgatggctactatcaaaaaagataagagataacacaagtgttggcaaagatgtggagaaacagcaaagattgccagaaaaccactagaaacaatggkaaaagcatgaaacagattcttcctcacagcccttagagggagccaaccccgggcccggggcggtggctcactcctgtaatcctggcactttgggaggctgagggagacagatcacgaggtcaggagatcgagactatccaggctaacacagtgaaaccccatctttattaaaaacacaaaaaattagccaggcctggtggcaggcgcctgaattcccagctactcgggaggctgaggcaggagaat

SEQ ID NO: 694369 - DNA, 1121 bp, Homo sapiens
gtgataaaatgtctcattcactctgaaacattatcactatacaggcactccttacagtgtttgttctcatatatgtcctcgtatttttttttycttttaaagtggctctgagaaatggctaatgcacaatctaattatgtgataataaatgttaatgacagtattatcagatgataactaggcttcattaatgtgtctcattatgattctcagtcccttgtggaagattgtgaagaaaggaccttagatattccagattatatttgaatgtagtagttacagagcccatatccagggagaaaggaagatatcagagacacctttaagctctttctctaattttgcttcttcaaacctaagcatccatcaatcacatctcaaaatttatcatataccttcagcataataaaaatagtaattatagtaatagtaatagtcctgatatgacaaataatatggaagatcattttaattgtaactgctgatatattttggtataagtatataggcatttatgtcccaaacattatgaccttgattatccataagcaagttcaaatcatttagagaggatacacttatttaaaggtttgcacctgttaaattttggttctgctacaccatatatatatattttgttgttgttgttgttgttgttgttttgttgttgttgttgttgttgaaatggagtctccctctgttgcccaggctggagtgcagtagcacaatctcagctcaccgtaacctccgcctcctgggttcaagtgattctcctgcctcagcctctcaagtagcttggattacaggcatctgtcaacatgcccagctaattttgtatttttagtagagacgggtttctccatgttggtcaggctggtctttaactcccgacctcaggtgatccacccacctcagcctcccaaagtgctgggattacaggcatgagccactgcacccagccagctacactattcttaatattcaaagtagcactgtcaagttatcaccaagatttcatcacaatttttattatttttctacatttaccctctattttaactatgtaaatttatcgaatgttttaatatttgagagggcaaatctactatcaccgttattta

SEQ ID NO: 694370 - DNA, 1121 bp, Homo sapiens
gtgataaaatgtctcattcactctgaaacattatcactatacaggcactccttacagtgtttgttctcatatatgtcctcgtatttttttttccttttaaagtggctctgagaaatggctaatgcacaatctaattatgtgataataaatgttaatgacagtattatcagatgataactaggcttcattaatgtgtctcattatgattctcagtcccttgtggaagattgtgaagaaagsaccttagatattccagattatatttgaatgtagtagttacagagcccatatccagggagaaaggaagatatcagagacacctttaagctctttctctaattttgcttcttcaaacctaagcatccatcaatcacatctcaaaatttatcatataccttcagcataataaaaatagtaattatagtaatagtaatagtcctgatatgacaaataatatggaagatcattttaattgtaactgctgatatattttggtataagtatataggcatttatgtcccaaacattatgaccttgattatccataagcaagttcaaatcatttagagaggatacacttatttaaaggtttgcacctgttaaattttggttctgctacaccatatatatatattttgttgttgttgttgttgttgttgttttgttgttgttgttgttgttgaaatggagtctccctctgttgcccaggctggagtgcagtagcacaatctcagctcaccgtaacctccgcctcctgggttcaagtgattctcctgcctcagcctctcaagtagcttggattacaggcatctgtcaacatgcccagctaattttgtatttttagtagagacgggtttctccatgttggtcaggctggtctttaactcccgacctcaggtgatccacccacctcagcctcccaaagtgctgggattacaggcatgagccactgcacccagccagctacactattcttaatattcaaagtagcactgtcaagttatcaccaagatttcatcacaatttttattatttttctacatttaccctctattttaactatgtaaatttatcgaatgttttaatatttgagagggcaaatctactatcaccgttattta

SEQ ID NO: 694371 - DNA, 1121 bp, Homo sapiens
gtgataaaatgtctcattcactctgaaacattatcactatacaggcactccttacagtgtttgttctcatatatgtcctcgtatttttttttccttttaaagtggctctgagaaatggctaatgcacaatctaattatgtgataataaatgttaatgacagtattatcagatgataactaggcttcattaatgtgtctcattatgattctcagtcccttgtggaagattgtgaagaaaggaccttagatattccagattatatttgaatgtagtagttacagagcccatatccagggagaaaggaagatatcagagacacctttaagctctttctctaattttgcttcttcaaacctaagcatccatcaatcacatctcaaaatttatcatataccttcagcataataaaaatagtaattatartaatagtaatagtcctgatatgacaaataatatggaagatcattttaattgtaactgctgatatattttggtataagtatataggcatttatgtcccaaacattatgaccttgattatccataagcaagttcaaatcatttagagaggatacacttatttaaaggtttgcacctgttaaattttggttctgctacaccatatatatatattttgttgttgttgttgttgttgttgttttgttgttgttgttgttgttgaaatggagtctccctctgttgcccaggctggagtgcagtagcacaatctcagctcaccgtaacctccgcctcctgggttcaagtgattctcctgcctcagcctctcaagtagcttggattacaggcatctgtcaacatgcccagctaattttgtatttttagtagagacgggtttctccatgttggtcaggctggtctttaactcccgacctcaggtgatccacccacctcagcctcccaaagtgctgggattacaggcatgagccactgcacccagccagctacactattcttaatattcaaagtagcactgtcaagttatcaccaagatttcatcacaatttttattatttttctacatttaccctctattttaactatgtaaatttatcgaatgttttaatatttgagagggcaaatctactatcaccgttattta

SEQ ID NO: 694372 - DNA, 1121 bp, Homo sapiens
gtgataaaatgtctcattcactctgaaacattatcactatacaggcactccttacagtgtttgttctcatatatgtcctcgtatttttttttccttttaaagtggctctgagaaatggctaatgcacaatctaattatgtgataataaatgttaatgacagtattatcagatgataactaggcttcattaatgtgtctcattatgattctcagtcccttgtggaagattgtgaagaaaggaccttagatattccagattatatttgaatgtagtagttacagagcccatatccagggagaaaggaagatatcagagacacctttaagctctttctctaattttgcttcttcaaacctaagcatccatcaatcacatctcaaaatttatcatataccttcagcataataaaaatagtaattatagtaatagtaatagtcctgatatgacaaataatatgkaagatcattttaattgtaactgctgatatattttggtataagtatataggcatttatgtcccaaacattatgaccttgattatccataagcaagttcaaatcatttagagaggatacacttatttaaaggtttgcacctgttaaattttggttctgctacaccatatatatatattttgttgttgttgttgttgttgttgttttgttgttgttgttgttgttgaaatggagtctccctctgttgcccaggctggagtgcagtagcacaatctcagctcaccgtaacctccgcctcctgggttcaagtgattctcctgcctcagcctctcaagtagcttggattacaggcatctgtcaacatgcccagctaattttgtatttttagtagagacgggtttctccatgttggtcaggctggtctttaactcccgacctcaggtgatccacccacctcagcctcccaaagtgctgggattacaggcatgagccactgcacccagccagctacactattcttaatattcaaagtagcactgtcaagttatcaccaagatttcatcacaatttttattatttttctacatttaccctctattttaactatgtaaatttatcgaatgttttaatatttgagagggcaaatctactatcaccgttattta

SEQ ID NO: 694373 - DNA, 1375 bp, Homo sapiens
gagtcaattttatacaataaaaggtgaacttttatgcatgaaacaataatttaacaaaaaatgtactgggagaagaatgttcattacaaatataggaaacataaatattaccaaatattggcaagcactaaaatgttcagaaatataagtctattacagttatagctctctcaagcaaaaaaatagcagagaaaaacttagtttaccttaggggctatttatttacttagagatttgttaaaaggtcaaatggggtcacacagaatactaagaagagctgttcacccaggcctcactaagaactcttcttcattcagtagctatatggtaatatgacaactgctcctacgacccaaagaggaactacagcaactactctttagcatctgttgctcccaactctgctttgcaattatatgactcaagcattctggctccgttaactattactgctgttactcccaaytaaattccctctaaaaaataaaaatttttaaagctgcaatttaagctttctgctgcctcatgacttcaattccatcagagttatgcattgtttcctctgtacatctttgctctgcttccattgctaattccctagtaaagtgttgtatattcaaagttccaaagaaacagaatatccaagacatcaccaatcatccaaaacacagtgtaggaggccacagttaagagaagcaagaccattagctctttttataggcttgagaacaacaggatgctttggtcctgtatcagcaggatgcttttcgggtagatcctactgccaccctactatcgggtagatcctactgccaccctagctatgggcacatgtcagagtcccatgtaataaaggagacaaaaggaaaccaccatgagtataaactaagaaaagtactccaaggtttctaagaatggagctgtataactcactttgccccatttgttacttctccacggtacttaccaccacctattacatatattttgtttatagtcagtcttccctcattagaatgaaagttccgtgaggacaggactatacagtcagccctcagtatccatgggggactagtttcaggatctcctgaggataacaaaggatactcaagtccctgatataaaatgacacagtatttgcacatcacctttgcacatcctcccatatacttcatatcaactctagatcactcataatatccgatgtaaatgtcatgcaaatagttattgtactatattgtgtaagggataaggagaagaaaaaagtctgtacatgttcagtacagacgcaatttcttttcccaatatttccaatccttggttggcttaataaacagatgtagaacccaggaataagttctggtgtcctattgca

SEQ ID NO: 694374 - DNA, 326 bp, Homo sapiens
tatataatatrcatacacacacatatatacacatgtatatatatatatgtgtgtgtatacatatatatagaaggaattctctttcttttatcccttattccaatcctgttattattaaggattatatttaactttacatgttcaaattagtatagttcctgtctcctgactgaacgctgatgcagggaaactctggtctctgactttgatttttttttaatagtaatgtttggtacaatcaactgacttaaaactttaaaaaactgaatttctacgggtaaatgtttaaatatgagaaaaaagttgactttagaatgtctaataag

SEQ ID NO: 694375 - DNA, 910 bp, Homo sapiens
ttagccaggggtggtggcacgtgcctgtaatctcaactacttgggaggctgaggcaagagaatcacttgaacccgggagggtagtggaggttgcagtgagctgggatcacgccactgcactccagcctgggcaataagagcaaaattccatctcaaaaaaaaaaaaaaagtataaggaattaataatttattcatcactaattaaaaaaaaaagctacgtttttaaatgtagttggcgaagatacaaacacaagcaaaacagacagactgtcctaatgaagcttatgttatagtgaggagagagacaaaagttatatggtacaaccaaaaggaagaaaaataaggcaataacagggacttaggtaataggagaaagcatctctgatgaggtaaaatttgaaagaaaagagaggcaaaagatttctggggaaagagaagtataggaaaatttcagtcttatttagtcatgttttattgtgcaattagtattactggtatttatgaactgctgctataattaatttagcacttatttgcctccaaagaaattattacctatttcacggataataaagatttataccacagctaagaacccatgtagttgtattaaaggttattcagcaaaagactttggtactactcataaatrcaagtctaagaaaatctgacaatcgttggctgccaagtagaatttctataatttgctgaagaaggagtacgttgggaggtatcatcttggtaacttttttttttgagacggagtttcgctcttgttgcccatggcactatcttggctcactgcaacctgcacctcctgggttcaagccattctcctgcctcagcctcccgagtaactgggactactggtgcctgccaccacgcctggctaatttttgtatttttagta

SEQ ID NO: 694376 - DNA, 1011 bp, Homo sapiens
gatgggtatgttatcagaggacttaccatgcaagacatttgaagacaaatccctgaagtctagagtgacacatcaccaatggctgattgaatgccactgaggtcatcagcaatggtaatggaacacctaaatatgacaccaaatggacaccataatagccttaatctctggaagctttcaaatcacactatatggttctggaggcacttagactgtccaccttccatggatgattctggttagaaaggaggcaatgggcaatggcaaggagtgaggggagagatagggaagtttgcctatggctcctcactacagggccacatgggagaaggcacagctaggacctcttccattatgtgtatatatggaagtagggaaggacttcccttaatctcttatctctttgttactttgtgacagtgcttctttttttttctctttttccttctttttttttgagactgagtccccctctgttgcccaggcaggagtgcagtggcgtgatcttggctcactgcaacctgcctccctggttcaagtgattctcttgccttagcctcctgagtagctgggattacaggcacaggccactacgtccagctaatttctgtatttttagtagagatggggtgtcaccatgttggccaggctgttctcgaactcctgacctcaggtgatcctcctgcctcagcctcccaaattgccaggatcacatgcataagccactatgccaggcaaatggygtttctatctcaataaatatcaacaacagacaccgaaagtctaaaacagaaaaaggtggaaattacttttctttttttttttttttttgagatggagtctcacactgtcgcccaggctagagtgcaatggcgtgatctcggctcactgcaacctcggtttcctgggttcaagtgattctcctgcctcagcctcccaagtagctgggattacaggtgtctgccaccatgcccagctaattttttttgtatttttttagtagagatgggg

SEQ ID NO: 694377 - DNA, 1566 bp, Homo sapiens
agacggatatgcaaagatatgtttgtatcacagttggcaatgactgaatactatacagttaaataatatgttggacctgttggatgtgggaggggatgtaagtgggaacaaatcctctgaagttagtttgagaaaactgatgaattggcaacaatgtttagtctgtcacatataaaatacacaatatttctaaagagaaccaggctgtgttaatayacgactttataaagcatgcatttgattatttaacgaccaatctgaggatcttacaaaaatcattcgtgtgtatttttatgaggcatgtcttattaagtgtacctttcagctcagaactttataaaacaaaagaaatttaactaagaagccctgaatctacccactggggtcctctatttattaataaaaaacagttaacttcagtgtaactaatttagacagaagtctgaatttgttagttgcatgggaataaaaggatattattctactaataactgctgctaactgtaaccagtcaaagctttctttccagctgatggaagattcccttaacaatcctcatccaattctatttcctttttcatctctttcaattagtagaacagtctcattttggctcattaagactctgtcttattcattttcatatgcagtttaaagacatttttcctcctctccccatctccatctcctgcctcagtcagcacaggccaaatgcatgcatctagagtcttggtgggtgagtgaagtgttgggcttaccctcacctctcacctctccactcaccctcagctctctctcccctgtttacggcagagccacagaataagagaattgagagatagcctcctttaacatgactacgaatctcagatgctattggaaagctcttcctttactataaaggttaaagaaaccaaaaactaccctggttctcttgtagctatggtacctaagtgacctaattgtggctaatgagaaataagcaaaagcttgttatgtggattctgagaatacttttatcttcctgatataaataatacactttgctgttctctcctattcccagacttcttccttccttcagtgtgcacctgatgcctggggttaagacagccaccagagggaaaggctgagagaatttcaaaaccattgagatatggaaccattgagaatttcagaaccattgagatatggaaccattgagaatttcagaaccattgagatatggaatttactctataatatagagtaggaatatactctataatagcaacttcccacaagacatcttgttatatgagaaaaataaatctctatttgttaaggccactgaaaagtaggctcactctgtcacccaggctggagtgcagtggtacagtcttggctcactctgcctcctgggttcaagcgattcttttgcctcagcctctcaagtagctgggactacaggtgcccaccaccacgcctagctaattttttgtatttttagtagagacagggtttcaccgtattagccaggatggtctcagtttcctgacctcgtgattggcccacctcagcctccca

SEQ ID NO: 694378 - DNA, 632 bp, Homo sapiens
cagaagaacagtcacagggcaaagatcagaacaggtgagcaaggctaaatagcgggagaaaagaattttgagaaggtgtccatgctctatcatctcagataatatggaatcaattaaggactgagaaggggcctcatggagatctggcaagrcgttcatcgctgactttgacgataacagtggttagtagagtggctgaagatggaatcagatgccagtagggtaagggaaagaatgaaggtatgaagggaaactttgcagggaagacagagtgacaggacagaccaagataaagttctttaggatgggatagaattaagcagactaaggaaaaggaggtactatagtaactatgttaaagcccagtgatactctttgttgcttgcaagggctaaggcatatagttctaccataagctcaagagtggagagtcaaaatctagattctggattcaaggtttcacaataaattcactgcactagcttcggcagttatttaatgctccctgggtctcaatccatcaacaaataataccaaatatgaagagtatataatactatattccataagcattactatacaaaaatccatatgcatgtaatctgtatcaagcagacagaaaatgctttgaa

SEQ ID NO: 694379 - DNA, 632 bp, Homo sapiens
cagaagaacagtcacagggcaaagatcagaacaggtgagcaaggctaaatagcgggagaaaagaattttgagaaggtgtccatgctctatcatctcagataatatggaatcaattaaggactgagaaggggcctcatggagatctggcaagamgttcatcgctgactttgacgataacagtggttagtagagtggctgaagatggaatcagatgccagtagggtaagggaaagaatgaaggtatgaagggaaactttgcagggaagacagagtgacaggacagaccaagataaagttctttaggatgggatagaattaagcagactaaggaaaaggaggtactatagtaactatgttaaagcccagtgatactctttgttgcttgcaagggctaaggcatatagttctaccataagctcaagagtggagagtcaaaatctagattctggattcaaggtttcacaataaattcactgcactagcttcggcagttatttaatgctccctgggtctcaatccatcaacaaataataccaaatatgaagagtatataatactatattccataagcattactatacaaaaatccatatgcatgtaatctgtatcaagcagacagaaaatgctttgaa

SEQ ID NO: 694380 - DNA, 610 bp, Homo sapiens
cggctcactgcaagctccacctcctgggttcatgccattctcctgcctcagcctccgaagtagctgggactacaggcgcccgccaccatgcccggctaatttttttgtgttttttagtggagacggggttttactgtgtcagccaggatggtctcgatcttctgacctcgtgatcttccygcctcagcctcccaaagtgctgggattacaggcgtgagccaccatgcccggcctatgtgaagcatctttttatatgcttatttgtcatctgtatatcttctttggtgaagctaatgtttttatttatttgtcctgcttcagtttatcacttttaatttttcaataaaaagaattttcccttacatatttatatgcttcacatttagagttggtcatgatgttgtaagttataatacaaaaacaacttaaatcagtcatataccagtatctgaagtactggctctgaaattcccaggttcaaactttatcttgttcattctagagccattgatccacatggaataaatataaattcatatctatttctagatatttattcactactcccacttattcactacctaacaatagtagtggttagctatacatt

SEQ ID NO: 694381 - DNA, 2416 bp, Homo sapiens
tgtctgagttccctagttagacgctgtgctccttgaaggctgtgagtagtttttaaatactattttactcaattgcaattgcttaatatctggcacacagcaggccctctacaaatatctatgcatgaaagaatataattttcatcactcattccattctgaaatgcacacacacacatacacacactgatgaatcaatcaatggataaacaggtagataacagctaatagaaaataatgactgcaggttgtataacacaatcaaagtgtttgttgttgtttattttctttgaaattaactggcatgctggatctcattgacactagcatcaaaatacctgatattattagccgtgacatgtgttaactagtggtttctatgactgcttcccctcactactccccacctcagtgatccttagtgatccatttgctcatcaaatcaaaactaatttccccaaagcaaggctattatgaatttgaaaaagttgattatttcccagcagataacttgaaatgtcatggagcctatttaaagacagctttatatcacaaaccttatgttcaagccttaatatacaaccaaatggaccaaatcaggcaaacagaatcaggcttccaaatataatcataattctacattagctctcaaaataagattgcagttcacatagtctacaaagtatgttttgacattaaatgtaacatactgaggattatttttctgatttatacttgctttggtttctacctttgggtaggtggctctgactatgaaaaagtcactgtgagcctgccaggctacatctccctcgcagcagtgaagtcatgccctatcctcctccacattgccttttccttcagattcttatttacagatgaatgtttcacaatttttttttctcttccttctaaaactaagcagaaatatttcctctagtgttattcattgtgaggagaggcattttttcttgcaggtgggagagtatagataagggtaataaagttcccatagtttttgtttttgtttttgtttttctgggcatgaactaatagtatttattttcttttaaatcacaaagtatgattgctatagcacttctcagttctattttcttttttaaaaaacagctataaattaattgtacaggcagtttcaagtactcaaaacgtaatagattaatcttgacatctgtggcttgtggattcaagtccctacattctctagcttgtagtgtttatgaggtagtggatgtgaagagttcataagtcaaattcacatgtaatttgtactggtttcatcattcatcataaaatatgctactgaacaatagtgagtacgctgtcgatatgtaaatacacaaatacaagtgcacacaacatataacaaagcagtttttatgatgtaccttttgcattacaatactcttatgtagctataaaactactacaagagataaagtaaatttaaaagctattttcttcagttgcatgtacatagatgtatcctagagaaatgctattgtccctcagaaatagtatttgtaaatgaatttttttttagacaaacccaaagtactatactatggaataagtttgtcttattttgtttttaatcagtgaatatagatgactagttcattcacttagtctttcaaaagagtattaatatcaaaattaycatatggtctgattttttttaaagcccagtttctacaaaacaataaatggtgaggttctgacaattatgagggaaacttagtaccaaatacatatgctatttctccacttgcgcaagagagctaatttgtagaaaacagaagtctaaaagttggtaaatcaaatgtgtttcataatcacatctgtgagagaagaatcctcttatgacttctggaaatatcaaaatttgaaatgactaaataactgacttgccaaggaatttgtattctcttgtacttttacacactaggggagaaaatagtaaaaactagcataatcgtgtggcaaaatatccatgaaataatattttgaacgttaaaatatggatttaaaataagacaaatggatgtgttttttagatgtgtatgcctaaaagatggatactgtggatatctgatggctttcttgattaagccacaaccagtggacctcacaaatgtcaaatatgttattccaaaatgtcagttgtttagactcatttctcagcttgttattgatgagtttcctttcacatttggaggcatcctgttggggaaactgaagaacagatgttaagtgtgaagtgtctccctccttagttcatattcatatcacattgtttgagctgccacatgtaaacaatatagacactaagccaactggtcctctgcctactgctgacgtggcagaaaatatctaggaggtagtcagaggggca

SEQ ID NO: 694382 - DNA, 555 bp, Homo sapiens
  misc_feature 2, 3, 4, 5, 6, 7, 8, 9, 10, 11, 12, 13, 14, 15, 16, 17, 18,19, 20, 21, 22, 23, 24, 25, 26, 27, 28, 29, 30, 31, 32,33, 34, 35, 36, 37, 38, 39, 40, 41, 42, 43, 44, 45, 46,47, 48, 49, 50, 51, 52, 53, 54, 55, 56, 57, 58, 59, 60,61: n = A,T,C or G
  misc_feature 62, 63, 64, 65, 66, 67, 68, 69, 70, 71, 72, 73, 74, 75, 76,77, 78, 79, 80, 81, 82, 83, 84, 85, 86, 87, 88, 89, 90,91, 92, 93, 94, 95, 96, 97, 98, 99, 100, 101: n = A,T,C or G
tnnnnnnnnnnnnnnnnnnnnnnnnnnnnnnnnnnnnnnnnnnnnnnnnnnnnnnnnnnnnnnnnnnnnnnnnnnnnnnnnnnnnnnnnnnnnnnnnnnnnggctgcaagtagatacaaagtattcccagttagattttacatgtatacattttgaaactattaatttttttaaaataaagcaacgactttaaaaaaatttttatttattatttatttatttatttatttttatggagtctcactctgtcgcccaagttggagtgcagtggcgtgatcttggctcactgcaacctctgcctcccaggttcaagtgattctcctgcctcagcctcccrggtagctgggaccacaggcatgtgccaccatgcccggctaatttttgtatttttagtagagacagggtttcaccatgttggccaggcaggtcttgaactcctgacctcaggtgatctgcatgcctcagcctcccaaagagctgggattacaggcgtgagccactgcacccagccaattttcccatttttgacacactaattctaaagtaaactttccc

SEQ ID NO: 694383 - DNA, 636 bp, Homo sapiens
tgcttgggtagtcaagagaccaggaagcagaggaagctggtgtgcaaaagagggaaagatgcaaagatgcacagggagaagcagaagccagggagagagcatgccattacctgagtccccctagtcctttttaagcccatttggaaccctttrttcagagaaaaaaacacttctcttggtttatgctacatccaagtgttttctcttacttgtaataaaaaagccattctgagctccctcgatgaatgtgtttcggtgtggtctctgagtagtttgctcattattgtgtaactgacttatatttcagaagctgccacaaatttggggatttttttttttcagtaactggagaatgatcttagcagagaacctgggctgcatgctgtcttgaagtgtggcttttgttttatagacatgttgtcctatatatgaaatgtaggagtgtcgggaagagggatgggactgggggggtcccatccagaaagagaagtctccctggtttgtgtaaactaaggagagagtggctgattttctatcaggaaagaggttgtttgccccccccccttttttttttttgagatggagtctcgctctttcgcccaggccagagtgcagtggcgcaatctcagctcactg

SEQ ID NO: 694384 - DNA, 636 bp, Homo sapiens
tgcttgggtagtcaagagaccaggaagcagaggaagctggtgtgcaaaagagggaaagatgcaaagatgcacagggagaagcagaagccagggagagagcatgccattacctgagtccccctagtcctttttaagcccatttggaaccctttgttcagagaaaaaaacacttctcttggtttatgctacatccaagtgttttctcttacttgtaataaaaaagccattctgagctccctcgatgaatgtgtttcggtgtggtctctgagtagtttgctcattattgtgtaactgacttatatttcagaagctgccacaaatttggggwtttttttttttcagtaactggagaatgatcttagcagagaacctgggctgcatgctgtcttgaagtgtggcttttgttttatagacatgttgtcctatatatgaaatgtaggagtgtcgggaagagggatgggactgggggggtcccatccagaaagagaagtctccctggtttgtgtaaactaaggagagagtggctgattttctatcaggaaagaggttgtttgccccccccccttttttttttttgagatggagtctcgctctttcgcccaggccagagtgcagtggcgcaatctcagctcactg

SEQ ID NO: 694385 - DNA, 636 bp, Homo sapiens
tgcttgggtagtcaagagaccaggaagcagaggaagctggtgtgcaaaagagggaaagatgcaaagatgcacagggagaagcagaagccagggagagagcatgccattacctgagtccccctagtcctttttaagcccatttggaaccctttgttcagagaaaaaaacacttctcttggtttatgctacatccaagtgttttctcttacttgtaataaaaaagccattctgagctccctcgatgaatgtgtttcggtgtggtctctgagtagtttgctcattattgtgtaactgacttatatttcagaagctgccacaaatttggggatttttttttttcagtaactggagaatgatcttagcagagaacctgggctgcatgctgtcttgaagtgtggcttttgttttatagacatgttgtcctatatatgaaatgtaggagtgtygggaagagggatgggactgggggggtcccatccagaaagagaagtctccctggtttgtgtaaactaaggagagagtggctgattttctatcaggaaagaggttgtttgccccccccccttttttttttttgagatggagtctcgctctttcgcccaggccagagtgcagtggcgcaatctcagctcactg

SEQ ID NO: 694386 - DNA, 678 bp, Homo sapiens
tgaaggaagagtaatgtgaaggaagagtattcgaaggatataagaaaagggatcacacaattaactgtatgtaggctgttcttagggaagatttcttctagaggtggtacttggccttcagtcagaagcatgatttgatatttgatgttaaccaggtaattgaggggataaggtgctttctcagcagaaaagacatagtaggcaaagtctttaagataaaagcacagtgaaagctcaaaactaaaaggaggcttgggtgtctggactccagagacaggaagagtttagagagtctagcagagatagcagagaagactttatcttttttttctttctttyttttttttttctgtagcaaccatctttcctgtgaaaaattccctctcgtactttagttctgtggatccaaaatttatagcattcttctaccaccacaggggtgagtatataataaaaaatgtcagttattcgagtatgtaagaaacttgaaagtcatcactcccatccttacaacaagaaaaatgctgaacaaacagactatcaacaactcattttagatccattagaggactgaggtcacagaaaaactgctgcccccaccctaaatccccactaaattagagagatgggaaaatgcaaagaattatagcctagtggagcaaaagcccaggagccccc

SEQ ID NO: 694387 - DNA, 612 bp, Homo sapiens
tggctagactgtagtaagccagggtgccgattatgatgagccttgggcacgctctaaggactccaacttcattgggacagtttttgaaacaaattttaacataatcattctatgctttagtagatcactctggctgctgcagtgagagaagagactgaagggaggcctgagtagaagcacggagaacagctgagggccattgagactatcctagtaagacaggatggtaattacaccgtgtgatgtcagtggccatggtgagaaattgcagaattctggatatattttgaagttacagtcaacaagcattactgacaaattggcagtgaggtatcagaaaaaaaaaaaaaaaagaggagtcaaggataaattgtggtctcagaaatggctggaagcattaagaacttaaaacaaaaaaataattttaaaaagaaaaaaataaatagtgcaagaacaaaagtcaagaaagaagggatgaagttgaaaagggggaggactaaaaatctgaataataygtggaagtattttgtaaactgttaaaaggctgcaaatggaagttggcacctggtgatgatgatcatcattaattataacactaggaataaggcattg

SEQ ID NO: 694388 - DNA, 1351 bp, Homo sapiens
gaaacagagtggagaaatgtatcctggtgatatcatttgggttctgaatcagtacatacctgcagcaatagttaccccaggaactcttcaatttctcgagccaataatacctttttataaaacttgtgtagcctgcttgggtcaggtttttgtcacttgtgactaaaaaattcctgatgcttatatcttggttgaggatttatcctactgattctactacatgttaaagtgtgataaccaaaattgattgtagtcctccaggaacttaatacagccccatagagcaagttctcttcttctttactttagtaacccacatcacactgttgactgatattgcattttgatcagtgccttacacatagtagatgctaaataaatgacaacagttgtaattctctacccctttttctgaactgaaaaacagagttccaatatgcctgttcagagacaagagctgaaatattgggctccgtctgaggtattatatgataatcaggagtacagtcaaaagagatagtccaagggtctattaaagggtcacatgacacagcaagcggatgatgtagaaagaaggtgttagcataagactggaccctattttctgcaccatattataaccagtaactatcattgatcactcagtacactcaattttgtgccatcactacttcaattctagatgcctggtatttaagtcccaggttgaacctcactgaactgatggtttcctctgatgttattaatwtatctagaaggaggacacttccacagcctttttccaactccaactcaaatccagcatctaatgaacatggctttctaccacttattgcaagtgctgctgacactgctttttttttaatccatctgctgctctcctgcatctttgtttcttggtatttttctacaattattcattgcatcatactactaagagaatttctttctccatctcctcaagaaatccaagactttatttttgtcagttgcactttacatactgtgttaatctgtaccagctaaaggtttcccagttttacacttagctattggctggagttagcctgggatttttttcctacccttctaggtaaagacgggttctcaaacctaaactttctttgaggtctcttgctcctatagatggtttcaggctccctgattctccaagtcagtagtcttcaaactggagaatacattcacgtatataaggagtttccaggaagtacatactagtgagtagtttacaaaatcaatttctagaaattcaactcctgtccaaactattccctgaattgctttggatgataacatggctgctcatgctagctttttctttttttttttt

SEQ ID NO: 694389 - DNA, 644 bp, Homo sapiens
agcttgagagacagacactctccttggaagacagacactttccttggaaaacagagaatacaaagaaaattagtttttctaacacttaattcatgtatataccagtttgttctctctctctctctctctctctmtatatatatatatatatatgtatatacacacacatttttatatatttatacatttttatatacaaatataaaagtttaaatttttccttgcctcttgtttagtgtagtcattttgataggataaatcccattgtggattttgatttttattactctatcttctactaccccaccctctaagctagcccagctaacagctttcccaatgttaaaactgtgcgtgtgtatatatatgcagaagatagagagagagagagagagacagagagagacagagagagagacagagagagagagagaccagcttgtatatacatggtatatgcatgaatatatatatacatgaaaaatatatatttatatatatatatattcaggcagtcactgcactcactgttctaggtgctgggcatgcagaggtgaatgtgacagatgtgatccctgtccccgtggggctcatgctgtgtgctggggaggagaggcatttagaagttaaatacccaaataaaa

SEQ ID NO: 694390 - DNA, 644 bp, Homo sapiens
agcttgagagacagacactctccttggaagacagacactttccttggaaaacagagaatacaaagaaaattagtttttctaacacttaattcatgtatataccagtttgttctctctctctctctctctctctatmtatatatatatatatatgtatatacacacacatttttatatatttatacatttttatatacaaatataaaagtttaaatttttccttgcctcttgtttagtgtagtcattttgataggataaatcccattgtggattttgatttttattactctatcttctactaccccaccctctaagctagcccagctaacagctttcccaatgttaaaactgtgcgtgtgtatatatatgcagaagatagagagagagagagagagacagagagagacagagagagagacagagagagagagagaccagcttgtatatacatggtatatgcatgaatatatatatacatgaaaaatatatatttatatatatatatattcaggcagtcactgcactcactgttctaggtgctgggcatgcagaggtgaatgtgacagatgtgatccctgtccccgtggggctcatgctgtgtgctggggaggagaggcatttagaagttaaatacccaaataaaa

SEQ ID NO: 694391 - DNA, 644 bp, Homo sapiens
agcttgagagacagacactctccttggaagacagacactttccttggaaaacagagaatacaaagaaaattagtttttctaacacttaattcatgtatataccagtttgttctctctctctctctctctctctatatmtatatatatatatatgtatatacacacacatttttatatatttatacatttttatatacaaatataaaagtttaaatttttccttgcctcttgtttagtgtagtcattttgataggataaatcccattgtggattttgatttttattactctatcttctactaccccaccctctaagctagcccagctaacagctttcccaatgttaaaactgtgcgtgtgtatatatatgcagaagatagagagagagagagagagacagagagagacagagagagagacagagagagagagagaccagcttgtatatacatggtatatgcatgaatatatatatacatgaaaaatatatatttatatatatatatattcaggcagtcactgcactcactgttctaggtgctgggcatgcagaggtgaatgtgacagatgtgatccctgtccccgtggggctcatgctgtgtgctggggaggagaggcatttagaagttaaatacccaaataaaa

SEQ ID NO: 694392 - DNA, 644 bp, Homo sapiens
agcttgagagacagacactctccttggaagacagacactttccttggaaaacagagaatacaaagaaaattagtttttctaacacttaattcatgtatataccagtttgttctctctctctctctctctctctatatatmtatatatatatatgtatatacacacacatttttatatatttatacatttttatatacaaatataaaagtttaaatttttccttgcctcttgtttagtgtagtcattttgataggataaatcccattgtggattttgatttttattactctatcttctactaccccaccctctaagctagcccagctaacagctttcccaatgttaaaactgtgcgtgtgtatatatatgcagaagatagagagagagagagagagacagagagagacagagagagagacagagagagagagagaccagcttgtatatacatggtatatgcatgaatatatatatacatgaaaaatatatatttatatatatatatattcaggcagtcactgcactcactgttctaggtgctgggcatgcagaggtgaatgtgacagatgtgatccctgtccccgtggggctcatgctgtgtgctggggaggagaggcatttagaagttaaatacccaaataaaa

SEQ ID NO: 694393 - DNA, 619 bp, Homo sapiens
taaatatgagtgggctggcttttctttcaaacaagctgtattcagcagctcctggaggcttaaataacttttacaggtaaggctgtaagctaagccacaaatcaaacttaccgccattgcagtcttggctttatagttttgccttttctagaatgtcatgtagttggaatcgtgcagtatgtagcctttttagattggactttttcacttagtaatatgcatttaaggttctcctatgtcttttcacggtttgatagctcatttttgtcagcactgaatagcattccattgtgtggatgtaccatagtttattcatgcattcacctactgaagaccaccttgctttacttccaagtcttagcaattataaataaagctgctataaaaacatatgtgcaggtttttgtggggacataagttttcaacttctttgggtaaatactcaggagtgtgatcrctgggtcatatggtaagagtatgcttagctttgcacgaaaccaccaaactgtctttcaaagtggttgtaccattttgcattcccacccgtattaaacaaaagctccagtttcctcatgtcctcaccagcatttggtgttgtcagtgttctggatttagggca

SEQ ID NO: 694394 - DNA, 619 bp, Homo sapiens
taaatatgagtgggctggcttttctttcaaacaagctgtattcagcagctcctggaggcttaaataacttttacaggtaaggctgtaagctaagccacaaatcaaacttaccgccattgcagtcttggctttatagttttgccttttctagaatgtcatgtagttggaatcgtgcagtatgtagcctttttagattggactttttcacttagtaatatgcatttaaggttctcctatgtcttttcacggtttgatagctcatttttgtcagcactgaatagcattccattgtgtggatgtaccatagtttattcatgcattcacctactgaagaccaccttgctttacttccaagtcttagcaattataaataaagctgctataaaaacatatgtgcaggtttttgtggggacataagttttcaacttctttgggtaaatactcaggagtgtgatcgctgggtcatatggtaagagtatgcttagctttgcaygaaaccaccaaactgtctttcaaagtggttgtaccattttgcattcccacccgtattaaacaaaagctccagtttcctcatgtcctcaccagcatttggtgttgtcagtgttctggatttagggca

SEQ ID NO: 694395 - DNA, 609 bp, Homo sapiens
tatagtcctttaaaaaacctgatgataaacactgtcaaagaaagtcctttagaaaatggctgcaggatgttcttgtttgttttgttttgtttttgatacggagtctcactgtgttgcccaggctagagtgcagtggtgcaatctcggcctcctgagtagctgggattacaggcacccactaccacgcccggctaatctttgtatttttagtagagatggggtttcaccatgttgctcaggctggtcttgaactcttggcctctggtgatccacccgcctaggcctcccaaagtgctgggattacaggtgtgagccaccacgcccggccagtatgttcttgaaaccaaggcatttcagggtattttctgctactcgagaattctggccatcaggctatggaacgttgagcatggttgcacacactcacatgcactcacgygtacacacactttcatagagttattacttttttaaagtctaatgcctagagtggtctggaatgaatgctgacatactgtgagaaataaagaatgagaccggacccacgagtaaccaaatgagcatttcaccagtcagagtgagtgaccaaaggacagctaagaccgttgc

SEQ ID NO: 694396 - DNA, 631 bp, Homo sapiens
caacctgtcttttctaattgccaatcattttacacagtattgccagattaactttccgaagcactcctaccaccacaacagtgtcccttttcaagtttttattgtcttttctttaagctattgtttcctgagaatttactatgtaccattcattcactatgctaagcacctgacatacattatctcatttaatcctcacagcagtctccttgttcaattttgtatcttaacaaaataaatacttgtccaatgtcaaaagctaaatggcacagctagggcctggagtctgcttgactccagggcattttaacaactattctgcagaacaccttagcctgacattcatatggctccacttgacttagtcctagaatactttttccaytttctttctccctcccctgtcttctgaatcaaactacttgctgtttcccatatgagccctgcaatttcccacctcctttgggaagtgtccacattcccaaaggaagtttattaatttaatagtcaactcttatagcacttattttgtgtactgcttatatttagtcattaaactttgacatactgcttatattttgtcattaaacttttgacatattgtttcttataccaagaaaaaatcctctct

SEQ ID NO: 694397 - DNA, 863 bp, Homo sapiens
ggataaaaaacatgctgtagcatgactggcagcatttagaaaataagtgatggcttttaaaaagtcaaaccattctctggatggggactgtctgtagtttcttttttatttttaaaagtacatggattttttttaacctgtttgaaaatgacacactgattcaataaatactgtctctcagcaccaggtactcagctagaacaaaagatgaaatgaacacagtccctaccttgaatgacctcacattctccaatgttagaaacaaaacagtgttggactaatatacaaatgagaaaagtgaaaccaagagaataacaaatttttccatcaatcccaaagaaaagaaaccccatccataaaaactgagtttatgaattgaaaatcttaccgttttgcataatcctctagcttcctttaaaatagatacccacaattaaaatagttaagatttatgaaattaggttgacatggatttgaattcgtaatgattagtcataggctttatttctgccacgtagaagacactgcttggttttcctcttgcactgattgtctttccctgagctgtgtttgctttttagtttagtagtttgtatctgattttaaaaaaaggtggagaagtcagttcatttaattcaaatgtctgaaatagagaatatttttagtgttattactgttaactataagacaagatgaactaaatacaggtaaaataaatgattgaaacaaacaaaattatatttatactacaacttttyttcttgatataaaaaataaagatcctttggatgaataacatctcttttttttaatccagccattaaaacattattaaacttaatttcttttttttttttttttga

SEQ ID NO: 694398 - DNA, 1485 bp, Homo sapiens
attggaatataggcctaaccacattacagtgaagttcatctcatatttttagacactaaagcccaatgggggccaggcgcagtggctcacgcctgtaatcccagcactttgggaggccaaggcagggggatcacttgaggtcaggagttcgagaccagcctggccaacatggtgaaaccccatctctacaaaaaatacaaaaattagccaggcakggtggcgggtgcttgtaatcccagctacttgggaggctggagcaggggaatcacttgaacccaggaggtggaggttgcagtgagccaagattgtgccactgcactctggcttgggcgaaagagggagaccccatctcaaaaaaaaaaaaaaaaaagcccaatgggaaggcccaaagacaaatcccatttgtgtaaaaacctattctataatgatttgctgttttttgtgggactgactcttgtacgtgtgactaaaactgccttcaagtattcttgctttttgaagcagtattttttttttctcttcacttatgccaagttaaatgttccttccatagtgttcttttatgtgcatgactgaagctgaggcttggtctgtctcccaggtttgaaagtaacttagagctggttcagcactcagcaaagagagagatttgcctataagacaacctataagaggtgcctataagacaacctccacattaaaagttcgttacaggctaaagattcttagaacatggcaatatataaagaaaaatcatcactccccactgccaaataaaacccaaacattaaataggtccagggtggtggctcactcctataatcccagcactttgggaggcccaggtgggcagatcactggacatcaggagttcgagaccatcctggccaacatggtgaaaaatacaaaatttagttaggcgtggtggcaaacgcctgtaatcccagctactcaggaggctgaggcagcagaatcacttgaactcaaaaggcagagaggttgcagtgagcaagatcacaccactgcacatcagcctgggcaacagagactacgcctcacaaaaaacaacaacaaacaaacaaacaaaaacattaaatagtatcacctggtagaggctaaagacataggaggaacaaagaggagctggataattttacatttaccaaaaatttagttgtggaccattcccgttatatatcagcaaggatggcaggtcctatgattgctgtagtttgcattctgcctgcagaactaggcttggcgtggtttatgcttgatgatttagatacagggaactgggaaactaaaccagtgcagaaaaagaaaactgaagtagtaaagtaccataatgttttccacttgaaagatagcctgaggatcggctttgagaaagagtttcttcagtataggattctcagaatggagcatagtgaagaaaggaaatgcatcaaaaagtctagctgaattcctttgctcttagccaca

SEQ ID NO: 694399 - DNA, 1485 bp, Homo sapiens
attggaatataggcctaaccacattacagtgaagttcatctcatatttttagacactaaagcccaatgggggccaggcgcagtggctcacgcctgtaatcccagcactttgggaggccaaggcagggggatcacttgaggtcaggagttcgagaccagcctggccaacatggtgaaaccccatctctacaaaaaatacaaaaattagccaggcatggtggcgggtgcttgtaatcccagctacttgggaggctggagcaggggaatcacttgaacccaggaggtggaggttgcagtgagccaagattgygccactgcactctggcttgggcgaaagagggagaccccatctcaaaaaaaaaaaaaaaaaagcccaatgggaaggcccaaagacaaatcccatttgtgtaaaaacctattctataatgatttgctgttttttgtgggactgactcttgtacgtgtgactaaaactgccttcaagtattcttgctttttgaagcagtattttttttttctcttcacttatgccaagttaaatgttccttccatagtgttcttttatgtgcatgactgaagctgaggcttggtctgtctcccaggtttgaaagtaacttagagctggttcagcactcagcaaagagagagatttgcctataagacaacctataagaggtgcctataagacaacctccacattaaaagttcgttacaggctaaagattcttagaacatggcaatatataaagaaaaatcatcactccccactgccaaataaaacccaaacattaaataggtccagggtggtggctcactcctataatcccagcactttgggaggcccaggtgggcagatcactggacatcaggagttcgagaccatcctggccaacatggtgaaaaatacaaaatttagttaggcgtggtggcaaacgcctgtaatcccagctactcaggaggctgaggcagcagaatcacttgaactcaaaaggcagagaggttgcagtgagcaagatcacaccactgcacatcagcctgggcaacagagactacgcctcacaaaaaacaacaacaaacaaacaaacaaaaacattaaatagtatcacctggtagaggctaaagacataggaggaacaaagaggagctggataattttacatttaccaaaaatttagttgtggaccattcccgttatatatcagcaaggatggcaggtcctatgattgctgtagtttgcattctgcctgcagaactaggcttggcgtggtttatgcttgatgatttagatacagggaactgggaaactaaaccagtgcagaaaaagaaaactgaagtagtaaagtaccataatgttttccacttgaaagatagcctgaggatcggctttgagaaagagtttcttcagtataggattctcagaatggagcatagtgaagaaaggaaatgcatcaaaaagtctagctgaattcctttgctcttagccaca

SEQ ID NO: 694400 - DNA, 615 bp, Homo sapiens
aagaaagmaagaaagcaagcaagcaatactcagattgggcacggtggctcacacctgtaatcctagcattttgggagactgaggtaggaggatggcttaagctcaggagaccagtctggagaacttggtctctacaaaaaaaaaaaaaaaaaattaattgggcatggtggtgcatgcctgtagtcccagctactcaggtggctgaggtgggaggattgtttaagcccatttggtccaagctgcagtgagccaagattgtgccactgcattccagcatgggcaacagagtgagacgctgtctcaaaaaaaaaaaaaaaaaaaaaagaaagaaagaaaacaatactcatcactcccactccctgactacataaatctgaaccactggggagaagaatgagatgagaattggcttggagaacgagaattaaggaagcagaaaaattgcttttgaggagaattgatgagggtcttgtgtcactagaggtgggaaaagccgttctcaattgtcaccatgcttcagagtcacctggggagttttaaaaacatgccgatgcctgggttccaccccagaatttctgacttcattggtctgggtggggcctgagcactggactg

SEQ ID NO: 694401 - DNA, 615 bp, Homo sapiens
aagaaagaaagmaagcaagcaagcaatactcagattgggcacggtggctcacacctgtaatcctagcattttgggagactgaggtaggaggatggcttaagctcaggagaccagtctggagaacttggtctctacaaaaaaaaaaaaaaaaaattaattgggcatggtggtgcatgcctgtagtcccagctactcaggtggctgaggtgggaggattgtttaagcccatttggtccaagctgcagtgagccaagattgtgccactgcattccagcatgggcaacagagtgagacgctgtctcaaaaaaaaaaaaaaaaaaaaaagaaagaaagaaaacaatactcatcactcccactccctgactacataaatctgaaccactggggagaagaatgagatgagaattggcttggagaacgagaattaaggaagcagaaaaattgcttttgaggagaattgatgagggtcttgtgtcactagaggtgggaaaagccgttctcaattgtcaccatgcttcagagtcacctggggagttttaaaaacatgccgatgcctgggttccaccccagaatttctgacttcattggtctgggtggggcctgagcactggactg

SEQ ID NO: 694402 - DNA, 615 bp, Homo sapiens
aagaaagaaagaaagcaagcaagcaatactcagattgggcacggtggctcacacctgtaatcctagcattttgggagactgaggtaggaggatggcttaagctcaggagaccagtctggagaacttggtctctacaaaaaaaaaaaaaaaaaattaattgggcatggtggtgcatgcctgtagtcccagctactcaggtggctgaggtgggaggattgtttaagcccatttggtccaagctgcagtgagccaagattgtgccactgcattccagcatgggcaacagagtgagaygctgtctcaaaaaaaaaaaaaaaaaaaaaagaaagaaagaaaacaatactcatcactcccactccctgactacataaatctgaaccactggggagaagaatgagatgagaattggcttggagaacgagaattaaggaagcagaaaaattgcttttgaggagaattgatgagggtcttgtgtcactagaggtgggaaaagccgttctcaattgtcaccatgcttcagagtcacctggggagttttaaaaacatgccgatgcctgggttccaccccagaatttctgacttcattggtctgggtggggcctgagcactggactg

SEQ ID NO: 694403 - DNA, 615 bp, Homo sapiens
aagaaagaaagaaagcaagcaagcaatactcagattgggcacggtggctcacacctgtaatcctagcattttgggagactgaggtaggaggatggcttaagctcaggagaccagtctggagaacttggtctctacaaaaaaaaaaaaaaaaaattaattgggcatggtggtgcatgcctgtagtcccagctactcaggtggctgaggtgggaggattgtttaagcccatttggtccaagctgcagtgagccaagattgtgccactgcattccagcatgggcaacagagtgagacgctgtctcaaaaaaaaaaaaaaaaaaaaaagaaagaaagaaaacaatactcatcactcccactccctgactacataaatctgaaccactggggagaagaatgagatgagaattggcttggagaacgagaattaaggaagcagaaaaattgcttttgaggagaaytgatgagggtcttgtgtcactagaggtgggaaaagccgttctcaattgtcaccatgcttcagagtcacctggggagttttaaaaacatgccgatgcctgggttccaccccagaatttctgacttcattggtctgggtggggcctgagcactggactg

SEQ ID NO: 694404 - DNA, 615 bp, Homo sapiens
aagaaagaaagaaagcaagcaagcaatactcagattgggcacggtggctcacacctgtaatcctagcattttgggagactgaggtaggaggatggcttaagctcaggagaccagtctggagaacttggtctctacaaaaaaaaaaaaaaaaaattaattgggcatggtggtgcatgcctgtagtcccagctactcaggtggctgaggtgggaggattgtttaagcccatttggtccaagctgcagtgagccaagattgtgccactgcattccagcatgggcaacagagtgagacgctgtctcaaaaaaaaaaaaaaaaaaaaaagaaagaaagaaaacaatactcatcactcccactccctgactacataaatctgaaccactggggagaagaatgagatgagaattggcttggagaacgagaattaaggaagcagaaaaattgcttttgaggagaattgatgagggtcttktgtcactagaggtgggaaaagccgttctcaattgtcaccatgcttcagagtcacctggggagttttaaaaacatgccgatgcctgggttccaccccagaatttctgacttcattggtctgggtggggcctgagcactggactg

SEQ ID NO: 694405 - DNA, 1598 bp, Homo sapiens
tttttctcagctgagtgaggtggtgtgtcctatagtaccagctattcaagaagctgagacgggaggattgcttgagcctgggtgtttgaggctgtagtgtactatgatcatgcctgtgaataaccactgcacaacatagcaagaccctatttctaaaagaaaaacaaaaagtcttttatctcctggaactctttaaatatttctcccctctgtttaactaaggtatgtgataagagggtcttttctttttcccttttacaatatgtttctgggagactgaccaggaatttcacctaaatacttcccattggtagagtaaagccagcattgcagccttataaagaacattctgagattctcagcccaagtgagggaaggaagactgtcttgtgctttgatatggtttggctctgtgtccattgtaagtttcctgaggcctccccagccatgcagaactgtgagtcaattaaacttcttttctttataaattacccagtctcgggtatttcttcatggtaatgtgagaacgaactcatacatgccttctacaggcaaagcacatcattgggaaaatgagatgtctatattggcaaataatttagtgacaaaggaagagctgtggctcagtcctccagaagaaactgctggtctcaaaagagactgtcttttctttcacacttscatatacttcattattcttgtattgcagttatgtgattatccaaccagacagtgatggcaacaacagccaaggaataattgaatgtccactatggcgtgctcaatgacagtcttgaggacaatggagagcttttatgttgtcagggaatgatgcagatgttaggaaatgatgcaaaatacacaagatgtggatgttaaggcatgggatgagtatggagtcataaggagagaggtagtgagaaaccgatagtttgtaagttacttagtagatactcagaagactgttgaaggatgagtgatagaataaaagagtgactttccagtagcttcttgagatctccagtgaatcaggcttggaggaaacttagaatgaattaattatctgcaagtgaatttttgcatttttctaagtttatgcagcaaatccatgcaactttttatgtctctccacagattatttgatttctgacatttgatctcatcccctttgtctacgttttaatggttgtttttaaattgagtgatgttcaggccccttcctgcatatctctaccttccatcattaaggctcctttctaggaacatgacattctaaaatgaagactaattgtttatcttcagtgttgcctttttatataaagaatagattttcatctttaggaattccactaactgtctttattttatgtaatttccatgccagttttttctttattataaagatttcttagccgggaacggtggctcacacctataatctcagcacttttggaggctgaggcaggtggatcgtggtcaggagttcaagaccaacctggccaagatggtgaaaccctgtctactaaaaatgcaaaaaaaattagctgggcatgatggaaggtgcctgtaatctcagctactgaggaggctgaggcaga

SEQ ID NO: 694406 - DNA, 1598 bp, Homo sapiens
tttttctcagctgagtgaggtggtgtgtcctatagtaccagctattcaagaagctgagacgggaggattgcttgagcctgggtgtttgaggctgtagtgtactatgatcatgcctgtgaataaccactgcacaacatagcaagaccctatttctaaaagaaaaacaaaaagtcttttatctcctggaactctttaaatatttctcccctctgtttaactaaggtatgtgataagagggtcttttctttttcccttttacaatatgtttctgggagactgaccaggaatttcacctaaatacttcccattggtagagtaaagccagcattgcagccttataaagaacattctgagattctcagcccaagtgagggaaggaagactgtcttgtgctttgatatggtttggctctgtgtccattgtaagtttcctgaggcctccccagccatgcagaactgtgagtcaattaaacttcttttctttataaattacccagtctcgggtatttcttcatggtaatgtgagaacgaactcatacatgccttctacaggcaaagcacatcattgggaaaatgagatgtctatattggcaaataatttagtgacaaaggaagagctgtggctcagtcctccagaagaaactgctggtctcaaaagagactgtcttttctttcacacttccatatacttcattattcttgtattgcagttatgtgattatccaaccagacagtgatggcaacaacagccaaggaataattgaatgtccactatggcgtgctcaatgacagtcttgaggacaatggagagcttttatgttgtcagggaatgatgcagatgttaggaaatgatgcaaaatacacaagatgtggatgttaaggcatgggatgagtatggagtcataaggagagaggtagtgagaaaccgatagtttgtaagttacttagtagatactcagaagactgttgaaggatgagtgatagaataaaagagtgactttccagtagcttcttgagatctccagtgaatcaggcttggaggaaacttagaatgaattaattatctgcaagtgaatttttgcatttttctaagtttatgcagcaaatccatgcaactttttatgtctctccacagattatttgatttctgacatttgatctcatcccctttgtctacgttttaatggttgtttttaaattgagtgatgttcaggccccttcctgcatatctctaccttccatcattaaggctcctttctaggaacatgacattctaaaatgaagactaattgtttatcttcagtgttgcctttttatataaagaatagattttcatctttaggaattccactaactgtctttattttatgtaatttccatgccagttttttctttattataaagatttcttagccgggaacggtggctcacacctataatctcagcacttttggaggctgaggcaggtggatcgtggtcaggagttcaagaccaacctggccaagatggtgaaaccctgtctactaaaaatgcaaaaaaaattagctgggcatgatggmaggtgcctgtaatctcagctactgaggaggctgaggcaga

SEQ ID NO: 694407 - DNA, 1324 bp, Homo sapiens
cacaccactaaccatggttagtattttggcattattttttcagtctttacctatatacctatatatcatctctctagtcacactactttttaaaaatgagattatattatacattcttttttcataacatactattttcatctaacaatatatcatgatcattttacctcataattaactatkctgccatggttgtaaatttttaaactttgatttgcattatcactggagttacctattaaaataaagattccaagtctactcccagtgcttctgactccgtcattgggatccacatccagaaatctgtattttttacaggcttctgagcgattctaatatgggccatcttgggctctttgagattacttccacactactaatttcaactattgctgaatttttcattgtgtggatacagcactatttattcaaccagttacttatttggggtcatttagattattggtatttttcattattttattcatctgctgaaaaaatccttattcctacaactttgctgtcatccatgactgagcatttgttgcttatacccaaactgtgtggtatgttacagtgatggggcttggtgagtgctcttctcatcattgaatggggattgagatgcagatgctggagaaagcctctcaaaaagccacatcaggccctgaaatgtgattgagaggacttagggtttcacaggagaagtggaaaaggggaagcagctcagtgtgtgaggaagtgagattcaaattccgtgtgcttgaacctggaagccaaaagagcttatacacctggggcccagccagcagtcgcttatttctctagaaactaagagagggactaaaatactcccttttgttgaaaatttcaaagtgggggcatcagccttgggtcaaaaagaaggaataatgggaggagagagagcagaatgagacagcacagctttctgtcccagcacagctcatgaaagagaggccatgcaaaatgaaagcattctttgcactaaaaatttctgagagacaccaaggcacaaatagagttgctttggtgttgaaatgtcaaaagaggtgtagccaccatttagggatgtgacacattgaggtttggatgctttaaagaacttcaaagaaaacgcagcatctttttgggtcttgatggccggtgccctttcaaagaacattagagaagatgatggctcagtggtgtcaccacagatagtgctgaagtgctttgatgtagctttgcgggctgtatcagtctcagcaggaagaaggatgagtcaatgtcgaagaaaggaaaacctagttccggggactgg

SEQ ID NO: 694408 - DNA, 665 bp, Homo sapiens
tagtcatgttaaacttcacttgaattaaaaataaagtcagctgggtgcaggggctcatacctgcaatcccagcacttttggaggccaaggcgcttaagtccccaggggtttgagacaagcctaagcaacatagtggtaccccatctccatttaaaaaaaacgacaaaaatccgtcagcctttctgatagaagctaagtctaatttgggacactggatgactggtttgacaataaagagaagcttcagttactacattaagtggcagagatcttccagaagttgaatgtactgagtttgctgctcctgagccytgactgaactatatttaagtatctaatattagtaatattctaagtattaaggtaagtttaaaatataaatatttacatactgaaattaaaagaaaatgtccaaatgtgaacaaagcagcagcattttgtcaagaaaataccgcattagcaaaaatgaacaactttccctcaatccttaggtcaacaaagggcctctaagtgacacaggaaggagtataattaacagcctatttcataagtcttggtaaagccttttgtactcttcctagaaaataagaaaagtgaaaggtcccagtgtcagggaatgcatgctttcacaagtctctggtttccaattctttgctttcaacaca

SEQ ID NO: 694409 - DNA, 1815 bp, Homo sapiens
tcctactcattcatttttacaaccactgacttcaagagtatgcactcttcccaagtgagagttcctaacaaatatttatctcagatggttcccttgtcacacatattttcatctaaagacttaagagcaaggcattcttcctgaagatctgattattatctgttgagagatgcttttactgtgtccacacagtgccaaatgcctgctcaacccaaccaaaaataccaggagaaggtttgcctcaataacctggccagtcagaaattgattgatgatccaagagtctcaagaagacataggctcggggagagacaagggcaatgtggggagtgtccagtggaatgayagtgtcttattggaaagtatctttttccccaaaataaccaagataaatgatttgtgactgtgacataggacaaaggatttcagtataacagagacgactatggaaaaaatgcaactagtaaatcactctatggagaaaaacaaaaaggaaacagttcagaatgagtgcctccagagataaaaatcacctctctgagatatttttgtgaaaaaaaaaattcctttagaaatattgggaaataatttatagtaggaaaaaaaggccattataaaccaaatggtcttcccacatgatagcaaagtatatatttaacatgggctcgttataccttatttactatcaattctaactaggttttcctttgctgccaaggtttagccccaagggtgttaaatctaaagccaacccattcttctcaaggctgtaaacgtccatgaaaggggttacgaagtgaaaatagactcctcccctgcccctgcccatgagactcatttctagactcttcaatggcagccattcattacttgtgtgcccgggatattcatactacctaccaactatgcccactcagactctagaagcagaattcagaaaaaacatacatgcaaaaaatttttaaagaactgcaaaatgagtaaaatggcattgggaaaactaagtaatcgtctgggaaaataaataatgtttaattcccaaatcactccctatacctaaaagtagttcagattaatcaaagattaaaccagaaaatatgtggccataaaggttctagtagaaaacttggggggaaatgttataattttatcatggagaaagtatgtctgtgtgtaacacaaaattcagatgccagaatgaagtaaagatgaattttaccccacaaaattctacataaaagaaaatactggaagaagaaacaaagataaataacaaactggaggaaactaggtggcaatgcatattatagatcaaagggtatttttattaatatacaaagagttcctaaaaatcaataagaaaaagcccaactacagaaggaaaaattgccaaggacatagattcttcacaagtaactaaagcggcttatggacatattaaatttactcaatttccttataataagagaaatgaacattcaaaactatactgaaataccatctttcactgatcagattgacaaagaccaaaaaaaaacttgtagccacttatattgaaggtggagaaaataggtattcttataccttattgatggaaatgtaaattgatttaatctctgagaaaggcaatctggcaatatttatcaaaatttaaaatgcacatatcctttaacccaatacctaaacttctaatgattcatgctgaaatttacctacacatgtgtacaatagccgggattaccattgtatcactgcttttcacagaaaagatgaaacaatctgaatgtctatcaacagagggctggtaaaaaaaaa

SEQ ID NO: 694410 - DNA, 1790 bp, Homo sapiens
tcctgctgaactctaccagtctcaccacttcatgaccatccatgcaaggctgattgtctgaggttgtctggctgtcttacacgactaatgtgaggcaaataaacatacaggcaaagcttctaagagaaagaaattatatctttaccagttgcttcaaaagagaccagtaggaccaatcacggattggtggttaagatgtctatttgcccctactaattcatagttgatgggccttgcaagattccaagtttaaatacaactttgtctttacaaagcctctgtctcttaagaccatcagttgtcctacatttcatttgattatttttttaaaaataaacaaaccctcatcaaaaacctttctttagactagtagaagatattggaatctacatttcacaaacattaaggtacattccataaccatttgtttaaaagcatgggtgagtgattgcagccaatgtttactaagtccaggataattcatgagaccaccacaaacatcatgaatgacagattctggttgtaaacaaggttcagggaacagaagcagttctaccatctaatatcaagctgaagctactagactaactcagggactaaatctatagacaaagaacaataaaatctttctgatgaggtccccaaatgagattcctgtgctccacttcttagaccagtgattctcagttttacctacacattcgaatcatccagattccaccctagagattccaatttaattgatgaacttaggcattggtgttttaaaaaagtttccaaggggataccaatgtacagttagggttgaaaacttttgtcctagagtacaaggttctgctcaaagttctcattcatttgaggcattgagaatagcttaggaccgtggttcccatcaacatcttcctgtgtggttttaaaaaatacagattcttgtattctacccccatacttccaaattagaatttttaggagttggtcccaggaatccacaattttacaagctcctcacataattcttatgaagccatcctggcaggtcctgattggaagaaatgcatttggtaactactgaattaagtcatctgtatgtctacaactgtgcacagcagtggctctcaacctttgttgctccaatgcctgattgcttgaatctcacctccagataatttaatttaattagtttgggggtagatcccaggtatcaatatttttaaatagctctcagtaattctatgtgcaattaggtttgggagccactggcttggtgcaaggatggataaaaggtagcctgtttgctgaccctccgtgttttcatgtccatggcagacatcaataatcaatccctatagtgcccatatgtggcctcataattcttctcactatattgtcctaggcagccactcccatgcattgagtgggcatacaactactatttgctatctttatcttcgatccagtctggcagaaagttaatgacttctagagagtccttcctgggttttgtttctagggatagtacttaaatgtcgagattattgtctgccaggacactgttctgaagtaggagaaggtaaaagccggaggtgggtgcaatagagagatctatcatctagctacctctactacccagkgaagcactttcagtcccagcttctgttaaaagtagaaagctttatgcagagtaatttatctactgtatacatattgggttaacagaggacctctgtaagacctcctaacaccaagtgtacaggaaaggccaaacatgaaaggagttcacttaatgttta

SEQ ID NO: 694411 - DNA, 670 bp, Homo sapiens
ttagttttgttttgagacagagtcttgctcttgtcacccaggctggagcgcaatggtgtgatctcagctcactgcaacctctgcctactgggttcaagcgattcttctgcctcagcctcctgaggagctaggattactggcaactgccaccacggccggctaatttttttgtatttttagtagagacagggtttcaccatgttggccaggctccaggctggtctcgaactcctgacctcaggtgatccatccgcctcggcctcccaaagtgctgggattataggcgtgagccaccatgcctggcctgttttttatccttactgtattttccaatgaacttttactttcatgatcaggaaaaaaagatttaaaaaaatagggaaaaagtagcacaatcccttatcatcattttgaacctatcctctctccttatggcacacagagcattccactgtgaattagagttgagcctcaatccagattcctcttcaggctggatttgggctccttaatggtggagcctgagtcttggttctttctgacccctgccttgttacacacttggaatctgacgcacacttgctgagttgaactgcagtgcrctgcccaggtctgacgtgaagggccacagcaggaacagaaatggagagacaaaaaaagagcagagaag

SEQ ID NO: 694412 - DNA, 665 bp, Homo sapiens
aatcatggttcactgtagccttggactcctgggccaaagcgatccatcagccttgacctctcaaagtgctggaatttcaggcataagccactgtgcccggtctaaatttcttctatcacttgtatcatttctttttttttgtttaaatctctgatccatttgaaggttatcttgctgtgtagtgtgagtaatggatccaatttttctgtttatccacggggctatacagttctttctgaatatcactaaccaccaccaccccccaagaaaacccacaaaaacccaaacaatattcacacaaaattgagatattgaratcgtccttttaccgtatattatttgtgtataaattgcaggatattccttttttcatgattttgtctaaaccgtgcacataacccatattgttttaatttagattctttatagattgagttgttttaatatttgggggaggtagctcatcctcttgcccttttggatcgtcttcaggattctcttgggttttcatgctcactggtggatgtctttaacctgactaactagaaaagagtcagtcatttacctcttgccaaatcctaagagtggagctaaggaggtgcaaatctgtcatgaagtcctgagtgttttttaaacaaataaaatgcccaaagatacatttttaa

SEQ ID NO: 694413 - DNA, 665 bp, Homo sapiens
aatcatggttcactgtagccttggactcctgggccaaagcgatccatcagccttgacctctcaaagtgctggaatttcaggcataagccactgtgcccggtctaaatttcttctatcacttgtatcatttctttttttttgtttaaatctctgatccatttgaaggttatcttgctgtgtagtgtgagtaatggatccaatttttctgtttatccacggggctatacagttctttctgaatatcactaaccaccaccaccccccaagaaaacccacaaaaacccaaacaatattcacacaaaattgagatattgaaatcgtccttttaccrtatattatttgtgtataaattgcaggatattccttttttcatgattttgtctaaaccgtgcacataacccatattgttttaatttagattctttatagattgagttgttttaatatttgggggaggtagctcatcctcttgcccttttggatcgtcttcaggattctcttgggttttcatgctcactggtggatgtctttaacctgactaactagaaaagagtcagtcatttacctcttgccaaatcctaagagtggagctaaggaggtgcaaatctgtcatgaagtcctgagtgttttttaaacaaataaaatgcccaaagatacatttttaa

SEQ ID NO: 694414 - DNA, 665 bp, Homo sapiens
aatcatggttcactgtagccttggactcctgggccaaagcgatccatcagccttgacctctcaaagtgctggaatttcaggcataagccactgtgcccggtctaaatttcttctatcacttgtatcatttctttttttttgtttaaatctctgatccatttgaaggttatcttgctgtgtagtgtgagtaatggatccaatttttctgtttatccacggggctatacagttctttctgaatatcactaaccaccaccaccccccaagaaaacccacaaaaacccaaacaatattcacacaaaattgagatattgaaatcgtccttttaccgtatattatttgtgtataaattgcaggatattccttttttcatgattttgtctaaaccgtgcacatawcccatattgttttaatttagattctttatagattgagttgttttaatatttgggggaggtagctcatcctcttgcccttttggatcgtcttcaggattctcttgggttttcatgctcactggtggatgtctttaacctgactaactagaaaagagtcagtcatttacctcttgccaaatcctaagagtggagctaaggaggtgcaaatctgtcatgaagtcctgagtgttttttaaacaaataaaatgcccaaagatacatttttaa

SEQ ID NO: 694415 - DNA, 639 bp, Homo sapiens
attttcattgtgtgatcaacaattaactattcattaaataaacaattagtaaagcccattcttaaatttcatattgaccatgcttaccaaaagctgcttgtttttattggttctggtttttaaaatgtaaacacgatgcctctttaaaatttttctctttttaatttcagtcattttctatagccttattcttgtaggttttatttctattattttattgacttattctcaatgatctaaaggattgaaaaaatgtagccaagcaatacaaaatttaaatatatttttatcaagtatgtaaatcaaattaaacaattgaaatattcaaattattatcataaggtatttttgttctcaaatattcaaaataatctattagaatttgagtatcaaataatgctgttttcttctatttgactttttgaaaatgttaagtttgattatgtttctctgcaaaataaaaaatttgcaattctagtattcattgtccatctagttgccaatgtttaaaagtcaccatcagcttcacttatgttctgtctggatatacacacatgcacccccatcccacccccccycccccgacacatatataaaagggacaagatcatttaatattgcaatatgttctttacctgt

SEQ ID NO: 694416 - DNA, 650 bp, Homo sapiens
aacaaaacagaatttataaccaagctttcttgtttgtatctcatgaaatatcatcctaaacctcttaaatggtctaaaagcaactgatgatttcatcaacatcataattgtattagggttctctagagggacaaaactaataggatatatatatatatayacatatcctatatatatatctatcctatatatatatctatcctatatatcctatatatatatctatcctctatatatatcctatatatatctatcctatatatatatctatcctatatgtatatctatcctatatatatatctatcctatatgtatatctatcctatatatatatcctatatatatatatgtataaaggagagtttattaagagtaaactcacgcaatcataaggtcccacaataggctgtttgcaagctgagttgcaaggaagcctgttcgagtctcaaaaccgaagaacttgaagtctgatgttagagggcaggaagcatccagcacaggagaaggatataggctgggagcctaagccagtctagtcttcacgtttttctgcctgttttatatcctagttgtgctggcagctgattggatggtgcccacccaaattaagggtggatctccctttcccagcccactgacccaaatgtta

SEQ ID NO: 694417 - DNA, 602 bp, Homo sapiens
tctgttgtattttttgttttctggtgtcatgtgcctcccaccctgctcctagcaattgccatgacaacaaatagataattggcttccgtaatttctcatcttattgcctaaggcaacagagagcttgtgggctcagcttgcggttcagcagctgctttgttgcctctcctctgtatgtgtgaggcctgccagagcccactttccagacaggtgagagttcattcattcaccatgcagttaccgatcgtctcttgacctgtgtcctggggaggtaaaggtgacgagccagttctgccccatgcagctcacagtctaggcaaagctacatgcaaacaaacagaatccaaagtgctatcatgaaccctctgagaggggctgactcagcagcccagggagcttgaagaaggctccacagaggaggctgtgcctsaaggcgatttcggtttaggagccaccaatttataaccacttttctgtggcccgtcttattttatttcttatttcttgacaatcagaagtaccttgggtaggttttaccatgcacatcgtaatttgagtgagcttagtgtgaggcttaacggtgtgtgggctgtacatcctgg

SEQ ID NO: 694418 - DNA, 1602 bp, Homo sapiens
cattttgcttcagaaatcattcagtggttaatgttttaaagtgcactgcctggtcactataataagcaacagttcacttagttttgcttaagaaaaagtacatttttgtgactcaccagacatatttttaatgataaaaatgcagaaatataaatcaagacacctttcaatttactttcattgaggtgcagctaagcaagcagaacaggatgagactctgccttacttaggaagagacttgttaacaccctactgatgactcaggcaaattagatgtaaattacctttgagaggtccccagcctccaaatagaagcagataacaaacacattccacgtaacccagaggactagccagacagcatactgtagagaagcaagagagaaataacgtataattaatttggaatcagttgagtatgattcaaataaaacgaactttcgcacaccctaatataagattagtgggaaaggttaaatattgcttctctctaaggaacaggattagatgtacgtttatctctgttgagatttttttttccttctttccttttttttttttaatgacaaagtcgcactctgttgcccaggctggagtgcagtggcatgatctcggctcactgtaacctctttctttcaggttgaagtgattctccaccctcagcctcccgaatagctgggactacaggtgcgcaccaccacacccagctagtttttgtatttttagtagggatggggttttgtcatgttggccagactggactgttgagttttttttttttttttttcttactgttatggactcataggattacagctcaaacctgcttaaggataaatttttaggttttaagacaaaaaaaatagtaatccacattattgttttaaaagtgaataattatagtttcyagacatctaaaaaattcagtgctctaacatatatgtctgatacaacccaccaaaagaagactcacagtttccttagcaaaaccatctccgtgtaggacaatgatcaacctttccccaagttgtcaaggataatcaaatcagtctttctgcctctgtcccattccaatcagctttctctctttggtgtctccttttcatttctccattcaccttcttattttatcatttcactatctcccattacagtgaccatctaactagtgtccctaaatttattctattttctctctagtgtaccttctataatgatgatagattttcttactaagacatagttctgatcattcagtcagttaaaatgtatgaagcatccagaaggcaacatgctagcaagacactgagaatgcaaagaccaatgatgaattcctcctgaactcaaatcaaatgagagtgactttttaaaaatagatcattattatacaagaatcataaaaatatataaagtctgagcacaagacaggaaaatgagaggagtacataacctgtcctgggaaaaagagtctgcaaagcttaacaaaagaggttaagaaacaccttccagaagagatgaatcaagcttaaaacgaatggacttaaaagcatgcggggttggaagggctttcatgggaggatcctgtaaacaaaggaaagagca

SEQ ID NO: 694419 - DNA, 3385 bp, Homo sapiens
agctaacaagtgacagccaggatgggacaccaggcacattgacatcagagccatcacacataattttctggatagcccttgcggtggctttgccatgctcatggaacgtgtttctggtgaggcaatggtgttggcagttgttagttgtttgccttccttcttgtgtgtgtgtgccctcaaataattgctttgtgatgtctgactaaagagacttccaagttctctttaaaaaaatttaaatactcttcctttattagcacatactgaatttaaaaataatggaaaaaaaattatttgattgggaggctgaggcaggccaattacttgaggtctggagttcgagaccagcctgggcaacatggtgaaaccccatctctactaaaaatacaaaaatcagctggacacggtggcatacacctgtaatcccagctactcaggaggctgaggcaggagaatcacttgaacccaggaagcagaggttgcagtgagctgagatggcaccactgcactccagtctgggcaacagagtgagactccatctcaaaaacaaaaacaaaaaaatattatttgagatttcaattagtgctttattgcccagggccctaggactcctagaagtcctttaaggaggtagcggagaccttaaagaaatgttctgtatatttaaaaactgaactgaaatggatttactgataataaggcttcagagggtaactcaaacaccaagttcgtggaattatattagctcagtgaggtaatgcggattattgcatactgattgttctttgatgaataaacataggggaatggagaattctttaataaaggttgtcaatgagacaaaaacattaaaaataggaaaccttagaggaaaaagaatagaggaggtccttggtgacagaaagcctgggagcccctgatataaagccttgttctttttgttccctgtcccttggttatttgtttgaaatgttatcaaaatacctttcaaagaccagtgatgtaatttatgtaaagtgttatgcaaataccagtttttgttattaatattagcagtaatagttatgataatgatcttgctgtggcacatgtgatttcattaacaattatatcaagaacctttaaaattaaggaattttaaacatttcatttcctagggttagatttaacttcttccccaaaccctgcattagcacagtcgtgccctgacatgccgtgtgctctgtgtatgtgtacatgcttgtttaatgcatcacacgtgtgtgtgcatgtgtgcagtgcccatagttttgtgagttttgtattgctcttaccccctctgccttgtacagctgcacattataagattctttgttcagaaaacttgtttgaaagggcgatgaagcatttggatcgaggtgtgggtttttactcccacattttttgccaataattagacaaactttaccaccaaatcttcttttgcctctgtggaggatgaagggtctgggagaaactggatttgaaaatctgatctggctgtcacattgttcgggggctgtgcctacacacacaagttggtttgaatgtcacaaagaggttacgaacttgtgtttccaggtatgctcctatcatatatacctggtgccaaaaatggatttgacttcattcttcctttttaactagttgttttgatgcactttggagacagtctgaataatgctattaattgggcagagattagcacataatcaaatcacatctgctttaaaaaaaagtcagagccctctttactaaaatagcataaagtataaattgattcatagcaacctagctctatattcctgattaaaaaagaaagttatcagtagaataagattggtacctgctctaatatttgttatcaccccttcttagtctgcttctgtatgtttcctttctcttatttcctttatcttgtatctayctggctgctgcttcaacctggctcacaccaccagcaagctgagtgtcctcgtgaacaccccagttcattctcagggtccctgtcttactccagagctctcttctgcttctctcctttgtgtaaagctgtcttctcttcgtgccttgggtcttgctggtctcttttttttagcatctagaacagcaggacatccctctctaccacctgcatgtgtgcttgagcaggctgtgttctaacccacagcagccccctgtccactcatggttgtgttatattttccttgctctgaagctcataattaaaattactaatttttacttagactgggcctcttctataacattagttttcaccacctgccaaagaatttgccagcgacttaaaaaaaagttctaccttcctcttatttctattattcagattgaacatgagggttaaagtagcagtgtgccatggtttctcagatagcagaagtacaaccagggcctctggtgggggccacaggcagtcatttactgggtcaggcattgaactaggtgggtcatgagttgatctgagttggtatttttctccaaggcagtctctgtagacttgaggagctggaacatacgtggaattaagtggcggccgaaaggatgtgacaagtgaactctgctgccactttgcatcctggccaaaaaggaaaggcttcaggttttggagttttacatgagtccaaatctgggtctcctggcttattagccatgtgactcctgagtctcactttcctaatccataaaatgggaatgatgatacctgcttcacagggtgttatgaagaataaatgaggcagtgtgtttaaaatggctagcagagcacacagcaggtctatggttgtcatgtgttgtggtagatcaagagaggatatccctgggctatggaaacctaaaaatgttagcacagtcatgctgcaaaaaaattttgaacatcagtgaaaattgacgagcataaaactgccggaaacagtttctaatgaaactgtagcccttgctatgctgagccttgcacttcctgggggtcatggctgcccaggggactttgcccattaggggcagtgaggcaggagggctggagctataccagatcagttttttagcctcaggcagcacttctggtggaaaaaagacatgactcacatttttagaagctgggagaaggaaacagaaaataagtctctagaaagagttgagagtcagaaagagacttagaagaaccccagaagggcaagtacatacaaaatcaagggcaaaagtctgaagattgaaacatgagaaaaaagaaatgcaaatgtaggaagactagaaacgagtttcaaaaatatctgtacctgttggaactttggttaaaatcaagaaggtaataggaatacttgaagagtcttacacttagcttatgttatca

SEQ ID NO: 694420 - DNA, 615 bp, Homo sapiens
ggcttctatctcttgaattcttattagaagtgaggccatcttcatagccagctcattgaatgtttacaatagctctgcgaggaaggagacattattatctccactttttggatgagaaaactgaggtttacagaggttagtaacagggtcccccagccagtgaatggcagaactgggaatcagagccatgcctgtctggatctacagctggagctcctcctaagaactatgctatttgaactgactattcatttccttttgtttcagacagaatagttttctttcagcttcagaaaggtcagcttgggaatatgtcacaaaaggcaatgaaaggtgttattctgttcatttctctcttttcttatctctctgctgtttcttaagattgcccctttccactgtcccatggctgggacagtgacagaaataagagaatgttggaggatgttggggacagagttttcgggtctctggcaattaccaatatgctaatcacttaatcttcaaacaatttaacagtaaaatgtccaatgtccagaaataactkctttccattgctatcccgtatggtggggagcacaatagaatactgttcaaggttagcagggggcctgg

SEQ ID NO: 694421 - DNA, 615 bp, Homo sapiens
  misc_feature 220: n = A,T,C or G
attacatatagggagaattttgtcttatacatctactaaaggaaaacaaaagcctttgtaatatatacaagcaattttaaaattttggaacaaattcggaaaagatttctgacctcaaagattcaggagcatcattgattttaaaatggtaaagtataaacgttattggatctataattcttaagaacaggtagctgaaattgcggactctgtccacgtngtagatgtaaccaaggacataacatgcatgtaatttgcatattcatcaattttctatcactgcaaatctcagagaaaactctcgttgtcttaaaattgatgagttttgcttttggcagttaaaaaaatgcagaaagcagaagaatgaggactcatttttgtctagtttcatgtgtagccacaggaacaaagagcaaaacaaagtatacaatcatttgtacatagcaaacaaacattasagcattgttgcaattttgcgtaggaaggaagaacaactttttgatgcaaattggaaaaaattttaactttagcattattgtggtagggaaacatactgtacaaaaagttttctttaatcttagagttttaaaactactttctaccactacatatgca

SEQ ID NO: 694422 - DNA, 608 bp, Homo sapiens
gaatcaactagaatttgacacaagggtaaaattttactgcttagtttaattagtcctttaagtgtttaataaagcatcattttcttagtgatctgaaatggtaacttggtcacgttatcamtctgtttccttatacttcagtctcttttgatttttcttctgcttttcacaaattttacttcctttttttacattttagagattatgtctttaatataaatcaattaaagtctcaaaatgtctgcttaatctagtttaaattacgttacatgaaacatgtcaaataatgctcccctgaatagacttaaaatttttgagtgacaatttgacactgtctaataaaattatttgaagtttttatcctttcatttaattccgcttggagaactttgttacatttgcaagactggccaaaatatattcatgttaagtttggtattcatatcaacatcaagtggatatatttttaaatgatccatcatatataaattttaaacactaatgttgccctgcactgaaaagacatgctgaaactaggacaggttgataattaaacattttttttaaatccaaattaataagtttaaagagacaaaaaatatctgatt

SEQ ID NO: 694423 - DNA, 608 bp, Homo sapiens
gaatcaactagaatttgacacaagggtaaaattttactgcttagtttaattagtcctttaagtgtttaataaagcatcattttcttagtgatctgaaatggtaacttggtcacgttatcactctgtttccttatacttcagtctcttttgatttttcttctgcttttcacaaattttacttcctttttttacattttagagattatgtctttaatataaatcaattaaagtctcaaaatgtctgcttaatctagtttaaattacgttacatgaaacatgtcaaataatgctcccctgaatagayttaaaatttttgagtgacaatttgacactgtctaataaaattatttgaagtttttatcctttcatttaattccgcttggagaactttgttacatttgcaagactggccaaaatatattcatgttaagtttggtattcatatcaacatcaagtggatatatttttaaatgatccatcatatataaattttaaacactaatgttgccctgcactgaaaagacatgctgaaactaggacaggttgataattaaacattttttttaaatccaaattaataagtttaaagagacaaaaaatatctgatt

SEQ ID NO: 694424 - DNA, 650 bp, Homo sapiens
ttgtgatactctgttatggcagtcctaagaaactaatacaccagcgttacggaacactctagataagaattgactggtgggaaaaaataagagttctgaactcagggggaaagttttttcccaaatttgcccagctatcataaagtcccactatgttttcaactcttgtgtttatgcttcctctgcaaggaaagagcactacaaggaaagagcaaggcaattagaactgcaaggaaagagcaagaaaagaaactatttaggagtaaaacataataacagtgagcccctgtgctggtcagggctccagagaagaagaaccaatagaatgcagaatatgtgtgcgtgtgttggggggggtggggtatacacacacacacacgagacagagacagagagagagaaagaaagaaaagaagaaaagaaaagaaaagaaagagagaaagaaaaagaaagaaagaaaaagaagaaagaaagaaaaaaagaaagaaagaaagaaagaaagaaagaaagaaagaaagaaagaaagaaagaamgaacgaacacatcatgtattataaggaattggctcacacaattatggaagctgagaaatcctacgagcagcagttggcaagctggagactcaagagagttgagttgatggtgtactt

SEQ ID NO: 694425 - DNA, 650 bp, Homo sapiens
ttgtgatactctgttatggcagtcctaagaaactaatacaccagcgttacggaacactctagataagaattgactggtgggaaaaaataagagttctgaactcagggggaaagttttttcccaaatttgcccagctatcataaagtcccactatgttttcaactcttgtgtttatgcttcctctgcaaggaaagagcactacaaggaaagagcaaggcaattagaactgcaaggaaagagcaagaaaagaaactatttaggagtaaaacataataacagtgagcccctgtgctggtcagggctccagagaagaagaaccaatagaatgcagaatatgtgtgcgtgtgttggggggggtggggtatacacacacacacacgagacagagacagagagagagaaagaaagaaaagaagaaaagaaaagaaaagaaagagagaaagaaaaagaaagaaagaaaaagaagaaagaaagaaaaaaagaaagaaagaaagaaagaaagaaagaaagaaagaaagaaagaaagaaagaacgaamgaacacatcatgtattataaggaattggctcacacaattatggaagctgagaaatcctacgagcagcagttggcaagctggagactcaagagagttgagttgatggtgtactt

SEQ ID NO: 694426 - DNA, 629 bp, Homo sapiens
atctttctgtaatcttctgtcatgttctaaaatgtctaaaatattgaaacagtccttattatcagaaaaaagtaatcatgaacagagcccagaatatggtataaaacattaccttactgttctcatcatgtcattgttcagtcctacctccaaacaatgtcccatgagaaawcccagaagacatctccctcactaaagcattgagaaatgcattaataaatggagcacctgcaacctctttcaaaggagagctctgtggttgctctcttctatagggtaggtggaaaatatgccattgacatggtctccccaatttcaatgatgggatgatgggatctcagagtggcataggtaggggtggcactgaatctccaaggacaaagtaaatgcatccactgtaaagggcaatcagaatgctttggcctgcagacatatttgatggtggttaagttatggtgttcttaggaatgaaatagatgggcaatctaccattgtattgcttgatctgtaacagagggaaaaattctaggtctggtagctaaaaacctgatgagtcactgcagtggacagtcatggcctcttgtgttgagatctaagtcaattcacagagccaaagctccttgattaaa

SEQ ID NO: 694427 - DNA, 436 bp, Homo sapiens
tttctcactgtccctttcaggaatgtctggtgaaatttgagcacttggtttgtctttcctattttgctaacacgttttctggtctaatataaccagtgggtatgctttcttttttttcttttttggtgaggggaagggacttaatcatatacagtatttgttttaagtgaattagaaaattgggaatatgatttcagcctaacttggccattgtgcatcttgcctccagacctaataggaattacatattgtttgaaaccatggttaggttccagatatatgaaagtaagcaatcctaagacttactctgttacaggcacctaactaaatttgatkgatttaaattatttgaaaacagttattttgccattgtgcctcccaactagcttagcaaatacctagcaatataacaatataaaatacttcaggtaactct

SEQ ID NO: 694428 - DNA, 668 bp, Homo sapiens
ataatagtattgtccttactttttttttttttttctgagacggagttttgctcttgttgcccaggctggagtacgatggcacaatctcggctcactgcaacctccacctcttgggttcaagcaattctcctgcctcagcctcccgagtagctgggattacaggcgcccgccaccacgcccggcgaattttttcgtatttttagtacagacagggkttccccatgttggccaggctggtctcgaactcctcaggtgatccacccgcctcggcctcccaaagtgctgggattacaggcgtaagccagtgcacccggcctgttacttcttgattattagtttaaaatttttaaaaagaaaactattactagattccaacaagtttctctattgctagctgagtttttatcatattaataggttataaatagaaagccaacttaaaaaagaaactaaaaaattatctctatgtcaactaaatatctcctataactgctattaatttaaaaggaatactctgtttcacttgaagaaaatgaaggtgaaaaatacaggtacactctgcaaggtacaaattagcatgtacacagtgattataatgtaaaaatgtatgtaagcgtgcagacaaaaacatcaaattaatttgtaaaagtacatatagaaggtaataa

SEQ ID NO: 694429 - DNA, 668 bp, Homo sapiens
ataatagtattgtccttactttttttttttttttctgagacggagttttgctcttgttgcccaggctggagtacgatggcacaatctcggctcactgcaacctccacctcttgggttcaagcaattctcctgcctcagcctcccgagtagctgggattacaggcgcccgccaccacgcccggcgaattttttcgtatttttagtacagacaggggttccccatgttggcyaggctggtctcgaactcctcaggtgatccacccgcctcggcctcccaaagtgctgggattacaggcgtaagccagtgcacccggcctgttacttcttgattattagtttaaaatttttaaaaagaaaactattactagattccaacaagtttctctattgctagctgagtttttatcatattaataggttataaatagaaagccaacttaaaaaagaaactaaaaaattatctctatgtcaactaaatatctcctataactgctattaatttaaaaggaatactctgtttcacttgaagaaaatgaaggtgaaaaatacaggtacactctgcaaggtacaaattagcatgtacacagtgattataatgtaaaaatgtatgtaagcgtgcagacaaaaacatcaaattaatttgtaaaagtacatatagaaggtaataa

SEQ ID NO: 694430 - DNA, 619 bp, Homo sapiens
tgaatgtccttataaaatagagataggagatttgacacagacacacagaggataagtgacgtggagacagaggcagagattggagtggtatggccacgagtaaaggagtgtcaaagatgctgggaaaccaccaggagatagaaaaaggcaagtaatggattccccccagaacctccaagaagagtgcagccctgccacaccgcaatttcagaattctggcctccagaactgtgcctattgttttaagtcaccaaatttttgtggtgattgttatggtaactctagaaaatgaatacaaaagttaattgaagagtcaatgtatgataaaggaatcatctgacaacagacagaacaaataagttattggattcattttgtggaatgtttattgtatcrtgatgatgtaccgccacaggttaaaagtgataagatgaataaaaactaattcccacctttaggagatcccagtggtgaggatgatagaacatttacacagataactataatatgagaaagatgtaataaattcgtttttttttttctttttttttgagacagagtctcgctctgttgcccagtctggagtgcactggcacaatctcggctcactgcaacctcc

SEQ ID NO: 694431 - DNA, 603 bp, Homo sapiens
tgatctcagactgctgtgctggcaatcagygagattccgtgggcgtaggaccctccgagccaggtgtgggatatagtctcgtggtgcgccattttttaagccggtctgaaaagtgcaatattcgggtgggagtgacccgattttccaggtgcgtctgtcacccctttctttgactcggaaagggaactccctgaccccttgcgcttcccaggtgaggcaatgcctcgccctgcttcggctcgcgcacggtgcgtgcacccactgacctgcgcccactgtctggcactccctagtgagatgaacccggtacctcagatggaaatgcagaaatcaccagtcttctgcgtcgctcacgctgggagctgtagacgggagctgttcctattcggccatcttggctcctcccgggccaaggcatttaagagacaatctgattcttctattcctctattcccctgatgcagagaccttgaacgccatatgttctagacataactgtaggtggagcttacatgagcccgtggcaatacattaaagacatttgactatattctattaattcaaatttgtatcagctacaaattcatttccacccaaaaacat

SEQ ID NO: 694432 - DNA, 603 bp, Homo sapiens
tgatctcagactgctgtgctggcaatcagtgagattccgtgggcgtaggaccctccgagccaggtgtgggatatagtctcgtggtgcgccattttttaagccggtctgaaaagtgcaatattcgggtgggagtgacccgattttccaggtgcgtctgtcacccctttctttgactcggaaagggaactccctgaccccttgcrcttcccaggtgaggcaatgcctcgccctgcttcggctcgcgcacggtgcgtgcacccactgacctgcgcccactgtctggcactccctagtgagatgaacccggtacctcagatggaaatgcagaaatcaccagtcttctgcgtcgctcacgctgggagctgtagacgggagctgttcctattcggccatcttggctcctcccgggccaaggcatttaagagacaatctgattcttctattcctctattcccctgatgcagagaccttgaacgccatatgttctagacataactgtaggtggagcttacatgagcccgtggcaatacattaaagacatttgactatattctattaattcaaatttgtatcagctacaaattcatttccacccaaaaacat

SEQ ID NO: 694433 - DNA, 620 bp, Homo sapiens
aaatacaaaaaaattagctgggcgtggtggctcatgcctgtaatcccagctgcttgggagactgaagcaggagaatcgcttgaacccaagaggtggaggttgcagtgagctatcgcgccattgcactccagactgtgcaacaagagggaaactccgtctcaaaaaaaaaaaaaaaaaaaaaaaaaaaagaaggtataagagaatggaactgggttgggggatgagcctcaggaggaaggagaacctgcctgtgaaacagatgagaaagagacaagggtggacacagatgtgcatggactggtgggcaaggaactggaggtgaggaaatgggaaggggcagctgctttgggtgaactaggaggtgtgacatcatctaagagtgtagggggcagtgaagaggaagagggcttcatgaaaggggaaagtttaacaaagtgccaggaagaactgacatgggatttactgtgtcatagaggatgtctactgggaggtggtgggggcccagctgtcaccagsgaccatgaaagaaaagtagcctcacaatgaatggttgggtgggtttctccagaagtccccagcagcacgagtataggagcaaagaaggctggctccatttacga

SEQ ID NO: 694434 - DNA, 614 bp, Homo sapiens
ctcctggtgagggcctcaggaagcttccaatcatggcagaaggcaagaaggagcaggcaggtcacatggcgagagcaggagcaagagagagtggggaggtgccacactcttttaaacaaccagatcatgcctgaactcggagcaagaactcactccttaccacaaggagggcaccagccattcatgagggwtatgtcctcatgactcagatacctcacactagccctcacatccaacactggggactgcctttccacatgagatttggaggggacagacatctaaactatgtcgttcagtctgtccaacttgactgcagttaaaagccacacagaaagactgcatttgtgcaatggtgtaggttaatgcctgtgcaccatctgcttcttgtctggcttctttgtgctcatatcaccgttctctgggaagaaaatattcttttctttctctttattctcttccttcctgcagggagcctgaagtccagtctttcccaaaaagaatatcttttttttttttttttttttttttagacggagtcttgctctgtctcccaggctggagtgcagtggcgcgatctcggctcactgcaagctccacctcccaggttcacg

SEQ ID NO: 694435 - DNA, 614 bp, Homo sapiens
ctcctggtgagggcctcaggaagcttccaatcatggcagaaggcaagaaggagcaggcaggtcacatggcgagagcaggagcaagagagagtggggaggtgccacactcttttaaacaaccagatcatgcctgaactcggagcaagaactcactccttaccacaaggagggcaccagccattcatgagggatatgtcctcatgactcagatacctcacactagccctcacatccaacactggggactgcctttccacatgagatttggaggggacagacatctaaactatgtcgttcagtctgtccaacttgactgcagttaaaagccacacagaaagactgcatttgtgcaatggtgtaggttaatgcctgtgcaccatctgcttcttgtctggcttctttgtgctcatatcaccgttctctgggaagaaaatattcttttctttctctttattctcttccttcctgcagggagcctgaagtccagtctttcccaaaaagaatatctttttttttkttttttttttttttagacggagtcttgctctgtctcccaggctggagtgcagtggcgcgatctcggctcactgcaagctccacctcccaggttcacg

SEQ ID NO: 694436 - DNA, 614 bp, Homo sapiens
ctcctggtgagggcctcaggaagcttccaatcatggcagaaggcaagaaggagcaggcaggtcacatggcgagagcaggagcaagagagagtggggaggtgccacactcttttaaacaaccagatcatgcctgaactcggagcaagaactcactccttaccacaaggagggcaccagccattcatgagggatatgtcctcatgactcagatacctcacactagccctcacatccaacactggggactgcctttccacatgagatttggaggggacagacatctaaactatgtcgttcagtctgtccaacttgactgcagttaaaagccacacagaaagactgcatttgtgcaatggtgtaggttaatgcctgtgcaccatctgcttcttgtctggcttctttgtgctcatatcaccgttctctgggaagaaaatattcttttctttctctttattctcttccttcctgcagggagcctgaagtccagtctttcccaaaaagaatatcttttttttttwtttttttttttttagacggagtcttgctctgtctcccaggctggagtgcagtggcgcgatctcggctcactgcaagctccacctcccaggttcacg

SEQ ID NO: 694437 - DNA, 614 bp, Homo sapiens
ctcctggtgagggcctcaggaagcttccaatcatggcagaaggcaagaaggagcaggcaggtcacatggcgagagcaggagcaagagagagtggggaggtgccacactcttttaaacaaccagatcatgcctgaactcggagcaagaactcactccttaccacaaggagggcaccagccattcatgagggatatgtcctcatgactcagatacctcacactagccctcacatccaacactggggactgcctttccacatgagatttggaggggacagacatctaaactatgtcgttcagtctgtccaacttgactgcagttaaaagccacacagaaagactgcatttgtgcaatggtgtaggttaatgcctgtgcaccatctgcttcttgtctggcttctttgtgctcatatcaccgttctctgggaagaaaatattcttttctttctctttattctcttccttcctgcagggagcctgaagtccagtctttcccaaaaagaatatctttttttttttwttttttttttttagacggagtcttgctctgtctcccaggctggagtgcagtggcgcgatctcggctcactgcaagctccacctcccaggttcacg

SEQ ID NO: 694438 - DNA, 1489 bp, Homo sapiens
gatttcagataagggattgtgtatctgtattttttaagttccttttggttcaggaggaattccagagctttgaagttcatggccatggtataaggcagaacttccagaaagagcctctgaatgataactgagatacacgtgtaagagcttcagctctatgtaggtcagccaggctacagccctttatcttctattgctacagagcactggactaaatttggctggtgaatcttctatagcatcatgccataagcttggagatggtctcaccaactttggcaaagggccaaagaaacaactggaactgtactgaccccacaaagccagggcagacccctctgcaggtgctgggcagtgactctgagcctctgtccagcagtcagtgcacaagtcaggttggggtctgacaggagggaacaatttccccagcagctatgtgcaactcagcaatgggaaatccaggcatgaagacatggagaatccagggtgagaggtaggcagcaaggtgcaaccctagacaaggggctcaggacaggccttcggtcccagagaagaggacaggtaaaggcaagcaaggactcagtctgagaagctgccaaggcaagagctcagtcagtggggacagtacagacgacaagttacctgcctgagattaaagcagggactgggcctcaagtatgagactgggcctgctcagtatcaaggctgcctggatctgagttgcactctagagagctaagtctttccctactaaggtctagttcgacccctgagactgagcatggaccagattcaaggaaggttccctctgcaggcagggcctggcaccagagaccaaaggtccacagagaagagagattaggaatccctccagtcctaggcaccatagtgacttgatttggtccctgtgcagtagagaatgaccttccccacagaaaggtttgatccttgcccagatgctgggaggtaacccctaagcccatagaatatcctgcctgataagsgtgtgtttgtttacctgcaggtctatggccatgccgggtagtttgaatgctaacaatgcagtatatggaattgggggcaggaagaaggtgttaaaccacccactgtcagtttggtttctggaggggctggagactaagatgtgtgcgatcagtcacacctacatgattaactcccagtaaaaagccctgtaccccaaggcttgggtgagcccctctagctggcagtactctccgtgtgttgccccatatcactgctgagagaagtaggcactgtccacaagcctttcctgggaaaggacaactggacactcacacctgttctctcctggcccagccttatgtgtgtaatggtttttctgagttctccaggtccttctagtaaatcactgaaactgtaggcggtcttggggacctcccaaactcccaaatggggcagtcccattttcctccctaaaacagaccccagatggaccctgaatgccagg

SEQ ID NO: 694439 - DNA, 1489 bp, Homo sapiens
gatttcagataagggattgtgtatctgtattttttaagttccttttggttcaggaggaattccagagctttgaagttcatggccatggtataaggcagaacttccagaaagagcctctgaatgataactgagatacacgtgtaagagcttcagctctatgtaggtcagccaggctacagccctttatcttctattgctacagagcactggactaaatttggctggtgaatcttctatagcatcatgccataagcttggagatggtctcaccaactttggcaaagggccaaagaaacaactggaactgtactgaccccacaaagccagggcagacccctctgcaggtgctgggcagtgactctgagcctctgtccagcagtcagtgcacaagtcaggttggggtctgacaggagggaacaatttccccagcagctatgtgcaactcagcaatgggaaatccaggcatgaagacatggagaatccagggtgagaggtaggcagcaaggtgcaaccctagacaaggggctcaggacaggccttcggtcccagagaagaggacaggtaaaggcaagcaaggactcagtctgagaagctgccaaggcaagagctcagtcagtggggacagtacagacgacaagttacctgcctgagattaaagcagggactgggcctcaagtatgagactgggcctgctcagtatcaaggctgcctggatctgagttgcactctagagagctaagtctttccctactaaggtctagttcgacccctgagactgagcatggaccagattcaaggaaggttccctctgcaggcagggcctggcaccagagaccaaaggtccacagagaagagagattaggaatccctccagtcctaggcaccatagtgacttgatttggtccctgtgcagtagagaatgaccttccccacagaaaggtttgatccttgcccagatgctgggaggtaacccctaagcccatagaatatcctgcctgataagggtgtgtttgtttacctgcaggtctatggccatgccgggtagtttgaatgctaacaatgcagtatatggaattgggggcaggaagaaggtgttaaaccacccactgtcagtttggtttctggaggggctggagactaagatgtgtgcgatcagtcacacctacatgattaactcccagtaaaaagccctgtaccccaaggcttgggtgagcccctctagctggcagtactctccgtgtgttgccccatatcactgctgagagaagtaggcactgtccacaagcctttcctgggaaaggacaactggacactcacacctgttctctcctggcccrgccttatgtgtgtaatggtttttctgagttctccaggtccttctagtaaatcactgaaactgtaggcggtcttggggacctcccaaactcccaaatggggcagtcccattttcctccctaaaacagaccccagatggaccctgaatgccagg

SEQ ID NO: 694440 - DNA, 2836 bp, Homo sapiens
gatagtatagaactgccatctgcttctgattaggcctcagggagcttgtactcatgacagaaggtgaagggggagcaggcacgtcacatggtgagagcaggagcaagagaaaggtagggggaggtgccacacacctttaagcaaccagatctcatgtgaactcacttatcaccaagggatggcctaagccactcatcagggatccacccccatgatccaaacacttcccaccaggccccacctccaacatgagggtctacatttcaacatgagacttgagtggggacaaacatccaaactatatcacctgtgaaatggagtgttaactaattccaacctacagggcaggtgggattttcaatgagctataacaggggttctaaaatttgagggtgcatcagaatcacctagagggcttgttaaaccccacactactggctcccacccccagaatttctgactcggtggaggatgaagcctgaggattggcatgtccgaccagttccatggtgatgctcagtgagtccatgagcaacgctgctggtctaaagaccacactttcagaaccacaactttcctcctgaaacactcatggaaacctggccctcgtgatttatttgtctgtttctttgcctgatacctggataaatccttctgttgctctgtggtgcaacccttcatttcagtatccaacatctgaagttccagctcagaccttctgagccagcaagactgctgggttcagtctgacctcactggtaaagaacagagtgggttttcaatgtctaatagaaatacactgcatggcacatgtaattctaaattttctagaggccacgttaaaaaaagactagtaaaatgaattttagttacatattttatttaacctaatatatcatcaatgataggatattatcatattaacatattaacgatatggacattattaataaaatatttttctttttttgaacagtcttagaaatctggtatgttctggtatgtattttacctttctagcgcatcttcattcagactagccccatttcaggtgattaagagtcatatgtggttcgtggctaccaggctgggtggcacagtcttagagtatttgtaagtgggagaaaactgctgtgtattctcagagtaaaaaactccccagagagtactgggttctttatgttatagactcttctgtcaccagagtaccataacctctccaaaggccaggtgtccttgcgtgagaaaactgaaggcctgggcctgggatatttttataggaagttgcacatttcactaggcaaagaaaacattcttagatttctcttttaatgcccctaaaatagtcacatttccaaaataaggcttttctgctttgaaattgaactcataacatacccactgattctgatatttcagttgggtccaggagtggtgaattcactgcttttaattcttcctgggagaaattctgggagaccattttgaataggcaaattgccacgtaggtaaattagagtcactgtcttcgaattcagcttcccccagacagcaatagccagtgcttacccccaggaagttagagcctacccaccccagagaattttcacagcagatgtggttgagtacttcataatgaaaatgctcagtctaaatttacgttttcttcttagacaacactgagacttatttttgccattttttctcatttctgcgaaagcagttcttaacccataatattacctttgtaaatatctcaaactgaaaatcatttaaattttgtttctacggaaaagtgttggcgattcataaaagaatagttgtattttctaagctttccagtattactgaaatccatttggaaaatgtgactatattttatagacagaatgtcagatgttttagatttgctgtggaattgctaaaattatgccagtagttgagaataagttgcctctaattttttctacctgaacctgtaaccacatctaggcatttttcaggcacatagtttatcagggaaaagtaatattattatcctattgaaccatataagactactgtttttgtaggtcaaaaattgttgaatagtgacaatttcatgtatgtaatcataactagagaggacagcatttttcttttctgttcattttccatgccatttaaaattgagtggtaagaaaaaaatgtaaaagctatgaatttcaaatttgcactatttctagtggaaaagaaatagagcaaaatgctttagagctgtgattctcaatcttgatggtgcattaaaatcacctgtgcgacaaatacactctaaggtgacccctaatgagtcatgcccagtggaatatggaaaaggcattgagatgtcactcccttagttaggttacattttatggtgaagttgacatgaatcacttctatgattacattgtgttgtataagactccttcttaagggaactgtgggcagcttccaggagtaaagagtgctgatggccrtgaaggaaatggagaacttagtccctgagggagcttaaacaaagatcgtttcactacgaaatctctgatgagaccacagccctggctgacaattgaatcacagccttgtgcagaggactctattaggctgtgctcagattcctagcccacaaaaactgttggatagtagatctgccattattttaatccattaagtctgtggtaattcattttgcagcaacagattactgatacagctggggagctttagcaaatcgggatatacgagaccaatggcatcagaatctctggggctaggacccaggcatcattgtttatatagttcgtcagtgattctg

SEQ ID NO: 694441 - DNA, 662 bp, Homo sapiens
tatttatggataaataaaatataagatgcatacaaataagaatgaagtctagaaatttgcctttctaacttggtactaatccaacggatgagcaaagagaccataggagaaaaagaggtaaaatgttaagaaactcttttaaaaagataatcagacaagcctagaatctcataggctatgtcaaaagaaatgtaaatgtgtggagaattgagaaatggctcaggagggtttatcttttccatttgtgttctccaaatgccatccgaggcagcactgtgaccctggctcccagataagagcagagcctgtgccagagtcagtgacctctgtcacagaaatgctgactgtctcagttccctctgcatttgcattttcttccctgacttggaaagtctgcatttccacatgcaggcttccatactccagttgaaagatcatgtggctgcctgtctagccctccactgacagraatacaaagccagccattttcaaatgatctgactgcccctatgggttatggaacactggagaatcatggcagcttctcccattgttcaatgggtaaacttgtgtagctcttgtcctagattcctaaggggacaccaattttctccaaactcctcccaaccccaatgttttcctcaaggaatgaagtttggata

SEQ ID NO: 694442 - DNA, 632 bp, Homo sapiens
cttcataggttggctataaataatctcttaatctaaagaggggcactcagtggggatctttgatttcctggaccagtgcccaggaatgaaatctgaaggtggattctacactgaattatcactctccacatctcttcttatagcactctagttaagcccaaaattttacctggaccccacttaatttttaaatggatatttatttataatgaaattataaaagccagatttcttgaactgaaaagtgggctgtacaaactracaagtataactatcagttgaaggaaaaacatgaaattggaaatatctaatcaataatagacaaaagtcatttttaaatcaattcagttacaaaggtacttattgggccaaatgcggtggctcacgcctgtaatcctatcacttcgggaggctgagacgggtggatcacttgaggtcaaggagttcgaaaccagcttggccaacatggtgaaaccctgtttctactaaaaatacaaaaaaaggaaaagaaaaaattagccatgcatggtggcaggccatgcatggtggcaggtgcctgcaatcccagctagtcgggtggctgaagcaggataatctcttgaacccatgatgcggaggttgtagtgagctga

SEQ ID NO: 694443 - DNA, 632 bp, Homo sapiens
cttcataggttggctataaataatctcttaatctaaagaggggcactcagtggggatctttgatttcctggaccagtgcccaggaatgaaatctgaaggtggattctacactgaattatcactctccacatctcttcttatagcactctagttaagcccaaaattttacctggaccccacttaatttttaaatggatatttatttataatgaaattataaaagccagatttcttgaactgaaaagtgggctgtacaaactaacaagtataactatcagttgaaggaaaaacatgaaattggaaatatctaatcaataatagacaaaagtcrtttttaaatcaattcagttacaaaggtacttattgggccaaatgcggtggctcacgcctgtaatcctatcacttcgggaggctgagacgggtggatcacttgaggtcaaggagttcgaaaccagcttggccaacatggtgaaaccctgtttctactaaaaatacaaaaaaaggaaaagaaaaaattagccatgcatggtggcaggccatgcatggtggcaggtgcctgcaatcccagctagtcgggtggctgaagcaggataatctcttgaacccatgatgcggaggttgtagtgagctga

SEQ ID NO: 694444 - DNA, 632 bp, Homo sapiens
cttcataggttggctataaataatctcttaatctaaagaggggcactcagtggggatctttgatttcctggaccagtgcccaggaatgaaatctgaaggtggattctacactgaattatcactctccacatctcttcttatagcactctagttaagcccaaaattttacctggaccccacttaatttttaaatggatatttatttataatgaaattataaaagccagatttcttgaactgaaaagtgggctgtacaaactaacaagtataactatcagttgaaggaaaaacatgaaattggaaatatctaatcaataatagacaaaagtcatttttaaatcaattcagttacaaaggtacttattgggccaaatgcrgtggctcacgcctgtaatcctatcacttcgggaggctgagacgggtggatcacttgaggtcaaggagttcgaaaccagcttggccaacatggtgaaaccctgtttctactaaaaatacaaaaaaaggaaaagaaaaaattagccatgcatggtggcaggccatgcatggtggcaggtgcctgcaatcccagctagtcgggtggctgaagcaggataatctcttgaacccatgatgcggaggttgtagtgagctga

SEQ ID NO: 694445 - DNA, 664 bp, Homo sapiens
tcctggcctcaagcaatccccccaccttggcctctcaaagtgctgagattacaggcatcagccactgtgcccaccctacaccaagcatttaaaaaacatatttcccaattctcactgtattacccattcaaggaattctatctttagaaataggaaaaaaaaaaaaaaaaaaaaggtgggggggaatagtctggtaaaaggttagtgtactctacactgagaatggtcaagttcaaatccacttctgtcatttattatctatgtgatgctggaaaaacatattaacttccctttgtctttgtctaaaatggataatacagggctgttgagaggattaaatgaattatttaaaaccactagatacatattaagatttyagtaaatgttcattattttttttttaggttactcttactatttgactctatttctctaaattaaatgtagagtggtctctagagttggccttcatctctgtgattctagtaaaaatacaataaaatataaaataagtaaaataaaaaatataaactaatcaaatctttaaatgaacaaagtggtattataacgtgattggttatgacatgacactggctataaatacaatttacaaaagctatacagtattcactttaatatacatttgttaaatgaattaccaaaa

SEQ ID NO: 694446 - DNA, 1564 bp, Homo sapiens
taatccagacaatgtatagtttaacagcaattaagtttataatatttcagcctctggtagaggctcgcatagagcctgaagaaaaaagggaaaggaacaagttagtaatggttttatgccctatcttctgcttgcctaattcagtgtacactcatttgcaagtaaagcatacatttaacagttctaataaraatcagttgaatgtcattacagtatacagggcaggaaaactcaacaaaataaaaggcaaagtatatcagtaaaatattttgttgctctatcagtccaaatttgaaatacttcaaattttagataaagctctgctttgacccagaaagaaacatggcattgatgaatccgtgtattcagtacattcagaaaatgttttaagtaacaaactcttgcctaccatgtagacagaagtctaagatcaaactcctccttcatgcttttaagatttataggataaatgtagaacttcaagcaagtcattttttaagtgatgatttttctcccactgaactggaatgtccctcttctatcaccccatgtatattttcatttgaatttgacatgacagatagtaccgatcttttcacatgtggaaaagtgaataaagggatctgcagcatattaaaatgcatggagatgataatacttttcacatgatttaggttataaataaatcaagtgcaacgtttctgggttcttgttcaaagaagatatattttcatctgatatcttttcaacgtgtccctttcctgggaagccattgatgacagtttgatcgaagtaccatgttgtttttgtaagaaaggaatgttgagtcatatcgacatgtattattgtcaaaaagattatgtttttagatagagctaagcttttgatgccaagccattgattacactgattaactttggtatttgaaaaatattaggaagtagtaattatgattaacattctaaaagcagtgtcccacctcaattttaaatttatctgattattgataatttttctgtattggaaaatagtttccatggaattgttattttctatggatgtatcaaagcaacatttgacatatttttttaagtctttaggtttatcagaatgtaggttgccaggtataacttacacaaacaagttgagtatagagagttactgatggaagccagtgttggacttaatcagtttctctgcatccttcctctccccacaatccttgcacagcactaatgcttcatcctgcttaccatcaggaggcagccactcagtaggtaatagtgaaggtactttgcagacccatttacaatatttaaggttgaatgccactagttaccttactaattttgtattttaacattcagatttatggaaaatttacaaacagagattcaagaaatggaattccttcagttttctaaaggtttgagtttcatgagaaaagaagactttgcagagtggctactttttttcactaacactgaaaataaagatatttattggaaaaatgtgagagagaagttgtcagcaggagaggttggtatacccttttattatgcat

SEQ ID NO: 694447 - DNA, 640 bp, Homo sapiens
ctttgtttacttttgttttgtttgtttgtttttgagacagggtcttgctctgttgcccaggctgaagtgcagtggtgcagttagctcactataacctcaaactcctgtgctcaagggatccttctgcctaagcctcctcagtcgctgggaccacaggcacatgccaccgtgcctggctaatytttgtattttttgtagagatgggggtttcaccatgttgcccagtctggtctccaactcctgagctcaggcagtccggccacctcagccttccaaagtgctgtgattgcagtcaggaaccaccgtacccagcttttattgttttaatggaaaaaactgagttttcttttaacttttttatttatttgtttgtttttacacagagtctcactccatcacccaggctggagtgcagtggcgcgatcttggctcactgtagcctccgcctcacgggtttaaacaattctcctgcctcagccttccaaatagctgggactacaggtgtgcaccaccacacccagctaatttttttttttttttctttttcaccatgttgaccagactggtcttgaactgctgacctcaggtgatctgcctgccttggcctcccaaagtgctaggattagacatgagccacagc

SEQ ID NO: 694448 - DNA, 650 bp, Homo sapiens
ttttagtgttctgaatatttaattacattttatcaaatatgccacatcagccttcaagatccrtatccatcctccttctaagggtgcctccacatgccctctgctgttggtaatcctttccagtttaaaacatgtatttatcctggaaacagttccaaagctttcgggatgttctcattagctcataacagccaggaggagggaggaaggtttattgtataatttgggtgattaagatagcagaaacaagagaaaatgtcggagtttgagagttaacagtgctagaaaagcagattaaagcctctgtggaattgataaaaagctaagagctaaatgagaaacgagataaagaggtcttactggcatagaaaaataagattcacaagagtaagcaagtggaaagacagaaaccttgattttaattattttgtttgtattaggtaatttatattttattaaatcttttttagatgatacacacacaatctagaaatagtaaataaaatgtttggtggaaataagtttcattgtttgaaatagggtctaaaaagcagaatactaaacaccaaacaataccaaagtttttaccatggaataatgcagaacaaagcctataggacatggaaatactgaccatttctttgcgcagt

SEQ ID NO: 694449 - DNA, 650 bp, Homo sapiens
ttttagtgttctgaatatttaattacattttatcaaatatgccacatcagccttcaagatccgtatccatcctccttctaagggtgcctccacatgccctctgctgttggtaatcctttccagtttaaaacatgtatttatcctggaaacagttccaaagctttcrggatgttctcattagctcataacagccaggaggagggaggaaggtttattgtataatttgggtgattaagatagcagaaacaagagaaaatgtcggagtttgagagttaacagtgctagaaaagcagattaaagcctctgtggaattgataaaaagctaagagctaaatgagaaacgagataaagaggtcttactggcatagaaaaataagattcacaagagtaagcaagtggaaagacagaaaccttgattttaattattttgtttgtattaggtaatttatattttattaaatcttttttagatgatacacacacaatctagaaatagtaaataaaatgtttggtggaaataagtttcattgtttgaaatagggtctaaaaagcagaatactaaacaccaaacaataccaaagtttttaccatggaataatgcagaacaaagcctataggacatggaaatactgaccatttctttgcgcagt

SEQ ID NO: 694450 - DNA, 650 bp, Homo sapiens
ttttagtgttctgaatatttaattacattttatcaaatatgccacatcagccttcaagatccgtatccatcctccttctaagggtgcctccacatgccctctgctgttggtaatcctttccagtttaaaacatgtatttatcctggaaacagttccaaagctttcgggatgttctcattagctcataacagccaggaggagggaggaaggtttattgtataatttgggtgattaagatagcrgaaacaagagaaaatgtcggagtttgagagttaacagtgctagaaaagcagattaaagcctctgtggaattgataaaaagctaagagctaaatgagaaacgagataaagaggtcttactggcatagaaaaataagattcacaagagtaagcaagtggaaagacagaaaccttgattttaattattttgtttgtattaggtaatttatattttattaaatcttttttagatgatacacacacaatctagaaatagtaaataaaatgtttggtggaaataagtttcattgtttgaaatagggtctaaaaagcagaatactaaacaccaaacaataccaaagtttttaccatggaataatgcagaacaaagcctataggacatggaaatactgaccatttctttgcgcagt

SEQ ID NO: 694451 - DNA, 650 bp, Homo sapiens
agcctagccaacatggtgaaacccccgtctgtactaaaaatacaaatttagccgggcgtggtggtgcatacctgtaatcccagctacttgggaggctgaagcaggagaattgctagaaccaacctgcgaggctgaggttgccatgagccgagagcacgccattgcactccagcctgggcaagaagagcgaaactctgtctcaaaaaaaaaaaaacttttgtaattcttacctaattatacgacctggagcaagtcccttctcttgagtctgaggtttttcatctgaaaaatggcaacagttataatacatgttagaacttcatgagtagcaaatgtcattatgtttctgacatactttgaaaactctaatacacttaaggtgagcaacgataaaatagctgctgttaactagtgttaattcacaccaaaattgtgctgagatctttacgtgtattatctcatttaacctctttaatcatcctgtaacatatatattatgaaatctatttatcatgagcaaaaaaaggacttagagttccaagatcacaccagtttgtggccaagaattcaaacccagatatgtttatgtccaaaatcaatactgtaaaatatattttatggtgctactagtaaygaagtggttcagtgca

SEQ ID NO: 694452 - DNA, 1556 bp, Homo sapiens
tttctttgyttcatttgccaaatattctgcacagtgcttattttgtattttttcccatattaagtgtaatacaagactcattggcacattataaataagaaattaatgctgaaaaggaagccacttccaaaagcagcatttccccaggaaataaagaagaggtgagatcagtacccccagagagtctacaactgtcttctgtctgttccccttcttcttttacaggataaaatgaaaattgagaaagaattcagataattgagactaaaacgtgctgccttagttatttcaatttctcatacaaaatgtatgcttggcttgaggtatattattatcttccatgttttagttatagtcttactgaattgtacaagaaggaaaaaggttaaaaaattaaagtggattgcatgtatatgtgtgtgcctaaaggcatattgataacatagaaacataaatatgttatagaaaaattataccatgaggatcaattaatgtatcaaagggaaggtaatgttatgatgattgatcagattcatttcactgtgacccagattaaagctttttactattaacccgtggcttctgcatttactggggtggatttttcctttttgtatagctggataggaacattttcatgtcttttcactttaaatttgctcaaacaaagcactaaaccaaaaatgatacagatttaaatgaagattctgtaggagaaagagagagggtgaaaccatgtaccacaaaaccttgtcctcattaaatatttttattttctgcaagttctcactgccatcataacaaaactgctggttttcgttatcctccctttggtcactctgtatcccttcttactggatcctttattttgtcattcttatttttcctcagaacctcaaatcctccatcttttcatatacagggcaatttcttcacagccttttgttagtcaggaagtccttttcatcataattggtttattttagcttcgaaatctttcctctaaatatgcacaaggctttctctgaaagggactttgttttatttttccatcttgttacaatttcctccatcacagtacataattctgtagttgaggatagttgtgaataacaattcagaaagcaggaattgaagcctatttctccaaactcattgatattattatcctgtaactaaactctaagaattttaagaaatgtatctctatggggtcacctatagcagtaaaacatcaatcatcaataacttttatgtaggctttgcttaatacattgtaaactttgatctcatattattttctaggtataagggttaaaaataagtgccagtctagattttgctgaaaataacttctgttttaatatcctgtgattttcaccacaatcattcccttcattgccaaacaatgaattggcaaggattcttgttcaattgaggtttaatggaaactggttgccttaagaagaaattgacttatgtgcatgatgtgttcatttgcaggcagcttcaaagatcaccaactgtaagaaacaggaagagactttgaagtagat

SEQ ID NO: 694453 - DNA, 1238 bp, Homo sapiens
tatcttttaaatttggtcatttttcttttttttgtcttgagacggagtctcgctctgtcgcccaggctggagtgcggtggcgtgatgtgcaagctccgcctcctgggttcacaccattctcctgcctcagcctcccgagtagctgggactacaggcgcccaccaccccacccggttaattttttttttttttgtattttcagtagagacgtggtttcaccgtgttagccaggatggtctcgatctcctgacctcgtgatccgcccgcctcggcctcccaaagagctgggattacaggcgtgagccaccgcgcccggcctaaatttggtcatttttttgactgatgtgctacttcttactagattagggagatgcacttagcttttaaaacctgagttcctgttacatgatgaggctcttggacgtgtgtctctgactctgcgttgcgagcagagtgagggatgcaggatgatccctggtcctgtcctgtgctcctaccatcgagcccactacctggctggggagacttgtgaacgcatctcaccaaacccttcccaacagaccctcagcgagctctagcagctgccagctacctggcccagaaaagaaatacacccatcgtctcctactgatatcatttagaaaacggaagatttcaacctacttaggaaagctattaatacggtctgttctctcacttaagtaattaacggccaggtcacactaaaaatgtatacatgacgtcaagtcaaagccaagacatctacaaagcctaagacgctggttgtgcagctgcaggaaagacctgggattcaggctagattctgaggagtaaactgtgcttaaagagacatttagagacccatgcaggcatctaagaaccctgtcaccactgcggactgtgactstggacctgaaggccaagagggtcagtggtgccctctcacaggagctgaggagttcaccttccctgcttttctcatcgtgctgttcaaccacagcactgaacacagacagaatcctcaacagaacttctatgtctcagctctcaatcatgtgggtgagggaagatggatgaggtcgtgttttgatgaaaaagtgaacaagcttaccatttgtctgcagtggtcctgccagcacgtgttaatcttctttaaaaataaaacactatctagtgagtctgtacagatctgctaaggaaaactttaaaaatgctggccaatttaattattacctttt

SEQ ID NO: 694454 - DNA, 646 bp, Homo sapiens
gtcctggcttcattaaaattttggcaagtatttactctcacttgacttgagaagtacttaccttagaaaatcagatatttgtttttttgtcatatagtcattttgggaaggttccagaatgttcctgtacaatgttgctaatagaaattgaagatgctctctttttctagtttagagtatttactatatgtttatgctcacagcaaagcatgtggattcaaagttaagagcaggcaacaaagaagccacagacgaggagctggagcggacgttggacaagatcatgatcctgttcaggtttatccacggtgagactcgggcactcagaaaatgctgcataatcaagaggtgtaaacaggccctgctttcccagaggaggtttagcatgagaatgtcagtatcagtagagccagtttgcattagaatgaacacttttcatccttgctaacatggtgaaaccccgtctctactaaaaatacaaaamattagccaggcgtggtggcaggcgcctgtagtcccacctacttgggaggctgaggcagagaatggcgtgaacgcgggaggcggagcttgcagtgagccgagatcgcgccactgcactccagcctgggcaacagagcaagactctgtctcaaaaaaaaaaaaa

SEQ ID NO: 694455 - DNA, 2461 bp, Homo sapiens
tccatcacaccagcacggcggggcctgctcctgccctctaggttggtgctgagccctccgacctgagctctcacctgctgctgcttgaggtctgccctccacaaagacaggaactcgtgtgtgctcaccgatgtttcccacacccctgaacggcgcccagaacacgataggttttcaacaatatgtggtgaaaagaactgcatggcccacggctgtgaagattcgccatgatttgcactcagacataaccgaagcaggctgtgagcccgtttccatgtcctaccaatcccacatttggatgtctcctaactccatctgcctctaatttcaccattccacctggtccaggtgttcaccgaactgagctgagacagccggcatcctttccgccctgcgaggttctgcctgctgctgctgctgctgcactgggtccctgggccccagccgggtcaacagctcttcccactcccgggagctctgtggggttcccttcctctggggcggctccgtcaggctggtctctggcatcctcatttctgcgcccttgggttgagggtggcgctgattcctccctgcccttaatgatgcacttgagctttgccccatccgtgaggacacacactatggtctgtgagtcacacagccaggatctgaaccaggctctgccatgtacagcggtggtcaggccagcacgcaaattctcccggccttcggtgtcctcaccctggaaatggggtgggtgactgtgtccgtgtggtgtggctgttctgaggacaagcgcagctcagcaggaaactgacacatgccgtgtgctcaccaggcaggagctggagccacacacccccaggctccaaacactggggactggcccggctgcccctcacgtctcctctgccctgcaggatgagcacgcagcccccttgacccagcaccacagccaggctggggaagggcagagtggtctcagccccaggccctgcccacccgactgatcctcagcttctcttcccaagtgacttgagcctgcagctcatcgtctgcactggccttcaccataacccgtggataacttatccactaataaatacactttaattattaaataattaaacattaataaatagaaaagtggaaaggtttgaaaagaatggttttcaccttaaaaagtaagtaattacttaaaaagcaaccatggatatatatagcgcaattattatgctcttactagtattcacaaactcagtacaaatacatacataaaaccaagatagcctctcagagattctgtgatcaatacaaaccacaccgtggccctcaataggcacagaagttaccaactgaggaaggggtgagccaaccacacagccccagctgcccacaagggctaagagacggcaaaaggccctctgccgtcccaggagcaagcagttgctgcagccggaccctggccactcacatgggtttctccttttcaactcaatttcaaagaaatttttttactgcaaaaagatttttggccaggcatggtggctcatgcctgtaatcccagcactttgggaggccaaggcgggtggatcacctgaggtcagaagtttgagaccagcctgaccaacatggtgaaactccatctctactaaaaatacaaaattagccgggtgtggtggcacacacctacaatcccagctacttgggaggctgaggcaggagaatcacttgaacccgggaggcagaggttccagtcagccaagatcacaccactgcactccagcctgggcatcagagcgagactccgtctcaaaaaaaaaaaaaaaaaaaaaaacggtttgtaacctcatctcccaaacaattcaaccatgttttaattaaattttgatttctcagcggaatcattttggcagcaccagaaacaggacagttcgggcataccgcaggaattttcaacatacctggtagtattcttccaacaagagcatctaacagccaaaaagattcttcttcattatttgttataagaatcagatatcctgctataaaattcattccctgaaattagaaaaatgagaaacaaattcacattgagttttaagcccccatttgattctgcaatcattcggctacaaactacccagtttccatttctcttgcttctccttaaaacctgcataattgcagaatgatcctttagtaraactctagagtcactaaatacctaccgtctagtaatgtgtttagtcaagcttacgtgaaaagtaaaagcaaaaggaaacagtttaaagaaatcctgaatactaaaatcaaagactcttccactaatggtaaccttgtgataaaagaacataacttaccattgctttctaaagaaattactatatatcaacagcatgaaactctctgccagagagaaaattataccaatgaccacattttataaaaccgtaaggaacatgtgctgacacgcggg

SEQ ID NO: 694456 - DNA, 640 bp, Homo sapiens
caactgatttatgctatgaaaagggcaatctgagcaggaatgtcttagtctttcctgacatttaatttaccatcataacattcgtagacttgtacagctgtagcatctyttcaatgcagaaataattctttatgatgagtgacacatttcttagaagttaaaatttgtgtacggagatggcagaagaatctgtctaggcctgcctcaaactgggttactgtagcaaaaaaaaaaaaaaaaaaaaaattatcagttggtgttccaatatggaatgtaacacattttagagtgtattttttctgttgcccaggcttggagaagtgtagtggcaagatcatggctcactttagcctccacctgtcaggctcaagcagtcctcccacctcagcttcccaagcatgcaccactactctctgctaatttttaaatttttcttgtagagatgaggtctcactgtattgcccaggctggtctcaaactcctgggctcaagcagtcctcccacctcggccttgcaaagtgctgggattataggcatgagccaccatgttcggcctagaatatattttggaactgacattttaattcaaataggacatctctaccatgccctgggatttttgtaaaatagagtttggaaa

SEQ ID NO: 694457 - DNA, 645 bp, Homo sapiens
tttactatagtattgttgtcatatagtatactgtactatactataacatcctagtccaaattaatttcattttgggacagcatggccccctaactggactgccgtgtacactcttgccccgtacaattcattctctacactgcatcaaagtgaactttaaggcaaattctgattatatctcctatcaaattttttattgtccttaggatggcaaaaatcaaaatataagctggcttggcacartggctcatgcctgtgatcctagcactttgggaggccaaggcaggtagatcacttgagcccaggagttggagaccagcctgggcagcatagtaagaccccgcctctacaaaaaattaaaaaattagctgggcagggtagtgcatgcctgtagtcctagctattcatgaggctgaggcaggaggatcaattgaacctgggtggttgaggctgcagtgagccaagattgtgccactgcactccagcctgggcgacagagtgagaccctatctcaaaaaaaaaacaaaaaacaaaaaaaaccattataaactgtgcaagatttctgtctctctccagaccagactagtgtcatactaatctcccccttcttccttgtgctccatctcccagtatttacctttgcca

SEQ ID NO: 694458 - DNA, 1331 bp, Homo sapiens
gcatcaacacatctccttctgaactttccgaaggcctgggagaaaggggcctgctttcaggaaatccaagatgggcgtgtcctgcatatttgtctgtttcagttagaaagaggaggtcaagtggaattggtgtgtgcgtgctcacgtgtgtgtgtgtgtgtgtgtcagtgttgtatgtagaggctttgcatttgttttgttaatacgtgtatgtatttaaactcagttgcttcttgctcttcatgaaatgcaggaggccactgcgaaaaaagttctttgaaaggtccatgggctgacatactgaagtcatctgtattattttgacctgagagagagaamagatgtttttagtcaagggggaaagtgacaggtgcctgctgctcaccaccttttctcacctttccaagcacaagagcaaacaaacaaacaaacaaaaaagaagcccaaattgggttttaaatagataattttcctccttttctttttattcatggcaattgcagggatagagaggccagttttggtcatttagaatctatttccagggacaactgaaatgaatatgtacttctgtacaattaggctgccaaaaagaatgcaatgtttacaaatgttgtgtgatatattataggatattcttatattgctggaagcccaatcagatctctacttgctctgacagtcacataggtctctggtagtcaaagcagctattttgttaaaaacttaagctgtagacacgggattttttttttttagacaaagtctagctctgttgccggggctggagcacgcagacatgggattttttttgtgcagcaactttgttgttattgatttgtttcaacaacatgtaccaaactttaagaaaaatataattaaaatctttcctttttaggttagttatacatcatctgaaaaattacaaaccaagaacagtcacccaacttaagaggactgtctattcattgtttgcaggaactgaaacacagctgtgactgtaggtcagttacagcagtgttttcaaagctttgtccaggatcttggccacagaagatttgctgggaacagtgggagccccacagctaaaaatgcctattgcttttcaacatttgttttccttccaaggaagagcttgtgtttccatttgctatataatatttttagggtgtttggactggcccctgaagttaaattactcttactttacaagacatatttatggcaggttgacagaaggtacactctaaatgataaagacataggagatgctaagttctctgcctctcagtaggggatgaggtttataggtgtgtcagttttggtttttc

SEQ ID NO: 694459 - DNA, 567 bp, Homo sapiens
ttgatttcctcattcttcccagtctcacccctgggagtttctgctactggcttggctcaaagccttaaaaacccatagagtacttttataatgtcacagcaaatgcaagcatgttgtctctggaaaggaactctgaggcacatgtgttaaaccagcaatgctgtacctttagcagagtgttgttggttccgtgcctgaaacacagataacatacttgacatcaagaccccttgtgaatcagagagaatgactttaccttcttggaaacgttttgacttgagatgtagtcagaagatattctygtccgaccctttgagggttcatttaagccgtacgcaattagatgaacatgtatgtcctgcagatactcactgctcatctgttgtccactgccgctgtctacatatgtgacctctttcaatttagtgcacattcttgacatcaggtggattcacagcttgcaacagcggactggtccttggctgataaaaactgggaggactttcatgttgtactgaggcgaggtgtctgaggtcatggaatggttattaagattgtaatcgaggt

SEQ ID NO: 694460 - DNA, 654 bp, Homo sapiens
ttttaatattggaaaattgagttaataaaatgatgttttggcatgtacttccctcagcaagggaacagctgtgcattcactttaagccgcctggtcccccttgctcctgcttgatccagctgatttgtgtgtcacgccatgcccttcttgggtttgcaggctrtcagaaatcctggacagaaataggatttaattaacctggaaattgctgttgtgccgcagtcagggctaccctagagattgagtgcacagatagcaataagctggttaactctacactgttgatgaccccagaggaaacctggagaaacagtgccacccttgtgtgaagcttctaatggcaggatgcccaggaagcttctaaatcaatcatttggggaggaaggggcacagggagggtattacaaaagaaaaaagtatttggcataggactgttagttcatccctggggtttctttacaagcatggtctcgtgatttattggttaactttccaaataatgttagtgtgtatcttgctgtgctccttcgttctcataaaggtgctatatattttattttaacaacaaacaatgaagattgattttggtaaatttttaagcggtgatacctaacagcaagtgagaggtggctgtgggaggcttagcagaaaaag

SEQ ID NO: 694461 - DNA, 2368 bp, Homo sapiens
aaaaaaaaagagtgctgtatgtggaggtctgggaaaggaccctgacttataaaaacacaaccaggccgggcggtggctcatgcttgtaatcccaggccgaggcgggtagatcatgaggtcaggagttcaagaccagcctggccaagacgataaaaccccgtctctactaaaaaatacaaaaactagccaggcgtggtggcggcgcctataatcccagctactcgggaggctgaggcagagaactgctcgaacccaggaggtggtagttgcagtgagccaagatcacaccactgcactccagcctgggcaacagagtgagactccttctcaaaaaaattataatttaaaaaataataataaccagataagcagtcaatgaatgacaactaaaaagaaatacctacaaacatctggttgtcacgacacctatggagatgttttagatgacaaggacagactggaaagactgcaggacttctcagattcactgcagttactcaaactaggaggggacactctgaggatggagacagtcacaggatgtaagcaggaagccaagataaggccacagggccagccctgaggtgctatgaatactgcagtggaaaccaaaatggaaaatgaaatttaagaaacaaaacctttacaacagcatcaaaaaccataaagtgatcaagacagggggctgggaacacccaagatgagcctacaacaccttaatgtgtctgtcaggaagtaagagctcagaggacgatggggacatgttacagggacacgggtagcagctttaaggcctcccagtattagtgtcctcattgttaactatggcttgggaacaaaatatccttaattttaggaaatagacactgaagtatttggtgataaggggatattatatttgcaacatattctcaaatggttcagaattataaaaactatgtgttgcggggaggatgatggggagggataagggagagagaatactgtcacacaaatatgctatggttaacatttgggaaaatctttgtactaggttttgcaacttttcattaaaaaaccactcgtaaaacataaccacaaactaagtaagaacaaataaaaaagtatgaaggaagataaatgccaccaggagctytgagagatgcagagaatatcgtgttatattgatttgctgctgcagtcttctctagcacaacgttcaaatactcccaaaatgattctattagaatgcacgctacaaatgcccaagtgcagcaacttaggctaggaattatgccaagaataaaaaaacaatagcatttacttcaaagaagtaaaaaatgttactgaccaaggcactggtgtttgattttgactatttttaaagggaaacatcttttctgggttgagaagaagcaagatcacaaaataaaggaggttgaaaaaattaccgaaatacttttgtgcacgagagtctagccttacgaaatggctggacaggtgtagtccttggtctttctctgcgtgaggtataaaatggtttttaagtataaaaccctgccaggcacagtggctcaggcctgtaatccccgcacattgggaggccaaggagggtggatcatgaggtcaggagttcgagaccagcctggccaatatggtgatgccccatctctactaaaatacaaaacttagctgtgcatggtggcgcacacctgtagtcccagctacttagaaggctgaggcagaagaatcacttgaactcaggaggcagaggttgcagtaaaccgaggttgtgccactctactgcagcttaggtgacagagcgagactccgtctcaaaaataaataaataaataaataaccctaagtggcaaagggcctattcagtattgaaacatgtatttctgaaaccggtcttcatcatacagcaatctccttccaatcaagacttccaacaataaatgcagtattctttccattacatcacagagcacctatgccaatgctgaaccactgttttccgttgaaatggccctaaaatgctttactccacaaatcttattacctatataaattaacttctaattactattagaaatgacaggagcagtggctcacgtctgtaatcccagcactttcagaggctgaggcaggcggatcacgaggtcaggagatcaagaccatcctggctaacacggtgaaatcccgtctctactaaaaatacaaaaaattagccgggcgtgttggcgggcgcctgtagtcccagctacttgggaggctgaggcaggagaatggcgtgaacccaggaagcggagcttgcagtgagccaagatggcgtcactgcactccagcctgggcgacagagcaagactccgtctcaaaaaaaaaa

SEQ ID NO: 694462 - DNA, 1856 bp, Homo sapiens
attttgactaagggtgtggcctcctgaagttttggatttattctggtagtaggtagtttcaagtcactaagttgtgtgagcccaagcattactatcacgtcattacaattcaagtctcctgactactgagattaacaaacagccccaaggaagtcaacgttttacagcctgctaaatactctggttttagcatcctcattccttatgctcagttgcacatttatttataaggatgtttgttatgtttatcccctagcaagtttagtttctttgtttgtttatttggcatagaaaaatatctagtctgtcaaaaatctgaaaataaaaatgctgctgaaggtcttgaaaactttagagatcaaataaaatctaatcatgggaatgattgatttatgaaaattaataaacaaagaaaaagcattctctaggtttctaatagattaacctgtgtcagttctaaagagtattatcaacaaactgtcaaaagattagtagaaaataagcagaaattattagggttcagaatgaacttattaaaattaagttataagataaatatcatttttggacaaggtcactcatttaatagagcaccggataatagcgttgtatctacaatatttagcaacaaagagaattgaaaaatgtaattgaatgagtaaatatgggttattggattgatattatgtatctcaatttgagcaaggcttttgaaaagaagtctcatgcagtcttaatggatgaggtgcagtgtagcagatgttggtcccctgtccatatcctctcagcactcagcattctcatagctcattactccaagcacctgccactttctgcctgaggacttctctgtccccgaaaatgtgcttggctcatgtacagacctgggagttaacacccctgtgaacagcattcaatcattgagaggagaatcagtggatccatacctcagcttcctcttcatccctccacagagcatcccctgttggtttccttctttcctttccctgcctaacttcccattctcctccatcagcactttctgagaaaaaacctcctaagcaaacgacctttcttcaaatcctagtcttacagcatgcttcttggggagcccagtgtaacacatggagaattatggactagaatctaaaacaaaccaaattgtttcataaatcgagtaaaatagtttcataacccaatgattgctacttggtttatgtaagtcagaaggaatgtttctaatgttacactgggagggtattttttccttatctttctcagtctcatcaacacttgaataaagatgtagaaagttttgtaatgagtttggagatgacatagtattggtgtagcgggtgatgtagtgaatatattagatgatggaatcaggactcacacaatttttaataagctagaaaatggataagtataataaaattatattagtggattaagatattgcaattgagtattctcaaatgtgaaacattattttgtgataacgttttagaggtattaattmacaataaaccaggttagttaacatgatgcatggctgataaaaaagcagatgtgatttggggttagattaataaagtagtaactagaccaaagaaagtgataattatgtttaaatgataataaaccgacaatagcatctaaacattatgctttttctaaaaaaaaattcaacttttattttagacacaaggagtatgtatgtaggtttgttccatgggtatattccatccaggaagtgcgcatggtacccaatagtagtttttcaacccttgtccccattcctaccttccccctctggtagtctgaagtgtctgtttttcccatgtttacgtcca

SEQ ID NO: 694463 - DNA, 1856 bp, Homo sapiens
attttgactaagggtgtggcctcctgaagttttggatttattctggtagtaggtagtttcaagtcactaagttgtgtgagcccaagcattactatcacgtcattacaattcaagtctcctgactactgagattaacaaacagccccaaggaagtcaacgttttacagcctgctaaatactctggttttagcatcctcattccttatgctcagttgcacatttatttataaggatgtttgttatgtttatcccctagcaagtttagtttctttgtttgtttatttggcatagaaaaatatctagtctgtcaaaaatctgaaaataaaaatgctgctgaaggtcttgaaaactttagagatcaaataaaatctaatcatgggaatgattgatttatgaaaattaataaacaaagaaaaagcattctctaggtttctaatagattaacctgtgtcagttctaaagagtattatcaacaaactgtcaaaagattagtagaaaataagcagaaattattagggttcagaatgaacttattaaaattaagttataagataaatatcatttttggacaaggtcactcatttaatagagcaccggataatagcgttgtatctacaatatttagcaacaaagagaattgaaaaatgtaattgaatgagtaaatatgggttattggattgatattatgtatctcaatttgagcaaggcttttgaaaagaagtctcatgcagtcttaatggatgaggtgcagtgtagcagatgttggtcccctgtccatatcctctcagcactcagcattctcatagctcattactccaagcacctgccactttctgcctgaggacttctctgtccccgaaaatgtgcttggctcatgtacagacctgggagttaacacccctgtgaacagcattcaatcattgagaggagaatcagtggatccatacctcagcttcctcttcatccctccacagagcatcccctgttggtttccttctttcctttccctgcctaacttcccattctcctccatcagcactttctgagaaaaaacctcctaagcaaacgacctttcttcaaatcctagtcttacagcatgcttcttggggagcccagtgtaacacatggagaattatggactagaatctaaaacaaaccaaattgtttcataaatcgagtaaaatagtttcataacccaatgattgctacttggtttatgtaagtcagaaggaatgtttctaatgttacactgggagggtattttttccttatctttctcagtctcatcaacacttgaataaagatgtagaaagttttgtaatgagtttggagatgacatagtattggtgtagcgggtgatgtagtgaatatattagatgatggaatcaggactcacacaatttttaataagctagaaaatggataagtataataaaattatattagtggattaagatattgcaattgagtattctcaaatgtgaaacattattttgtgataacgttttagaggtattaattcacaataaaccaggttagttaacatgatgcatggctgataaaaaagcagatgtgatttggggttagattaataaagtagtaactagaccaaagaaagtgataattatgtttaaatgataataaaccgacaatagcatctaaacattatgctttttctaaaaaaaaattcaacttttattttagacacaaggagtatgtatgtaggtttgttccatgggtatattccatccaggaagtgcgcatggtacccaatagtagtttttcaacccttgtccccattcctaccttccccctctggtagtctgaagtgtctgtttttcccatgtttaygtcca

SEQ ID NO: 694464 - DNA, 559 bp, Homo sapiens
gacgtattcttgttatccttattttcttagctacatagaggctttgggtagcttacccatggtcatatgacttagttttgataaagctggacttctaatgcacatgtgtcagagtccaaaggctacagccttcctactataccatagaaagaattttttcagactgaaatatgcatttccawacatttgtgacatacttaggctttttaaaatccatgcaggtctaacaactatttagctgaaatgtaagactcacttgagggagtttgatagaaatgcatattacaagacttcatcctcagagactctgattcagttaatcatctgtgatgccctgaaatctgcatttttaagaaattctcctaaaaatcctcttctaaagttcctcagttgattctgatatcaggccagctttagaaatgagaaatttatgccactgccccccgtggctgaaattacactgtgaatctgaattcattagtgccttgcagcatgattgctgccctgagaatgatctatagagttcatccatgtgaagcactgaaatagagaaggtaaa

SEQ ID NO: 694465 - DNA, 605 bp, Homo sapiens
gagatagtcgaccagacacagtggctcacccctataatcccagcactttgggargccgaggcaggcagaacacttgaggccaggaattcaagaccagcctggacaacacagaaagaccccatctctacaaaaatgtacaaaaattagccaggagtgaaggtgtgtgtctgtagtcccagctactcagtaggcttaggtgggaggatcacctgaccctggggaagttgaggctgcagtgagctgtgatagcgccactgcactccagtctgagcgacagagaccctatatttaaaaaaaaaaaaaaaaaaaaaagtcttacctctcaatatgatggtggcttggtttcactacaggaacaatcctgccctctgaagtaagattacaagctacaaatggctgtgttcagagtgatctctgatgggatggtacagtcctgcctggaatacctcagtcatgaggggattctgcagggggcgatggactcacttgctgtgatagacaacaaaggaatgaacagctccctgtttcccacggagaggatcctatctgctcataaaaatgcctatcactacctggccaaaggaatactgggtagtttcctttgt

SEQ ID NO: 694466 - DNA, 675 bp, Homo sapiens
gggaggggtggggtcaggttggagatgctctgcggtattcacggtgagtagggggactcggggacttggagtagggggacttgggccttagagtctccatgcccaaacagacatcctcagcctgcccggagaggccacctgctgaactttgttctttggctcagtctgctagggactttggccactgataaaatgcacacatgtgggaagtttaacattgagctgtgacctattatttatcccacagtgggatgtgattatcacttgggggagaggagggaggcttgccacatgcaggggaaaggtcttagatagcagattggttgctctaagtaggctgtgctggcttggctgggacttcaccttgagaggtcggtgaacatcacagctgcatagggaatgcagggacaggcggaacggctcccagctggggttcaggttgttcttcaccaccttggagaggcaccaggtggctggtcagctcctgtctgtgtyttcttactttactctccctcccttcatccccatagccccaggcaccaacctcagttctccagaccagctgatcactttggtcctcgttggtcttatagatttccatgaaagggtcagacttgctgaacagatcctgaagatacaggagaaagggcccttgaggttggtgagagctgcaag

SEQ ID NO: 694467 - DNA, 669 bp, Homo sapiens
ccctctggtgacaggaaaagccttggtttttccagggaaaatgaagagaacaggtcagcctagggctctcaggtgtagcttctcagcctatgtcctcttgtttgccccatccagactgctgcccccactgctgcagattgtgtgcaagggcctggaggacccctcgcaagttgtacgcaatgctgcgctgtttgccctgggccagttctcagaaaacctacaggtgaaccaggctgaatgtgggagccaccacttgaatgtccccttcccctcatctttcatctcttcaagcatccctgckgccatcagcactcttgtgtgtgcccggcaggtgaacctgactcaggccctgcttgctccctcccccagccccatatcagcagctattcaagggaggtaatgccactgctcctcgcctacttgaagtcggtgcctcttggacacacacaccacctagccaaggcctgctatgccctggagaattttgtggagaacctaggtagtgatggcagtggggagcttggggaagggggatgaggcggcggctttggctgaatgtacaggatgtgcatctccctgcattgctgcctgtggtaggggaaagggtgtgatggtgccaaaaaaaggtttccgcctggagggaggtgggcgtgcaggtagcagacctgg

SEQ ID NO: 694468 - DNA, 669 bp, Homo sapiens
ccctctggtgacaggaaaagccttggtttttccagggaaaatgaagagaacaggtcagcctagggctctcaggtgtagcttctcagcctatgtcctcttgtttgccccatccagactgctgcccccactgctgcagattgtgtgcaagggcctggaggacccctcgcaagttgtacgcaatgctgcgctgtttgccctgggccagttctcagaaaacctacaggtgaaccaggctgaatgtgggagccaccacttgaatgtccccttcccctcatctttcatctcttcaagcatccctgctgccatcagcactcttgtgtgtgcccggcaggtgaacctgactcaggccctgcttgctccctcccccagccccatatcagcagctattcaagggaggtratgccactgctcctcgcctacttgaagtcggtgcctcttggacacacacaccacctagccaaggcctgctatgccctggagaattttgtggagaacctaggtagtgatggcagtggggagcttggggaagggggatgaggcggcggctttggctgaatgtacaggatgtgcatctccctgcattgctgcctgtggtaggggaaagggtgtgatggtgccaaaaaaaggtttccgcctggagggaggtgggcgtgcaggtagcagacctgg

SEQ ID NO: 694469 - DNA, 601 bp, Homo sapiens
tttttttagcttgtggttgtaaccagcagtcatgccaaactttaaggaaataagggcaagttttattacaaataccaataaagaagagtgcacttatggagggaaaatatatttattcttcaataattttaaggtaataaaaatgttgtaaataaacatgatactaatatttttattgttatataggtatatatgtaaaatttaggaatggatttagaggaaactatcartttacttttagcattctgttataacatatacatagaaatctggagtttaaatattaggtgactcgctaaatatgagagaaagatctaactctcatgttacatcttctcttaacagcacactttatattttcttaaaggcaaaatcaccagaattcttgcaaatcgaaggaaaagaaattaagcgaatgcggaaacgtaaatcactgagaccaagaaagtcttcaaaacctctttgtgataaaaaactacataaaaagtaattttcttaaatttataatttttctattgggagaggagttattcagtagcatagagacatgaaaatacatttttaaaaaagaaaactaaatgttttagaaattcatatatga

SEQ ID NO: 694470 - DNA, 1363 bp, Homo sapiens
aatagagaaaatgagtggatatgtgtagcacaaggtatattgttatagatgtggtgtgccacccaatttcccacatccagctaaagatttaggcactcatttcacctgactgctgtaatgctacctgcaactaggtcacagctgagttcttcaccaggcagtgctctcagctgaagggaactacctctccgaggtcatatccctccttggagtagctcatatttaatggcttgtcagtacaggggtacaaggaatacctttctagcctctgaaggaccatcccagtttcagaactccctatgggatctgttgaggtctctactgcaattgcagctcaacttcctcttctgcctgaccctgctttccttacttcttataggtgttgtttctgtgagcagtcttttttgtacattgttactgagatcaggaaaatattcatctgagaaactatttgcaaagggaactcaatctatgacaatgatgaccatgggaaagataagaaaatgcagacaaaaattctatagttctatcaccattctattaataccttaatgaatttctttccagtctttctatgcatatatatatatatatatatatatatatatatatattcatagtatgtatgtgtgtgtgtatatacatactgtataagtttttgccatgaatgttgtttttatgccttacttttaaaacttaatatattgagaatatcttatgtcattcttctgtatcatcacttttagttgctgcttaagtcatgtatggatgtaccaatatcttaatgtgtggtttctaattttttcattactgtattatgaataatgcagtagtggtcatctttgtagctaaatctttgtctaaccatggtttttttatttatttataagtgttgaattgttgaccaaaagatatattttatagatatatatataaaatcaaaactatactccaaataggttacatgacccattctttaaaatagagtgtcttgatcctcagccctctagcactggtgtrtaatgtgtgcactgagatgattttgccactgatgaatccattctaattttttacagagtatgtaggccccattttaaaggtttgttttaggaaacaaggtggcagaatagaaagctccaccaattatcccccatagagggacaccaagttaacaaccatctgcacagaaaaacaccctcataagaagcaaaaatcaggtgagcacttatagtacctggttttaatttcatattgctgaaggaggctctgaagagatagaaaaaaacagtcctgaatcattgttgccacccctccaccacacccagcagctttatgtctccaggtaatcttgaaaggcaatcta

SEQ ID NO: 694471 - DNA, 1363 bp, Homo sapiens
aatagagaaaatgagtggatatgtgtagcacaaggtatattgttatagatgtggtgtgccacccaatttcccacatccagctaaagatttaggcactcatttcacctgactgctgtaatgctacctgcaactaggtcacagctgagttcttcaccaggcagtgctctcagctgaagggaactacctctccgaggtcatatccctccttggagtagctcatatttaatggcttgtcagtacaggggtacaaggaatacctttctagcctctgaaggaccatcccagtttcagaactccctatgggatctgttgaggtctctactgcaattgcagctcaacttcctcttctgcctgaccctgctttccttacttcttataggtgttgtttctgtgagcagtcttttttgtacattgttactgagatcaggaaaatattcatctgagaaactatttgcaaagggaactcaatctatgacaatgatgaccatgggaaagataagaaaatgcagacaaaaattctatagttctatcaccattctattaataccttaatgaatttctttccagtctttctatgcatatatatatatatatatatatatatatatatatattcatagtatgtatgtgtgtgtgtatatacatactgtataagtttttgccatgaatgttgtttttatgccttacttttaaaacttaatatattgagaatatcttatgtcattcttctgtatcatcacttttagttgctgcttaagtcatgtatggatgtaccaatatcttaatgtgtggtttctaattttttcattactgtattatgaataatgcagtagtggtcatctttgtagctaaatctttgtctaaccatggtttttttatttatttataagtgttgaattgttgaccaaaagatatattttatagatatatatataaaatcaaaactatactccaaataggttacatgacccattctttaaaatagagtgtcttgatcctcagccctctagcactggtgtataatgtgtgcactragatgattttgccactgatgaatccattctaattttttacagagtatgtaggccccattttaaaggtttgttttaggaaacaaggtggcagaatagaaagctccaccaattatcccccatagagggacaccaagttaacaaccatctgcacagaaaaacaccctcataagaagcaaaaatcaggtgagcacttatagtacctggttttaatttcatattgctgaaggaggctctgaagagatagaaaaaaacagtcctgaatcattgttgccacccctccaccacacccagcagctttatgtctccaggtaatcttgaaaggcaatcta

SEQ ID NO: 694472 - DNA, 469 bp, Homo sapiens
cctttccccctctaacacctcttaactcatctagcacactggccctcattacctcctcttcagctatactggcctcctcagtgttcttatttcagtgcctttgcacatattgttcccttggcttggcatagtcttcccacagtaacctacaaggttcacagtttcaccatatgtgaaatagccactcactgcattcctctcgttttgaccccatttaatttttctccataacatttrtcaccatctgacatatatctacataaaatttgtttgttggctatcttctcccagtacagtataaactttacaagggcaaaatcttactctattctgttcattgctgatttcacagtgcctacacctgggctcagcatatagcgagtacacaatacttatttattgtataaatgtgtgaatgaacgagaaagttcaggctagtcccaggggttttggaaaaactgggttggga

SEQ ID NO: 694473 - DNA, 1493 bp, Homo sapiens
tgaattgcaacactgttagctgtgtccccagatccttctcaattcctaactgctgccccatttgaagttcttgggaaggtaagacacaagccactccaagcagatgggtgctatttattcatagttgaagcttttgcataaattcttcttagttttcgtactctattgagctaagacagacaagatagaaacctcaagaattctctttaccatccccctctgatgttgaaacataacaggatgaaagcagcctctttccgaaaccttctctttgttattctggcttctcactcagagctctcttcccaaagcatcaggtacctttcctctccatcttagtaagcctcagccagtgtggaggtaagagaagtctttataaagagaattatcactgttgtttgtaacaaatgtcccaaccttgagcatttcttgacctttatggctgtgtgtgtgtgtatgtgtgtatgtgtgtgtgtgcgtgtatgtatactatggcatggagagtgatacaatgtacttccagaattttttggtacattatttatggtttccaaagaatgtggtacacatctttaaatatacatacacatggataagcgataagaactcctttggatggttgcctgagttacccactgcccaatctcattcttagtacaaaacaaccttcagggtaaaaattgttatacatttcattatacagtagacatatgggaatatcgtgatgcctgaagctttttagctgaaggaggctttgagccaaatttattcctggggcactcatgtgtaaatcctatatatgtggcctatactgagtaacctgtttacaatttatttgtaaaaagcatgtggcagccagttgtcttttgcctttttcagttgggaagacacatggtaactagctgtctagatttacagatgtgggtcagctgaagctgaaacattaatgtacataggcagtgtgttccgtatatactcctccttggtagttctgttcatggtcagagggttttttttgtttttggcttttcttgattcagattaaattattattatttgtatattttttattcagagcaaaagtctaaagagsctacattttgtagaatgatttttgatacacagtttattaaaagtattaacagaacttcgttttagagcattaaaaagtaattctgcaaggaaatctggtaactaagaaattcatttgtttaaaagataatgaagggctaattagctgtgaatgtaattatctcagggaacattatcagttgctcattagaggccttcaatagcaagttagctgttctagagctagtatctagggagttggtcagtcaaaagttggaagtcttttgaagactgtgggctagtggtttaatatttctagtggctagtatccaggtagcattaattgtcatccttaactcatcaaacacttctcctttacccaattgatgtattactcacattatcagaaatatctttaaaga

SEQ ID NO: 694474 - DNA, 649 bp, Homo sapiens
ttaggcccagcacaagtattaatattattcacccttgaaagaaaagcttgattatgggtgatgctaggcccaattttcactggcttatctaaaggatctagaaaccacagattgctgggccacaccctcaagtttctcattagtaggtgtagggtggagtccaataactggcaattttctcaaattcccaggttatatcatgctgcctgtgcagggaccacactttgagaaccattgttttagcgtaactcattggttttgagatccaaggaaatggaagcacatgtgtttagggtaatcttgtgctagtttgcatttattctcatatatatgtcagcacatgcaaactrcagtagaggaggcatttacctgaataattcaggctcacaaatgacttgcactccattaaaatacttcaagcataggaagtgttttctaggggagtagggaggggagtgtttctgaatcaccctatgacttgctttattgcccgtttttattttgcatatgtatagcaaagtattgtttgccttaagagaaatatgttcacctgtctctaatgatggctttactctgatttcctgtttgtgcaagatctggaaaaaaagttgtgttaggaaatgggaatgggaatgggcaagaggttttc

SEQ ID NO: 694475 - DNA, 422 bp, Homo sapiens
ggcctcaggggctgctggtggggaggactgtaatgagttcagaacagtcccagaaggtaacactgataagagacgaggtggagtagtaacaaactatgagcactcaagatggagaaagctgagaaagggctgataaacaagaattttgagtgggccagcaaaagtaatgagttattagacaaacacttaaatcaagaaattggatgagaacagaagatgagagagcctmcacagatatgcttggagctccatgtcaaggtatgttcagaaaaaaggaagaactaatcatgaccatctgtatgcacagcccagccaacaccatgttaaatgtatgtcaagttctccaagtaatatacatgtgtgtgtgcctatagtcatcgttatttgtaaaatgtttgttctcttagcatatgatattgtac

SEQ ID NO: 694476 - DNA, 633 bp, Homo sapiens
ttttagcaaccagtgatgattcttgctataactattattattatagtatttaataaatggttggcagttttgagggtaatatacagaagaaaaaaattaaaaattaaaaaataataaatggtgatttttctatttccataatttcttcaacatttgttagagttctactrtaagaagaaatctccattctcccagtttatttattaattttaaccctacaaactcatggatatttatttcagtctatgaattataattcattactatcataacttattttgtggctcaaatttgttttcaatttggccagtggttgctcttttaactgggctcctatatctacttgacacatcccaaacatttcttgagcacagctgtagtttctggtgtaataagatgctctagggtcatcttatactttctcagcctcagtcctggaatcagccatttctttgaggagctaaagttccctttatttggaaaaggtatttagaaaccaagatcttagctaggagtgctcatggctactgggctttcactgtttctaggactctcagtggacagaactggaaaatatatgtatgtatactaaagccatgcatacacaagcatttgtatctatttctttatatt

SEQ ID NO: 694477 - DNA, 633 bp, Homo sapiens
ttttagcaaccagtgatgattcttgctataactattattattatagtatttaataaatggttggcagttttgagggtaatatacagaagaaaaaaattaaaaattaaaaaataataaatggtgatttttctatttccataatttcttcaacatttgttagagttctactgtaagaagaratctccattctcccagtttatttattaattttaaccctacaaactcatggatatttatttcagtctatgaattataattcattactatcataacttattttgtggctcaaatttgttttcaatttggccagtggttgctcttttaactgggctcctatatctacttgacacatcccaaacatttcttgagcacagctgtagtttctggtgtaataagatgctctagggtcatcttatactttctcagcctcagtcctggaatcagccatttctttgaggagctaaagttccctttatttggaaaaggtatttagaaaccaagatcttagctaggagtgctcatggctactgggctttcactgtttctaggactctcagtggacagaactggaaaatatatgtatgtatactaaagccatgcatacacaagcatttgtatctatttctttatatt

SEQ ID NO: 694478 - DNA, 649 bp, Homo sapiens
ctcagctctggcaagttaagaaatacaggtggaattctgcttgataaagctgctgggtttttttgttacaaaaggacagacttggcaarcatgagcctttgctcttatcttttcatcctacttggagtgcagagataaaacctgagtaccagagccacttttaggcataaggaaggcagccatgtgctttgggtcatgttagtaaaaagactcagagcttggctccttgctgacatgcctggaggagctgctacaccagcttggattgctgacctctgacttcttggtagtgagaagaataaacactgtgcttaattaggcctcggtcaggtttctcttatatgcagccaaatgcagtcctaagtaatacaataaataactggtcaaactgttactggtggagggtgtccaggttcttggcattttggacaaataattgaacaaaacgcacaaagcaatgaatatcctctagaggtttgccattggttacttggcgtacaccctgtgtaaatgaagtagtggcccgtgacctgtctgattggtgcagaaagtgaccaatcagaggctgaagtgaagttacaaagttatactcctgtgtaaatgaggacttggcttatgaccagtctgattggttgcaggaggggaccaa

SEQ ID NO: 694479 - DNA, 649 bp, Homo sapiens
ctcagctctggcaagttaagaaatacaggtggaattctgcttgataaagctgctgggtttttttgttacaaaaggacagacttggcaagcatgagcctttgctcttatcttttcatcctacttggagtgcagagataaaacctgagtaccagagccacttttaggcataaggaaggcagccatgtgctttgggtcatgttagtaaaaagactcagagcttggctccttgctgacatgcctggaggagctgctacaccagcttggattgctgacctctgacttcttggtagtgagaagaataaacactgtgcttaattaggcctyggtcaggtttctcttatatgcagccaaatgcagtcctaagtaatacaataaataactggtcaaactgttactggtggagggtgtccaggttcttggcattttggacaaataattgaacaaaacgcacaaagcaatgaatatcctctagaggtttgccattggttacttggcgtacaccctgtgtaaatgaagtagtggcccgtgacctgtctgattggtgcagaaagtgaccaatcagaggctgaagtgaagttacaaagttatactcctgtgtaaatgaggacttggcttatgaccagtctgattggttgcaggaggggaccaa

SEQ ID NO: 694480 - DNA, 649 bp, Homo sapiens
ctcagctctggcaagttaagaaatacaggtggaattctgcttgataaagctgctgggtttttttgttacaaaaggacagacttggcaagcatgagcctttgctcttatcttttcatcctacttggagtgcagagataaaacctgagtaccagagccacttttaggcataaggaaggcagccatgtgctttgggtcatgttagtaaaaagactcagagcttggctccttgctgacatgcctggaggagctgctacaccagcttggattgctgacctctgacttcttggtagtgagaagaataaacactgtgcttaattaggcctcggtcaggtttctyttatatgcagccaaatgcagtcctaagtaatacaataaataactggtcaaactgttactggtggagggtgtccaggttcttggcattttggacaaataattgaacaaaacgcacaaagcaatgaatatcctctagaggtttgccattggttacttggcgtacaccctgtgtaaatgaagtagtggcccgtgacctgtctgattggtgcagaaagtgaccaatcagaggctgaagtgaagttacaaagttatactcctgtgtaaatgaggacttggcttatgaccagtctgattggttgcaggaggggaccaa

SEQ ID NO: 694481 - DNA, 1122 bp, Homo sapiens
  misc_feature 364, 365, 366, 367, 368, 369, 370, 371, 372, 373, 374, 375,376, 377, 378, 379, 380, 381, 382, 383, 384, 385, 386, 387,388, 389, 390, 391, 392, 393, 394, 395, 396, 397, 398, 399,400, 401, 402, 403, 404, 405, 406, 407, 408, 409, 410: n = A,T,C or G
  misc_feature 411, 412, 413, 414, 415, 416, 417, 418, 419, 420, 421, 422,423, 424, 425, 426, 427, 428, 429, 430, 431, 432, 433, 434,435, 436, 437, 438, 439, 440, 441, 442, 443, 444, 445, 446,447, 448, 449, 450, 451, 452, 453, 454, 455, 456, 457: n = A,T,C or G
  misc_feature 458, 459, 460, 461, 462, 463: n = A,T,C or G
attccataatagatgtctgtggatgataacacaggatgcaggtaacatttacattttggcatgtatttcttaagtatcattttcagaatgtccaaaacttcagcagaaaatggtagagggcaggagaacttttgactaaaaacttccttaatttttttttttgagatggagtctcgctctgtcacccaggctggagtgcagtggcgcgatctaggctcactgcaagctccgctcccgggttcacgccattcttctgcctcagcctcccgagtagctgggtctacaggcacccgccaccacgcccggctaattttttgtacttttttagtagagacggggtttcactgtttagccagaatggtcnnnnnnnnnnnnnnnnnnnnnnnnnnnnnnnnnnnnnnnnnnnnnnnnnnnnnnnnnnnnnnnnnnnnnnnnnnnnnnnnnnnnnnnnnnnnnnnnnnnnggtagggtgtgagttcggagcgtcggagttgtaagaacagataaaaaaagatagaaaagaatagagggagcgggggaattgggagttaccgatactagttggtgtgggggaaggtaaaggagagtaaagtgtaaccggcggcccggccaaaasttacttattaaataatgaggctgttgggaatatgctgactagatttggaaacaaacaataattctttacagtttattaaagaaaatacccattggtgtttatttcttttacatagctttccagacacatttttatttattaagtcctgtcattttctcctgaactcaaggaggcaagttatctctctgataaggacctcagcaatcagctgaattacctgccagaggctataaaggggcttgtctgagccagaaattcacagcagtgtctgccagtgagccccaggactttgcttctcgtttccaaccttaagttgatcctgctgtctttgtagaggtaacatctacttgctcctatatctgcacctgaaaagcatctcaacatagcccaaaactggaagcaaccacaatgtttttctgtaggggaatggataaactgtggtatatccatacagatgggatattattaagcaatacaaagacatgagctagcaagctacaaaattc

SEQ ID NO: 694482 - DNA, 669 bp, Homo sapiens
cttctcactgctgatgggggctggagctccagctagggtctttttcccctcacctttttcccctcacttctttccctcaactcctgtccccacctctctgtcattacagggccccccccgttcccagctcagagctgggtctctacttcagccacatttctctggtgtttgcctttcttcctgccaggtattactatcatacccatatccatctgtgctttgcccagtagtccaacctcacccttagccctgctcttcttcactcctggggccagctagtgccctccaccaacacctggacctgtggacacctctttcccagacagacggcagcagcctcttagtcctctgaatagatgactttattccttgtattctggtacacagaaatctcttgaattaggcttattttaagaatagagtttagrtaagtttcccaagctataattcatcatgaaccttattttcccaagtctagaagattctcaatactagtactttcttgatcttatcagagggtgtccatggaaggtcatgaccatcacccagctgagtgcagtagaaggaagctttctaatgtaagttgcatcacagtttcagagatgtgagagaaattcagaaatgtgagggaaattgtgaaatgtaaaacgtgagggagaaaagcattca

SEQ ID NO: 694483 - DNA, 580 bp, Homo sapiens
ctgtggactacctcgagatctaatagttctgtggtgtctgaaagatgtcactgtatttctctcaaaactgaaatatcccaaagaccctttcaggtcactgtggagccccatgttacctcagcgcagagtttggaaactayatcttattctatcataaaaccagtttccaaacacatatgtggttttacatgtgtctattagttaaaatttgtgaattaaattattcaaattttctatctcttcttgtgtttattcattactaagaaaatctcccacaatgattatatctttgatgaatttccccttctaattttgcaaattttgactttatatatatatatatacacacacatatatatatatatatagagagagagatagatagagagagagagagagagagacattctattaggcatatactagtttagagctattatagcttctttgtaaattatttcttttatcaaacattgggtaacaacccctgcatttaaattgaaaacatcctaacatagaccaaaatatctatggcacaagaaccatatttacttattttttattttttagatggagtttt

SEQ ID NO: 694484 - DNA, 580 bp, Homo sapiens
ctgtggactacctcgagatctaatagttctgtggtgtctgaaagatgtcactgtatttctctcaaaactgaaatatcccaaagaccctttcaggtcactgtggagccccatgttacctcagcgcagagtttggaaactacatcttattctatcataaaaccagtttccaaacacatatgtggttttacatgtgtctattagttaaaatttgtgaattaaattattcaaattttctatctcttcttgtgtttattcattactaagaaaatctcccacaatgattatatctttgatgaatttccccttctaattttgcaaattttgactttatatatatatatayacacacacatatatatatatatatagagagagagatagatagagagagagagagagagagacattctattaggcatatactagtttagagctattatagcttctttgtaaattatttcttttatcaaacattgggtaacaacccctgcatttaaattgaaaacatcctaacatagaccaaaatatctatggcacaagaaccatatttacttattttttattttttagatggagtttt

SEQ ID NO: 694485 - DNA, 580 bp, Homo sapiens
ctgtggactacctcgagatctaatagttctgtggtgtctgaaagatgtcactgtatttctctcaaaactgaaatatcccaaagaccctttcaggtcactgtggagccccatgttacctcagcgcagagtttggaaactacatcttattctatcataaaaccagtttccaaacacatatgtggttttacatgtgtctattagttaaaatttgtgaattaaattattcaaattttctatctcttcttgtgtttattcattactaagaaaatctcccacaatgattatatctttgatgaatttccccttctaattttgcaaattttgactttatatatatatatatacacacacatatatatatatakatagagagagagatagatagagagagagagagagagagacattctattaggcatatactagtttagagctattatagcttctttgtaaattatttcttttatcaaacattgggtaacaacccctgcatttaaattgaaaacatcctaacatagaccaaaatatctatggcacaagaaccatatttacttattttttattttttagatggagtttt

SEQ ID NO: 694486 - DNA, 580 bp, Homo sapiens
ctgtggactacctcgagatctaatagttctgtggtgtctgaaagatgtcactgtatttctctcaaaactgaaatatcccaaagaccctttcaggtcactgtggagccccatgttacctcagcgcagagtttggaaactacatcttattctatcataaaaccagtttccaaacacatatgtggttttacatgtgtctattagttaaaatttgtgaattaaattattcaaattttctatctcttcttgtgtttattcattactaagaaaatctcccacaatgattatatctttgatgaatttccccttctaattttgcaaattttgactttatatatatatatatacacacacatatatatatatatakagagagagagatagatagagagagagagagagagagacattctattaggcatatactagtttagagctattatagcttctttgtaaattatttcttttatcaaacattgggtaacaacccctgcatttaaattgaaaacatcctaacatagaccaaaatatctatggcacaagaaccatatttacttattttttattttttagatggagtttt

SEQ ID NO: 694487 - DNA, 2733 bp, Homo sapiens
ttttgtattttttgtagaggtagggtctcactttgttgcccaggctggtctagaactcctggcttcaagcagtcctcccacctaggcctctcaaagtgctgagattacgggcatgagccacatgcctggcccgtattattttttagtaaaatcactttccaaaatactgcaatatgaggaaacctttattccaaaaagtctactcataataacttataaacatctttggaagttaaaaattaaccacatcaacctgcttagcccacataacccacattaacccacatcaacctgcttagcccacataatccacattaacccatattgtggtttatgttttaaaaggagaaaaaacactgaaactaccatatgtcttaccttttaggcatacatgttaaaattttggcagatgaaacataatactgatagatgacgcttcaaaataatgcagggaagagtagaagtgggtagagattgttaaatcaagtttagtctaaagcagtctccttacatatttgaagttcagtctaaaggtttctctgtacatagtgaactataaatgtatctaaatggaggtgtaaacagactgtaacctacttttgtgccaatcaccaagttttggccagttaaaaggggccaactgttcaaaccatgttcaaataaggcaaatgccgagctgtaaccaatctgactgtttctgtacctctgtctatacatcttcttccaccacctggctgtgctggagtctctctgaacatactgtggctcaggaggctgccctattcacgaatcattctttgctcagttgaactctttaatttgactaaggactttcttttaacaagatataaattacacaaacgaccataaattataattgttttaaaatgccacatgggagttcaatatattattctctctacttttacatatgtttgaaagttttataaaagagagcttttgtttttttgttgttgttttttctgagacagtacaatctcagctcactgtggcctccacctcatggactaaagagatcctcccacctcagcctcccaagctgggactacggttgtgaaccaccatgcttgcctactttttaaattttgtgtagagatgaggtctcactgtattgcctaggctggtcttgaactcctagtctcaagcaatcctccctcctctgtcttccaaagtgctgggattacaggtgtgagccactgtgcccagccagaatttttgttaagtgtgttatgataaaacacataattaaaaacaagtgatttttgattttctgaaatcagaaaacctggttaccaactagatgagtggacaacattcattatttttctacgccttaaattttcacatctgtgaaaaaggagttggactcattaaattccaacgttcctgctagttccattttttttttttaacaattcaactgaatgacttccacactttgaatttggtttaacaattctaactaaaatccagaatgcattcatagctaaatcttatataattaactgaaaattgttcattactgttaccaaaataacaatctagtacagtacttacctcagctgggccttcattcctatataaatcctattttgcttaccctgaaacacctttccttcaagtattacctcttagacccttcattctctatagttaacgttgtcaaagaaaatagaggccactaagtataattttgttccagtttccctacccctaatgcagcccatcctcatttctgcctgtacttcaagtcctttccacctgaggctgcttcaagatctctccacatctcacacatctcttatatttcttattcccttccccaacaactccctacttactctatctaggctcagtcgtttgttccttttctaaccaagtcctcaggtctcttttgctctggcttcttcagtttagcctagtcaacaccacccttcttaacaaataaaaaacaaacgaacagccttctttccaccctacgtcttcctcaagctaacctgtgattcctccttcccatgactaccaaatatttaaatcaaagctctaactagtctaaatagctcaactccaactcactccttagctcatcatgatctagcttccagcctccaccaccctcagttttcccttctcactggcccccaaagagcaaatacaatgaatggcttattgtaaggtctcatcatgcctctcctctctgtagcatttgatactgcaattactgcccctccttcaggaaactctcctccctaagttcttatacaccattttcctgctaagcttcctacagactccctcagtaccattttcacctcktctcctaatatgatttggttcctcagggttctttcctcccctgctcctctttccttcttatccctacaatccctcacctatattatcatcttactctagccattgcttgagctattaatcttcaccactggatacgctagcctagaagggcctgtgagcaaaatctagacccccaactgatttcataaataaagctttattagaatacaaccacactcatttgtttgcctacagtctatggctgcttttgcgctcaagacacaggtgaatagctgcaatacaagcagaatggccctcaaagccctaatatttaggcttttaaaaaatattatggctctttacaaaaaacttgccaacctctattctataaggtaaaatatgccaaaagattagtcc

SEQ ID NO: 694488 - DNA, 2733 bp, Homo sapiens
ttttgtattttttgtagaggtagggtctcactttgttgcccaggctggtctagaactcctggcttcaagcagtcctcccacctaggcctctcaaagtgctgagattacgggcatgagccacatgcctggcccgtattattttttagtaaaatcactttccaaaatactgcaatatgaggaaacctttattccaaaaagtctactcataataacttataaacatctttggaagttaaaaattaaccacatcaacctgcttagcccacataacccacattaacccacatcaacctgcttagcccacataatccacattaacccatattgtggtttatgttttaaaaggagaaaaaacactgaaactaccatatgtcttaccttttaggcatacatgttaaaattttggcagatgaaacataatactgatagatgacgcttcaaaataatgcagggaagagtagaagtgggtagagattgttaaatcaagtttagtctaaagcagtctccttacatatttgaagttcagtctaaaggtttctctgtacatagtgaactataaatgtatctaaatggaggtgtaaacagactgtaacctacttttgtgccaatcaccaagttttggccagttaaaaggggccaactgttcaaaccatgttcaaataaggcaaatgccgagctgtaaccaatctgactgtttctgtacctctgtctatacatcttcttccaccacctggctgtgctggagtctctctgaacatactgtggctcaggaggctgccctattcacgaatcattctttgctcagttgaactctttaatttgactaaggactttcttttaacaagatataaattacacaaacgaccataaattataattgttttaaaatgccacatgggagttcaatatattattctctctacttttacatatgtttgaaagttttataaaagagagcttttgtttttttgttgttgttttttctgagacagtacaatctcagctcactgtggcctccacctcatggactaaagagatcctcccacctcagcctcccaagctgggactacggttgtgaaccaccatgcttgcctactttttaaattttgtgtagagatgaggtctcactgtattgcctaggctggtcttgaactcctagtctcaagcaatcctccctcctctgtcttccaaagtgctgggattacaggtgtgagccactgtgcccagccagaatttttgttaagtgtgttatgataaaacacataattaaaaacaagtgatttttgattttctgaaatcagaaaacctggttaccaactagatgagtggacaacattcattatttttctacgccttaaattttcacatctgtgaaaaaggagttggactcattaaattccaacgttcctgctagttccattttttttttttaacaattcaactgaatgacttccacactttgaatttggtttaacaattctaactaaaatccagaatgcattcatagctaaatcttatataattaactgaaaattgttcattactgttaccaaaataacaatctagtacagtacttacctcagctgggccttcattcctatataaatcctattttgcttaccctgaaacacctttccttcaagtattacctcttagacccttcattctctatagttaacgttgtcaaagaaaatagaggccactaagtataattttgttccagtttccctacccctaatgcagcccatcctcatttctgcctgtacttcaagtcctttccacctgaggctgcttcaagatctctccacatctcacacatctcttatatttcttattcccttccccaacaactccctacttactctatctaggctcagtcgtttgttccttttctaaccaagtcctcaggtctcttttgctctggcttcttcagtttagcctagtcaacaccacccttcttaacaaataaaaaacaaacgaacagccttctttccaccctacgtcttcctcaagctaacctgtgattcctccttcccatgactaccaaatatttaaatcaaagctctaactagtctaaatagctcaactccaactcactccttagctcatcatgatctagcttccagcctccaccaccctcagttttcccttctcactggcccccaaagagcaaatacaatgaatggcttattgtaaggtctcatcatgcctctcctctctgtagcatttgatactgcaattactgcccctccttcaggaaactctcctccctaagttcttatacaccattttcctgctaagcttcctacagactccctcagtaccattttcacctcttctcctaatatgatttggttcctcagggttctttcctcccctgctcctctttccttcttatccctacaatccctcacctatattatcatcttactctagccattgcttgagctattaatcttcaccactggatacgctagcctagaagggcctgtgagcaaaatctagacccccaactgatttcataaatraagctttattagaatacaaccacactcatttgtttgcctacagtctatggctgcttttgcgctcaagacacaggtgaatagctgcaatacaagcagaatggccctcaaagccctaatatttaggcttttaaaaaatattatggctctttacaaaaaacttgccaacctctattctataaggtaaaatatgccaaaagattagtcc

SEQ ID NO: 694489 - DNA, 652 bp, Homo sapiens
tgatatgttacttgtgtttaaacccaatttgcaacaccccttttgttggctaattttgtcgctatgttgggtagcagaacttgtgacgatcacactaataacataaagtttcccacctttcttgttgctgttttccttgttagcatctcagacttcccaattctgggaatagtctctaggaggcaaggttttcagctttggaaatgcatgcgtgacacagtrgtgtggtatggaaggcgtgtggacttgaagatccggctccagaaacacgctctgccaattaccgtgtgtgaccttttataaattacatccatgagctgtagttacctaaaatagtgatcctctctccttcactggctggaaggattaaatgagatagtgtttataggaaatgtactttgtgttccttagttgcctccccccgccactccccgtggtaggaactcttgagtacttgtcaaatctgaactctcggcatttttacctccttcagggaaaactattggacaggctcttactgaacacccgcttttgtgcagaatgcacttcctgatactctgggagtttcagaggctactaaggtgtccttctggccctcaaggagttcatctggagacagggagacgacacattttcttcaataactaagaaa

SEQ ID NO: 694490 - DNA, 602 bp, Homo sapiens
tatcgtgctgtattcctgtgttcacttatctgcgctggattgtgagtccttacagagagaaattgttatgtgctatrttcccaacacctgcacattataggtggtcactaagtgcttgatgaataaatgaatgagggaataatattgtttattattttttgctgttatttataattgggagtgggtaggatttggattatgaagactctgggaagcctcataagaacctcagactcactgggcacggtggctcacacctgtaatcccagcactttgggaggccgaggcaggcggatcacgaggtcgggagatcgagaccatcctggctaacacggtgaaacccggtctccactaaaaatacaaaaaactagccaggtgtggtggcgggcgcctgtagtcccagctactccagaggctgaggcaggagaatggccgtgaacccaggaggcggaggttgcaatgagccgagatcgcaccactgcactccagcctgggcgacagagcaagactccatctcaaaaagaaaaacctcagaccagactcaacgtgtccaaaaaagagctcaccttgtacccctagatcctgaagcggcttccagtagc

SEQ ID NO: 694491 - DNA, 602 bp, Homo sapiens
tatcgtgctgtattcctgtgttcacttatctgcgctggattgtgagtccttacagagagaaattgttatgtgctatgttcccaacacctgcacattataggtggtcactaagtgcttgatgaataaatgaatgagggaataatattgtttattattttttgctgttatttataattgggagtgggtaggatttggattatgaagactctgggaagcctcataagaacctcagactcactgggcrcggtggctcacacctgtaatcccagcactttgggaggccgaggcaggcggatcacgaggtcgggagatcgagaccatcctggctaacacggtgaaacccggtctccactaaaaatacaaaaaactagccaggtgtggtggcgggcgcctgtagtcccagctactccagaggctgaggcaggagaatggccgtgaacccaggaggcggaggttgcaatgagccgagatcgcaccactgcactccagcctgggcgacagagcaagactccatctcaaaaagaaaaacctcagaccagactcaacgtgtccaaaaaagagctcaccttgtacccctagatcctgaagcggcttccagtagc

SEQ ID NO: 694492 - DNA, 602 bp, Homo sapiens
tatcgtgctgtattcctgtgttcacttatctgcgctggattgtgagtccttacagagagaaattgttatgtgctatgttcccaacacctgcacattataggtggtcactaagtgcttgatgaataaatgaatgagggaataatattgtttattattttttgctgttatttataattgggagtgggtaggatttggattatgaagactctgggaagcctcataagaacctcagactcactgggcacggtggctcacacctgtaatcccagcactttgggaggccgaggcaggcggatcacgaggtcgggagatcgagaccatcctggctaacacggtgaaacccggtctccactaaaaatacaaaaaactagccaggtgtggtggcgggcgcctgtagtcccagctactccagaggctgaggcaggagaatggccgtgaacccrggaggcggaggttgcaatgagccgagatcgcaccactgcactccagcctgggcgacagagcaagactccatctcaaaaagaaaaacctcagaccagactcaacgtgtccaaaaaagagctcaccttgtacccctagatcctgaagcggcttccagtagc

SEQ ID NO: 694493 - DNA, 1016 bp, Homo sapiens
ttttcttaataaataaagggatcatacagatcaacaagaataaaaaagaccttagcagataaggcagagaaacaaatttagaatctataaagaggaattactaataagtgtaacaaaacatttgatgcagtttataatcaaacatgaacattttaatagcaatgagataagtgtttttgctcatcgaatttgtaacagtgtgttcagtgttggtggagatgctgaggacagactcctgcttcctgccggcaggaatgggagtacagcagtttcctaggaaaggggagcagtgtcaarccttaaaatactcatttcgttttcacctgcatttcttttatgtttagaaacttatcccaagtcggccgggcatggtggctcatgcctataatcccagcactttgggaggccgaggtgggcggatcacctgaggtcaggggtttgaaaccagcctggcaaacgtggcgaaaccccgtctctactaaaaatacaaaattagccaggcatggtggtgcgcacctgtaatcgcagctacttgggaggctgaggcaggagaatcacttgaacctgggaggcggaggttgtggtgagctgagatcgtgccattgcactccagcctgggtaacaagagcaaaactccatctcaaaaaaaaaaaaaaaaaaaaaaagagaaacttatcccaagtcgatagaaggacagactgacacataaaggtgcctacatttattgataagcattatttataagatggtaaaattggaaacaatcggatcatccactatttgggaatgtttaagaaacctattgtatatacttacacagtagtctagctgcttagccatttttgaattctgttttatgaaaacttgtaaagacatgggaaacgtcttaagtggcaaaagcaggccatagcctaggtatgtacaatattacaccagccagataaaatatctgaaatgagaaaccaaaatgttaacagtggttagttctgggtatctgaatatttaatatttttgta

SEQ ID NO: 694494 - DNA, 1016 bp, Homo sapiens
ttttcttaataaataaagggatcatacagatcaacaagaataaaaaagaccttagcagataaggcagagaaacaaatttagaatctataaagaggaattactaataagtgtaacaaaacatttgatgcagtttataatcaaacatgaacattttaatagcaatgagataagtgtttttgctcatcgaatttgtaacagtgtgttcagtgttggtggagatgctgaggacagactcctgcttcctgccggcaggaatgggagtacagcagtttcctaggaaaggggagcagtgtcaaaccttaaaatactcatttcgttttcacctgcatttcttttatgtttagaaacttatcccaagtcggccgggcatggtggctcatgcctataatcccagcactttgggaggccgaggtgggcggatcacctgaggtcaggggtttgaaaccagcctggcaaacgtggcgaaaccccgtctctactaaaaatacaaaattagccaggmatggtggtgcgcacctgtaatcgcagctacttgggaggctgaggcaggagaatcacttgaacctgggaggcggaggttgtggtgagctgagatcgtgccattgcactccagcctgggtaacaagagcaaaactccatctcaaaaaaaaaaaaaaaaaaaaaaagagaaacttatcccaagtcgatagaaggacagactgacacataaaggtgcctacatttattgataagcattatttataagatggtaaaattggaaacaatcggatcatccactatttgggaatgtttaagaaacctattgtatatacttacacagtagtctagctgcttagccatttttgaattctgttttatgaaaacttgtaaagacatgggaaacgtcttaagtggcaaaagcaggccatagcctaggtatgtacaatattacaccagccagataaaatatctgaaatgagaaaccaaaatgttaacagtggttagttctgggtatctgaatatttaatatttttgta

SEQ ID NO: 694495 - DNA, 624 bp, Homo sapiens
tttgggaggccaaggcggatggatcacagggtcaggagatcgagaccatcctgactaacacggtgaaaccccgtctctactaaaaatgcaaaaaaaaattagccgggcatggtggtgggcgcctgtagtcccagctacttgggaggctgaggcaggagaatggcgtgaacccgggaggcggagttgcagtgagccgagactgcaccactgcactccagcctgggcgacagagcaagactacatctcaaaaaaaaaaaaaaaaaaaagagagagaaaatgtaatgacaaaccactagtttctcatcatatttatttttttctgtccatatttaattttgatgcwtgtatttgctagagctgccgtaacaaagtaccacaaactgggtggcttaagctgcagaaaattattttcttataattctggaggcaagaagtccaagctaaaggtgttgacaggtttgcttttttccgtggtctctcttcttgacttgcagatgactgctgctatggtctgagtatttatgtccccacaaatgcatatgttgaaatcctaaccttaaggtaatgacataaggaaatggggactttgggagtgattatgtcatgaagtcaaagccctcacga

SEQ ID NO: 694496 - DNA, 627 bp, Homo sapiens
gaaatggatagtaattcctgttttaacttctcagggatgttataaggctcaaatgagataatgtatgtgaaaatatagtaaaatgttcatatccagaagtctgattcattgagaaacagtaaaatcacttggaattgacttatctacatacagtatgagaaatgcaaaaattgaactctatacttaatatccttaatgctttttttttttttttttttgagacagagtctcactctgtcacccaggctggagtccagtggcacaatcttggctcactgcaacctccacctcccgggttcaagtaattctcctgcctcagcctcccgaggagctgggactacaggcatgtgccaccaygcctggataatttttgtattattagtagagatggggtttcaccatgttggccaggctggtctcgaactcctaacctcacgatctgcctactttggcctcccaaagtgctgggattgcaggtgtgagccaccacacctgactgtgctttctttttttttttaggtggctatttcttgccaggagatttgagatatggtgagaaacaaaacagacatggtcccttcccttataaggtttatagtctagcatcctaaaaatgtattttaatca

SEQ ID NO: 694497 - DNA, 637 bp, Homo sapiens
aatgcgggaggattgcctgagcccaggagttcgagaccaggctgggcaacgtggcaaaaatccatctctaccagaaatacaaaaattagctgggtgcgatggtgcatgcctgtagtcccagctacttgggggctgaggtggaaggatagcttgagcttggggaggtcaaggctgcagtgagccttgagcctcatgagcataggattctggtggacctatgargtgcgagaactcaaaagagtaataaagttaatataagacaaacgtacatctatgactgagttagtggagtcatagtgttgccactgtactgcagcctgggcaacagagtgagaccctgtctcaaaaaaaaaaaaaaaatcatttcatcaaaagtgaattcattaaaaaagtgtaccaagaatacattcattggccaggcacgatggctcacacctgtaatcccagcactttgggaggcagaggtgggaggattgcttgagcccaggagtttaagaccagcctaggcaacatggtgaaaccctgtgggactgagaggctgcttggttgagaggtgggaggatcacttgagcccgagaggtcaaggttgccgcaccactgcactccagcctgggtggtagagcaagatcatgtctca

SEQ ID NO: 694498 - DNA, 624 bp, Homo sapiens
tgccttaagggagaggaagggggaagctaaggaaacaattcctgctgaagcaattgggttttgaaaaaggtgatcccagtagacaagggtcagggagaaagaatgctacctgaagagggaataggacatgaaaagcccatgttgccaaataaaccctgagatctttacattttgaagaatgacattttacccttgcatgaaatgaaaaaggtatacataaaaatgtatataagaagttctataaatgatgaaatctggttttcacagggataatgccctggtaatttctattatgtattaaaaaaagccttgtgggatgggggtgggggagggtccctaaaacacaaactttagcagttccacctaactatttggtctcatttaatgataaaatattttcgtcatatgacaggcttattatattttttctagaatgtcttttttatctattttgttaagaacatgaacttactgctgtaactcataaatgraaccttccttttcagaatagcattgttctctcttatcatcttacaattgaatacaaaccgaaaaggtgttgaaaaattaatctcttctttcagcatcttctcatttatcaatcacatgattcacctgtgtcat

SEQ ID NO: 694499 - DNA, 1365 bp, Homo sapiens
catcagtgatagactggataaagaaaggaaggccaattttgaagcagtaaagaaaagcagcagaacctaggaaaggcaggctgagagcctgtgttaggattattggcatcctttcaatcttttttccataacagagtgccttgaatttccattggcagaacatcacctgcacccccaccaccatgggttgggtagacataacccaaccctcacccccaggggcaagcctgataagcctaatccaatctgcatatctaatcctccaggccacttattggcaggttgactggggagacacctgatgtggacagtgtgtaaagcaatgggcttttctcrgactgctgagaactggatatgacccttggaactcctggtgtccaccgtgtgctcatgaaggaaaatctgcccaacactgagcaagtagcaagaaaggagggcagataagcagaggaggagaaatcacatcctgatgaaatcatttgagtccctggatgaatcctggcctgaaactaaccctacccttaaaacaaacattcttaaaaaagaaataaagtaaaggtttccagtacttacagcctaaaggtttttggttgatacagtctgggaagggtaagatgaaatatatatatgtctccttttatatatatatatgtatgtattatatatttgtatgtgtgtatatatatacacacatatatataaagagagagtgagagacagagagagagagagagaaagaggccctaatcttttcccactggtatggtttggctgcgcccccacccaaatatcatcttgaattgcagttcccataatcctcaagtgtcgtgggagggacctcattggaggtgattagattatgggggtggtttcccccatgctgccgttctgggtgatagtgagtaagttttcacaagatctgatggttttataaggggcttttgcctgctttgctctgcacttctctctcctgtcgccatgtgaaggatgtgtttgcttccccttccaccgtgattttaagtttcctgaagccaccctagcatgtggaactgtgagtcaattaaacctctttcctttataaattacccagtcttgggaaattctttatagcagcatgaggacaaactaatacatccacctaactcagctgctggtccatctccctagcccagggtctggccatgctcccggactgctcttagagatgaaatccttgagaaggaactccacctgtccttgcagtgactgggaagagagaatgtagtgttcagtttgcccatttagacatctagcaacctatgattctcaaaggactttatagactgttggagaaagcagctagggaagaatgacagttaaatggtg

SEQ ID NO: 694500 - DNA, 1552 bp, Homo sapiens
tagactgcaatctttccaaaggcaagcttcccggcatgtctatccccctacgcccagaactttggagagtgaatgaatgatccatgaactaaacatgctttttatrcaaaagacttcaggctacttttttattgaaaactacattattttgaaaattattgattaaaaatgttaagaacaacattgggcatagagaggcgtccgtgtgcccttgggcaattcatttacccttttggtgcctccattccctccgcggtaaaccgaggacaacaatggcctctccagctcatcaggagtgtaggtggatttgtgagttcaactgctacacagtaagcacgcagaaaatatatgctggcctagatgacagggaagaaattctacttgcccctatagccacagagttacagctacctttgggaataaggctgtctggaaggtacagttcttgggtagttgggccgtgtcagcaccattgctagcagcttctgcctggagagcagcgttatagcttcctggctgcagagggcccatgttcgcacacagcccctatgacctgcaaatgtccccgtgcagatctgtctaaatgagtcaccttcatctgtgtctccacggcagtcgaacctgagcctccagggaagcgccacccaccccaatgtggttctccacccccagaggttcaggcctgccctcggctggatgctcccaacactcttctgaacaaatgaacttgactgtgtaatgactacaccatatctagtctgtctgtatttctctccagtttgtttctgcaaactgcaaagtgaccaccctgatgatttggtaaaactgggtgtatttttaagggtaaaattagagagagttggcctacaaggcccaggacaataactcactcatcttaaaatgacacagaaatatcctgcaatagcttagcactcccctgccatacgcacagcgtgtgaacagcactctgcataataattgccactgtcagacgtcatgtccttgtcggacccagctaactaacctcccaactggtctccctgtccccatctcacaacctctcctacccacccatgctttccatagtcagccacccgtgacttttaaaaactcttaactaagggtttttgggggaaaaataataaaagagagctgaacttcaataccaaaagccttacagctgagaataactaccacatcattaactaccagttcatgagtttaagatctgattttctaaaatgatttaaaaccccaactagacaattctattaaaaaaatacattgataaaatggatgacaaatttggagcaagcaaaggaaatctttggtatttggcattttgataatcatatgccatcagtgacctctacatgtatccaataataataacaatcatgccaagtggcatgtgaaaatgaaaaaagaccacaatgaccacacctcatagctgagaatagtattcagcgtctctgtgcctctgttggtttcaaagtttctaggtcatgtgtttgaaactgaagtgcatttatcagttttagggatgtgactg

SEQ ID NO: 694501 - DNA, 1041 bp, Homo sapiens
cctctcatgattgttacacatctacatacttagctgatttcatcaataagcccagctctggctttttcttcctcctggttagacagaattactccctataggggtaggcataaactgagggataggtgctggtgtaacagtgctggatgccgttgaggtctgggctatctgctcattgcttgtgctctcggtcctgctcttgttggaacccagatgaaccatcttacaatgaagtgttgctgagtctgccctgacatatgacttggggggtctgagaggccccagcctatcatgggcagtctggtcacacggttaccgggtgtctgtggccaggcatcttgcttccactagggctcagtagaacatcaggagaggtttttcaaatgacatgtcattctctgctgcagaagacatatctttgctccagaacaacaggggactgcattgtgattctcccattgggcttcccccaaactccatgtggcaccttttcctaccactgatacctccaacacaatagggtctgccagattatatggcccaaatggcagcattgcttgcattacagccatgacctgagtccttcctagaaggtcatcacttgacccaaaatatgggtgggagaagtatcccactttttaccacgttaagatgagggaaaaaaaatgcatcttagaattgatgatggtgcaataactaattttgtgtgtcgacttgacttggttatggttcccagttgtttaatcaaacactagtctggctgttgctgtgaaggtagtttgtagataatactgtttacaaccagtagatcttgagtaaagcagatgatgctcaataatgtgggtgggcctcatccaatcagttgaaggccttaaaagcaaagaccaaagttttccagataaaaagaaattatccttaagcctgtaacctagaaattctgccaagatttctagcctgatgccctgcctgycctacggatttcagacttgctgcctctcaatttgcatgagccaatttcttaaaataaaataaatattttac

SEQ ID NO: 694502 - DNA, 637 bp, Homo sapiens
agggcagaggcagattgcaggtggggcaggacttcgtagccaggacaaacttgactgcagagggtagcctgttcctcaaccttctgaagccctgactgagacttgaaactgtagagaaattagcaggattctggggagaacagagtctggagagaacagaatggagtgtgcatgtttgaagatgtatagtttctaacagcaatttcagtgcttgtaggcaatttataaatattcgagaaagatgctaccatacttggctgaaaggctgacggagatggkattaggtaacggaagttacagacagtggatgtatgaagctgatattataggagtcccctttccatctgggcagtatgaacaggttgcaacttaccctcctagttagatcctagccgtcttagcttccttttctggcatggccagccattgctttctgacctctttgaaataaatacttttatgcccataaaaagagtgttttttttttgaattaagaaaaaaagactttgattggatggtttctaagctttcttgcacatcggagtcactgggtgatcttgataacattccagtgcctttcttttccttttttttttttttttttttttttgagacagagtctcgctctgtcgcccag

SEQ ID NO: 694503 - DNA, 641 bp, Homo sapiens
attaggtttgctacgtataattaaaaaaattccaaaatgatcatgacttaactgggtctccagccatccccactgtgttccaggttaccagcaacaggaagagcaaaacaagaatgcattccctaaccaattaagacattttccagattcatacaacacttttgcttccatattactatccagagttaagacacatggcaataaaaacatgcaagggaggttgggacatgtcatcatttagttctgaagcaatgtgtccagataaaagttgatcttctgttgtgcacaatgcataagaatggatattgtatggcaaccagaagtctttaaatataaagagaagtatgaagataaatctctgtggaaaaccaacttttaaggtatrgatagttagagaaaaaagtaagatggtgaagtagactgaagaagaattacagaggtaaaaggagaacaaagccaagtttctagaagtggatagcaatgccaaatgtcaggggacattactgaaataaaggacaacttaatttgacttgtaggaggacattggtaacattcaagtactacttccattagctgatgcctgtcaatgaagagctccccaaacactacagggaatgggaagcaaagctcatcacttgtgc

SEQ ID NO: 694504 - DNA, 1749 bp, Homo sapiens
ttgttaacttatttccctcatcttgtcctttcatattatgatctctttcctcacctggacccaattcttgggagcaatcatataaacagagttccagaattaggagaaagaaattagtgtatgatggtgtcatagaaccgggaataacagcatatagcctgctattcacaatacatgcatacctgtacatgtatatccatgtatgcatgcatgcctatatataaacacatacatatatatgtacctctcatatatatgtatgcatataggggtgtttttatttgtgtgtgtgtatagatagataggtaggtagatggatggatggatggatggatggatggatgaatgggtggtagggaggctttatgtcaatgtttctgtttctaaatcatctaatctaaaatagtgtgcatttgagaaagagcctaagtgattttcagggacacagagtaataagattagatcacagtctcaattctgctactgactggtatccaatgctttttcaactagacaaagaattctgagaagctgtctgatcagacctgttgggtggcacgatatgccccaggagggtttttcactagaataaattttaatagaaaattgacttaaccagaaatctgcctcccaatatagacataaagtcaaatatctaaaacttctgaggaagagccgcccctcttactcctacactagcaaagaaacttctgcatgaaaaaaggagactccagttcaggacgttttgttttatagaagcatatcacgtctataatttatcttgatctcagttgtaaaacaggtttgggttttctcgtgttttgtttccctttttcttcttccacctttgcatttgcttccatatttttggttactttggcatttactaagagtgaatcacttaggctgtttctcaaacacacactattttagattagatgatttagtaacaggaacattgacataaagccttcctatccatctatctttctatgtatgtatgtatgtrtgtatctatgtatctatatatgtgtgtatgtgtgtatctatcatctatcttggtatctatacacacatatacacatatataaaaacacactgatatgcacatttaatggatgtctctatgatcataggagaagctgtgatattcacgtcaaacccactgtttgccagactggggtgattcatcaaagtgtcaaaatagtgtagggagaaataaaaacacagcctatgtaagctggtagctctaaacatcaaatttccacccaacccacaaaccctacccagaaaaaacttcaaaagggttttgcttaagatgttcccccgcccccttcaggcagtgtacccttaatgatactgtattgattttgtaatgtttaatttaaaagggcagtcaggctagtacataatcttgtgttgaataagacagggtcatttatgtggcagtgcaccagatgaaatgtaaaagtaccaattgactaacaagtacataattcaagccaaatcacattaggagtgtttgtgtagacttaaacaaaaagcataccaagggacggtggtgcatctctccctggaaatcaaacttgcacaaatgatatggagttcttagagttgggattaagaactgacccactgtgggaattcactcttgcctcctgaccagtggtagggactaccctcccatgctttctggttctgtaatagtcaatttttaaatttggaaaaggcaataataattagcctgta

SEQ ID NO: 694505 - DNA, 647 bp, Homo sapiens
tgcacccagtaaatagatagttgtggctctgttgctagttgagtttgtcaccttgaggaaatatattgagctcttgcayattttttggattagatcttctctaaattttcatgtagctcttaaagtccatggtcaaacttgagttagataatcagaaaatttccctgcatgctgaatatgtttccttaaggattgttcataagatcaaacattaagtatccagtaatagaagattggttaaataaattacggcatattattatgatggaataacatgttatttttagtgactgtaaatctattagtacctattaaccatcattcattgttgaatacaaaaacagcttgtattctctgtgttacatatattatatatttaaaaacagttaatcatacatagtattacctcattgatattacatatttatggaaggatattaaccacaattaatttctggaagaaaaaatttcaggtaaattctatttttgcctttatatttccttcattgtttgattattttcacaatgttcttggatcatcttaaaactgagataaaaaagctgaacaaaatattggaaaaataaaattgactaccattgattaccaaaataaacataaaatacaaccctgtgattatgtaaatgaa

SEQ ID NO: 694506 - DNA, 647 bp, Homo sapiens
tgcacccagtaaatagatagttgtggctctgttgctagttgagtttgtcaccttgaggaaatatattgagctcttgcacattttttggattagatcttctctaaattttcatgtagctcttaaagtccatggtcaaacttgagttagataatcagaaaatktccctgcatgctgaatatgtttccttaaggattgttcataagatcaaacattaagtatccagtaatagaagattggttaaataaattacggcatattattatgatggaataacatgttatttttagtgactgtaaatctattagtacctattaaccatcattcattgttgaatacaaaaacagcttgtattctctgtgttacatatattatatatttaaaaacagttaatcatacatagtattacctcattgatattacatatttatggaaggatattaaccacaattaatttctggaagaaaaaatttcaggtaaattctatttttgcctttatatttccttcattgtttgattattttcacaatgttcttggatcatcttaaaactgagataaaaaagctgaacaaaatattggaaaaataaaattgactaccattgattaccaaaataaacataaaatacaaccctgtgattatgtaaatgaa

SEQ ID NO: 694507 - DNA, 2849 bp, Homo sapiens
gaacctgcatagtcttttccttttggaaagaataacaatataaaatgtatgaaaggatcacattatccttattaaatcctttggaggcggaagatccgtcattcgtatcatcttacttattcccacgcataaggaccactgccagcctcctgttggtagctgtcaaaaccccaccttctgcccactccaaaatgtatttaaaaaaaaaaaagattagtgacagctctaaggaaatgaaagttgtgaaagaaaatattttattcaatcaagagagtttatctttagatgactcaatggaatttagtaaaagttacagagaaaccatgagttgtagataaattcctaatcacctcccaagggcctcacttcttgataccatcacattgtgggttcrggtttcagtatattgaatttttgaggggacacagaattttagtccatagcactcttcagtttgctctttggaattaggcaagaaacaaattaatgaataatcaaaacacatatgtgaacttgtttctattttacttctaaacatagggaaaacttatgctacattaataatagtatcacaaatattaatacagttatctagattttacttttaatacctatctcaaatatttgataattcaccgtgagatagattttattttaaaattttacctcacattttggatcgtgtcaatcatggtgatcaaaacaaggttgcatttaatctacaacctactaagcctgcaaaaaaattcaacaaacaattcatatataagcaatattgtgctagaatttaaatgataggatcccagagaatctgaagactctaaaacttgctgacacagtggaatatatcgtcacgacagcacatcttttttcctgttctttgttctttatttccataggaagacaactcattttctcagacaatttgagaaaactgccatgttagaaatccttttttagagaagataggttatgtaaaaagcagtagaaatgtgtatctttttgtcttagttcaaactattataacaaagtagcatagaccgaggggcttgtaaacaacaacaatgtgtgtctcacagttctggaggctggaagtcccaaatcaagttaccagcatggttgggttctggtgaggaccctcttccaggttgcagactggaaaattcttgtatcctcgcatggccaatagaggaagagaagaagaagctgtcaggccttttaggcactcattccattcatgagggttctaccttcctgacctcttcacttcccaagggccccgcctgctaacatcatcacactggggcttagggtctcattatatgaagttttgaggggacacagacttgcagtccatagcacctttcagtttactgtttggaattaggagagaaatcaatgaatgaataaattagtaagaacttactgcctgtaacaagaacgcacagtatgggttgcagtgaacacaggtggagacataggcgcctggcatcattttaagcatctctgtaaatgaagcaagtgtgtagttgatatgggggacattagttgacctccctgctgtctgagctgcaatgatttcatcccattttctacgaatactctagatgtcgtcagaaaataatgcccagagctgccacatggctgagatgcgggccttcctgaaagtgtcacacaaaggggttctctgaggactcccagccatgcacagatctctttttccctctctgcctgtttctccactccccctcatgcccaccctccttccacccttccctcaaatgttctgtagctgtcaggtttcttttatagaaataagtgaaattataatgacacaagagttagacgtgctggagatgaaaagaaagactttaaggaaataaaaaggaattgccatgctatttgaaagccgtaagaaggaggaaggagggtagatgaaggatgttaccctgctcggggacctctcttcttgcacatttgactttcaaaaatgcctctgatcatttcccagggagctggtgatgaattgagttggatccaaacaaagccttcacagctggggctggaaaacctcgagacccaaagacactctccttctggcccaaatggtcatagcctcttatgaggagctcactaggtgtgacctcttcaagaagtttgtcattgagaacagatgccttcccacttccagatttttataacattagccagttgtctgtcgtatctacgggggatattctgctcaggattgataactgaggttgatgctctctgtcccggtagaagcagagtattagagcttacaaaaatttagagacttattgattataatagcaagcaagcatttgtatagtactttacattttacaaaatgcattcatggactttatcatctttgtttttgttttttgggtttctttttttttcctaaaaattgtgtgggtcttgtgtccttatcatcaccattttacaaattaaaaagtggtaaaagtcacatactttgtaagtactagagctagatgttaaacacagaccttttattttaaaatatctcattttatagctgaggtaatttatgctcaaaatgttaagtgacttgcacaagatctctctcaattctaaatgcagaagcaaagcagacatcgaaatcctgggcttcttgatcctgaacaagcagccatgactccctatgttctggctgaaggaattgttttggtgtgaaatctatgtattgtttgttgagataaggcaggtctggagtggaatattgcagctttaattctgaatatgatgaggttgaactgtctgcagtggagctgagtggaattcccttaggtatctggaactag

SEQ ID NO: 694508 - DNA, 602 bp, Homo sapiens
tcttaacrtttccttttctctagcttacggtattgtaagaatagagtatataatacatataacatacaaaaatgtgttaatcaactatatatgatattggtaatgcttctggtcaagagtaggccattagtaattacgtttgtggagagtcaaaagggatacatagatttttgaccatgcatatattggcatctctaacccccacaatgttcaagtcaactttacttccatttccccacctccttggccactctaaagacaatactagaaaacagggcctttgaggaagtttcttagttccttcttggccaaaaaaagttgaaagcccagaagcctttttaattttcaaatagcttatttttaatctggcagcactacttcctatataactcccttaaacactttttaggttttctatgaatctgatttcattcaactctaattataaaaacaacacctatgattatgttagtgataagcttctctacatagacttaattccaactacttatccagcccatgtgcatttctctgatgatcagtgatgttgagctttttttttcatatgtttgttggctatgtacatgtcttcttttaagaag

SEQ ID NO: 694509 - DNA, 633 bp, Homo sapiens
agagattcagacttgaggtgaagggctggccttaggggggcacgtgggtgtgtaggaagaactgctcagcaggccttagggatacatttgttgtgcaggtgcagagaggacacaggcatggctggggcgggagttcaggatgagaaccctgggacaggctgtaagatgatcgagccaggggtgtgtgtgtgtgtgtgtgtgtgtgtgtgtgtgtgtgtgtgtgtagaggtataatgacatactgtaaaatgcaagatatgaagtgtagaatgagttttgatacatttctacatctgtgtaaccaccccccacaacctcagttttttttaatacatatgtttctttttaagtttgagtttcccgtgcctgcagagtctaagtttaaacagcctcacagacaagaagctatatgcacctgaagtgaacrggaacacgggctgcaacagtagatcgtaaagttatttggagcgaaggaggtagaagtgttgtgagcaaatgaagacaggtgcaggaagggataaacggagaacagaaagttccaacctttgagatttttgaagtgcttgtgccccaacactgaggatcttctttgccgtatatagggcaactctgatttaccctataaatttctca

SEQ ID NO: 694510 - DNA, 2417 bp, Homo sapiens
  misc_feature 418: n = A,T,C or G
cattttgcccactttcacctgactaaatgcactatgaaatgaactggagaagaggcaatcctttggcttatttaatcagtgtagaggcttaaggtgtcaagcaaaagaatccacacatggcatggaactctataccaagattagtcgccatcctagatagagaggcaaatggccactgcactttacagtcacagatatttctgctgtcatgtgatacaggcatttcaaaaaactctgagtgatacaaaactgaacactaacgaaaacagggcttatgtttacctctacacccttgtgactagacaacaacaactacagataaacaatcataatgacatgttaacacattaaaaaaaaaacacacattaggccaggcgcggtggcctcacgcctgtaatcccagtactttgggaggccnaggtgggtggatcgcctgacgtcaggagtttgagaccagcctggccaacatggtgaaacccagtctctacttaaaaaaattacaaaaaattagctgggcatggcgttgcgcacctgtagtcccacctacttgggaggctaggcaggagaatcgcttgaacccagtaggtggaggttgcagtgagccacagctgtgccactgcgctccagcctgggcaacagagtgagacttcttctcaaaaataaagaaaaaaacaaaagacacattagtttctaaaaaaataaatactgctgtaagacttgccctttaaaacaatgatgaaagtagcttgatcaatgcgagtgtaaggaggggagagcctgctgacttctggagactggggtgtagcctgcagagtttggggagaactgagcaaagcactgttgtcatacagagcctgtggccaaactsagtggagaggaagaacatgggggtgcatgtgcatcttgtacagtctcattttcctttgtggcttgcagcattcagccctatgagtgtatcatacttggttttcatttgtgttcgactttaacactgaggacgaatcatgttattaatgcatgtaagtcctgggttgtatttccaattattccattatttgttaattacatatgaaagagttgatatacattgtgccagaactggctggattgtgtgtatgttcaggcatgacctggttacaattaaggccaagggaatttgcaaggagtactggcaggctgaatatctacaagagtgcccctgtagtctttattccactttctttacataattttctctcctcttacccagaagagaaactcatagatatctttttgtattgacttgtatttagtattattttatttaaaaacttctctctttttaaaaaagcattaaattcatatgtacaagtttagatagcttaaacaaggctaatgaaaaatttcaggggaaacaaatccaggctcagataaacagaggatgtttggtttcctagtttctcttattttagccactattggcagggggaaattattatcctgaagacatatagataatgtaggaaaaacaaaattttcagctttttttaaaaagctattttaaggcctggtaaaattccaaacgcgtttgctgtttttggtttagtttttgctgaacactttgtctcttaacttcagaatctcggttcaagggaggtttaacctgcacaacatgcttctgattatttgtatataactcagcaaaatggtgtttggtcagaattattttttcatctctttaattttcaatgaacctcatgtttttttccccccatttcctttctttggctttaatttaataaatgtctttttcatgaacaataaaatgtttgcatttggagaggctcaaattttgttggaacatcaatattcccaaagtgggacatgatgcatttcccataaggaatgttgggttgtttagaagctggaggtgtggtttggaaatctctggctagttctcttatttcttgacttgcctttttgttggtggttcttaaagctaatatggctgctttggtattatgagtaacggtaagacgcgtgaacaagaacaaaaggcaatccaccattactgttggtctccactccctttcataaaaacataaactcagtctctagtggctactttaaaaaagagtacccctcaaggaacaagtttcaagaatctgaagtatttttcatggactaagaaagtcacgagagtatttatgatctgtcaactctgagatagtgtgaaagtctgttgggcagtttagcttattttacctccttaattcttctaagtcttttatttcgttctgccttcactctgcctccctgagtaaacttgctcagctcttccagattttgtgactctgacaacttgtcagggggcacttcactcccagactgctgggctggagtgctgtcctcagcaggagcccgtgggaggacagctg

SEQ ID NO: 694511 - DNA, 2417 bp, Homo sapiens
  misc_feature 418: n = A,T,C or G
cattttgcccactttcacctgactaaatgcactatgaaatgaactggagaagaggcaatcctttggcttatttaatcagtgtagaggcttaaggtgtcaagcaaaagaatccacacatggcatggaactctataccaagattagtcgccatcctagatagagaggcaaatggccactgcactttacagtcacagatatttctgctgtcatgtgatacaggcatttcaaaaaactctgagtgatacaaaactgaacactaacgaaaacagggcttatgtttacctctacacccttgtgactagacaacaacaactacagataaacaatcataatgacatgttaacacattaaaaaaaaaacacacattaggccaggcgcggtggcctcacgcctgtaatcccagtactttgggaggccnaggtgggtggatcgcctgacgtcaggagtttgagaccagcctggccaacatggtgaaacccagtctctacttaaaaaaattacaaaaaattagctgggcatggcgttgcgcacctgtagtcccacctacttgggaggctaggcaggagaatcgcttgaacccagtaggtggaggttgcagtgagccacagctgtgccactgcgctccagcctgggcaacagagtgagacttcttctcaaaaataaagaaaaaaacaaaagacacattagtttctaaaaaaataaatactgctgtaagacttgccctttaaaacaatgatgaaagtagcttgatcaatgcgagtgtaaggaggggagagcctgctgacttctggagactggggtgtagcctgcagagtttggggagaactgagcaaagcactgttgtcatacagagcctgtggccaaactgagtggagaggaagaacatgggggtgcatgtgcatcttgtacagtctcattttcctttgtggcttgcagcattcagccctatgagtgtatcatacttggttttcatttgtgttcgactttaacactgaggacgaatcatgttattaatgcatgtaagtcctgggttgtatttccaattattccattatttgttaattacatatgaaagagttgatatacattgtgccagaactggctggattgtgtgtatgttcaggcatgacctggttacaattaaggccaagggaatttgcaaggagtactggcaggctgaatatctacaagagtgcccctgtagtctttattccactttctttacataattttctctcctcttacccagaagagaaactcatagatatctttttgtattgacttgtatttagtattattttatttaaaaacttctctctttttaaaaaagcattaaattcatatgtacaagtttagatagcttaaacaaggctaatgaaaaatttcaggggaaacaaatccaggctcagataaacagaggatgtttggtttcctagtttctcttattttagccactattggcagggggaaattattatcctgaagacatatagataatgtaggaaaaacaaaattttcagctttttttaaaaagctattttaaggcctggtaaaattccaaacgcgtttgctgtttttggtttagtttttgctgaacactttgtctcttaacttcagaatctcggttcaagggaggtttaacctgcacaacatgcttctgattatttgtatataactcagcaaaatggtgtttggtcagaattattttttcatctctttaattttcaatgaacctcatgtttttttccccccatttcctttctttggctttaatttaataaatgtctttttcatgaacaataaaatgtttgcatttggagaggctcaaattttgttggaacatcaatattcccaaagtgggacatgatgcatttcccataaggaatgttgggttgtttagaagctggaggtgtggtttggaaatctctggctagttctcttatttcttgacttgcctttttgttggtggttcttaaagctaatatggctgctttggtattatgagtaacggtaagacgcgtgaacaagaacaaaaggcaatccaccattactrttggtctccactccctttcataaaaacataaactcagtctctagtggctactttaaaaaagagtacccctcaaggaacaagtttcaagaatctgaagtatttttcatggactaagaaagtcacgagagtatttatgatctgtcaactctgagatagtgtgaaagtctgttgggcagtttagcttattttacctccttaattcttctaagtcttttatttcgttctgccttcactctgcctccctgagtaaacttgctcagctcttccagattttgtgactctgacaacttgtcagggggcacttcactcccagactgctgggctggagtgctgtcctcagcaggagcccgtgggaggacagctg

SEQ ID NO: 694512 - DNA, 656 bp, Homo sapiens
ggaatcatgcacttgagaggaaggctgaagaaggggcctctgtggggtgcaaggacacagagccacagtcccactggagggacggcctccgtaagcttgccctctggcattgccagcagtggcccttctccacagcactgcttgtatctctgaggccactgtgagtaactttaattgaactttagcctggatgttactccttcaagattcaaagtgctgggtgggtactgtttgtcgaccacctttaaagcatgtggccatgtcctagctgctgggagggttggggagatgaatagcaagactttttcatcttggtaggaggaaggggccctgctttccckagagacttatgagtggaggaatctcatcaacataagaggccacgctaagaagcctgggaagcctaggaagccctgtcgttgttcacgcgaatggtcaattgcttgcagttggaagctgagtgggaagtctggcaaacgtcggtattgcttgtgcttcaacttcttaagtgacattttcctacaggacgccttcagcagggagcctggaaggatcagaagaagatgggagaacttccttcctgctggtcacttaggagccagaatgacctttgttacctggacttttccttttctcctcctcatcattgttccatc

SEQ ID NO: 694513 - DNA, 592 bp, Homo sapiens
agagttttctgacgatttcatcaccttctgaatggtgggaacttcaatttatagcctaggtttcttgtaaaatgtttttgtgatctgtcaaaaattagttttgttaaatgcctctgcaatcatgttttatatcaaaatgaaacctggttgtcagattctgttttggtctgatggcaaggatatacttggtacaaaataaaaacctccaaaaacagaaatgttggtgacattgtaaaggttctttaaaaaatagtgtagtacattagtccttaaaacatttcagtaagttgatgtagaaaagcaactttgaaaattggaattgttaagcttcttttggttgttttgtatttagaaaacagaattttcagggctgttaatgcttaaaagcagttagaattcttttctatatttataacatattgctagttgtatggtttaatgtgtactttaatatttaaagagtactgtatttgaccttaaaatatttgatggtggttactgtccttttttgttaaataatttttcccttgttgagttttctatgctamgctttaccggcccagaatgtttctttttgtcttagtctcaaaga

SEQ ID NO: 694514 - DNA, 610 bp, Homo sapiens
gtatgctgagtgctttcttcctattaccctgtagttccagctttgatctgaagggaagaagttggttcccttctaaactagatttgttttatgacctaaggcatattcatttgggcaacatgagtatgacatttttctcccaaccatgttaagtctaattaatttatcaggcacttgccagtttgcccattcttgcccataactaccctcaaatcttcaacttttaaggtgaatttggttttgaagttactgtcatttcttatggcctactggaaattttctggtgtgtgttttttttttttaatgtttgcattttctaagactactgtgcttttgtatgtattcatttaaattgtcaaaaaggatgttgtcaagatatgytgaatgagccccttcccccagaaatgttgccatattaatgggatattagccctttactgacttggaggttgcatcttctcaatccggtaattagctgaagtgctacattttaaaaaataatttaagctcttttttcattatttttttttcaatttttcagaaggcaagttcagacacataggtttatacaagatgaaaatattagataaaaagtgatacatctgaatta

SEQ ID NO: 694515 - DNA, 773 bp, Homo sapiens
ataaaagagcccagagcctagtatactgctaacacatggtagggccacatatgcttcctaattaattttttaattacagaaccaaagaattattttggaaatagtattacctgcaagttttgcttgcaatggataatactggtctagtaaatacctgatgtgtttgttcaaatatttgtgcccttattttttatgtttaatatatcacagaaaaacaatgaccctagtttaaaagggcaattcgatatagctatgatggtaaaatttcagctctggtaaaataattttcttataaagtctttttaaatgaccccttctccagttttaaattcaaaaaaagaaaagcagcattatagtcaatttccttaagtatcaagtaatctgtattttgcaaaaatgattattgcagagagaaatttgaaaaaagaatatttcagcgatcaaagtctctcyggggacaggttaaagaaaccgaagatcataacagatgtttttagctatctagttagctagggctatgatgcaaataattgttactgccattatctttgaaaccagatgtctgatgtccccatgagagacaacaaaataataatgataatggtatagatgattttcaagcctattgctgagttacaacttaatatttatttttgcctgtatgactgctgacaggcatgccaaaatgttgagaccagaaacactttttttcctaaattttgctggaatatcatttacaattaagacctaatttattattagtgatggctttt

SEQ ID NO: 694516 - DNA, 652 bp, Homo sapiens
tgagatttagacgttgatatttgctatactatagccatttgaaagtctatttgtcatattgaacttctgaagcaatcagaaagaaattcagttattayagtatatgcaagtcacactgcaagccttagctgaagcatttaaaaattctatgagagaattgttcctcccatttcccttctatttccaaagagtagctcaaggagagcgtttttaaaagttgatggtttgaatttgaatgagcccatatttaatgatacttcaggaattttgaatataagaacaccttagctaatataatagagaagaatgaagaagagtaagagtgagatattcttcttaagtcgacaaattatgaaatgagttaaatagatgattgtattgtcaaatgtacagtagtcatatctcatcccacatccacctttcactgaattttctggttgtcaacgttttaaaaaatattttgctatttgttgattaagttattcttatttcttaatatcatctttcataggatttgcttttctattacatcttaaaggaatccatttcatcataataaatcatttactttttacacttcaagggacttaggtatagaaaacttgaattttatatatgtgtgtatatatatttatatatataatatgtaaat

SEQ ID NO: 694517 - DNA, 1678 bp, Homo sapiens
ttttttttcactcgacaaaataatggggataaacaaaatcaccaagcagtcaccgagcattctaattagtttggacagcaaaacttgcttggtaggctgtttggcttctgggtgcatttaagatacataaatcagacaaggtttgtctacataccgggtcacctggggggcctggcaggcctggctttccatctctccctggaactccctgaaaacagaggtatccatgttcaatctttgcacgtggcacaggtgcagattaaaatgggggagggtagataaagaaagtccttacatcattccctggagtccctggagttcctggcaacccagggagacctcgaggaccctggaaaaggagggaaataaaaacagttacttatgaggatggtctttcagtcatttcccccaagtaagcaagctggctttgctgtgctaaaaaattagttaaatagcttacctgaatacctggctctccagctggtccttgggcgccctgagtacaaatgagattttattattaaaattccaccaagaatgtccataaattatccaagtgacataaaagactaagcattgtagtttacttagaggaacaacagggtttgccaccgtacacacgtggaaaactgcaaagtcggccaagactttcaggtcgtaggtgaatacttaatcagatacctgttgctggaaacatcaacatgattttgctcagggacttgggacatctatatcattaccataatctgtcactgcacattcatgagggcacaaagaatgcatccaaattccacctgtcagaaactgaccacccacaggggtaactggctcagggattcttttctgctttcaactttgagtcatttatctcttggaataaatcaccagaaacagtgttcagtgacaggagtaggaggtaaaacactaatcaatgatttttttttctacttttagaaaattagaatttcggataaataaaatgaggctgggagattatcagggaacttaacgatggtagttgtaccgctcttaggtaaccatgaacttctgcatgaggaatgttcacctaagtaagtcaagagctggtttcttagcagttgacttcagtaactgctcactgatttttcttttcttatttaaataaataaatattcatatcactgctcttgccaaagctactttttcctcccttcctatttatcctgtgtccctgagtgattttttcctcraccaccatcacttccctaataattttcttttctttttttttttttagatggagtctcactctgtcacccaggctgaagtacagtggtgcaatctcagctcactgcaacctccgcctcccgggttcaagcgattctcctgcctcagtctcttgagtagctggtattacaggcacccaccaccacgtttggctaatttttgtatgtttagcagagatggggtttcactgtgttggccagactggtctcaaactcctgacctcaagtgatccacctgccttggcctcccaaagtgctgggattacaggtgtgagccaccaggcccagcctctaataattttctgatacaagtttttacttggcttaatttccatctccaatgttcttttacattcttgccctggcaaatcagacaaccctcattcacaacataacccttcactgcttatgct

SEQ ID NO: 694518 - DNA, 1678 bp, Homo sapiens
ttttttttcactcgacaaaataatggggataaacaaaatcaccaagcagtcaccgagcattctaattagtttggacagcaaaacttgcttggtaggctgtttggcttctgggtgcatttaagatacataaatcagacaaggtttgtctacataccgggtcacctggggggcctggcaggcctggctttccatctctccctggaactccctgaaaacagaggtatccatgttcaatctttgcacgtggcacaggtgcagattaaaatgggggagggtagataaagaaagtccttacatcattccctggagtccctggagttcctggcaacccagggagacctcgaggaccctggaaaaggagggaaataaaaacagttacttatgaggatggtctttcagtcatttcccccaagtaagcaagctggctttgctgtgctaaaaaattagttaaatagcttacctgaatacctggctctccagctggtccttgggcgccctgagtacaaatgagattttattattaaaattccaccaagaatgtccataaattatccaagtgacataaaagactaagcattgtagtttacttagaggaacaacagggtttgccaccgtacacacgtggaaaactgcaaagtcggccaagactttcaggtcgtaggtgaatacttaatcagatacctgttgctggaaacatcaacatgattttgctcagggacttgggacatctatatcattaccataatctgtcactgcacattcatgagggcacaaagaatgcatccaaattccacctgtcagaaactgaccacccacaggggtaactggctcagggattcttttctgctttcaactttgagtcatttatctcttggaataaatcaccagaaacagtgttcagtgacaggagtaggaggtaaaacactaatcaatgatttttttttctacttttagaaaattagaatttcggataaataaaatgaggctgggagattatcagggaacttaacgatggtagttgtaccgctcttaggtaaccatgaacttctgcatgaggaatgttcacctaagtaagtcaagagctggtttcttagcagttgacttcagtaactgctcactgatttttcttttcttatttaaataaataaatattcatatcactgctcttgccaaagctactttttcctcccttcctatttatcctgtgtccctgagtgattttttcctcaaccaccatcacttccctaataattttcttttctttttttttttttagatggagtctcactctgtcacccaggctgaagtrcagtggtgcaatctcagctcactgcaacctccgcctcccgggttcaagcgattctcctgcctcagtctcttgagtagctggtattacaggcacccaccaccacgtttggctaatttttgtatgtttagcagagatggggtttcactgtgttggccagactggtctcaaactcctgacctcaagtgatccacctgccttggcctcccaaagtgctgggattacaggtgtgagccaccaggcccagcctctaataattttctgatacaagtttttacttggcttaatttccatctccaatgttcttttacattcttgccctggcaaatcagacaaccctcattcacaacataacccttcactgcttatgct

SEQ ID NO: 694519 - DNA, 1678 bp, Homo sapiens
ttttttttcactcgacaaaataatggggataaacaaaatcaccaagcagtcaccgagcattctaattagtttggacagcaaaacttgcttggtaggctgtttggcttctgggtgcatttaagatacataaatcagacaaggtttgtctacataccgggtcacctggggggcctggcaggcctggctttccatctctccctggaactccctgaaaacagaggtatccatgttcaatctttgcacgtggcacaggtgcagattaaaatgggggagggtagataaagaaagtccttacatcattccctggagtccctggagttcctggcaacccagggagacctcgaggaccctggaaaaggagggaaataaaaacagttacttatgaggatggtctttcagtcatttcccccaagtaagcaagctggctttgctgtgctaaaaaattagttaaatagcttacctgaatacctggctctccagctggtccttgggcgccctgagtacaaatgagattttattattaaaattccaccaagaatgtccataaattatccaagtgacataaaagactaagcattgtagtttacttagaggaacaacagggtttgccaccgtacacacgtggaaaactgcaaagtcggccaagactttcaggtcgtaggtgaatacttaatcagatacctgttgctggaaacatcaacatgattttgctcagggacttgggacatctatatcattaccataatctgtcactgcacattcatgagggcacaaagaatgcatccaaattccacctgtcagaaactgaccacccacaggggtaactggctcagggattcttttctgctttcaactttgagtcatttatctcttggaataaatcaccagaaacagtgttcagtgacaggagtaggaggtaaaacactaatcaatgatttttttttctacttttagaaaattagaatttcggataaataaaatgaggctgggagattatcagggaacttaacgatggtagttgtaccgctcttaggtaaccatgaacttctgcatgaggaatgttcacctaagtaagtcaagagctggtttcttagcagttgacttcagtaactgctcactgatttttcttttcttatttaaataaataaatattcatatcactgctcttgccaaagctactttttcctcccttcctatttatcctgtgtccctgagtgattttttcctcaaccaccatcacttccctaataattttcttttctttttttttttttagatggagtctcactctgtcacccaggctgaagtacagtggtgcaatctcagctcactgcaacctccgcctcccgggttcaagcgattctcctgcytcagtctcttgagtagctggtattacaggcacccaccaccacgtttggctaatttttgtatgtttagcagagatggggtttcactgtgttggccagactggtctcaaactcctgacctcaagtgatccacctgccttggcctcccaaagtgctgggattacaggtgtgagccaccaggcccagcctctaataattttctgatacaagtttttacttggcttaatttccatctccaatgttcttttacattcttgccctggcaaatcagacaaccctcattcacaacataacccttcactgcttatgct

SEQ ID NO: 694520 - DNA, 1678 bp, Homo sapiens
ttttttttcactcgacaaaataatggggataaacaaaatcaccaagcagtcaccgagcattctaattagtttggacagcaaaacttgcttggtaggctgtttggcttctgggtgcatttaagatacataaatcagacaaggtttgtctacataccgggtcacctggggggcctggcaggcctggctttccatctctccctggaactccctgaaaacagaggtatccatgttcaatctttgcacgtggcacaggtgcagattaaaatgggggagggtagataaagaaagtccttacatcattccctggagtccctggagttcctggcaacccagggagacctcgaggaccctggaaaaggagggaaataaaaacagttacttatgaggatggtctttcagtcatttcccccaagtaagcaagctggctttgctgtgctaaaaaattagttaaatagcttacctgaatacctggctctccagctggtccttgggcgccctgagtacaaatgagattttattattaaaattccaccaagaatgtccataaattatccaagtgacataaaagactaagcattgtagtttacttagaggaacaacagggtttgccaccgtacacacgtggaaaactgcaaagtcggccaagactttcaggtcgtaggtgaatacttaatcagatacctgttgctggaaacatcaacatgattttgctcagggacttgggacatctatatcattaccataatctgtcactgcacattcatgagggcacaaagaatgcatccaaattccacctgtcagaaactgaccacccacaggggtaactggctcagggattcttttctgctttcaactttgagtcatttatctcttggaataaatcaccagaaacagtgttcagtgacaggagtaggaggtaaaacactaatcaatgatttttttttctacttttagaaaattagaatttcggataaataaaatgaggctgggagattatcagggaacttaacgatggtagttgtaccgctcttaggtaaccatgaacttctgcatgaggaatgttcacctaagtaagtcaagagctggtttcttagcagttgacttcagtaactgctcactgatttttcttttcttatttaaataaataaatattcatatcactgctcttgccaaagctactttttcctcccttcctatttatcctgtgtccctgagtgattttttcctcaaccaccatcacttccctaataattttcttttctttttttttttttagatggagtctcactctgtcacccaggctgaagtacagtggtgcaatctcagctcactgcaacctccgcctcccgggttcaagcgattctcctgcctcagtctcttgagtagctggkattacaggcacccaccaccacgtttggctaatttttgtatgtttagcagagatggggtttcactgtgttggccagactggtctcaaactcctgacctcaagtgatccacctgccttggcctcccaaagtgctgggattacaggtgtgagccaccaggcccagcctctaataattttctgatacaagtttttacttggcttaatttccatctccaatgttcttttacattcttgccctggcaaatcagacaaccctcattcacaacataacccttcactgcttatgct

SEQ ID NO: 694521 - DNA, 636 bp, Homo sapiens
atctcttatgactgcaaattgtatatcatagttagattgtttctcaatccaggagcaattaaatttgtacattaggtaataagcatttttctgccaaccccatattaagaatacatggtaataaaacaggatgacacagagtaaagtacctgtttctggtgtcagaaacaactgacatattccagctctctattttttgcctgtgttatcttgggcaactttctgagttttaattttcttatctgtgaaatataaacaattaatgaaacgagataatgttaagatctgataaggattagaaacaccaaatgatagcaaagtatgaacaaccttctttcccgcttgggaaacaggtatttcacagttttagaggtttatgtatatatacacatacacacacttactcaacggtttgatatattgagtaaatgtatctgtagstatttactgagttcctgattgccaggctctgttctaggtttctgagatacatgacttaataaaacaaaacctctgtccttgtcgagcttagtattttagaaagtgaatattgtgggttttcctttcatgtcattaatatttattttaaagcattctagcagtattggctgtctatattcttggctcacaatatat

SEQ ID NO: 694522 - DNA, 649 bp, Homo sapiens
tcagaatcggatattaagttgagccttgattctggccacaaaatcatttcctaactgtagtcaagtctgagtcctggccctggtcacagattaagccccagtgtggccacagatggcaccctaagtccaggcagctaatacacaaatgatcattatcagatggattaagtcaaatacattctcacctctggcgacacagttcaaggcctgcrctttactagaggtgggtcagtagctgtgccttttgtctgtgaaggacagtgcattattgatatagcaatatgcttgtcagtgtttcttcttcaattgtctggctgcagagagcacaaatactttattgccgtggtagacagtcttttcctgaagaagataaaaataaaatggaaagaaagaaatgaaacttgagtgaaggaagtaatttcctgtgactgtgaaaacataaagcaaatgcctgaacatgagtttaaatggatctgtaaatgtggcttgatggaaggaacctttcttggaaaggacataactgtgagtgctgctaggtatagagcacattagggggcaaggaagccaggaatcatgtgctggaagtcagtttctattaaatgaatagacttcaaacagctactaaatccggtctggataaatgggtttt

SEQ ID NO: 694523 - DNA, 634 bp, Homo sapiens
caattgacaagaaaagttaaagtattgaatctagggataaatacttgggtgataaatctattaaaatgcagggaggtgtttcctgtaaaagttgagaaataatcagaaggaggcgtggtgataaggatggggtcatcagtgggtatctggggtggctggcaaaggtctcttttccgacctggcttatggttacaagggtattcgccgtaccattatacaataaacgatatagacgctttgggaagttttctgtctctgtgttgtataataaaaatacaaaaacaaattttatttgatttttatttttcagaacatacatgtagagttaaaaatattgaaaaatattatccaagcattagtcataattattatcamcatcatttaagacaaacaattaaggacagtgatactgtcagaaggaattcagaaatcatatcagtagcataaacagctgcacaaaattgtcaaagaatgctgggtgataggtgtcatttctgtctaaatccaaacatacaaaagaactgctaacataataacatatgtactaacatagtatctcacttcatttcaggagttctcctgtctgttagtctaaaccaaattcagttaactaaattcagtcagacaatacaca

SEQ ID NO: 694524 - DNA, 2773 bp, Homo sapiens
tgactccagcctccatagcttttatatcttgttcaacctatgcgagttaggattcttctgacctaccatttagaaggaggtcttattcttaggtaggacctaaatatctgtataaaacagtgactttatctgcttcactctacacaacatttgggttcatagaggcctagaattttagaactggaatgactttagaagtcatgtagttcaggcaaggtgcagtggctcacccctgtaatcccagcactttgagaggcggaggcgggcagatcactagaggtcagaagtttgaggccaggcttgctgggtgtggtggctcacacctgtaatcccaacactttaggaggccgaggcaggtggatcacgaggtcaggagatagagaccatcctggctaacatggtgaaaccccatctttattaaaaatacaaaaaattagccaggcatggtggtgggtgcctgtagttccagctactcgggaggctgaggcaggagaatggcgtgaacctgggaggtggagcttgcagtgagccgagattgcacgactgcactccagcctgggtgacagagggagactccatctcaaaaaaaaaaagaaaaaagaaaaaaaagaagtttgaggccaccctggccaacatggcgaaaccccatctctattaaaaatacaaaaattagctgggtgtggtggtgtgcacctgtaatcccagctactcaggaggctgagacatgagaatcacttgaacccaggaggtggaggtttcagtgagccaagattgtgccattgcactccagtctggataacggagtgagaccrtgtctcaaaaaaaaaaaaagtcatgtagttcattcaactctgtgctttactggtaatattagtgtcatgaacaaattgatccagttggttacctgcagagctgtcagaaaatttaattcctctgaccccccagtcctgagtcttttctttcacagactactgcacatttttttaaaatcacattctagttgaatataatagggaagctttttaaaatttttaaagcatttggtcacaaaggctttaggatggaaaagaatcgtgttctaaaacattcaaattttttttattttttttaattctactctgttaactgaatccttttttatatataaatacagtttggggtctatcagctttgctcaaagtgaaatatactttaaaagttttaacctaaccctttctttttaaactctataactgtagtagacatcacaaatcagtaacttaatgcataaccatgtgtttttcagtgtagatttggatgtagttttggtttacacagcactagattgaggattttgccacctccgccatattatcagccctcgttggtttacggctttcctgctgagaaagtcatctactgtgtagaagacatggctgtctttatgatttctgaacagggacagccatagaggggaaaaactattaaatggtgtttaaaagctacatccttcctccaaggccacagatccaaaccatagtttttttcaaaggaaaacatatgactatttttttgtatacaatatctccaacttttttttttttttttttttttttttttttggtcctcatgggtttttcttgttaggagggacttttcccctaatgcagggtaataagacataacactctttctggatcactggtgaatatgtttttcacctcaatgtgagatttaatgtgaaacttttctgtagttaaaatgtcccttaggattttttttgtatgtgtagggagtgcaggtagggacttttatgagtatggcaaagattgagtttaattccagagtagtgatcaaattaagtaaaacatgcctgcaagcagtgtaattaagccgtgtattcatagttctttataatagtatctacatatgattatttgtcaaagttttgtcctaaaatgcttgttaaaacaatctactaaatatctagaaatgtaaaatctcatctactaaaatagttcacccacaaaagggtacttattgatatccttcagcccacaggagacccttagttaatttttctaacacctggcttctttaagtgttatgagtctattgtgacaataaggttgccttttgctgaatgattggtgtgtttatgagttactttatctacctgttggcagcttgaacaataaaaatggtgattgatgagctgaagtgtctggtgacattgactctgtctaaggatatactattgcatgttgtgaaattcttttccaacaattcagaatttaaatccccttgggggagtttgggatttttgtggggctcagtgataattaagtccttaatacttggttctcttaaattgctctctgagctaaagtaaatcctctggaaacttcaatggatttaaaatccatttgtgatgggtattttggttgtgtgtcactattattttaccatcagaagcttggtgtcttactccattttctgctgctataacagaatatctgagactgggtaatttattaaaaaaagaattgtatttggttcacagttctggaggctgggaagtccaagagcatggagccagcatctggtgagggccttcatgctgcatcatcctgtgacagaagttgaagggcaagtgagcacatgaggcagagagggaggggggctgaactctttttattaggaactcactcccaagatagcagcattaatccatccttgagggcagagccctcattacccaatcacgccttaaaggtctcacctcttaatactg

SEQ ID NO: 694525 - DNA, 2773 bp, Homo sapiens
tgactccagcctccatagcttttatatcttgttcaacctatgcgagttaggattcttctgacctaccatttagaaggaggtcttattcttaggtaggacctaaatatctgtataaaacagtgactttatctgcttcactctacacaacatttgggttcatagaggcctagaattttagaactggaatgactttagaagtcatgtagttcaggcaaggtgcagtggctcacccctgtaatcccagcactttgagaggcggaggcgggcagatcactagaggtcagaagtttgaggccaggcttgctgggtgtggtggctcacacctgtaatcccaacactttaggaggccgaggcaggtggatcacgaggtcaggagatagagaccatcctggctaacatggtgaaaccccatctttattaaaaatacaaaaaattagccaggcatggtggtgggtgcctgtagttccagctactcgggaggctgaggcaggagaatggcgtgaacctgggaggtggagcttgcagtgagccgagattgcacgactgcactccagcctgggtgacagagggagactccatctcaaaaaaaaaaagaaaaaagaaaaaaaagaagtttgaggccaccctggccaacatggcgaaaccccatctctattaaaaatacaaaaattagctgggtgtggtggtgtgcacctgtaatcccagctactcaggaggctgagacatgagaatcacttgaacccaggaggtggaggtttcagtgagccaagattgtgccattgcactccagtctggataacggagtgagaccgtgtctcaaaaaaaaaaaaagtcatgtagttcattcaactctgtgctttactggtaatattagtgtcatgaacaaattgatccagttggttacctgcagagctgtcagaaaatttaattcctctgaccccccagtcctgagtcttttctttcacagactactgcacatttttttaaaatcacattctagttgaatataatagggaagctttttaaaatttttaaagcatttggtcacaaaggctttaggatggaaaagaatcgtgttctaaaacattcaaattttttttattttttttaattctactctgttaactgaatccttttttatatataaatacagtttggggtctatcagctttgctcaaagtgaaatatactttaaaagttttaacctaaccctttctttttaaactctataactgtagtagacatcacaaatcagtaacttaatgcataaccatgtgtttttcagtgtagatttggatgtagttttggtttacacagcactagattgaggattttgccacctccgccatattatcagccctcgttggtttacggctttcctgctgagaaagtcatctactgtgtagaagacatggctgtctttatgatttytgaacagggacagccatagaggggaaaaactattaaatggtgtttaaaagctacatccttcctccaaggccacagatccaaaccatagtttttttcaaaggaaaacatatgactatttttttgtatacaatatctccaacttttttttttttttttttttttttttttttggtcctcatgggtttttcttgttaggagggacttttcccctaatgcagggtaataagacataacactctttctggatcactggtgaatatgtttttcacctcaatgtgagatttaatgtgaaacttttctgtagttaaaatgtcccttaggattttttttgtatgtgtagggagtgcaggtagggacttttatgagtatggcaaagattgagtttaattccagagtagtgatcaaattaagtaaaacatgcctgcaagcagtgtaattaagccgtgtattcatagttctttataatagtatctacatatgattatttgtcaaagttttgtcctaaaatgcttgttaaaacaatctactaaatatctagaaatgtaaaatctcatctactaaaatagttcacccacaaaagggtacttattgatatccttcagcccacaggagacccttagttaatttttctaacacctggcttctttaagtgttatgagtctattgtgacaataaggttgccttttgctgaatgattggtgtgtttatgagttactttatctacctgttggcagcttgaacaataaaaatggtgattgatgagctgaagtgtctggtgacattgactctgtctaaggatatactattgcatgttgtgaaattcttttccaacaattcagaatttaaatccccttgggggagtttgggatttttgtggggctcagtgataattaagtccttaatacttggttctcttaaattgctctctgagctaaagtaaatcctctggaaacttcaatggatttaaaatccatttgtgatgggtattttggttgtgtgtcactattattttaccatcagaagcttggtgtcttactccattttctgctgctataacagaatatctgagactgggtaatttattaaaaaaagaattgtatttggttcacagttctggaggctgggaagtccaagagcatggagccagcatctggtgagggccttcatgctgcatcatcctgtgacagaagttgaagggcaagtgagcacatgaggcagagagggaggggggctgaactctttttattaggaactcactcccaagatagcagcattaatccatccttgagggcagagccctcattacccaatcacgccttaaaggtctcacctcttaatactg

SEQ ID NO: 694526 - DNA, 626 bp, Homo sapiens
gccagatgtgatggcgcatgcctgtaatcccagctactcaggaagctgaggcatgataatcacttgaacccaggaggcaaaggttgcattgagctgagatcgcaccactgcactccagcctgggtgacccagtgagactccgtctcaaaaaaaaaaaaaaatacacaaattttttaagataatattttgtttcactcttaaccacaataatgggatataagaacctgttaggcattaggcactgcataacttctgatatcttgggatcatattggacaccatgaccgttatctgctgttccacattgatttttatgcagtacttgctttttatcacagcaaccacaaaaatccagctttgcaaagacatgacagctcactccaaaaggaatataatgatgttgacattgcaaactacataaagccaatagattgttagatgtccagtagtcgttgagtataactatgtgtccctagaaactttwaaaaatcccacaacaaccctgtgaattcactgtggcatccctgggccgctcagccagtctgggaactgcagggctagagtaatagtttggaacatgctgtggtccgtggttgcagtaatggcccccacaaaccatgccttcc

SEQ ID NO: 694527 - DNA, 626 bp, Homo sapiens
gccagatgtgatggcgcatgcctgtaatcccagctactcaggaagctgaggcatgataatcacttgaacccaggaggcaaaggttgcattgagctgagatcgcaccactgcactccagcctgggtgacccagtgagactccgtctcaaaaaaaaaaaaaaatacacaaattttttaagataatattttgtttcactcttaaccacaataatgggatataagaacctgttaggcattaggcactgcataacttctgatatcttgggatcatattggacaccatgaccgttatctgctgttccacattgatttttatgcagtacttgctttttatcacagcaaccacaaaaatccagctttgcaaagacatgacagctcactccaaaaggaatataatgatgttgacattgcaaactacataaagccaatagattgttagatgtccagtagtcgttgagtataactatgtgtccctagaaacttttaaaaatcccacaacamccctgtgaattcactgtggcatccctgggccgctcagccagtctgggaactgcagggctagagtaatagtttggaacatgctgtggtccgtggttgcagtaatggcccccacaaaccatgccttcc

SEQ ID NO: 694528 - DNA, 626 bp, Homo sapiens
gccagatgtgatggcgcatgcctgtaatcccagctactcaggaagctgaggcatgataatcacttgaacccaggaggcaaaggttgcattgagctgagatcgcaccactgcactccagcctgggtgacccagtgagactccgtctcaaaaaaaaaaaaaaatacacaaattttttaagataatattttgtttcactcttaaccacaataatgggatataagaacctgttaggcattaggcactgcataacttctgatatcttgggatcatattggacaccatgaccgttatctgctgttccacattgatttttatgcagtacttgctttttatcacagcaaccacaaaaatccagctttgcaaagacatgacagctcactccaaaaggaatataatgatgttgacattgcaaactacataaagccaatagattgttagatgtccagtagtcgttgagtataactatgtgtccctagaaacttttaaaaatcccacaacaaccctgtgaattcactgtggcatccctgggccgctcagccagtctgggaactgcagggctagagtaatagtttggaacatgctgtggtccgtggttgcagtaatggcccccacaaaccaygccttcc

SEQ ID NO: 694529 - DNA, 764 bp, Homo sapiens
gataaggactcagcacatagtaaggtactctactaagtgttagttattattaagagcctggtttaacggggctctaagccaccacccagagaaatcactgagaacccaaggcctagccttcctcctactgaagagtcattccctccactccccaccagccctgctgacgctgcctgtcttgctagtgatgccaccctaataacatgaatgccttcaccactgccttctccagcctctcaaagttgccctctcagtctcctgagttgatcctgtggctctctcaaacagaagggaggattctctttccatcattgttgtaactttttaccagacctttaagtgtgaccgtgatctctccattttttaataaatctcccataaagggtagcttactcttttagtttccttcagaactatcttccaaataactcaagaaaagcaaccccctcagcaaagtcagaaaatatttgaatggcagcttaaataacctgctcaacaagtctcttcccactgattatrctactgttccaccgaggtagttaggcatcttgatctcaccctatacgtatcattatactttttgtacagtagtaccctcttatctgtagtttcaccttccagttacctgtgatccaaagacagatggctataggcaaacctcactttattttgcttcacagatattgcattttttttacaaattgaaggtttgcagcaacccctgtgttgagcagtctatcggcaccaattttccaacagcatgt

SEQ ID NO: 694530 - DNA, 3345 bp, Homo sapiens
attttcagttgttatcatggttgtacagttcttactagcttctttagaccaatggtatttaaactttagtgtacaccatcatcgcttggagagctagtaatcctgaagattcaagagctccacttccagtgatttggtcttgagcaaaatctgggaatttgcattttaacaagctcttgggcgatgccattgtgctggttgtgagccacagtttgaggagcactgaggcactcatctgctgaccactggttgggcccggcggtctgttttaaaaagcatccaggtgataaccaattctcactaaagtttgagaagagctgtttaaaaccactggttcgcagacttaactaaacattggacccacatgagcagttgcttaaagaatgccaatgcctgggtctcactcggctgattctgatgaaattggagtgggaagcagcctgacatggggattatttgaagctcccaagatcactgtaatgggcagccaaggttgaaaaccatttgtagaccataccttcattcctgcattgcaagactacacgatctgcaatttgtactttccagtatgtcactatggtagaaaaagagatgggtaaaattctagcatctgaaaggaaataatctttgccaggcttgcatgaatttgatcctagcttatcttacatattgtacagactgtgagtaatgaagggctcaatttgaaagagctgggagtgagtcagccggaagaggtagaaatttgggcaaaagagcaagttctataaatctgtagaagtgaaacccatttagttacctccaaagggccaaatgtgctgtttaaaatgctccaatagagcattgaatttcacagctgtctgtagctttgaggccaaattctcattccctaaagttagaaaacagaagtaggagcagtaccaaaaagccacacatactactgagatattaattaagccccaaagacttcaaggacccctgtctggtcttcctaaatgcactattttttgccaacggatgcaaacagatttctcttgaccttccccatacttgacccagatctctaagtctaaatattatcaccataagaagatgtcaacattttaagttccagataatagattcctgggaaatgaacccacatatttttgttatttccccaagatcttgaaattttttctgtttttattaaagtctcttataggaatgtattaaacaataacaacaaaaaatcccaacaaaacaaaacaaaaactaagctagattcctgtccggaaatccagcaaacgttttaggcaggaaatgtaggtattttgccaagtcaaagcagtggatggagagtcagaaacacaggatccttgtcctggttttgtaccttactatgtgaccttgagaaggttgtgcaactcctctgagcctcattttcacatgtgtcaaatggcaatgatgtctcaggatccctttctactttaacataaaagaatcgtggtaggacatgggaatctgaagaattattattattatttgtttttttgagacggagtctcgttctgttgcccaggctggagtgcagtggcctgatctcggctcactgcaagctgcacctctcgggttcacgccattctcctgcctcagcctcttgagtagctggaactacaggcgcccaccgccacgcccggctaattttttgtatttttagtagagagggggtttcaccttgttagccagaatggtctcaatctcctgacctcttgatcagcccgcctcggcctcccaaagtgctgggattacaggcgtgagccaccgtgcccggccctgaagaattctttatgattgcaatgcattgcaaatctcttgtgtttggttgcaaactttcaactgaaacactgagtgaattgttgcctctgcaatgacaaaattttggtggtgccccctcctcctttctttcctgctgtataagggctgtcctttttcattgatatgatttaagagactggaaaaagtaaactattcttcaattcattcctcttaaagtgatagaagacacgatttttcctatgatctgctttcaaatcactctcaccggctgtgaatctcctcttgacggctgtgaatctcctcttgacacaaagttatcagctgaagatttctccctcagttggtttatacttagccacccttttgaaatgaggttccatttactttattggttctaggaaaatgcaggcattttaaggcccatttttgcttcttcctgattggaatggaaggggaggaggggcagggacagcttctctaatttgctggtgaactgaaaaatactccaaagaccctttttcagtcttcctgagtagatttgcctttgccaaaggatacaaatacacttattttaactttgccagccattgtgtcaatgtctaattttggaccatattaacaaaaaaaagttgacaaaatttaagtcattgagggagacagatccagccaaagctggcattggcattaatgatggacattgatagtgattggattaattttaagtggttgtatggaaggagttacttatattaactaagaaggtgccaaagggaagaaagcaaagcaggaagaagacagagttctggaattcaagaaatcttggcttgagttttcatcatcaattaaccagctatgagtatttggaacaatttctcaatggcttaatgtgtaaaatggacctagacccgtgctgtttgaactttaatgtgcatttgaattttctgggatgtgtttaaaatgtaaactctaaagtaggtctgtgggtgaagcctgagatcctgcacttgtaacatcttttaggtgattcagatgctacgagtcagaggaccacactctgagtagtgtcctcagtggataattcttctcatgctaccttccagatctagaagtaagcagataactaagtaagtaaakaaataacactcttaaactattctgaagagctctattaggaaagatactgaagtccaaattttataaattagcatgtgaatgtgaaatggtacctaagtggattctttacaatttcacacccactgcaggaaaaaatgtcaaccacagaagtaagatctgttggagaaataggcctcctggttatttttccaaattattgttctttgcttattggatacctcctaatctcactttaaaattacccagaagaaacctgtaacgaaggtttctcattttgtctatcagccagagaattatgctttttaagtttttcttaaatgtatggtacataaacaattggttttgttactaataattttttaaattgtcaacctagtaattttcttttaaactatt

SEQ ID NO: 694531 - DNA, 1210 bp, Homo sapiens
aagcccagtcaatattagccaaaccatgactactttttagaacagagtaagaaaaataagcatttgagaaaaaacactgagatttggggataaggaaattgttacacaaaattatcacagtaaaaatcttacaaaaaaatagattcggtggtgcgacatccaggatagggaggcctcaaagacaaaccgatcataaaagagtagttgctggtttgagggaggaagcagggaaaacactggaagaaaccagtgtgttcttactggaaagacatcgtacaataaaagaacatggcttcaggcagatgaccaggtggagtggctgcccttttggcactgacttctggtgacaatcttccctatttgcagaaattctcttttctgccacactggcaaattgtgctacctttcagacctcaagattctaatatgatgtaaagataagtagtacagtgtagtggttaagagaataagctctagagcccagctgtctgggttttaatcttggctctgccactttactgacttcctgaccttggcaaattatgtagccttgtcatgtcttagttttcttatctggaaaatggggcttgtaatagaatctacctcatacaatcattgtgaggattaaatgttttaatatgcataagtacttagaatggggtcaggaacttagtaagttctcagtaagtcacagctattattaatgtcattattgtttaaccaaaatttagggcacagaagcccatagtactctgctgggtatcctgtaagaaattcagatgaatataaacatggccactgccctcaagaaatgtataatctaaaatctgctaattttgtattctctgaccttactaaatttttaaattagttctgataggggtgtgtgtgtgtgtgtrtatgtgtgtgtgtgtgtgtgtgtgtgtgtgtgtgtgtgtgtgatttgtagggatttctacatataggataatgtcttctatgaacagagataactttattcctttttaaatttagatatctttttttttcttgccaaattgctctggctagtatttttagtattttgttgagtagaagtgataagcatgggcattcttgtcttgctcctgatctttgaatttttcaccattgaatatgacatgaattgtcggcttttcatttttggttattattatattaagatatttttcttctatttctagtttgttga

SEQ ID NO: 694532 - DNA, 1210 bp, Homo sapiens
aagcccagtcaatattagccaaaccatgactactttttagaacagagtaagaaaaataagcatttgagaaaaaacactgagatttggggataaggaaattgttacacaaaattatcacagtaaaaatcttacaaaaaaatagattcggtggtgcgacatccaggatagggaggcctcaaagacaaaccgatcataaaagagtagttgctggtttgagggaggaagcagggaaaacactggaagaaaccagtgtgttcttactggaaagacatcgtacaataaaagaacatggcttcaggcagatgaccaggtggagtggctgcccttttggcactgacttctggtgacaatcttccctatttgcagaaattctcttttctgccacactggcaaattgtgctacctttcagacctcaagattctaatatgatgtaaagataagtagtacagtgtagtggttaagagaataagctctagagcccagctgtctgggttttaatcttggctctgccactttactgacttcctgaccttggcaaattatgtagccttgtcatgtcttagttttcttatctggaaaatggggcttgtaatagaatctacctcatacaatcattgtgaggattaaatgttttaatatgcataagtacttagaatggggtcaggaacttagtaagttctcagtaagtcacagctattattaatgtcattattgtttaaccaaaatttagggcacagaagcccatagtactctgctgggtatcctgtaagaaattcagatgaatataaacatggccactgccctcaagaaatgtataatctaaaatctgctaattttgtattctctgaccttactaaatttttaaattagttctgataggggtgtgtgtgtgtgtgtgtrtgtgtgtgtgtgtgtgtgtgtgtgtgtgtgtgtgtgtgtgatttgtagggatttctacatataggataatgtcttctatgaacagagataactttattcctttttaaatttagatatctttttttttcttgccaaattgctctggctagtatttttagtattttgttgagtagaagtgataagcatgggcattcttgtcttgctcctgatctttgaatttttcaccattgaatatgacatgaattgtcggcttttcatttttggttattattatattaagatatttttcttctatttctagtttgttga

SEQ ID NO: 694533 - DNA, 789 bp, Homo sapiens
aatttacctcaaaacatatggagcatattactttaaaatgtaattggccagacgcagtggctcacacctgtaatcccagcactttgggaggccgaggcaggcagatcacgaggtcaggagatcgcgatcatcctggctaacacggtgaaacccygtctctactaaaaatacaaaaaaattagccaggtgtggtggcgggcacctgtagtcccagctactcgggaggctgaggcaggagaatggcatgaacccaggagtcagagcttgcagtaagccaagatcacgccactgcactccagcctgggcaacagagcgaaactgtgtcccaaaaaaaaaaaagtaattaacatactgtttaaggataagtttactttctattttgcaggcatcctgtagatttggaagccatcctcttagacttagcagtcaaacctatacatcttttagctctctacataaatgaatggcaggcccagaagctcataggaacactgataattagaatttggaaagattagcaaaggagacaagagttaccataaaagagaaggaaaccaagaaaaacctataatgaaaatcaaatattgtcttaatgtgtaaggattggtcaatggtgtcatataatgcagaagatgaagtccagaaaaagaaataacaaagactgttaattatcttccaggctccattcttcccttctttgttcatgggtagtgcctccaaagttttagcaaagacaaaaatgtcaagaaatggaaggttaaccaaattgttttaagaaaggaagtgagg

SEQ ID NO: 694534 - DNA, 627 bp, Homo sapiens
gattacagtcatgagccactgcccccacatttgaccagtcttgtaatgtgcatctactatgtgtttggcactgtatagaccaagatgaaaaagatatgcattcaaagatctctcacagtaaggtaggagaagacaaggaaacaaaagaataaaaaaaagttacatagaatctatactagaagtctgaggtgtgtgccctgaggagggggcaagcggaaaatgtaaaaaggaaaaaggcagatctaatgaaggacctacagagactcagcacaaatattctcttgagttttcttctagtgtttctgttttgattattttgctttgggtttagttttttgtttgctttgtgtgtggtttcttttaatttagatccttagtctagctggaattttaaaatatgatctaacytgtttgcttctactagtaactaaagctttttttagactcaattgatattttctcttcaagctattgatatgttcactctcttggtaaatttctaaatgtaatactgtcttacattcctggaatattgagtttgtatgacaaagttggttggtttatgattcttacaagttttctttttctagctttattaaatgatagagaagtttccactttccctaa

SEQ ID NO: 694535 - DNA, 647 bp, Homo sapiens
agagaagcagttttcaaacatttctggctccagaaacaccctcactttcacagaaacatcatcattaaggacttaaaagagaccctgatgaggctgagtctaaaattagctaggccttcaaacgtgaatgtggtcctaaaattagacaggccttccagctgggcttgggcttgggcttgctggagcccacaaacaggaggggccgcctgacttccttcctgcctttccagttaattggccttgcagatcttcctgggactgacgctgcagcctctcaagggcagggaggcagagttaggaggctcctctgcacccaggtagggargctggaggtgaggcctagctgtcttctcctcctacagtaatggggcagaccaaggagcaatcagagacttgctgagagaagcgggaccagcacccaggctggaaaatcataggatcaaggtataatcaaggagcacctttcatatgcctaaatttgggactgttcatctttgtcagtgtcttatgaggcttctgattgggtgtgaacattgtgttgtattagtgttgaaaagggcctctgatttactctaaccttctcatttaatcaagtagggtaaagaatacagttgacctgtgagcatgggtttaatctgtgcaggtcc

SEQ ID NO: 694536 - DNA, 657 bp, Homo sapiens
tacaaatcgttaaccctattcaccaaacagcaattaattgtcaataaaacacatccacactgtgaactctggtgtcaacgtaggcttatcaattgtaacaactctgagggggatgttgatatgggggagaccatgcatgtctgaggtctggggctatctcttagtctgtttagggttgctataacagaatacccgaggccaagtactttataaagatttagctcatggttctgcaggctgtacaaaaggcatggtgccaacatctgcttggcttctggtgaggccgtttcatgctgcatcatagcatggcagagaaaatcaagggggaagtgaacatgtrtgaagaggcaaaacctcaggggcatcctttttataataacccactctcatgagaacattcctcagtgaactaatccagtcttccttgagcgagaactcactcgctacttcaagaacaacaccaagccattcatgagggatctaatcccatgacccaaacacctcctattagacccacctcccaacactgtcacactggggatcaagtttcaacatgagtgttggtggggacaaactcaaaccatagcagatatatgggaaatttctgtaccttctgctcaaaattgctgtgaatctaatagtgctctaaaagaattg

SEQ ID NO: 694537 - DNA, 1664 bp, Homo sapiens
  misc_feature 417, 418, 419, 420, 421, 422, 423, 424, 425, 426, 427, 428,429, 430, 431, 432, 433, 434, 435, 436, 437, 438, 439, 440,441, 442, 443, 444, 445, 446, 447, 448, 449, 450, 451, 452,453, 454, 455, 456, 457, 458, 459, 460, 461, 462, 463: n = A,T,C or G
  misc_feature 464, 465, 466, 467, 468, 469, 470, 471, 472, 473, 474, 475,476, 477, 478, 479, 480, 481, 482, 483, 484, 485, 486, 487,488, 489, 490, 491, 492, 493, 494, 495, 496, 497, 498, 499,500, 501, 502, 503, 504, 505, 506, 507, 508, 509, 510: n = A,T,C or G
  misc_feature 511, 512, 513, 514, 515, 516: n = A,T,C or G
tacatgaaatgtacatgagcataaaacagccagctatagcccttctaatggagaccttcatagctgccataacagctgatggattggtgtaaggctagtagttttgaagttatattttgtatttattgttgaagctatcagaaatgtagagaacactgaggtcaatcaagagtatatgattttccaagtatattaaaatgtgtttgtgttcctttcatacaaaacataaagcatccatctttaaaatgttcacagcaatcaatgcctttaattgagcagaaaagcatatacagatatagaaatgtttagtcctagccgtggttcctgacaatcatcttcagagataaatttccacaatggatgtttcaattaagacagtaaatttaggtaccgagctcgaattcgaaatcggtcaannnnnnnnnnnnnnnnnnnnnnnnnnnnnnnnnnnnnnnnnnnnnnnnnnnnnnnnnnnnnnnnnnnnnnnnnnnnnnnnnnnnnnnnnnnnnnnnnnnnaattcaagctcggtacctttttacagtgcttatttataccaggaactgttttttacatatattggcaagtatagtcctttaacagtcctgtatagtagatattattttttatattttataaatgaggaaattatgcttagactatttatgaagcatggctagtaacttacaaagctgggattgctttctctttttttcttttaatttttcttttctttttttttgtgaaagtcttagttttaaagaatttttttatttaaacattttatattcaaatgtttaactattccaaatagtttaaagaagtttacagtaaatactcatatacccaccactgtgcatcattctatccctctgtccattcatcattcatgaatcttatttttggacacatttctttctttcttttttttttttttttttttgagacggagtctcgctctgtcacccaggctggagcacagtggcacaatctctgctcactgcaacctccgcctcctgggcttacaccattctcctscctcagcttcctgagtagctgggactacaggcgcctgccaccacgccaggctaattttttgtatttttaatagagatgggctttcaccatgttagccagaatggtctcgatctcctgaccctgtgatcctcccaccttgacctcccaaagcgctgggattacaggtgtgagccaccacttctggcttggacacatttcaaagcaagttatagacattagtacatatcctcctaaatacttgaacgtgtgcattattaccagaatttaaattttacgattctttgttttttcttttgaggtaaaatttacatatgataagacacacaacttttatgagtgaatttccgtgagtttgacaaatgtatctgcctgttgcacccgaatctatattaccccagaaagttcctgcaggcccctcccagtatccctacccctccaagagtaaatcacttctttcagggctttatataaatggaaccatactctatatactctttcgtgtcaggctcctttcatatagcataatgtttttgagatcagtctgttcttgagttcattggtagttctctattgctgagttgtattccattttaccaatttgtttatccattcttccactttcggctag

SEQ ID NO: 694538 - DNA, 1664 bp, Homo sapiens
  misc_feature 417, 418, 419, 420, 421, 422, 423, 424, 425, 426, 427, 428,429, 430, 431, 432, 433, 434, 435, 436, 437, 438, 439, 440,441, 442, 443, 444, 445, 446, 447, 448, 449, 450, 451, 452,453, 454, 455, 456, 457, 458, 459, 460, 461, 462, 463: n = A,T,C or G
  misc_feature 464, 465, 466, 467, 468, 469, 470, 471, 472, 473, 474, 475,476, 477, 478, 479, 480, 481, 482, 483, 484, 485, 486, 487,488, 489, 490, 491, 492, 493, 494, 495, 496, 497, 498, 499,500, 501, 502, 503, 504, 505, 506, 507, 508, 509, 510: n = A,T,C or G
  misc_feature 511, 512, 513, 514, 515, 516: n = A,T,C or G
tacatgaaatgtacatgagcataaaacagccagctatagcccttctaatggagaccttcatagctgccataacagctgatggattggtgtaaggctagtagttttgaagttatattttgtatttattgttgaagctatcagaaatgtagagaacactgaggtcaatcaagagtatatgattttccaagtatattaaaatgtgtttgtgttcctttcatacaaaacataaagcatccatctttaaaatgttcacagcaatcaatgcctttaattgagcagaaaagcatatacagatatagaaatgtttagtcctagccgtggttcctgacaatcatcttcagagataaatttccacaatggatgtttcaattaagacagtaaatttaggtaccgagctcgaattcgaaatcggtcaannnnnnnnnnnnnnnnnnnnnnnnnnnnnnnnnnnnnnnnnnnnnnnnnnnnnnnnnnnnnnnnnnnnnnnnnnnnnnnnnnnnnnnnnnnnnnnnnnnnaattcaagctcggtacctttttacagtgcttatttataccaggaactgttttttacatatattggcaagtatagtcctttaacagtcctgtatagtagatattattttttatattttataaatgaggaaattatgcttagactatttatgaagcatggctagtaacttacaaagctgggattgctttctctttttttcttttaatttttcttttctttttttttgtgaaagtcttagttttaaagaatttttttatttaaacattttatattcaaatgtttaactattccaaatagtttaaagaagtttacagtaaatactcatatacccaccactgtgcatcattctatccctctgtccattcatcattcatgaatcttatttttggacacatttctttctttcttttttttttttttttttttgagacggagtctcgctctgtcacccaggctggagcacagtggcacaatctctgctcactgcaacctccgcctcctgggcttacaccattctcctgcctcagcttcctgagtagctgggactacaggcgcctgccaccacgccaggctaattttttgtatttttaatagagatgggctttcaccatgttagccagaatggtctcgatctcctgaccctgtgatcctcccaccttgacctcccaaagcgctgggattacaggygtgagccaccacttctggcttggacacatttcaaagcaagttatagacattagtacatatcctcctaaatacttgaacgtgtgcattattaccagaatttaaattttacgattctttgttttttcttttgaggtaaaatttacatatgataagacacacaacttttatgagtgaatttccgtgagtttgacaaatgtatctgcctgttgcacccgaatctatattaccccagaaagttcctgcaggcccctcccagtatccctacccctccaagagtaaatcacttctttcagggctttatataaatggaaccatactctatatactctttcgtgtcaggctcctttcatatagcataatgtttttgagatcagtctgttcttgagttcattggtagttctctattgctgagttgtattccattttaccaatttgtttatccattcttccactttcggctag

SEQ ID NO: 694539 - DNA, 1664 bp, Homo sapiens
  misc_feature 417, 418, 419, 420, 421, 422, 423, 424, 425, 426, 427, 428,429, 430, 431, 432, 433, 434, 435, 436, 437, 438, 439, 440,441, 442, 443, 444, 445, 446, 447, 448, 449, 450, 451, 452,453, 454, 455, 456, 457, 458, 459, 460, 461, 462, 463: n = A,T,C or G
  misc_feature 464, 465, 466, 467, 468, 469, 470, 471, 472, 473, 474, 475,476, 477, 478, 479, 480, 481, 482, 483, 484, 485, 486, 487,488, 489, 490, 491, 492, 493, 494, 495, 496, 497, 498, 499,500, 501, 502, 503, 504, 505, 506, 507, 508, 509, 510: n = A,T,C or G
  misc_feature 511, 512, 513, 514, 515, 516: n = A,T,C or G
tacatgaaatgtacatgagcataaaacagccagctatagcccttctaatggagaccttcatagctgccataacagctgatggattggtgtaaggctagtagttttgaagttatattttgtatttattgttgaagctatcagaaatgtagagaacactgaggtcaatcaagagtatatgattttccaagtatattaaaatgtgtttgtgttcctttcatacaaaacataaagcatccatctttaaaatgttcacagcaatcaatgcctttaattgagcagaaaagcatatacagatatagaaatgtttagtcctagccgtggttcctgacaatcatcttcagagataaatttccacaatggatgtttcaattaagacagtaaatttaggtaccgagctcgaattcgaaatcggtcaannnnnnnnnnnnnnnnnnnnnnnnnnnnnnnnnnnnnnnnnnnnnnnnnnnnnnnnnnnnnnnnnnnnnnnnnnnnnnnnnnnnnnnnnnnnnnnnnnnnaattcaagctcggtacctttttacagtgcttatttataccaggaactgttttttacatatattggcaagtatagtcctttaacagtcctgtatagtagatattattttttatattttataaatgaggaaattatgcttagactatttatgaagcatggctagtaacttacaaagctgggattgctttctctttttttcttttaatttttcttttctttttttttgtgaaagtcttagttttaaagaatttttttatttaaacattttatattcaaatgtttaactattccaaatagtttaaagaagtttacagtaaatactcatatacccaccactgtgcatcattctatccctctgtccattcatcattcatgaatcttatttttggacacatttctttctttcttttttttttttttttttttgagacggagtctcgctctgtcacccaggctggagcacagtggcacaatctctgctcactgcaacctccgcctcctgggcttacaccattctcctgcctcagcttcctgagtagctgggactacaggcgcctgccaccacgccaggctaattttttgtatttttaatagagatgggctttcaccatgttagccagaatggtctcgatctcctgaccctgtgatcctcccaccttgacctcccaaagcgctgggattacaggtgtgagccaccacttctggcttggacacatttcaaagcaagttatagacattagtacatatcctcctaaatacttgaacgtgtgcattattaccagaatttaaattttacgattctttgttttttcttttgaggtaaaatttacatatgataaracacacaacttttatgagtgaatttccgtgagtttgacaaatgtatctgcctgttgcacccgaatctatattaccccagaaagttcctgcaggcccctcccagtatccctacccctccaagagtaaatcacttctttcagggctttatataaatggaaccatactctatatactctttcgtgtcaggctcctttcatatagcataatgtttttgagatcagtctgttcttgagttcattggtagttctctattgctgagttgtattccattttaccaatttgtttatccattcttccactttcggctag

SEQ ID NO: 694540 - DNA, 601 bp, Homo sapiens
ttagtagagattgggtttccctatgttgaccaggctggtctcaaactcctgacctcaagtgatccgcctgcctaattctcccaaagtgctgggattacaggcatgagccaccaacctggcctaccttattctttttaaagactccattgtaccccattgtttgcatgtatcataatattgctgggcttttgttattgccacaggtggatgttttagattaatcctgttatagtctgttagatgatcatttgaatggttataaaagagacttggggcttgtggtataaagcctgattaaatagaaagaaacctgaactaagcatgggaagctatgaatgcaagtccaagctgtgctatgcttgctatatcattatttgtggacttccttttttattttcctgttctgrcctcatgacagggtttccattttcctggcatgtcttgggctgttcaccagccccagggtcatgtctaggtgattcttcagttggagacctaactgacatccttcccacagcaacatcagtgccaggctacctgtaaccctgcagagtcaaattaaaacttacaagctttccacattccccacgaaggaagtact

SEQ ID NO: 694541 - DNA, 659 bp, Homo sapiens
cttaatttttcttcatatttttctttctgcttgtcagactaattttaattacattctctttaagttcactgattcttctgtctgcttgaatgtgcaatttaactcctttagtaaatattttatttcagttgttttactttaagctccagaatttctatttggttctttttaaaaataatttctgtttctttattgatattctctattttttcatatattgttttcttgatttcttttagttctttatccatggttkctttcaatttttgaataagaccgttaatttaaagtctttgtctagtaagtcagatatctcagttggtcttacttaatttctcttttttcctataaatctataatttcctgtttatttgtatgtattgtaatttttgttgaaaagtgaacattttgaatattgtaatgtggtaattctgaaaataagattctaccttttctccagaaattgcttttgttgtttgatgaaggctgcagttgtctcttttatggaaggcatgtatttcttgtcatgtgtgttctctaaagtgcccattatgttatctctacagtcagccaatgacttgacaggtattttcttaaatgcctggatccaataagaaaagaaaggtacctgtctttgaaaacttctaatgatttatgtg

SEQ ID NO: 694542 - DNA, 659 bp, Homo sapiens
cttaatttttcttcatatttttctttctgcttgtcagactaattttaattacattctctttaagttcactgattcttctgtctgcttgaatgtgcaatttaactcctttagtaaatattttatttcagttgttttactttaagctccagaatttctatttggttctttttaaaaataatttctgtttctttattgatattctctattttttcatatattgttttcttgatttcttttagttctttatccatggtttctttcaatttttgaataagaccgttaatttaaagtctttktctagtaagtcagatatctcagttggtcttacttaatttctcttttttcctataaatctataatttcctgtttatttgtatgtattgtaatttttgttgaaaagtgaacattttgaatattgtaatgtggtaattctgaaaataagattctaccttttctccagaaattgcttttgttgtttgatgaaggctgcagttgtctcttttatggaaggcatgtatttcttgtcatgtgtgttctctaaagtgcccattatgttatctctacagtcagccaatgacttgacaggtattttcttaaatgcctggatccaataagaaaagaaaggtacctgtctttgaaaacttctaatgatttatgtg

SEQ ID NO: 694543 - DNA, 632 bp, Homo sapiens
ttccaaacataccgtggtgtgattgtttgccatgttctaatgtgacataagggtgtattttcaatttaaatgcactgtgaggtgccaaaagatcactaagggagtttgtggaatatgttttccttagagctccagggctcaatatagagcaattttgcttgaggagaaacggagatcttaaatgagctctagaggtctctttatatcacatttataaaatgacaaatggattgaagtaggttcaaaccacaatgcaaactccgggaaagttccagggtatgaggtcaaatctgcctctctctctgctgttcgtttttctcttcgtgccttggctctgtctttcctttgtttcactctctttctcttggttcatctttttcccttttgtctctctttcctcctcttattttggagagcgtagcctgtttgttcttcatcttttccttatctatgggcctcatgacccttttctttaaagcagttgttcatgtccttattgcttttagaaaccaacagaagtttctgacatcgtatattgaatatgactgaggaagaagccaaagttgtatttaaagaaaagagatgctttctaagagaatctggtagtgtttrcaaactatgttagtgtaaca

SEQ ID NO: 694544 - DNA, 1519 bp, Homo sapiens
tactaccaggcttcatacctgggtgatgaaataatctttacaacaaactcctgagtttatttatataacagacttcaaatgtaccccaaacctaacataaaagtttttaaaaaaaattaaaaattaaaaaaaaaaaagaaaaaaactgaggctcagagaagttaagtacctcacccaaagccacacagctagctggtatgttttagaactaagctttaacttaagtatctttgactcaaagcctacttttcactgctgttgctgccttgagacagaggtccagaggtgttatgtgcgatggaagcgtcactggatggagacatgacccacccatgggggtatcttgaggaacacactcagttgcctgtgtgaattctaacaggtctgtttgcatctcagatgctctactgtgacctctggtacagtgtggctgtttactagtgatgctattccgggaagagctctagggcttcttagccccatgttaacttctcatggttcaaagtgctgttggcggagcacaatgcaaaatcctgtggatatgggtgaggctgtcatctttggaggaaggactaaagggctgggggcaggaggccagggactgactgggggctgatcaggacgaagagagctgagggcacacagtcaggatgaaattcttctccaatggcgccagggtgcacggtgctgggagccaaggggctctgccttcccaccagccctgccgctccagggctctgtgaacctgggtcacctcacctccatggagccacacttcttatttgcaaaacagagggtggggatccggtgacgaaggagcctccatccagttctaattttccgttttcttatagaagtccggcttcggtgtgtctggaactgtgtaaggaagacccagtgaagtatcctcatgactgcacctgagctgtactgaataaggggttgtgtgtgtgtatgtgtgtttgtgtgtgtgtatgtgcaccgtgtctgcatgtgtccacatgcatttkttatcttccatccttcatagcccttcttgaagattgagagaagtatcgggatttccaaacttcaatttggagtgggttttgccaggaaattactttggaaactgttgcaaactgcatgcttgtggatggcattctgtggtcatgatcctgccatctgacagtgccagggcctccaagttcgcacagccaaagtgcccctgggggtttgtgggggagactcaggacaagggacacacttcccagcacctcctcagaggttccctgctcagatgtactccctgggattggcctcggggtcacctgcctgagacccagccctgccctctgtcctcagccagcctggaccaggctccttctcccagtgctcaccatgcactggccccaggtctgccccacgtgagggtgagctccacagccagaacctggttttattcgcgtctgcctcctccttgccaaaccaccatgggcacaaagagagcactcactagggattcataggaggagtgaag

SEQ ID NO: 694545 - DNA, 640 bp, Homo sapiens
tatctatctgacttaaaggtgatgaaactgaggattagaaggattcagtaacttgccacagtggaatcacctagtatgcactgagagtgggtccgtgtgccttcagagccagcgctctcagcccttctgctgttttgcttcacagtgtgttccagggagtagtcggatctctgggaagcctgagactgattgtaacggccaggacaggagatcagctctcctgagctatttactccagcctagggcacttctgcgaaaaccatctgagagtatctctggaagactggggcatctgaaaccayggctttaaaacagtcttgccagagagtaaacttagtttccataggttgtgatctgaaccatcatgttaatgttgctagcttctcacatccacttcctttatgagttcattttcctttttcctgaaatatacccttcttaggtctttcttcaaaggtatgtgagttgcagaccttttcattgtgtctcactttgaaaatgtttttattttgccagtgttctaaaataacagcttagctgggtataattgatgtaggttgacagtttcttggtattattccattagctcctgaactctttgtagctactgagaaagctatttctttgttgttgctttgta

SEQ ID NO: 694546 - DNA, 620 bp, Homo sapiens
aaatgggataactatataccatggaatgctatgcagctataaaaagaatgagatcatgtcttttgtaggaacatgaatggagctggaggccattatgcttagcaaactaatgcaggaacagaaaaccaaatgctgcatgttctcacttataagtgggagctaaatgatgagaactcatgggtgcaaagtggggaacaatagatactggggactagttgagggtagagggttgagggaggaagaggagtagaaagaataattattgggtactaggcttagcacctgagtgacgaaataatctgtataccaaatccccgtgacacgagtttgcctgtataacaaacttgcacatgtacccctgaacctaatayaaaagtgaaaagaaagcaagagttcatgtctcatgttttcagtacagatacacacacacacggtaacatgtcagactactcatagttcatttttttaatgacaagaaaaattgtatatatttttggcatacaaaatgtgtgtgtatatatgtgtatatatatatggatgtttgtatatatatatacacataaatatggtagaataataaaatcaagctcacatacttatttttttggggggcgagaaca

SEQ ID NO: 694547 - DNA, 1087 bp, Homo sapiens
ctacaagaggaagtaattctgctttttccaaagttgcctggagcatattttcaaaaatgaagactctcactttaacyatatgaagtctggtgcacactattttgcatgctgtgattactggttatttaagcttcatcaatgaaaagaaacagcagagcaagagtcaagctttagtctaataagaaatgagaaacagaagctgtcagccaccgaatgggaacgaaggggtagtgaggcaaggacatgccaccttcctactctacaactcagaacctcacaagggaggctgttttgcctctctagttccatgttaagctggttttaatctccatcttgattgccttccttccaaatggatggatgtattcagagagattgtcctgatccatcctgattgtctgccaatgtatctgctgatgtgggtagggccacctggcatacacttgcagggccatgctcttgtgaatcagacagtcacattgcatggcaaaggagacctgcatttgatgttcaaaaatgagagagcccaaggagcctcagctcttggttgcaacactggggacaaactatgaataataaagtgagtgacacaagggcttaaggtcaggaactcctgtggcattttggtttagctcagttggaggtgtgggaggagtgtgatggagctgaacccagattacggaggaagcttcatcatgccagaccgagctgaagccattgagtggctttcaacagggaataacatgactgtactgaaagcggcagggctgacattggggagaccagttctgatgaccttgcagcagtccagaagaaatgatggtgccctgaactgtgttagcagcagtggaagagggtggacccaagagctgtggggaggaagaacctgtagacttgacgaccacctagctaacatattcatggcaatgagtcttggaagttctacagcgcacctggagggatggtgggatcagcgaggccaacactgagagaaacgcaggcgtggatgccctggcacaacctcgcagcagatcctaattcctgggaggacccctttccttcccacatttgacaaagacagtctacg

SEQ ID NO: 694548 - DNA, 1087 bp, Homo sapiens
ctacaagaggaagtaattctgctttttccaaagttgcctggagcatattttcaaaaatgaagactctcactttaactatatgaagtctggtgcacactattttgcatgctgtgattactggttatttaagcttcatcaatgaaaagaaacagcagagcaagagtcaagctttagtctaataagaaatgagaaacagaagctgtcagccaccgaatgggaacgaaggggtagtgaggcaaggacatgccaccttcctactctacaactcagaacctcacaagggaggctgttttgcctctctagttccatgttaagctggttttaatctccatcttgattgccttccttccaaatggatggatrtattcagagagattgtcctgatccatcctgattgtctgccaatgtatctgctgatgtgggtagggccacctggcatacacttgcagggccatgctcttgtgaatcagacagtcacattgcatggcaaaggagacctgcatttgatgttcaaaaatgagagagcccaaggagcctcagctcttggttgcaacactggggacaaactatgaataataaagtgagtgacacaagggcttaaggtcaggaactcctgtggcattttggtttagctcagttggaggtgtgggaggagtgtgatggagctgaacccagattacggaggaagcttcatcatgccagaccgagctgaagccattgagtggctttcaacagggaataacatgactgtactgaaagcggcagggctgacattggggagaccagttctgatgaccttgcagcagtccagaagaaatgatggtgccctgaactgtgttagcagcagtggaagagggtggacccaagagctgtggggaggaagaacctgtagacttgacgaccacctagctaacatattcatggcaatgagtcttggaagttctacagcgcacctggagggatggtgggatcagcgaggccaacactgagagaaacgcaggcgtggatgccctggcacaacctcgcagcagatcctaattcctgggaggacccctttccttcccacatttgacaaagacagtctacg

SEQ ID NO: 694549 - DNA, 635 bp, Homo sapiens
tgatgcaataaataaaggaataacaatatgtttattaatttgaaataatccatactaagaaaaaaagtaacttaccaacataatccctatcagggaggacgttttatttttaaacactgtactttagggttttatgcagttttctgaamtacatccttttcacttgatctgtttaatcagaacttcacagatatcacacttctgattttaaatgtcaacataataaataaccttgaacaaaggaaaaatgttctccatgtccaacttctggcttagtcattagctgtgtgagctcagcaacttgtgttttgtcatctgagagtatggaaggaaggctggacaactgaaatggaaacacacccttttagttcttacctacgtgcttatggcaggctcctacctatgtgtttatgtcaggctcctacctatgtgtttatgttttaccctctcagctattctaatagcctccaacacactacttatgggagaatacaaagcacaaataagaacacacattttaatccttctgcaaattcattcaaccaggagaccctgaaaagtcacggagggtacccatgaattaaagcagccatagtttctaatcagcaaactctctgccttcggggtaatgctaa

SEQ ID NO: 694550 - DNA, 689 bp, Homo sapiens
tgcccccctaaggccagcccttcacctcaagtctgaatctctgcggtagctcccagctgstatctccatgtcttagtcttccggtatattctatacacacagcagggggccccagcagtactttgctattgttttccatgttaacaagttaaagaccccggagtggctcttaatgcactttgaatgctccttattttccaccagcactggtactcaccttcaggatcctgggccgcctccagacctaggggattatttctccaaagaggcatggtcaccctgttcaacttctcatcaaaatggttgtactgtggccacctctttcagcagtttggtgttttcagcactgagttctgaaatcctcgaatctgcctttggagctctaattctgaggcctctctcacaggccctttccctcagtctgaaatttctccattagtattctctgtctgaaaattacttccaaaagaagcttctagctttacacagcacctcataccctacctgtgaaaccagtgaagctctactcctgacaggagctaggatgcaacaatctattccatcctggaaacttataaatgataaccacttaaatcttccattaaaacaatcttccattaaaacacgcatgtcaattgctgttatccaatatttatgttctttttccagatttatattttatttattta

SEQ ID NO: 694551 - DNA, 1925 bp, Homo sapiens
ataccaaaattttatttctcaacgggttgtgtttctttggtcttatttttttaaaagggtcataagcaatttgacggaaagcaatgtttatatatttatttaaataatttgagtaatttagtctttatctgaatagcatttcccaaagtgtgttcctccaggcactacttatgagagatattagtagcagttccacaggattttttaaaagttttgtttccatataagtgtcaaataaaggtaaaacaaaattgtagagattgattgtagggctccagaggcttaaatatgccattgtgcatcatgaaaatccaggaggtggtatattaaaaacagtgttccccatgcttatttaactgtgaatttttaagaaatagcttaaagaaagtatgtctgaggacttgcttttagaaacaccgccccaaacactgcctcttgtatttctatctgaaatagtgtatactaatattattatatatcgctaatatacagtaatggtatatgttacatgttagaaatgtgtatcttaatacctaccatcaatggctttttaatggatatttggtacaacaaatttctaattaaaatttacgaacatccataaaaaatgtgaaaatagcctgaatttcagatccattattccacttgaagactaaggatccccagaaaagaagagagcatttctccctccccttccccatcccaaataataatttaaaagcacccttgagttttatgtcaagccagcatttggactaaaatggaaaaatgacaagggtagggtgctactttgtctgatttcaatagttaatgagtctactcacctttgagaacactggctttctagctgaaatctcatagtcactaagagcactattctttctaattataacagtgcatgagattattgtgtagtctttgtcctctgtgaagaaaatcaacatcgagatacatgtacatttcctataataaaactaaatcgatgtgttatttttgcctgcgtaatattgagttgtttttatttgttttcctcctttgcccttttgttcctctttccctcatttagagtaaccaagagcaggtgttgcttcagggtgaggatcgcttgtacttgaactgtggagaggcttcacaaacccagaatcccaggagttcttcaacacactctgagcataagcccagtcgagaaaagagcccatttgcagatggaggtttagagtctcagggattaagcactttacttggacatcggcattggcatgttgtacaggtaaatctttagttactgattactagagacttattctttgataggatatcacctggaacagattattaaatatttcatctgttaacttcaggcaactgagaatccttttaaccattttgtcatgtccctcttctgcttttctgtgttcttgtcctctagtcttctccctcctttctttccacttggcgtagagtgtatccccacctgtttcaagtctattaataatgtcaagaactagaagtttatgttttgccttctcattgagaactatttattttactttcagcctctttttttrtataaatttagctctacggatttgcacaggcaaaacaaagtgtaataatctcatggaaagtggcaacatcagctagtactctgtacagctgaccttacagtcttaaggggccacgttgaggttaatcatgtgactttggacccaaattgcagacttgtgatcagtagagagctttattgttaatacttttattagctaatcttattccaaattatttattcattctgatatcacttttaaattaacagtgtctcacagtaattctgataaactgacatttaacatggaaattaattctcaattttgataccaagtaaaattattttggggaaaccagtaagttgaagtttcttaaaa

SEQ ID NO: 694552 - DNA, 580 bp, Homo sapiens
cttgaacccgggaggcagaggttgcagtgagctgagattgtgccactgcactccagccrgggcaacagagactgtgtctcaaaagaaacaaaaatttaagaaccaatacagcatgaaaagacatgggttattagttatcgaacagggttctgacatcgccctactacgccaataatgaatccttcagttggccagatttttctgagggaggggagtcagttgtagcaaacacttaggtgacttggggcaaggtctatttaccaacatttatagaattattagtattttaacaactgacaccagcttttttatttctaaatttttttagaggtggtagtctcactgtgctgctcagttggtctcgagctcctgggctcaagcattcctcctgcctcagcctcctagtagctgggattataggcacaagccaccacgcctggctcagcctttgttttaacaagtttgtccactttcaattaaatgagaaggatatatctatctcttcctgtagattatttattatgtctgtcacagtttttaaaaagcctatctgctaattccaatatcaagattatctata

SEQ ID NO: 694553 - DNA, 597 bp, Homo sapiens
agttgcacaactttgtgaatacactataagccattagattttatactttgaaatggtgaattttacagtatatgaattatatctcaatttttttaattcaaaaaatgataacgttcggaaaatttgtaaagcattgtcactagtgctggaaatagccatcccaaacctaagtgacatcctcacctgccagcacaattaacccttcaattatttacttagacaaccatgtgttaaaggcaagttaaatatgttaactacttacagttctattcagctcttgcacgatgtctctgggaaatctctgttcttgggatagcttactgatggtgaagttaccattggctccaactctataaactcttccctcaacacaaagatcgtcttctcttggctactatatttactgagactaagtggcctgcttcatcttctaccaaatgttcaataagcatttccgggtctacscactgaagacagaagcatcgaggtgaggattccactcaacagagcattagtcatattgcacatagtagaagatgaagagaaacccgggtcttttcacatattcattattgcccatatttctattgttagaca

SEQ ID NO: 694554 - DNA, 575 bp, Homo sapiens
tagtagtagtagtagtagyagcagtagtagtagtagtagtagtagtagtagtagtaaagatggggtcttgctatgttgcccaggatggtctcgagctcctggcctcaagccaccctcccgcctcagcctcccaaagtgttggaattacaggtgtgagtcactatgcccagcctggcacctactttatgaagcttgctttatcaggatctgtggggagtacagacagtagagaaaatattaaatagggaagcacaagatgtgtcactaatttgcctggtgatactgaagtctcaccctcttagggttctaggcctcatcaacaaaatgagtggctgagtgaaatgaactgtttaccagagttacacaaataaagtatttttaaaagtcttttatttggaaataaatttaggtttaaagaaaagttgggaagatagtatggaatccctgtctatcctttacccagcttcccctaatgttaaaatcctatataaccatgcatttttgtcaaaactattaatattggtaaatactattaactaagcttttaactatacttttaactaaacagacttcca

SEQ ID NO: 694555 - DNA, 575 bp, Homo sapiens
tagtagtagtagtagtagtagyagtagtagtagtagtagtagtagtagtagtagtaaagatggggtcttgctatgttgcccaggatggtctcgagctcctggcctcaagccaccctcccgcctcagcctcccaaagtgttggaattacaggtgtgagtcactatgcccagcctggcacctactttatgaagcttgctttatcaggatctgtggggagtacagacagtagagaaaatattaaatagggaagcacaagatgtgtcactaatttgcctggtgatactgaagtctcaccctcttagggttctaggcctcatcaacaaaatgagtggctgagtgaaatgaactgtttaccagagttacacaaataaagtatttttaaaagtcttttatttggaaataaatttaggtttaaagaaaagttgggaagatagtatggaatccctgtctatcctttacccagcttcccctaatgttaaaatcctatataaccatgcatttttgtcaaaactattaatattggtaaatactattaactaagcttttaactatacttttaactaaacagacttcca

SEQ ID NO: 694556 - DNA, 1740 bp, Homo sapiens
tatttcatgcatgtgagggtatacaataccattattctccattttctgaaagaagaaacattcacaaaggtcaagtgacttgtcatgggtcactcaactcctaagtacacagttgagactatgagacttgtgcatgtaccacattctcccctatacactgcactctggtcacatgagtgagcttttctctgctttcctttttttttgttgttcctcaaatgtgccatgtccagtgcttttcaaatgctgctcagtttgcaatactgttcccacactttccacccctgtcctcaatgcccaaccactacttttccttcaaatrtcagtacaataatccttccttaggaaaacttccctgattccttgtcaaggtttagtcctcctattacacactctgactgctctctatctttttgtcctggcacttcaccgttacaatttaacattcattgtgtgatgcttagtttactgaactaagccttgtggcagagcccgtgtctatcctttgctttccattctatctccagctttagcacaacatctgtcactttgtaagcggtaaaatatttatggaatgaaaaagtgaatgaacacatttaatttagtgctctaaatgaactagagcatgcaaaaacaaccacacacacaaaaacaagcaagcaaaaaccctgacctgcactttgtagctcacaattaatttaatcaaagaggaatcggcattcaaactataaactaaaacaaagcaaataaaaccatcagcattactttatgatacagggctcactatcttattaaactacatgttcttcctaatgttgagtaagaaagtctttgaattggctttaagatttacttttcctgtctgtaaattatatatatatttatttatttatgagacaggttcttgctctgtcacccaggctggagtgaaaaggcacaatcttagttcactgcagcattgaactcctaggctcaagggatcctcccacctcagcatcccaagtatctgggactacaggtgtgtgcccccttggtctgtagtatctgtatttgttttttgtagagacgaggtctcaatatattactcaggctggtctcaaactcctggcctcaagtgatcttcttgtcttggttttccaaaggactgggaaagtgtgagccactgcacctggcctgaaaattatacttttaatatatactacaacaagtaaatgctactagcattagctattaaatcactcaaacatcaatcttattaagcctactaaattctttttctagtaaacctagtgatatacacttggggtcttggaaggatactgcctaaatttcagtcatagctctactactactaattgaaactcactgttgcttcagtttcctcatttgtaaagcagggaaaatagtacatatatggttgtcacaggtattaaataatgcacatgtgcattccaagcactctgaacagagactgatgctaatcaatttgtgttaaccattactatgaaataattgtgtaaatttacatttatttacacatatatgctctattctcaagagaaaacagattagaataaagaaagctagagcaaccaaatctattatttgggagttgtcagaaaaagtaggaccatattagtctattagatgaggaactggcttactcaaacatcctaaaacatggcaagataagcttaaaaagcctttatggagatggtactaagaataataacttttcta

SEQ ID NO: 694557 - DNA, 660 bp, Homo sapiens
aatccaaatatacagcttatgaaaaagaaatcagtttaaaaaccacatatatccaaaattcaaaaagcttccactcaaccttaatataaaataaaaggaaaatggaaatagctaaatagatgtcacattcatacaatgcgatactcggctgctgttaaaaagaataaaatagatctgtatgtagtaasatgagaaaatgtccacaatatgatgattaaatgaaaaaaaaagttaactgcaggaaaactgtataacttgatttgggagaaaaaagaagagaaaaattacgtacaacatgcaggcacaggaaagaatgcagggcctgtaccataccacaccagctgactgcgcagaacgtcgggtggagactaggagacccgggagccttttgccctatctagcgcctgccacaacagacattttataactagaaaaccaaatatgcttttaaattatatttacaaaaaaattgccggtcacggtggctcacgcctgtaatcccagcactttgggaggccgaggcgggcagatcatgaggtcagaagatcgagaccctcctggctaacgcaatgaaaccccatctgtactaaaaatacaaaaaaattagccgggtgtggtggtgggcatccgtagtcccaggtactcgggaggctgagggag

SEQ ID NO: 694558 - DNA, 2194 bp, Homo sapiens
aatgcattcaaatatatttccttctctcaactttatttcatggtaatttcaaaaaccattattttgctgtgatgttcagatcaaagtttcagcctcatccacctcaattaatttttagatgactgatattatagccatctactcattagctattagacacagacacataccctatgcaactcagcattgtaaattgttctttataaaacacctaatcaaataaattttagtgtggtggctcacacctataatcccagcactttgggaggcagaggcgggaggattgcctgagcccatgagttggagaccagcctgggcaatatagtaagacctggtccctataaaacaaatttaaaaattagacgattatggtggtatgcacctgtggttccagctactcaggaagctgaggtgtgaggatcatttgagcctgggaggcaaaggttgtaatgagccaacatagtgccactacactcctgcctgggtgacagagaaagtgcttatctaaaaaaaaaattaaaaataaaatttaaaatatataattagaatccattcttggctcttcccctttgtgtatcctaaacatactaagtttccttgattctaatatacacatcttggtcttagaatctttattcatcttccatggtgcataaaataatggtgaatcctatcattgatagcacattagatttgttgaaatataattgattttattcaagtttcttccaacaaaaaataatctctctctctctctctctctgtcattttagcctactcctaggccttttctctctccctgttttgctcccaacttcgggaatttcttgactccacatcctgtctatacaggtaactcacgaaaattcatttgaagtcatttctttcttctaagcgtcagatcctctttttgatgacttacttgaaatcccatatgattttattacttttaagtttaaaattaagtttttctccatcattccttctaacaaacatctcattctcctgactcaaaaagtaaaattctctcttccttttctaaactttcctccctatgtaaattacccaggctcaaaattgtagaggtaaattcaatttctaatacttttataagtctgctgctttaactaacttttttcctttctgttttcactggcataggtccagaccaggccttcatttttatttaaaatcatctaagaaactcttcttttgttttcttcaacttaacatatgtttccaaatttttcaaatcaatcatcttatagaggcagttcctgtaaatcgatttccttgctcagagactttcaataactctctgtttatccaaagtaaagtagaatccacatttcttatttctgattaatactggaaaagtaagtcaaaacttgtcctaccaataatgggctttgtggaaggaaaacataaaacaaaataattatgtcaagcctttcattaaaacattgcaatgtgaaagaacagctttaaaatgtgtgttctgcagggagaatacagattggtgaaggtcaatcatagttctggttattcctagaattgaatactgttcacgttctcaagactaatgggaaactgaggctctattagttacataatagaaataagaggcagccagattgaggttgcacattagtagcttttggttagataatttgagtttrgaaagaggggtggagaaaaacaaatgggatctaaattatctcaagtataagaagaaaaaatttagttttattggagctgtgatagtttgaaatcatagttgatatagaatagacaatataatattattctcaaaagacatacaaagccatttcttagctttactttcagctatctgttatatattctcaaagcaattgttaattaacatttcagtgagaataattttcccaatataaaatctcattgattttaatattaaggtaaatacattatattaagaattgcttgatgtggtaatgcagtgaatttaggggaagtatttcattatctatatgcaactattatgaaataaattattgttttttattagtttactcaaaaagtaaaataaggccacataattaatcattgcatgtgttcacttgactggacctcagggtgtttaaatacctggttaacaactatttctgggtgtgtatgtgaaggtgtttccaggtgagactatcattcaaat

SEQ ID NO: 694559 - DNA, 1864 bp, Homo sapiens
tcctattaataattgagagtcagtgtttatactgttttgtgtgtgattaacaagaataaacgggtcgatttcatcctccccactgaacctcctcctacagggttgccaagactgcagggtaaagaaaggaaagacaaaaaggagaaaaaaaatccgtaactacaaacaaaagcaaatgaagggcatacatactaaaagaactaccaacatacattgctactttcaaaaaagaacaacatagccatcaagattagaaatacaatcttgagggtttaaataaccagcagaagaggggctttgaaggaagaggggtggttggggcattcttcccacacccctacagcctaggcactgcagcttccaccttcggcccttcccagcatccatcctagagaataaaaagcccagctccaggggttctgggagtccgtcttgggccactctcctgagctcggcctccctgggggaactggccattaacacactttcgcggcggaagtgagcgtgttgaagggtacagtcactaaattgaaaggagagctgctttttattcatttgagtagaggtaagagaaaggggcatctccaaagcctttaactttttgttcccacggagactcctagcttcctcctgtcccaataatttaaataggttctagtgcaaaggaggtagcttctgtgggaaatgaaattttaaaacatccccaaattcatctaccctcgattttcaattcctctctaaccttgccctagaacacagccagctctttttcttaatcccatctttctccattcttgccttaaaatctcccagtgaaatctagggtaccggagcttaaaaataaataaatgcaatcaaagggtctgaggctatgcgaaaggtgcagaggagtggagtagggaaagggaagcaggggttcctttgtgaacgggatcctttatcttcgaagcaaacgcaaatcagagccgtgcttctgcgctccgaagtgcggctgccacatttggagagagcgggcagcggctagctctgcgggtttgggggtgcttctcctctgccccatctccgtggagtttggtacttaaaagcccagtgtgtcaaccgctcagacttgaaggtggttaggtaaagagttaagaagcgaggcggcttacacccataactttatcctccccctcacctgtatttttctcccctcacacccctccctcttcaaacggcctttcaaagatgacttaggggttccacgaatgtcgctgcacggttttgcttctcctcgggtgccatttcgaggagcctagaaacttcctgcctttctggttgaccctccgcagggctttctctgacaccgccatggtggcaacatgggccaagtggtacagggaccagcctagcgggtgggaggcctcgcctgtgggctgaggaggcacgaccctgatccccggcgcgcacagtagaagcgggacctgtgctaagccacgggaaggggggcgcgccgcgggcgcgkggggcgcgtggggcacgtgttcaccccagcactggaaagagacttgcggtgggcgccggagtcaagtctcctgatgttcatgcggaggggagaggatttgtagccatctttgctctgggtggagatttcatatccgcagtcacacgaggtaaccgacaccccccccccgtaacctgagctaaaggtaaaggtgatcctgaaaccgcttgcccctgggaacgtcgctccggacgggcgtcatctgccacgtgtgataggagccgtctggccaagtggaaaaatctaggctaagcgcagagcacaaccctggcagggtcaagtccgatttcaagcccaacccgatgggattcagaaaagccc

SEQ ID NO: 694560 - DNA, 603 bp, Homo sapiens
tcctttctcattctgccaaagcccccgtattagctggaactctttcaattgcacgtgataagcatctagcttaaattactttaagaaggcaataaggcttaaaggccaacacacttataaaacccaaccttgaaaaggccagtcttgagacaatatcctttcactttccactcaagacactccaaggaaggattcagattggctcagcataggtcatgggtccacatcttggactaatctctttggctagaagaatatggtacaaaatccacccaaccagaatccagtgaccacttctgcgactgaggaaggtgcagagtgctgtgttcccagccctgccagccatagatagccctgtgttgtgggagaagttgaaagtagcaagaagggaagggtcaggaggatgctrggcatgtaaaacaaagatgcacatggaggcccccagcctccatctagaggaagatgaaatgtttctacagttctggattttcaataacaacagccttgatatgggcagcttttattttatttcattttttaagagctatatggattcataacagttcaaatgatcatttctatctctattagacccttttgtaa

SEQ ID NO: 694561 - DNA, 603 bp, Homo sapiens
tcctttctcattctgccaaagcccccgtattagctggaactctttcaattgcacgtgataagcatctagcttaaattactttaagaaggcaataaggcttaaaggccaacacacttataaaacccaaccttgaaaaggccagtcttgagacaatatcctttcactttccactcaagacactccaaggaaggattcagattggctcagcataggtcatgggtccacatcttggactaatctctttggctagaagaatatggtacaaaatccacccaaccagaatccagtgaccacttctgcgactgaggaaggtgcagagtgctgtgttcccagccctgccagccatagatagccctgtgttgtgggagaagttgaaagtagcaagaagggaagggtcaggaggatgctgggcatgtaaaacaaagatgcacatggaggcccccagcctccatctagaggaagatgaaatgtttctacagttctggattttcaataacaacagccttgatatgggcagcttttattttatttcattttttaagagctatatggattcataacagttcaaatkatcatttctatctctattagacccttttgtaa

SEQ ID NO: 694562 - DNA, 1809 bp, Homo sapiens
tgcatttaaaaatcacatttttgacataaatttcacctcactgttgaatactacccttagtgcttgatacataagtggtaatctgttagtcactggtaagttatgtgatgccaattctggttatagttctgttactgataaaatatggcctttgagaagtaattttactactccgggtctcaaaattcttattggtaaaaagagcattcttacaaggaattcttaatatttatttatgattctgaattttcaaatatgtaagtagatgaaatgtttggttcctgaaacagaaccraaatgtaaatgaaaaaagaggcaaactatgtaagtctcatctggtggctccagattcaggaagaaaaataattgttaaaacccatctgctcccgccaggactaccgaaaattggtcttcctgcttccacttctgctccgtgcccctctgtgtaagatcctccaacagcttctccctgctctcagaataaaatccaaactctttatcaaggctccttcccctctccgaacgcatccaccctaagtcagcttcccatggcttcctaaactccacagtgaccttctttctgatacttgaacattccaagtttatttcttcctcatggtctttccaccaaaaacacctgtctgaaatgctctctcacttaggtccccgctttgattcagatcttcagacagttcttccatgactgccagtctttctccattatattgccctattttaacggcatagcacttattattattattattattttgtgtctttatatctttattgcctgtctctctgtgagggcagaaatcttctctgcattgaccgccttatactgagagcctagaagggtgcaccgtgcatgatatgtgctcaatatattagtttatggaatgaatgagtgaataaataaatgatattataaacatgatatcattttctatactgagcaaaagaagcccttttgctcagtatagaaacatgaccctacgttgaactattgatagctaaacacttatgttgtgcatattacatgctagccatttttaaagtgctctatttattaatatattaatatttaactctcataacactcttaagatgtagtcccatcatcatattccacatttcacaaaggaggaaatggaagtggagagaagttattgacttgctcaaagtcagaaagccaggaagtacatggccaggattcaaactcaggttgtctgttttcagagcctgtgttcttaatcattatgttatagatgataagatgaaattctgaaaatcctccccacaaaacatatccttgccaaatgattacccaataacacttgatcacttccactgatgagattctcattaccttagaatcagcccatttcttacagtgaaagctctgataagaaattctcccttttctgaccccaaatttctcccagctacctccaccctttagtcgaagcttcactccttgagacctatagaagaactgtaacctctcttccacctgacggccccccagcatttgcaagctactcagcattgcctccttgaatctttccttctccactgaccgtcctttgtcctttcaatagcctcttgtgtagtgatacctcagctctcttactatgctcttccctgaatatgctccatctagtctatatcctctaaaaatttggtcccagcactggataccatatttttggtatgatccagtcaacaaaaaagggtgaaaaagtactccataataaacttttgaaaatcaaacgaatggcaaccactataatttttttcccaggacaa

SEQ ID NO: 694563 - DNA, 1809 bp, Homo sapiens
tgcatttaaaaatcacatttttgacataaatttcacctcactgttgaatactacccttagtgcttgatacataagtggtaatctgttagtcactggtaagttatgtgatgccaattctggttatagttctgttactgataaaatatggcctttgagaagtaattttactactccgggtctcaaaattcttattggtaaaaagagcattcttacaaggaattcttaatatttatttatgattctgaattttcaaatatgtaagtagatgaaatgtttggttcctgaaacagaaccaaaatgtaaatgaaaaaagaggcaaactatgtaagtctcatctggtggctccagattcaggaagaaaaataattgttaaaacccatctgctcccgccaggactaccgaaaattggtcttcctgcttccacttctgctccgtgcccctctgtgtaagatcctccaacagcttctccctgctctcagaataaaatccaaactctttatcaaggctccttcccctctccgaacgcatccaccctaagtcagcttcccatggcttcctaaactccacagtgaccttctttctgatacttgaacattccaagtttatttcttcctcatggtctttccaccaaaaacacctgtctgaaatgctctctcacttaggtccccgctttgattcagatcttcagacagttcttccatgactgccagtctttctccattatattgccctattttaacggcatagcacttattattattattattattttgtgtctttatatctttattgcctgtctctctgtgagggcagaaatcttctctgcattgaccgccttatactgagagcctagaagggtgcaccgtgcatgatatgtgctcaatatattagtttatggaatgaatgagtgaataaataaatgatattataaacatgatatcattttctatactgagcaaaagaagcccttttgctcagtatagaaacatgaccctacgttgaactattgatagctaaacacttatgttgtgcatattacatgctagccatttttaaagtgctctatttattaatatattaatatttaactctcataacactcttaagatgtagtcccatcatcatattccacatttcacaaaggaggaaatggaagtggagagaagttattgacttgctcaaagtcagaaagccaggaagtacatggccaggattcaaactcaggttgtctgttttcagagcctgtgttcttaatcattatgttatagatgataagatgaaattctgaaaatcctccccacaaaacatatccttgccaaatgattacccaataacacttgatcacttccactgatgagattctcattaccttagaatcagcccatttcttacagtgaaagctctgataagaaattctcccttttctgaccccaaatttctcccagctacctccaccctttagtygaagcttcactccttgagacctatagaagaactgtaacctctcttccacctgacggccccccagcatttgcaagctactcagcattgcctccttgaatctttccttctccactgaccgtcctttgtcctttcaatagcctcttgtgtagtgatacctcagctctcttactatgctcttccctgaatatgctccatctagtctatatcctctaaaaatttggtcccagcactggataccatatttttggtatgatccagtcaacaaaaaagggtgaaaaagtactccataataaacttttgaaaatcaaacgaatggcaaccactataatttttttcccaggacaa

SEQ ID NO: 694564 - DNA, 654 bp, Homo sapiens
ttttcctatagctccatgagtctgagggtctatgacagtagccactatctccattaccaatgatgtatttccaataccaacaaacaatgacttcaaatagaataaactaaagtcttgctgggtgtgttccattaatggctttctgtcctctgtgatactgggctgaaatgaagatcagtagactctgggctctgagaaccaacagataacctttctgatgcaataaacggcatggtgaaagtcccagactgctctttagaaccaagcataccacacttcctgcagaaataataagaaactaacatttaaatgagtactgactataagctgaacattgtagtaagtcctgttttatctattatctcatttaatcttcacaacaaccctataagtaattatgctatcataatacccattttgcataagaaaactgagaggcatagagaggataaatattttgcccaaggttatgcagcgagtacaactccagacagactggctcccaaggaactctctaccactccatcatactatctatacatgcgcagtaatgacatagcrgtatttaaaaaagctacaacaaaacccacataattggtaagaccgcacagggaatagcaataaaattctgcatgacttgctgcactgagccta

SEQ ID NO: 694565 - DNA, 1310 bp, Homo sapiens
cagttttcgtcactgaaagtaatggcaaaaactaattacttttgcaccaacctttgtaacttttacaatctttataactacagaaaagttacaaagatggtacacagatttccttctctatgcaccatctttgtcacttttcggtaaacctaagactattctgtatactttttaatttattaaaaaacaaattcccctaattcttgttgaaatctgctcagtgatataatcaacttacaaaaaaccaatttccacatgagacaaatgggctagtgaaaagtcacaagttcaaatccatcatgggaccttaccatttgagtgaccttaaaactttataagccaccattttctcccatataaaacagggttagcaatactcatcctgtctacctacttcagaagacaggaaaaaaaacaattatatattaagtatcaactatgtgtcagagagcttaaatgtctgtatatcttaatcctcacaacaatcttgtaacataggtaaccttgtaacatataggtaacatggacctataaatctattttccagatgtaagaagctcaaagaggctgtgtaaattgactaaggtcatattattagcaagggttaaagtcagattttgaacacaagttcctccaaactgcctcatatgcaccataaacataaatgttttgtaaactgtctggcaactacacacacttaccttaacactacacacaagacaaatatctgagagcccaggtgagtgccaagtacagtcaaaaagggcctctcaccacttgtaattactgaaagaagagccattcaggcaaggggtactcgagcagccttttgaagcaccaagagcctgcacatcccatgagctctcattttcctctttctaggtcttgggggctgccctggggaattcttatcctgccttttggcagctccacaaaccttctttctgccagagtgttttgtaccagggctgtccgaggtagaagcctgagaggcttaccggtaatgctatgtgataacagtgtatcaaattcatattgccacttctgccaaatgaatttaattaagcagaaaaatgggttactgaaatgaaatacacatgtgctctctaaagtcaygcgtgcctttgggtatttggaaaataccctaaatgcatgttattacaggaatcatgttaacagccagaaagcaagctttagatcctcagtatttatttggaaatatgtgagcatcttggaatctcagtgttaatgtgtcagtttatcttcaggagataaacagcattttgtgccaggccgaggcacaatctccc

SEQ ID NO: 694566 - DNA, 878 bp, Homo sapiens
cagccttccaaagtgctgggattacaagtgtgagccaccacacctggccttaagttcagttttttataaccttcctactcttagctaaggttcagctgaatgtgactgtcacaagaattacataagtcaatgaagacacaagcacatagtaataaagggaaaactattttagctaatctataaatgctgacagtaacaggtgacaggcaggtagtgatgactataagcattgaatattttatattarcttaattttttaagaactaatttagagttaaatatatgccatctattttggtcataatacagttcataaatgtgtttattacaattctgtgtaatctggagttggtcaaaggcaccaatgtggttgaatccatttacagttcctaaaatacattcagtcatgggttagtattcattactttcgcagaagaataatttaggaagattatcgattgtatctcaagtgactatatgaacaaaatgtctttaatatttcattaataactgtgaaactgtataaattaatctaggtagagcttatggcataggagcctcctaggcatgcttcacattcttggtgctagaattgccaatgtgcctcagcttcctccaaagcaaatcaacataaatccacgtgctttcttactacaacgcagtgattgaggaggaaaattatttgacttgaccaattctgttattcatcaaaagggaggagtagagttatccagtaacatttctttcaaaatacatcagtctgctgggtttgtaaccatcaagagcactaaagagaaacaccctttgtttaaaagatctcaggaagtccttgtaaataatacagaggtctcaactcagacatgatttcttgaccagtt

SEQ ID NO: 694567 - DNA, 659 bp, Homo sapiens
aataaagtcaattggagtatcccagtttcgatttgacaacttctggtcataagaagaagtgctttcttcagaagatttccaggttttttagctgacatttgtcctaactcttaattatattaattatatatagcaccatctagtgaaataacttagaatacttgggtttttaaaagacaaaattaaagaaatgggtaaaaacataaatcaatgcaagttgtgttttttaatgatgggwtgagcaagaatttgcctatgttcttacctgaaatgtatttttaagtgcttagattatttaaggacgcttttaattcagtcagtcacttgatatagtgatcatctcaaggatggtttggcattacggggagagaaatgtcggagtaaggaaggatggaaaatactgattgtggaggtaataagtggggataaattaagggcctatgaattcctgaaaagaggagaatgtgcaatggtgtgctagagccagctagtaccactggagagagccaactgcgtgtatctttctttctccaacttcttgctcagtgatgtctcattggtagcttcaggtcagctggggtgagattatttacataatggatattggcaaatgctatgaatcacagctacccacccccagagaagcagctgttaaacat

SEQ ID NO: 694568 - DNA, 642 bp, Homo sapiens
tatttgtgtgtgtatatatgtgtgtgattttttaatcagttaagccacatcctcaacctccacttaaaaatgcttaattgtacattgaatctagatgtataaggaaatcacataagtacctaatgtatagggtccttatggggactagtgagaagtaacacttagaccatgaagggccttttacaaacttggctcttgcacctcatggttttcccttttttttttttttttttttttttggagtgacttggagataaagagaaacctttaattatatgaaggatattaagtacgrtggtggtgacatgagattcgtgttgtaaagaatcactcgggcagctttggggaagacaaatggagatagaatgaaataaaggatggagatacacattgggaatccattatgatgctgggcaagacaccgtgggcggaggcagtggcagttggtatagatggtaggcagagatcagagtaagactgagggacagaatctaaaagattaagtcaccgatcagatgtgaggacacgaagagttagaagttaaatgcacattgattcttgcacgtctctgataaaatattagtcttcaaaagggcttgagtttaagtacctttattgtcccagaaaagaaaatctacctat

SEQ ID NO: 694569 - DNA, 671 bp, Homo sapiens
ggccttcctgatgctaagagacatatacaagacacttacgagtcagggatctgatttttaatttgaggcaacaaaaatttcttttttataaaagaaaggtaagaagggtaaccaggcatgcagtggctaatgcttataatctcagcactttgcggggctgaggcaggagaaatgcttgagctcaggagttcaagactagcctgggcaatagcaaaacccatctctacaaaaaaaaattttttttttaaattaaccaagcatgatggtgcatgcttgtggtcccagctgcttgggaggctgaggtaggaggatcacttaggcctgggaggttgaggctgcagtgagccgtgatcaccctccactgcrctccagcatgaataacagagcaaggccctgtcttgaaaaaagaacaaaagggggaaaaagataaatttacatctaggaatggtaaatgattgtaaatgaaactgcgttacatccagctgcatcacagcgatctagtgaaggaaaaaggatgtttcaccccacaccagttacaaaaggatatggaaaaggatatggcacatagacttttactgaaggtggttaaattaatgtaaagagttgaagttaaaagtaaagacaatgtaaagaaacctacagcacgttaactctaaaatctaacaccttta

SEQ ID NO: 694570 - DNA, 671 bp, Homo sapiens
ggccttcctgatgctaagagacatatacaagacacttacgagtcagggatctgatttttaatttgaggcaacaaaaatttcttttttataaaagaaaggtaagaagggtaaccaggcatgcagtggctaatgcttataatctcagcactttgcggggctgaggcaggagaaatgcttgagctcaggagttcaagactagcctgggcaatagcaaaacccatctctacaaaaaaaaattttttttttaaattaaccaagcatgatggtgcatgcttgtggtcccagctgcttgggaggctgaggtaggaggatcacttaggcctgggaggttgaggctgcagtgagccgtgatcaccctccactgcgctccagcatgaataacagagcaagrccctgtcttgaaaaaagaacaaaagggggaaaaagataaatttacatctaggaatggtaaatgattgtaaatgaaactgcgttacatccagctgcatcacagcgatctagtgaaggaaaaaggatgtttcaccccacaccagttacaaaaggatatggaaaaggatatggcacatagacttttactgaaggtggttaaattaatgtaaagagttgaagttaaaagtaaagacaatgtaaagaaacctacagcacgttaactctaaaatctaacaccttta

SEQ ID NO: 694571 - DNA, 1036 bp, Homo sapiens
caattaggaacaattacaaatcaactcaaagcaacagtgtccaaaacacacccatatgtattatacacacacaagaaaccamcacaggactaagcactgtaggaagtcagggagggcagagaatagggtggcctgcgataacctatataaattagctttcactgctactgatggcagtaactgcagtagtatgatcatcaccatcattgcttttgttgcaaatccatgcattggctgatgtgggaaaatctcaacattataaacagtgtagtatatgtgaaaaaaagaaggctgacatgtgcttgagacatcaatgaatcattcccttcatcagacttccctaaatgggctatttccaaagggagatcaataatctctaaatatcaagccacaaggctgagcatattaaacaagcccatagtcaggctttctaagtaggtgagcaagttccattgattatttgaacctactgacaagcattttgatctgttcaagtgtcataaatccatgttctctatcaacccaaaaggcccactgtggttaatacctggaaaccaagtcatacacctaatgaaaatattgtgttttccatccatgacagaacaatgctcaagatgttctcctggtgtgtattctgaactcaggattggatactgcctccttccagcgctggcttctttagtgctgtgaattaacacagttatcaaagacactgactgtccaaattagtatttctcaaacttttcttgaatgtaacccacagtgagttatatatttcagatagtgacactatatacacacatacacacatactcacacatgtcatgagtgaatatttgcccttaccacagaggaagcactataatactttttattctattttaccacctcattttaaaatgttggtcctgacctactaacaaacactttgacgatcattgcggtaaactacagggtgaaatatcaacacctgagttagttctgcacctcaggtctacctcttataagatgccgaagtttgactccatgttcctaa

SEQ ID NO: 694572 - DNA, 602 bp, Homo sapiens
tttttgtccagagtctattttgtatactgtgtaattaaggctgtaccatttcctcaaaatatttgtcagttattcctacataatacactgaattacataccattgttttctccaataatttaatattcccttcctttcatgtacaaaattatctttggggggtattttttagcctaccacacaatgctaaaaacaatttaattatttttttcattattattatttccaaatatattttgactacttttatgcatttttctagtagatgaatttggcattaatacttcttttttttggttaacatttgcttagcaaatcttgaaccatccttatgtttcgttaacctgataagttagtttttatttttatttttatgattaatttttacttttagaatactcacaagaagagacataagtggctttctttcaaaaattgatattctattgcagcaatgagaaaaatgtcttccaatttttagatattactaatttttattttcaacattttgataaacatacatgtacataaaaacatatttacaaataattattaatgttttatatttaacgtatggctgttatcttrtatgttaaaaataa

SEQ ID NO: 694573 - DNA, 1251 bp, Homo sapiens
gtgaaacagaaaagaaagcaaaaaatctcaagtggtgaatccacaaaaaaaattaaggtagcacaaatcaaaaatgagaaaccaagtggagactaggggccctgtggaaataacattatgatgacaaattcttctgtgtctaaacctttgtggatttctggctaggattatttctaatagcaatactttgtgttctcattcctttctccttttcatctactcaaaaatagtacatcaaattattaagcaaagaataaagttaaaaatatgttgttttttaaatctaataaacaagctatttgacaattcaggaacatgaagttgaccattatcaatgtaattacattaaccttgtgccaactgagtctcctcctccttccctaatttctctcttcatagcaatcagagctttccctagtatttttttagtgtgtgacctacatctgagtttcycaatttgctttggtggagggaatcaaaaagtcagtttctacatccaataaaatctaccgctgagattttggattgatataaaactgagaggaagaaaaaagtggaggtggttttgtggctgccttggagaggttcaattaatatcttggcagagattcccagctatcctggaagttttccctaccttgggagtcttggtaaaatgctatacaggtaattcccctcagaggctggactggagaggtgatttaagccaactgggagtcaactacgaaccttacattggagaataaagtcaaacagctataaatatataaggtctccaccccagatgaatcaaagtcatcccacccctcttaagtgtcttcataataattctgtgatgtggtggtttagagtacaggctgaatgacagaagatatattctcatctcagcccttatacatacttgcacaatgtataataaccaaattacttaatttacctgagtcttgcttttctatctaccaaatcgggaaaataatacctacttcatagggttgtgagaataaaatgatgtaagaattaaacaaaataatgtacgtacgagtttgccacagcagttagcatctagcagatcttcaatacaacctaaaatgcaatctattttatccttttccattcttctgaatgataaaagtcatcaaataaatgataatgatgataaatatgatcattttggactggatgtgtatgtctccccaaaatcaacattttgaagccctaaccccaagtataactgtatttacagatggggcc

SEQ ID NO: 694574 - DNA, 1251 bp, Homo sapiens
gtgaaacagaaaagaaagcaaaaaatctcaagtggtgaatccacaaaaaaaattaaggtagcacaaatcaaaaatgagaaaccaagtggagactaggggccctgtggaaataacattatgatgacaaattcttctgtgtctaaacctttgtggatttctggctaggattatttctaatagcaatactttgtgttctcattcctttctccttttcatctactcaaaaatagtacatcaaattattaagcaaagaataaagttaaaaatatgttgttttttaaatctaataaacaagctatttgacaattcaggaacatgaagttgaccattatcaatgtaattacattaaccttgtgccaactgagtctcctcctccttccctaatttctctcttcatagcaatcagagctttccctagtatttttttagtgtgtgacctacatctgagtttcccaatttgytttggtggagggaatcaaaaagtcagtttctacatccaataaaatctaccgctgagattttggattgatataaaactgagaggaagaaaaaagtggaggtggttttgtggctgccttggagaggttcaattaatatcttggcagagattcccagctatcctggaagttttccctaccttgggagtcttggtaaaatgctatacaggtaattcccctcagaggctggactggagaggtgatttaagccaactgggagtcaactacgaaccttacattggagaataaagtcaaacagctataaatatataaggtctccaccccagatgaatcaaagtcatcccacccctcttaagtgtcttcataataattctgtgatgtggtggtttagagtacaggctgaatgacagaagatatattctcatctcagcccttatacatacttgcacaatgtataataaccaaattacttaatttacctgagtcttgcttttctatctaccaaatcgggaaaataatacctacttcatagggttgtgagaataaaatgatgtaagaattaaacaaaataatgtacgtacgagtttgccacagcagttagcatctagcagatcttcaatacaacctaaaatgcaatctattttatccttttccattcttctgaatgataaaagtcatcaaataaatgataatgatgataaatatgatcattttggactggatgtgtatgtctccccaaaatcaacattttgaagccctaaccccaagtataactgtatttacagatggggcc

SEQ ID NO: 694575 - DNA, 613 bp, Homo sapiens
caggatggtctcaatctcctaaccttgtgatcctcccgcctcagcctcccaaagtgctgggattacaggtgtgagccaacttggctatttttatctcctctacacataatatttcctcacgatactaaaataactcttctatctctgcctggctaattcctatgctggcattatatcttccataaactcctctatactagtcagagttcttcagagtaataaaaccaataatatatctatatatctatatctgtgtatagatagatttattwtggaaattggttcatatgattatagaggctgagaaatcccacaagctgaaactgcaagctggagaaccagaaaagccattggaataattcagtgtgagtctaaagtcctttggaccaggagatgggggtatgagtggtaatagtgtaagtcctagagtccaaagacctgagaaccaggagcttcaatgtccaaggacagaagaagatggatatgctagcttaagaagagagagagaaaattcttccttcctccacctttttgttccatttgggcccacaacagaatgaaattatgcccacccacatggggggcataatttctttacttagtttactaagta

SEQ ID NO: 694576 - DNA, 657 bp, Homo sapiens
tgttatcaaatgcaagctgaaaaaatccaaagttgtaaacgtaatgtaaatgtatagttaggaaaatctacttggtgatttcaggcatgtaaataactcagtcattcttttggttaaaagccagtttgctaaattctatgactatttttggaaagtatatattttaaagtctattttaacaattgtaatgtttttctcccctttatactgaggtcttttccctcttatagattctgccctgtttcattatgaagagatttttgtaggagggattttctaaaagaatttttctcaatgcatatcaaagagcatgctgtttttgtgatgatctcatggtatatcacaacaaaagtggaaattttctatgatttaaatttatcattttccattcctgtgatgtgctcctttttgtaatatctatttactttttttacgggcaccccttactggctacagcaagttctasttgacatcattcaaacgtagacagtgttggaatcacccaggataaactacaatgctttccatgtagcttgtcctccttttcacactgactccaggcacagaagtaggcatctcatggtgcaaagcacactagtctaagagtcaaaaaaagacatatttctgtcactttctagttgttcttccttgggtaag

SEQ ID NO: 694577 - DNA, 631 bp, Homo sapiens
cttcttcaatacaagaagcttacttttcatttacctctaaattcacgatcagtgaccacagggttgagatggaattgctgagagtataagctgctgcctggggttggaagtaagcaatcttttcttctttctgggaatactaatgcttgctagaactctgccaaaacaggggttctcagcccttgctgcttcctagaaccctttcggcttttaaaacctactgatgcttggaccctgacaccacagcttaacaaatcagaatctctagaaatagggcctgagcattgttatgtttataaaagcttcccacagaattctaatgtgctgctggggaagagaccacacatatataaggctttgagatggatggatgttacatatagtcagcttattattgttgacatggtggtgaaccaacagggttgagtggaagaaaaatgagggtaagtttccatgatgaagtgataactactggagaaggctctatctatagatataagaagatggagtcaatagtcaggagactgtaagtcctggggatgacttcataaccagcaagctgtatgagttcaggcaartcatctaagtccccggggtacagaactgagggagaaaggagggtggagggccc

SEQ ID NO: 694578 - DNA, 1346 bp, Homo sapiens
ctaaagatacaaaaatacagggaaaagacataaattttttttctggaaggaggtcatggaaagcttcacagaggaagtgatgactgagcaggattctgaaggctaaacaggagttcaaaaaccagatatggcaggatgaagcttttctaggaaagaaacacccccatgcaaatgttctcgagcatgaaacagccaggaactaaacagatttagctctgctttctttctcctaaaatagaaacttgcaaggatcttgactttgactggaaggaataagcatttatgaaaaacattctaagtgacaaaaattgagctagtattttgttttgtctttaatggaggaaatgagaaaactgaggctccggtaagtaagaaccctcttagatattcctggaatttacaccctgatgggtggttagttactttatctacatagtattctcatgtatatatgctattatcgtattctatcagttgttctcattacatagaaaggattaarataaattggtggtgttcaaggttttggatttacctactagcgcacttcctcattgccacaggagttaaatattaactcatgctgatacctgtccaacatgtatgtacatgtgtgggtgggtgggtttaggcgcaggtggaaatgaagtattgcaaaaatatctgcagtttggtgagcaattaatcaggaaataatgagtgctatactggaataatcaccttaaaagtaaaaccttcaatgaaagcaaatctttcagaagttcaatatgggaattaaattactttaaaattgtagaatgttctaaacttttgcatttattgttttgaaaatatttttcaatggtaggcattttcaatcatttattttattacaaggggttaattctgggattattttttgctacttctcaagttaactatgaaaaccataattctttttttatcttttggttgggtttaattatgacaatgtcagtaatatggtttagttgtgtccccacccaaatctcatcttgaatttccacatgttatgggaagaacttggtgggaggtaattgaatcatgggggcaggtctttcccatgctattcctgtgcttgtgaataggtctcacgagatctcacggttttaagaaggggagtttccctgcacaagctctcttctcttgtctgctgccacgtcagacttgcctttcaccttctgccatgattgtgaggcttccctagccatgtggaactgtaagtgcattaaacctctttcttttgtaaattgtccagtctcaggtatgtctttatcagcggcatgaaaacagacttatacaatcagtgaaggcataactgggaagtt

SEQ ID NO: 694579 - DNA, 2611 bp, Homo sapiens
tgcatcttttccttgtattatttgaccatctgatagatagcacacctatcagggaatggtcttataaggtattttcacccaaagcacaccttaaaaactgatgaattacttatcttgggaattaataaaaataaattggaagatccatattttaaatagcaaagaatctttttcatcactaaaaagtgatacaatggaaagaattaaattttattataagcaccaaagtcaactgctagggaactcactgagtgtagaacaaggagtatcagactaactgagatggcagaattagctaaggcctataaagtaaggggagctgctcagctgactaccttgcatagaagggagagtgccagcagtccaaggacattcaagaagattttgtctatccagggtacccttgatatcctagacatctgaccctaagggaagaaggaagaggaagtgtagagtgcaggtaaacagccaaagcaggtaatacttaggtaaggacagccattccatgttctctctggattgaaccagggcccctctaagtgagctggggtacagaaaattagtccagcccaataggactagagagaggggactgtcaaggaccagggcaattagaacagagctcaggggagtactgcagtcctgatgggaaacagagtgcagatctgaagctgcagtgcattccaacatgtaggatacattaagtagagattggagaaaggttcaattcagcaggcacactcaggacataccatgtctaaagcaacttaagctaagctgagcctttcatattataaaacattcacaggcttttccaaatgccccttgtcacaccaagtctcaatgtattgaactatttactataagttactattaaacatttaaaattaatttcatagaccatcaacaagtaggacatttgtagctatctttactaaatgatagaatgccccagagggctggtggcagctttaaagatttttcatagatggtttcagttggatgtaagttctgttttgcaaccaaaagaatgtaagaaatttgacccatatattgcaaaccttctgataagtgacatgaacctcatgagaggattcagccaacaatgcctcattgactaggcaagaaattttgtaacttctcaatgaatactcagggctttatgttaggagctggaattcagtgaacacaaataaaatcattagcataaataaatgcatcaccctaaagggagatgttggtgatgcttctgcattcacattctgcactggcatcagcagcctttgtttattctttgccccaggagtcctgtaaatcttctgaaggttttcagcctcactagaaacttagattatttgtgagaatctcaacaaagtgactcctaaattattagctcaaaattaaaagtatttagtctgatctagtaaaaaaaaaaatctaatatatgcctgttgtggagatttcaggccattatcttatgtaaaaagatgaacacaatactaactagagctttatttatcagaacgagtgattgccaaaattaagccagggatgctatgcatgaaaakctgtaagagtgattatgctaaagtattaaaaataaaattataaagacaagctatacgcagcagtgaaattatttttaagcaaaaagaaataatcatttcatctctgactctaccagaataaagagtgaaattttttaataagtctaacccggtccacaacacaaagccagtagaactggacaaagtcaactttgcattacaactagtgagttcttaatgaaatgggacaaacctaaatctaaactattttcaatttgggataataaatgaatttccactaagtttcctaaaaatgtgcatgtgtgtactagcgttgtttctacggtaaaatatctcttttgtaggttcacttctttccataaaaagacacccagattacttagctaagcaatgtttgaccccgggatttaggaggaataattgttgtgatagaattttttagttttcatccaaatatgtcatattatgtggactacataatgtcctcactctcaaacagagatacaagataaaaattatttccacatccctcagtcactcagaatgtactcttattataccgtagttactcacatgagtgcttttctctcctattaatgctaaattccttgaggagggcctataccatttcttatactaaataaggtagagcaattcagaggtaaatgagtcaaattgtttgacttcaatcaattagggaagaaaagacataaacaaaaggagaagcaacttagaaggttacaaatacgccaaagtttagcaacagatgaagtactgtccaagttcaaggaaagaatgatcaccttcaactcattacaatggaagaaagtttaattaataaggtaatatttgtgcctattcttaaagaatagtaagaattcagaatgtgtgtccagggaggagaaatggacatcctaagtgaaggagcagaatgaattgcttggaggtaatactttatattacctataaagtatacctattttgtaatataatgtattacctccaagtaattcattctgctccttataatataaagtatatag

SEQ ID NO: 694580 - DNA, 2611 bp, Homo sapiens
tgcatcttttccttgtattatttgaccatctgatagatagcacacctatcagggaatggtcttataaggtattttcacccaaagcacaccttaaaaactgatgaattacttatcttgggaattaataaaaataaattggaagatccatattttaaatagcaaagaatctttttcatcactaaaaagtgatacaatggaaagaattaaattttattataagcaccaaagtcaactgctagggaactcactgagtgtagaacaaggagtatcagactaactgagatggcagaattagctaaggcctataaagtaaggggagctgctcagctgactaccttgcatagaagggagagtgccagcagtccaaggacattcaagaagattttgtctatccagggtacccttgatatcctagacatctgaccctaagggaagaaggaagaggaagtgtagagtgcaggtaaacagccaaagcaggtaatacttaggtaaggacagccattccatgttctctctggattgaaccagggcccctctaagtgagctggggtacagaaaattagtccagcccaataggactagagagaggggactgtcaaggaccagggcaattagaacagagctcaggggagtactgcagtcctgatgggaaacagagtgcagatctgaagctgcagtgcattccaacatgtaggatacattaagtagagattggagaaaggttcaattcagcaggcacactcaggacataccatgtctaaagcaacttaagctaagctgagcctttcatattataaaacattcacaggcttttccaaatgccccttgtcacaccaagtctcaatgtattgaactatttactataagttactattaaacatttaaaattaatttcatagaccatcaacaagtaggacatttgtagctatctttactaaatgatagaatgccccagagggctggtggcagctttaaagatttttcatagatggtttcagttggatgtaagttctgttttgcaaccaaaagaatgtaagaaatttgacccatatattgcaaaccttctgataagtgacatgaacctcatgagaggattcagccaacaatgcctcattgactaggcaagaaattttgtaacttctcaatgaatactcagggctttatgttaggagctggaattcagtgaacacaaataaaatcattagcataaataaatgcatcaccctaaagggagatgttggtgatgcttctgcattcacattctgcactggcatcagcagcctttgtttattctttgccccaggagtcctgtaaatcttctgaaggttttcagcctcactagaaacttagattatttgtgagaatctcaacaaagtgactcctaaattattagctcaaaattaaaagtatttagtctgatctagtaaaaaaaaaaatctaatatatgcctgttgtggagatttcaggccattatcttatgtaaaaagatgaacacaatactaactagagctttatttatcagaacgagtgattgccaaaattaagccagggatgctatgcatgaaaatctstaagagtgattatgctaaagtattaaaaataaaattataaagacaagctatacgcagcagtgaaattatttttaagcaaaaagaaataatcatttcatctctgactctaccagaataaagagtgaaattttttaataagtctaacccggtccacaacacaaagccagtagaactggacaaagtcaactttgcattacaactagtgagttcttaatgaaatgggacaaacctaaatctaaactattttcaatttgggataataaatgaatttccactaagtttcctaaaaatgtgcatgtgtgtactagcgttgtttctacggtaaaatatctcttttgtaggttcacttctttccataaaaagacacccagattacttagctaagcaatgtttgaccccgggatttaggaggaataattgttgtgatagaattttttagttttcatccaaatatgtcatattatgtggactacataatgtcctcactctcaaacagagatacaagataaaaattatttccacatccctcagtcactcagaatgtactcttattataccgtagttactcacatgagtgcttttctctcctattaatgctaaattccttgaggagggcctataccatttcttatactaaataaggtagagcaattcagaggtaaatgagtcaaattgtttgacttcaatcaattagggaagaaaagacataaacaaaaggagaagcaacttagaaggttacaaatacgccaaagtttagcaacagatgaagtactgtccaagttcaaggaaagaatgatcaccttcaactcattacaatggaagaaagtttaattaataaggtaatatttgtgcctattcttaaagaatagtaagaattcagaatgtgtgtccagggaggagaaatggacatcctaagtgaaggagcagaatgaattgcttggaggtaatactttatattacctataaagtatacctattttgtaatataatgtattacctccaagtaattcattctgctccttataatataaagtatatag

SEQ ID NO: 694581 - DNA, 2611 bp, Homo sapiens
tgcatcttttccttgtattatttgaccatctgatagatagcacacctatcagggaatggtcttataaggtattttcacccaaagcacaccttaaaaactgatgaattacttatcttgggaattaataaaaataaattggaagatccatattttaaatagcaaagaatctttttcatcactaaaaagtgatacaatggaaagaattaaattttattataagcaccaaagtcaactgctagggaactcactgagtgtagaacaaggagtatcagactaactgagatggcagaattagctaaggcctataaagtaaggggagctgctcagctgactaccttgcatagaagggagagtgccagcagtccaaggacattcaagaagattttgtctatccagggtacccttgatatcctagacatctgaccctaagggaagaaggaagaggaagtgtagagtgcaggtaaacagccaaagcaggtaatacttaggtaaggacagccattccatgttctctctggattgaaccagggcccctctaagtgagctggggtacagaaaattagtccagcccaataggactagagagaggggactgtcaaggaccagggcaattagaacagagctcaggggagtactgcagtcctgatgggaaacagagtgcagatctgaagctgcagtgcattccaacatgtaggatacattaagtagagattggagaaaggttcaattcagcaggcacactcaggacataccatgtctaaagcaacttaagctaagctgagcctttcatattataaaacattcacaggcttttccaaatgccccttgtcacaccaagtctcaatgtattgaactatttactataagttactattaaacatttaaaattaatttcatagaccatcaacaagtaggacatttgtagctatctttactaaatgatagaatgccccagagggctggtggcagctttaaagatttttcatagatggtttcagttggatgtaagttctgttttgcaaccaaaagaatgtaagaaatttgacccatatattgcaaaccttctgataagtgacatgaacctcatgagaggattcagccaacaatgcctcattgactaggcaagaaattttgtaacttctcaatgaatactcagggctttatgttaggagctggaattcagtgaacacaaataaaatcattagcataaataaatgcatcaccctaaagggagatgttggtgatgcttctgcattcacattctgcactggcatcagcagcctttgtttattctttgccccaggagtcctgtaaatcttctgaaggttttcagcctcactagaaacttagattatttgtgagaatctcaacaaagtgactcctaaattattagctcaaaattaaaagtatttagtctgatctagtaaaaaaaaaaatctaatatatgcctgttgtggagatttcaggccattatcttatgtaaaaagatgaacacaatactaactagagctttatttatcagaacgagtgattgccaaaattaagccagggatgctatgcatgaaaatctgtaagagtgattatgctaaagtattaaaaataaaattataaagacaagctatacgcagcagtgaaattatttttaagcaaaaagaaataatcatttcatctctgactctaccagaataaagagtgaaattttttaataagtctaacccrgtccacaacacaaagccagtagaactggacaaagtcaactttgcattacaactagtgagttcttaatgaaatgggacaaacctaaatctaaactattttcaatttgggataataaatgaatttccactaagtttcctaaaaatgtgcatgtgtgtactagcgttgtttctacggtaaaatatctcttttgtaggttcacttctttccataaaaagacacccagattacttagctaagcaatgtttgaccccgggatttaggaggaataattgttgtgatagaattttttagttttcatccaaatatgtcatattatgtggactacataatgtcctcactctcaaacagagatacaagataaaaattatttccacatccctcagtcactcagaatgtactcttattataccgtagttactcacatgagtgcttttctctcctattaatgctaaattccttgaggagggcctataccatttcttatactaaataaggtagagcaattcagaggtaaatgagtcaaattgtttgacttcaatcaattagggaagaaaagacataaacaaaaggagaagcaacttagaaggttacaaatacgccaaagtttagcaacagatgaagtactgtccaagttcaaggaaagaatgatcaccttcaactcattacaatggaagaaagtttaattaataaggtaatatttgtgcctattcttaaagaatagtaagaattcagaatgtgtgtccagggaggagaaatggacatcctaagtgaaggagcagaatgaattgcttggaggtaatactttatattacctataaagtatacctattttgtaatataatgtattacctccaagtaattcattctgctccttataatataaagtatatag

SEQ ID NO: 694582 - DNA, 2611 bp, Homo sapiens
tgcatcttttccttgtattatttgaccatctgatagatagcacacctatcagggaatggtcttataaggtattttcacccaaagcacaccttaaaaactgatgaattacttatcttgggaattaataaaaataaattggaagatccatattttaaatagcaaagaatctttttcatcactaaaaagtgatacaatggaaagaattaaattttattataagcaccaaagtcaactgctagggaactcactgagtgtagaacaaggagtatcagactaactgagatggcagaattagctaaggcctataaagtaaggggagctgctcagctgactaccttgcatagaagggagagtgccagcagtccaaggacattcaagaagattttgtctatccagggtacccttgatatcctagacatctgaccctaagggaagaaggaagaggaagtgtagagtgcaggtaaacagccaaagcaggtaatacttaggtaaggacagccattccatgttctctctggattgaaccagggcccctctaagtgagctggggtacagaaaattagtccagcccaataggactagagagaggggactgtcaaggaccagggcaattagaacagagctcaggggagtactgcagtcctgatgggaaacagagtgcagatctgaagctgcagtgcattccaacatgtaggatacattaagtagagattggagaaaggttcaattcagcaggcacactcaggacataccatgtctaaagcaacttaagctaagctgagcctttcatattataaaacattcacaggcttttccaaatgccccttgtcacaccaagtctcaatgtattgaactatttactataagttactattaaacatttaaaattaatttcatagaccatcaacaagtaggacatttgtagctatctttactaaatgatagaatgccccagagggctggtggcagctttaaagatttttcatagatggtttcagttggatgtaagttctgttttgcaaccaaaagaatgtaagaaatttgacccatatattgcaaaccttctgataagtgacatgaacctcatgagaggattcagccaacaatgcctcattgactaggcaagaaattttgtaacttctcaatgaatactcagggctttatgttaggagctggaattcagtgaacacaaataaaatcattagcataaataaatgcatcaccctaaagggagatgttggtgatgcttctgcattcacattctgcactggcatcagcagcctttgtttattctttgccccaggagtcctgtaaatcttctgaaggttttcagcctcactagaaacttagattatttgtgagaatctcaacaaagtgactcctaaattattagctcaaaattaaaagtatttagtctgatctagtaaaaaaaaaaatctaatatatgcctgttgtggagatttcaggccattatcttatgtaaaaagatgaacacaatactaactagagctttatttatcagaacgagtgattgccaaaattaagccagggatgctatgcatgaaaatctgtaagagtgattatgctaaagtattaaaaataaaattataaagacaagctatacgcagcagtgaaattatttttaagcaaaaagaaataatcatttcatctctgactctaccagaataaagagtgaaattttttaataagtctaacccggtccacaacacaaagccagyagaactggacaaagtcaactttgcattacaactagtgagttcttaatgaaatgggacaaacctaaatctaaactattttcaatttgggataataaatgaatttccactaagtttcctaaaaatgtgcatgtgtgtactagcgttgtttctacggtaaaatatctcttttgtaggttcacttctttccataaaaagacacccagattacttagctaagcaatgtttgaccccgggatttaggaggaataattgttgtgatagaattttttagttttcatccaaatatgtcatattatgtggactacataatgtcctcactctcaaacagagatacaagataaaaattatttccacatccctcagtcactcagaatgtactcttattataccgtagttactcacatgagtgcttttctctcctattaatgctaaattccttgaggagggcctataccatttcttatactaaataaggtagagcaattcagaggtaaatgagtcaaattgtttgacttcaatcaattagggaagaaaagacataaacaaaaggagaagcaacttagaaggttacaaatacgccaaagtttagcaacagatgaagtactgtccaagttcaaggaaagaatgatcaccttcaactcattacaatggaagaaagtttaattaataaggtaatatttgtgcctattcttaaagaatagtaagaattcagaatgtgtgtccagggaggagaaatggacatcctaagtgaaggagcagaatgaattgcttggaggtaatactttatattacctataaagtatacctattttgtaatataatgtattacctccaagtaattcattctgctccttataatataaagtatatag

SEQ ID NO: 694583 - DNA, 668 bp, Homo sapiens
aggcctccagagaccagtggaggtctgaacctcattatggttctctcggtaggccagcatcaataaaggcaggcagaccagggaactgggttgggggatggggcaggcaggcagcgggtgggcaatggtggggagggggggcagcttgcaggctttcaaatccctggatttatttcacagtgaatcataactgaactctttagtgcccagggcccacagagggaagggtgggaatttgcccagggggtaggaaaaaggtcttaagtgggaggctggtccaggccaagaagatctctgatactggggtgagagggaggtctcctgtgtctgttttgtgtgtgagtcaaactcacctgctttcgggtatgtgggagttcgggtgggaaaaggaaggagagctggtagtattggaagagctgccaatcacaagtccagcttgtcgttccagttgtgctgcctgtgtggaccagccrccttcctctataggcctcagtttccctatctgtacaatgaggaacctgtccttgattatctctagctgccttgagattctgacatgtgggctccctgcatgcctgggtatatgagcatatcagggtgcactggggcactcgggggaatctgtgcaggaattctggttcaggaatggtggaggaaacagatgaaag

SEQ ID NO: 694584 - DNA, 1970 bp, Homo sapiens
tgaattcacgtataagtagtgctagagtaatgttgagatcctgacaaatgacattattgcttggtggctggaacatgggaagaggtgttggctcaccattcatctcttgggcagtatttccagggtcaaggcacggaggataagctaatcaatgaaatcagggtaaatgagctttcacrgggacactgaaaagaatgagaagccccatgtgaatggtgagttcaatcttgtctctttgtctctctccctggagaattttagagctgggaaaagttcgggaacagctggacaacagaaattctgattccctcagcctcatcagaaatcgggcactttatagagacattgtcagtgtggttattaacagaacaaagcaaagcatacacaatgtgagacagatagacctgaattagaatcttagccttagctattaatagcaatgtgtctaggcaaatcacttaacctaagtttcttcatcttaaataaggataatacctcactggactgtgacgaggattatagaatgagcagaaaacactgagcatatgcctgaacgccagtcaagtgctcaagaaaccactgttgctattatttggctacttatattattgtaattattaccattattaatagaactagggaaagataagggtacatgttgctcccaaatggtaaatctcgaataaagtatgacctcctatctaaactacagatggaagaattcatacaaatataaactgtggtgttactttacaaatgcagaagagtttacataccattctcaaataagctttttgttgttctattttttttatatgagttgctatgaagtggggcctgtgaaagaatcctcaagggttaaaatgtactttattttgcacgagtagagtaatacacaccttttgagttacaacccataatgcatttcagtttaaaagataacaagtcattttcatgcatgactgcacttcgttaaggagcgaaaatgggctgttactaaaatgtcaacacaattgtccctcttgaagcttagtttatcttgaagtatttttacactttcagcacttctttttgtttgtttctccaagagcataaagatccagaattttcaggagtcaagaaagactttcccttcaggcattctgaagaaaattaccaatattgggggtgactcaagttttggcccccaatagtgaaaatacaaggtctggtaccttctgcggtctttttgcatttcaccttggagcaatttaattgtgttgtccttcaatgaaaaatgctctctgaacctaaattcacaaaccagaaagagatttctagcaaggaaaatgccctgtcagggtcacttggaaggctgcgtttggtattgaggttaattggagaacgagagagaggcctcagctaatcttagccttgctgccaatgagtagaaggagctggttttcttttttccttcttcttaatgtctgatcatttccccccttcccctgcctctgcatcaggaagggcatcattccacatcctacctgtattaggaaaaagtagcttcttaagggttggcacagtcatctctctaatctttcccttctccttgtggcatgaaaacttttaatattgccaatccctaaaaatctattatttctgcctgtcttttttttccttcccactttgcagtgtagactatcattatccagcagccctgataagaggataatgaaacaatcccttctcaactggatcgggtggctgtcagactaaaatgacaccacccgtacatccttgacatgctaccacaagctaattgacagcaaacattggcaactgtctcccatgcaccaagacaaaggaaacatattcatgtcacctgatgggagagctacctggcaacggataaacaaatgtgttagggagatgttctattaaggtaagtgagggcacggctctgtagaacatgcctattaactttgagc

SEQ ID NO: 694585 - DNA, 610 bp, Homo sapiens
aaaggtcagtgaagaatgtttgttaaattcttgatatgttaataagtacttctttgtttaaggtggtgctgaggtagttatatggttaagaagtgtttagtaaagtttttctactttaagttctggggtacatgtgcagaaygtgcaggtttgttacatatgtgccatggtggtttgctgcacccatcaacccatcatctaggttttaagccctgcatgcattaggtatttgtcttaatgctctccctccccataaaggattttttaattggaagttttagatagcggaaagtacacacaaatggcaatctgttgctcctacttttgacacccaaagtattttaagctccttctttcagtgctccgcagaataatgattcttcagaaagaaggcagcttctagacagaatacaagtcacacaaggtgctcaggttagggagagagggtgagctgtggcactgtgcagacagtcttttgtggaaaccacaaaagataaagacccaagtctgaattactgacagtctgaactcagagtaaatgctgcagcaaaaattcatgataataagggcccagaagtgggtgtccatgatgatagctcaatcaaggcag

SEQ ID NO: 694586 - DNA, 610 bp, Homo sapiens
aaaggtcagtgaagaatgtttgttaaattcttgatatgttaataagtacttctttgtttaaggtggtgctgaggtagttatatggttaagaagtgtttagtaaagtttttctactttaagttctggggtacatgtgcagaacgtgcaggtttgttacatatgtgccatggtggtttgctgcacccatcaacccatcatctaggttttaagcccygcatgcattaggtatttgtcttaatgctctccctccccataaaggattttttaattggaagttttagatagcggaaagtacacacaaatggcaatctgttgctcctacttttgacacccaaagtattttaagctccttctttcagtgctccgcagaataatgattcttcagaaagaaggcagcttctagacagaatacaagtcacacaaggtgctcaggttagggagagagggtgagctgtggcactgtgcagacagtcttttgtggaaaccacaaaagataaagacccaagtctgaattactgacagtctgaactcagagtaaatgctgcagcaaaaattcatgataataagggcccagaagtgggtgtccatgatgatagctcaatcaaggcag

SEQ ID NO: 694587 - DNA, 610 bp, Homo sapiens
aaaggtcagtgaagaatgtttgttaaattcttgatatgttaataagtacttctttgtttaaggtggtgctgaggtagttatatggttaagaagtgtttagtaaagtttttctactttaagttctggggtacatgtgcagaacgtgcaggtttgttacatatgtgccatggtggtttgctgcacccatcaacccatcatctaggttttaagccctgcatgcattaggtatttgtcttaatgctctccctccccataaaggattttttaattggaagttttagatagcggaaagtacacacaaatggcaatctgttgctcctacttttgacacccaaagtattttaagctccttctttcagtgctccgcagaataatgattcttcagaaagaaggcagcttctagacagaatacaagtcacacaaggtgctcaggttagggagagagggtgagctgtggcactgtgcagacagtcttttgtggaaaccacaaaagatraagacccaagtctgaattactgacagtctgaactcagagtaaatgctgcagcaaaaattcatgataataagggcccagaagtgggtgtccatgatgatagctcaatcaaggcag

SEQ ID NO: 694588 - DNA, 661 bp, Homo sapiens
ttgtgtgcttagattataaggggtaaatgaggagtagaagatgttccttgccccacttggggattatgataagactggcacttagagagccttattctgtgccagacacagcatttgacgtgcgctagtttatgtaatctcacagtaacaccataaaaattataggtattttaatttattctactgtaagttgagaagttaggatttgaaccatgtcagttcaaagtcagagctctttaccaccatgcaattatgttgttcgagaagtgcacacaactggagaacaatacagggggattcatggttaagtgytaaatcatatttataatacaagcatttatgatgagtccagaataaatccctatcaatctgcaaccctgggtcagctgaagtgtgtagatttgcttatgtttaagcaaatattgagcctgcagagcgagtttttgagaaggtggagggtcagaatgagcactcgtaaggtcagggagtggcagctgtgggtaccatcaaagggatagcatcaggtgacctgctgtgagtctcaggccactgcgtgcccagaatggtcctaattgttggggaaaacacagaaagataattacacatatttttgccctttgagaattcagtctggttggatttacctgatcaattaatcaac

SEQ ID NO: 694589 - DNA, 661 bp, Homo sapiens
ttgtgtgcttagattataaggggtaaatgaggagtagaagatgttccttgccccacttggggattatgataagactggcacttagagagccttattctgtgccagacacagcatttgacgtgcgctagtttatgtaatctcacagtaacaccataaaaattataggtattttaatttattctactgtaagttgagaagttaggatttgaaccatgtcagttcaaagtcagagctctttaccaccatgcaattatgttgttcgagaagtgcacacaactggagaacaatacagggggattcatggttaagtgctaaatcatatttataatacaagcatttatgatgagtccagaataaatccctatcaatctgcaaccctgggtcagctgaagtgtgtagatttgcttatgtttaagcaaatattgagcctgcagagcgagtttttgagaaggtggagggtcagaatgagcactcgtaaggtcagggagtggcagctgtgggtrccatcaaagggatagcatcaggtgacctgctgtgagtctcaggccactgcgtgcccagaatggtcctaattgttggggaaaacacagaaagataattacacatatttttgccctttgagaattcagtctggttggatttacctgatcaattaatcaac

SEQ ID NO: 694590 - DNA, 609 bp, Homo sapiens
ggagtcttgctctgtctgtcgcccaggctgkagtgcagtggcgcgatctcggctcactgcaagctccgcctcccgggttcacgccattctcctgcctcaggctcccaagtagctgggactataggcgcctgccaccacgcccggctaattttttgtatttttagtagagacggggtttcactgtgttagccaggatggtcctgatctcctgacctcgtgatccgcccgcctcggcctcccaaagtgctgggattacaggcgtgagccaccgcgcccggcctcattgttgacttatataatgtctggttaaagaattcaggttgggttaaccaggtgggcagttggtttcttagaatagttcctacccatcagaaagacatgtaggcatttcattaatttccttccagaaggaggtctctgcccatcgccagtctccacattagtgttgctgttttgtatttttattcttcttgaaatatcagctacaatgtgagcctttgttttttggctattgaccatttgtaataatggcagccttttcccatgagaaccaattggagaacactcaagatagtgatgggctatatttttcttcaaacacatctatct

SEQ ID NO: 694591 - DNA, 609 bp, Homo sapiens
ggagtcttgctctgtctgtcgcccaggctgtagtgcagtggcgcgatctcggctcactgcaagctccgcctcccgggttcacgccattctcctgcctcagsctcccaagtagctgggactataggcgcctgccaccacgcccggctaattttttgtatttttagtagagacggggtttcactgtgttagccaggatggtcctgatctcctgacctcgtgatccgcccgcctcggcctcccaaagtgctgggattacaggcgtgagccaccgcgcccggcctcattgttgacttatataatgtctggttaaagaattcaggttgggttaaccaggtgggcagttggtttcttagaatagttcctacccatcagaaagacatgtaggcatttcattaatttccttccagaaggaggtctctgcccatcgccagtctccacattagtgttgctgttttgtatttttattcttcttgaaatatcagctacaatgtgagcctttgttttttggctattgaccatttgtaataatggcagccttttcccatgagaaccaattggagaacactcaagatagtgatgggctatatttttcttcaaacacatctatct

SEQ ID NO: 694592 - DNA, 1725 bp, Homo sapiens
ttctcactctagcaggactgaattagttaccacaagagcaggttgttataaagtgaggttgccttgttttgggtctctgcacacaacatttgcctatctgcttttccaccatgttgtgacacagcacatggtgctcacctgaagccaagcagatgttggtgccatgctcttggactttccagccaccagaaccatgagccaaataaacctcctcttttctttataaattattcagtttcaggtattctgttatagcaacattaaatggactgagtacacaagaatttgaaggaaggcactaaataaaggatcaagaatttactactctatatggacaggcagaagtattatgactttcactcattcaattgtttgacatacatttattgtttactctgtataaaataatacaatacttagcactttgggaaacaaaggtaaattagggatgattctcgctctcaaaaaataattgtttatatctcagtgggtatgggatttttagctttcagcagaaagccctttgtaaagcagtttaaatgtggaaatgcagatgtagtcataacactcgttaataatcacctgatgaatgccaatctgaagaatataataaaactctgctaagaatagcaaaaactactggtaggttctactccttagccaaaaccaccatacacttaagttagagatgactcagtgaaaataagtggtcatcttcaccactcttacaaaaaaaaaaaatctgacttagagccaattaaagtgcagaatctatttgctatataaggaagagagacaaacagacaaatcatgggttacatattcaaaacattgtgttttatagcttgaagaataaaagacaggatggagtcttaataaatactctcaaactacataaagcatattttgtgggagatggcaagtgaacattatccttttctaccaaatataggatcaaagagaatgagcttaagccctagagggaaatgtctcactgttctattagattggacatactatctcatgaaggactgtacttacctcagaaataaagaaatcactatttaaacatcttaaatattaataaaagggcagataacctcctcctctttgaaaggcttaacagaaggacagtgtccctgtggctacagccaggcagagtgttgtgttagtccttgggacagaacacaggcaaagaggagaggaccacatgggcaattacaggtgtatatctgtcattaaccaggtgaccacaggcatgtcactgggcctggtaaagccttctctttcataaaaatactgatttttaattttggttttaagtagcctagtttcaaatcaaagtcttatgcagaccacctctttccaaaccactacacagaaggattaaagtgkgtggttgtggtttcaaagtaagagttccagagccccacttgtggggccttccccttatggcagtcttgaggcatctctgtccaatcccaggttcttacagtaaattattcctgaaacttcttgcaagtgaacatatctataattacattcaagtataaattgttcatcaatgatttcaggaaggatttcaacttccttatttttctctgcaagacatatgccaagtgagtatcctacaaagaatccaagcttcagaagataataatgacagaatcatctttgaactggatggaacaggaatataaattgttgggggaaacctagattcct

SEQ ID NO: 694593 - DNA, 974 bp, Homo sapiens
tgaacagagtatcacatttttttccccagtacctgcccagtgggtgacctaacacaatcatttagattgaaaggtggaagcgaaagaagataaaagattgagaagcaagaggcagagggacagaggggaacaaaacacaaataggcaaactgcaaagcaaatggaaaatgcattatttctaaaagggaaataccaaaagcactggcaggagcaataatggaaacaagagtgaccagatagatgggaaaattatgataggacctaacctaatattcacatgataaaagggtttctcaggctaaaaatgcacacatatgcctatgtatgcagtcactgatttttttcctagttttatttgcttctttctttctcccaatttcctgggaaacaagaaagtttgtgttaactcctgactcaaaccaaaccggastacagtatggtcaagaattagaaacacagacaacactgaagggctgctctcgggataataattgcttgttacgcatttcttccctgcctaatgctaataataaattgacattgattgaaaacatcttggaaacctaattaactttttcttacttaaactgtttactttttgcttttaatttgtcttgagtaaattcccggttggtctcaatatttcattcttgtttagtgacacaagctttgtctgatcatctaattctgcttgtttctattaagagccccttccttctaaataatgacttaagtaggcacatccaagtctcagagagtacactgtcctttttattcttgcacaaagctaaaggttggctagacgacttgatgcaaagtgtcttcatctaatgtacagggggttctctcctgttctttccttatccttcttttgaaatggttcggaggttaacttcatttattagattttaaacttgtggttcaggcttaggcatggtaactcacatctgtaaccccagcactttgggaggcca

SEQ ID NO: 694594 - DNA, 1615 bp, Homo sapiens
tgaactaaaggtrttaatttaaaatgttaaaaactggaatgctatttggcagaatatttcttagaagctaatttatggtatttttgcttttcaaaagtcctgctctgttttactaagtcagtaaggctactgaatgcttcaaatgattttattatccatagaaaaatatttatcaaacacttgctctattttcatatttttaaaccttgcattaaatgccaataggcactatataactattctgctaagtagagtttttgaagtcattaataacggtggtacatcttttacatgatttttttctgtcactatatacgtgtgtttgtaatgactcagtaacagtctcttcatgattttccttactgataaattgtgataaaggctggagaacagtttgtgcttatggaccaaagagaagctaattttttcatcaaatcaattaccacagtcttaacaaaagtagacttctatgagttaacagccagaaagagaaaattcattcattaaatatttgtcatatttttgacataatgtatgcactatttagaattccctgaatcaaatacaaatactctgctatatttgttatttgtatcacaaactaatgataaattaaagataaagagaatattgatttgtaagcttcctgatacaaccataatgacaattagatttaatttgtgactggggatcatcattaaatgaaagagtcaccaacagtgcttttctgggtaagcaatgaatggcataattaaaattcaaaatttttacttcattccaggagtttctgtccagcctgggcaacagaggaagaccccgtttctgcaacaaaaatttttttaaatgaaccgggcattgtggcacatgcctgtggtcccagctacttgggaggttgaggtgggtggattacttaagcgtggaatgttgaggctacagtaagctatgattgtgccactgcactcgagcctggacaacagagcaagatcctgcctcaaaacattttaaaaaatttttgtaaaattcaattctaatggagagtttctcaaaatacagaatttgaacaagctgtttctttatatcagaaatttcagaaaataaaacagaaaggacacatccggtattcttaacctaggtcatatgcctaaattccttactgtataaaataaaatatgaatgtatgaagaaagtatatataaaaatggatcttgttagcattgatccaattaatagtattaatagatcagaagagacagctcaagagctttttaaagcttattcagttgctgtgcagacatttctgctgctgataccactatttctgatccgttaactttttatgagtttgtttctgttttcacagcccatcaatcacctaccatccatgtatgctttagggcaaaacatattaaggtcatccactgaatgaaaatgaggtctttgtgttgtaacatctgatcatcgagttttaaatctcttttcctaaaaggtgcaagcataaacactatagttttggttttgtttgcaggtatttttgggccagggaggaggtatgaacagggacagcagacactttaatattgaatatgcaggcagaggggaaggtaatgattggtgc

SEQ ID NO: 694595 - DNA, 1480 bp, Homo sapiens
tctcactgcatttttttaaaacaatgaaacctctttacttggttcattttcttttgtctcctcaattaaagcacaccttctgatatattacatgttccttccctttaaatactgtacacacacagtctgacatagatttttcttcttgccttgctggaaagcttgtcctgttttctccaaactagataaagttcactcagatgtgcttacgggcgcctccctcccctcagtgccctcccaaccctggatgcctttctgtcctcctccatattcttgggtgggcaggaacctggggagatgcagccaccaggcagcttgctactctcctgaagcacatctgggctttatattaggcctttaattaatcctcagtgaaagccaagctatgacattttgactgggcaggctccagttctggacaggtcttgatttattgcgactgagtcccaaccaactttgatttatttcagcttaggggaggaaggcaagcttggaacagaaaagcgctgttgaatgttgagcacgtgatgtcaggacaggccctccagacttccaggggcacgggacaagcggttcagaagagaatggcttctgagaaagccattttaaaaccctaagatttaaataacacgaaattgtaccagacaaaataaatgtaatcacagaggagagaaaatggctcctgaaacagttggctgattgtggcagggtaggaagccccagccttatctctgggaaaaggaggaaaccctgggggccttactgttaatcaggactctcatttgcattcgggggctgctctgtgtggccgtctgtccttcctgagagcaaaggccaggaggactgccccctcctcggcaacaccaacaactgatagtccattaaatgagagcagatttcctttttgcaggcagacagaataagtcaaaagaaggcaaagttactccattaagcaaagacaaaagggtcagtccatttaacgaacgaatttgtttcctttccggccaggctttcctgacagagccgatagtagagtgctgtgctcactgctgtgtccttgagcgtgggttgtcagaacagtgactcsccggctcccacaccagcaatgcgcagtaccttcctgttggccaagttagggctcagggtggtgcccacttaatacctcactgcaggcttcactgggcctagcatgatgcctcgcacatagccaggagcccccagcacagcagctttgactgctgacaaagccctgttccctccttgggggtggcagaaggagtgcatgagatggacctgtccccagtgtcacatggttgacaaagggcaacgtcaacaattctcagaggcaacgttaagttccttaaaagggagataatggtaggaaaaatgtgttgcaaaacaaagaagaggggaagcagaagaaaggggataagggcagaaaagatggatagaggtagcatggcccaagcaagtaagaaca

SEQ ID NO: 694596 - DNA, 984 bp, Homo sapiens
ttccaatgctggaagaaaagctattcatgcctatgggcatttggggcctataggaccttaatccctgcttgccctcccaagctgagatatagttacacttctagaggacagggaaacttcctgaggggtgtattagtgcattctcacacagttgtaaggaaatacctgagactgtgtaatttataaagaaacaaggtttgatgagctcatggttctgcaggctgtacaggaagcatagcggcttctgctcctgggcttctgcctcaggaaacttacaatcgtggcaaaaggcgaaggagaagcaggcccgtcttacatggttggagcaggagcgagattagggagcagatactacgcactattaaatgaccagatctcagatgaactcatacactatcgtgaggacagtactgagggggaaatccgcagccatgatccaatcacctcccaccaggccccacctccaacactggggaccacaattcgacgtgatatttgggcagggaaataggtccaaactgtatcaaatgggggggwtgtgtctgggtggaagtgagtcttttatatatttggagtgattgagagagtcagaacaacagtgtgtgcagagcgctcttggttgtagagaccagcgacagcagtccaggtatgacggaaatgaaaatgttagccatggcttagcaaaggtcttttgaaagaaacgagtgtagatgtttgctcatggcactatttctagggcttaggtcaggggctcaagggccattctcaagggtttgcaccaggataatggagaggaggaaaaagcctgagaagttggcaccttaaaatcagcaagactgaagagttcattaagtatgggctgcagagaagaagatgattcaaaaatgactgagaagcttgggtgttaggatggtgatgccgttttcagcactggagaacacaggagacgcaggtggtgcattgagtcctggacgtggtgagtcg

SEQ ID NO: 694597 - DNA, 630 bp, Homo sapiens
tttggtggaggggacacattcagactatagcaccacctctctgtattttagtaagttgttttaatctctcttttatttctttatatataacattggaataatactaatacctacttgtatcagtcagaataggttatgtgcagtaaaaacaacccctaaatatcagtatttaaaacaacaaaggtgaatttctcacttactcatgtccattgtgatttggccagtccctcttccacatcatccttacctgagaacttgagttgattgacccattgctatctggaaggttgttggtcaccatggcaaggggaagggatcatgtcatgtcacacactagctcttaaagtttttcaccaggaagagaggaacatctctccactcacatttttctgaccaaagtaagtcacctctctatgcctaacttcatggagttgggaaattgcaattaaacaatggacctccgggaatatgtgacttcagttggcactttcatcttaaatatattattctggcctgtgagctcctctggagtaaagattctgacattcttcagcctcgggtccttagctcccmgcaatgtcttcaagtaacagtgagtgaagaacagactgagtgaacaacaaaaaacgt

SEQ ID NO: 694598 - DNA, 1865 bp, Homo sapiens
aaaatgcaaaaattagccaggcatggtggagggtgcctgtaatcccagctactcaggaggctgaggcaggagaatcacttgaagccaggaggcggaagttgcagtgagccgagatcgcgtgccattgcactccagcctaggcaacagagtgagagtctgtctccaaaaaaaaaaaaaattgtgtttagtgaatgacttttcaggaaccactaaaattagttatcctgtagrctggactggcccatttgtgtctatagggctgagtgaacaaaagctgggctctgtctcactctttgctgcagttcttttgttcttggtagtcacagaagggacacttaccagagcttgtgcattgacattggttgtcccaggacgagtggctagagtttcctgtacagagcatatagagtgacccgctttttattctgcggaaacctctcttgcattcacagttcaacatggttccttccttgtaggccatggctttgaatgtggcgtgtgggatctctggcgggtcatcgtcacagagctctgcaaagcaaaagaagcctattaggaactcaagaggccccaggcaagtactcacatatttaatcctataatgacttaatcacatatttcttcactttatttaaaagatggtatgccctactttttgtgagaaagcaactaaggctgctaccattgttctttagaaagctttgtatcagagctggctcaaaaattaactacaaccaagctcctctccaaagcacaatgtatttcaaactagatgagtagaaattaacaaggttttattccgaatatgcctcatgtcaagcaagtatggagagaggagggtcaaggaatgtgaagaaaggaagaagcaaagttacgtacatttaattgaggggcaaaatatgtctgtgcaagatacttttaaggatatacgagttgttagactttctataattaatgactgtgcgccattttttgagaaatatacagaaagtgcttcactcaatgtctggcaaataggaaatgtgtatttctcacccacctgcccacctctgagttcaccaaataccttcttatattatgaagaccttagcctccctcagcctgaaaaatggactctggtatctcactaaaggcaccagaagcagtggtcaaacatcaaactattaaaaggaaaagtggcacaggtctaatcagaaaaataattccattgcctactttgcaacaagttctctgctctaagagattagattttggggggaaatatcacatgctggataaaggaagtggacggggagatgacagggacaggaagaggcaggaaagcaggagtctgtggcctctccgtcaatggaagcccacacggaggctgatcagggctgctggctgtacttatggctgtgggttggccggttgtgtattggtcattcaggttaagtgaagcttctctgtgcccttagactctgcccagcaccttgtcctccggaagaccatccccatccaatggctcaggactctcctgtctcccctaagaactgaaggtagggaggctgggtgcaatggctcatgcctgtaattccagcactttgggaggccaaggcgggtagatcacatgaggtcagcagttcaaaaccagcctggccagcatggtgaaaaccacagtctctactaaaaatacaaaaaaattagccgggcgtggtggcatgtgcctgtggtcccagttacttgggaggctgaggcaggagaatcacttgaacccaggaggcagaggttgcagtgggccgagatcacgccactgcactccagcctgggaaacccagcaagactctgtctcaaaaaaaaaaacgaagatagggagaaatcagaca

SEQ ID NO: 694599 - DNA, 630 bp, Homo sapiens
acctgcccttacaaagattaaaaccaagcctaatagacaagaggatgcgctagtcatttaactgcctggcagagcaaaatgcattaccttttaaaggaccataagataatctagaccctttataatgtatagctcataatatccagcaaattaaaagaaaatctagacatgtgaagaaacaggaaaatgtgacatacttgacctactcaaaaaagtgctcaatagaaacagacccrtaaaattgggtgtggtggctcatgcctgtaatcccagcactttggggcgacaaggcaggcggatcatctgaggtcaggagttccagaccagcctggccagcatggtgacatcccatctatactaaaaatacaaaagatcagccgagtgtggcagcgcatgtctgtagtcccaggtacttgggaggctgaggcaggagaattgcttgagcctgggaggtggaggttgcagtcagccgagcaccccagcctgggttacagagtgagtgagagtctgtctcaaaaaaaaaaaaaaaagacccctaaaatgacctagattttggaattagcacaaaaggaatttaaaacagttgtaattacactcaatgacttaaagcagaggtcagtaaactatgac

SEQ ID NO: 694600 - DNA, 630 bp, Homo sapiens
acctgcccttacaaagattaaaaccaagcctaatagacaagaggatgcgctagtcatttaactgcctggcagagcaaaatgcattaccttttaaaggaccataagataatctagaccctttataatgtatagctcataatatccagcaaattaaaagaaaatctagacatgtgaagaaacaggaaaatgtgacatacttgacctactcaaaaaagtgctcaatagaaacagacccgtaaaattgggtgtggtggctcatgcctgtaatcccagcactttggggcgacaaggcaggcggatcatctgaggtcaggagttccagaccagcctggccagcatggtgacatcccatctatactaaaaatacaaaagatcagccgagtgtggcagcrcatgtctgtagtcccaggtacttgggaggctgaggcaggagaattgcttgagcctgggaggtggaggttgcagtcagccgagcaccccagcctgggttacagagtgagtgagagtctgtctcaaaaaaaaaaaaaaaagacccctaaaatgacctagattttggaattagcacaaaaggaatttaaaacagttgtaattacactcaatgacttaaagcagaggtcagtaaactatgac

SEQ ID NO: 694601 - DNA, 578 bp, Homo sapiens
ccacttacaagtgagaacatgcagtatttggttttctgttcctgtgttagtttgctaaggataatggcctccagctccatccatattcctgcaaaggacatgatttcattctttattatggttgcatagtattccatggtgtataggtactatattttctttatgcagtctactgttgatgggcatttagggtgattctatgtctttgctattgtgaatagtgctgcaatgaatatatatgtgtgcatgtctttctggtagaatgaaaatcgattactttaaatactttgtcatatatactgaaaacatttcccctagtttgttatttgtattttaattmgtatatagaagtttataatgtgcagaatttgaaaatttgtatgtagtcttatgtattaattttccttagtggttttatttctttgctctaatgatttaaatgttttcctttcattccctttcatttaaatgtttcctttcctctatggattgtttatagtggcttctacttctttacttctgaacttatttggttgtatcttatgagatagggactttttctctaaagaaatcaaatg

SEQ ID NO: 694602 - DNA, 583 bp, Homo sapiens
atggtcctccaacttacgattttttgactacgatgatgcaaaagagatgcacatttagccaaaaccgtacttaagagtatccatacaaccattctttcactttcagtacagtagtcaataaattacataagatattcaacaacttattataaaataggctttgcattagatgattttgcccaactgtaggctaatgtatgtgttgtgaggatgtttaaggaggctagactaagctataatgtttggtaggttaaatacttaacaatattttcaacttataatgggtttatcaaaagtaaccccatcataarttgaggagtatctgtattaataatatagtgcatactgtgcttaaatatttttccctgcctttttagcaaaacaatttgaattgatagtaaggttatttctcttaccaaataaagttaatgagagatcaggtggaaattctttaccaaaacataaacaaacacacacacacacacaaataaatgtattttagggaaaactggacttgactatttttatctttgattatccttactaaagatatcctacgggaaacacagactttatttttttt

SEQ ID NO: 694603 - DNA, 877 bp, Homo sapiens
gagaagcttgattctagcaaggctacgcagtggctgatgaagtggtggaaaatacagcctggactctaattttaggcctcttctgcagtaccttttaattttctatgcctaatagttgcctttgtctctctgttgtgggtcatccgaaagccatgtggtaaacagacaaaatactaatgagattgaaactggggtatgtagcactttgcattggttggtcagttttttagtctgtaagttaatgttgctctctagattgaggttcaaatacaatagtaatttttatggctggagcagaacaggctaacttaattcaccacctttctgctcacctgcccttcctgttatctctggattggattttttcagtattgctgtcaccctgtaagggatgccaacctgagctcattgccaagtctggcactagaatatgagtccttcctcacttctaattggtctgtttctccacctgccccaagttttatccttcggggatgtgctgttcaccaccttttaacttttttgcctttggtgctaatggaagtatttttagtaattatatataatttcaatcaacagatattaagacactatggtaaatatttgttaaaaattgtagtgttacaaagcaattcttatgctagctgcagcagctagcataagaattgctttgtaatacaatttttaacaaagatttaccatagtgattacaggtgtgagccaccgcacctggcctgggctctgctatttaaatcctgtaggtctcagttttttcctcttaatctcccctggtagttgtrccagttaaatggatgctgatggtagagcaacaaatgctccctaatccattgcttgtgtttctccttgcacagaatgc

SEQ ID NO: 694604 - DNA, 633 bp, Homo sapiens
tctggacattcatgtggacagatatcatttgtcaatgagacgagccgatcctcctccattttctatgctgctgccaaattctactcagtgtcctaagcacgcctggtgcttcccttgtgatcgggtcgcgtgatgagcccagtgaggccctggtatggtggcacatcagggagctatccttgttaggwctcttttcaataattttgtagttacttaggatctaaaaattttattctacaatttatctttttttttttttttttttcaaaaaaaaaagtacctaaggctgaaaagtacaaatcacaggcatcaagaaaaagcagtttgtttgtgatgtttttcttactctgcaagcaagccaaaaatttagctaacacttttactgtattccactagattcgagacagcctgggtaagaagtgaccctggctgcccagtacaaacagctgggaagcccaaggagcactcaagaccaatgagatcaaaatccctagggtcagggtcccggcatcactaatttttaaaatatctcagaaaattgcaacgtgcagctaaggcagagaaacttcaagtgaaaaccaggctctttaatctaaaatgcaggaatgctgggtgaaaggcagtgacactggt

SEQ ID NO: 694605 - DNA, 1412 bp, Homo sapiens
acaatgaaatggccatcatttaatatttgctgggtgtcctgagcatggctggcaggcaacgactagtgttgggggcgaagagaagccccccagcctcatgggcccaggtagcatagagtctaggagatcgacatttgtcccccgcatgaagggaactgctaacagtgggaaggtatatctttggcgcagacctgaagacagagttgactctggttgggtcagagctggagcattactgtagttgtctcctccatatgctgtgacakgccatgtgtgacaaagctgtcacttggcattgagtgctagcatcttcctagtttcaagttttctaaggatctgagtagccgctcagtgaaaatcgcagagaataagtggcgcagccttctcgtcttcctcattttgctgctgttattttgtgctccagaattgacatgtaagagtttgttaattttaatgccttgtttttttctcccaattttgtacatattgtcaacatctttattgtatgtcatttttgctttttttaaacttgaatatgtgatcacagaaattataatacataattagtatttgtatatgatagtgaaaagtaaaacagacatttttctgcttttgtaataggacagttaaaatttagatttcattatagtaccttatatttcatagaacataaatgtattgctatcattccaaagggcagaccttttaagatggcttatattgtagcttacacatcaaaacaaaaaaactccagtgcaaatcacagatgatgatgatgatgatgatgatgatgatgatgatgattgagatggagtcttgctctctcacaccaggctggagtgcagtggcacgatctctgctcactgccatctccacttcctgggttcaaatgagtctcatgcctcagcctcctgagtagctgggattataggcgcccgccaccacgcctgactaatttttagtacagacagggttttgccatcttggccaggctggtttcaaactcctggccacagatgatccgcccacctcagcctcccaaattgctggcatgacaggtgtgagccaccgcgcctggccacagattattattttataatctgtctgtcctgttttctttcttttttttttttttaaattctgaaaagttgttcatcttattcaatctctccctcccctcactccctatctacttcctgattttgtctaaactcattggtaagagggtttataagatactgataaaggccttggctggctgagacaaagccagggccacatctggtgtatgttttccccagagctcagaagagcacctagaggctgaaaacatatttgatgaacatattagcaactgtaccttataaatagttaaatataatgaattgcataactgatgtatgttttcatta

SEQ ID NO: 694606 - DNA, 594 bp, Homo sapiens
tgagtatttgttaactgacaaaattataaaggatttaggacaatgaagtctttaaattcagcctggatacaggtaaaatcctctaattggtacaaattacctaccctaggaagagggtatatcatgaatcattattctactamaagcaagcttcatcttataactattttaggtccctatttgctgtgctgattttttgtttgtttatttgagatggagtctcactctgttgcccaggctggagtacagtggtgtgatctcggctcactgcaacttccacctcccaggttcaaatgattctcctgcctcagcctcccaagtagctgggattacaggcgcctgccaccacacctggctaatttttgtatttttagtaaagatggggtttcaccatgttgactaggctggtcttgaactcctgacctcaagtgatccacccgcctcggcctcccaaagtgctgagattacaggcgtgatccatcccgcctggcctgtactgatcttaaacataactatatatactctctctcaactcatagttagttatgtccaagatatacaaaactaatacggacacacattagatcagaaaaa

SEQ ID NO: 694607 - DNA, 609 bp, Homo sapiens
aaaaattaaaacaattgaactcatgagatagagagtagacggatggttaccagagtctgtgaagggtagtagggaggagggctggggtggggggtaggtgggagtagagatggttaatttttctaaccaaaggtataaagaatgaataagatctagtatttgatagcacaacagggtgactatagtcaataataatttaattgtacattttaaaataactaaaagagtacaattggattgtttgtaatacaaagaataaatgcttgtagtgattgataccccattaaaataaagataaaaaataaaaatttataacattcacaaagagaacatcaatatatttatctatttagaactaaacaacttcaatgtcaaaaactatcacaaaccaaaaaggcaaaaacaagygtgtgggaggagtgagaatgtgctacaaaatgacgtgggctaatatcattattatacaaggagttccaagataaacactaagatcccaactagaaaataacccaaggatacaaacaggcaatttacataaggaagaatgactaagaaaaacattcaaacccactaaaaatttttaaaaatgcaaacgaaaattgataacca

SEQ ID NO: 694608 - DNA, 1496 bp, Homo sapiens
tgtgcatccctggtgtctgtgtatccaaatttcctgttcttattaggataccagtaagattgcattaaggcccatcatgacagccttattttaacttaayatcctcattaaaggccctatctctgaatacagtcacattcttaagtactgggggttagttcaaatagcagtttgaggtgggggaacacttcagttcataacagataataatttaaaaataatgcctgcccaagaacagggctcattaaagtaacaaaatgaagtgaatcaaccctcgtatatcagcagatcatttcctcttcttgaggtacattttatgtaaactaatttacatttatatttcctctcttactgtcagtgtataagatgaaagaagtaataaagaggatataagaaacttctgctgggcacagtggctcacacctgtaatcccagcactttgggacccaaggcgggtggatcacttgaggtcaggagtccaagaccagcctggccaacatagtgaaacccgtctctactaaaaatacaaaaactagccggacatccttgcttgaactcaggagatggaggttgcagtgagccaagatcgtgccactgcactccagcctgggtgacagagtgagactctgtctcaaaaaaaaaaaaaaaaaaaaaaaaagaaacctctacacatactatcttgctattctcacattcaaggtggttttcagcaaactgggcagaatcttcagcttgggctattcccttcttattgccatcctttattcttggttggttcattagttgctttaatacaaaaataacagagaaaaattacttttattttggtcttctcccttattaattcacaatttaaaagtttgagacttatgataattttttagttctttctcattaccaaatagtatatatcctgtccccaggagcatgtgtactctacaaattaagtgtagagatatatgtacatttcagttgtttgtaatgtagacaaggccacagtatttatagtacaaaagatggaataatttgctaacagaaacataaacacctggaattttgaagacagtggacattagagctgacacccagtgcaacacggaagttagcagagtcaagaactgaattcgggactgttgattcctagtatttccatcaattagaatcaaatcaagtttttaaaaacacatatgtgcaaaatctggtgattagattttgggtttcttagggctggtaaagagagacgcatctataatttctggaggaaaacctagtgttgaaatgtccaacacatctcattgggttggggttaaggtggtatacttgggacctatattgcagacagcaccaagattagaatgggaatttttagtatttaactttgatttcccatgttttaaagtattaactatctagcactgctattgaaaattatgccattaagcccttccacatcataatattgtctttcagcaagatgtacggaactaaaataagac

SEQ ID NO: 694609 - DNA, 1496 bp, Homo sapiens
tgtgcatccctggtgtctgtgtatccaaatttcctgttcttattaggataccagtaagattgcattaaggcccatcatgacagccttattttaacttaacatcctcattaaaggccctatctctgaatacagtcacattcttaagtactgggggttagttcaaatagcagtttgaggtgggggaacacttcagttcataacagataataatttaaaaataatgcctgcccaagaacagggctcattaaagtaacaaaatgaagtgaatcaaccctcgtatatcagcagatcatttcctcttcttgaggtacattttatgtaaactaatttacatttatatttcctctcttactgtcagtgtataagatgaaagaagtaataaagaggatataagaaacttctgctgggcacagtggctcacacctgtaatcccagcactttgggacccaaggcgggtggatcacttgaggtcaggagtccaagaccagcctggccaacatagtgaaacccgtctctactaaaaatacaaaaactagccggacatccttgcttgaactcaggagatggaggttgcagtgagccaagatcgtgccactgcactccagcctgggtgacagagtgagactctgtctcaaaaaaaaaaaaaaaaaaaaaaaaagaaacctctacacatactatcttgctattctcacattcaaggtggttttcagcaaactgggcagaatcttcagcttgggctattcccttcttattgccatcctttattcttggttggttcattagttgctttaatacaaaaataacagagaaaaattacttttattttggtcttctcccttattaattcacaatttaaaagtttgagacttatgataattttttagttctttctcattaccaaatagtatatatcctgtccccaggagcatgtgtactctacaaattaagtgtagagatatatgtacatttcagttgtttgtaatgtagacaaggccacagtatttatagtacaaaagatggaataatttgctaacagaaacataaacacctggaattttgaagacagtggacattagagctgacacccagtgcaacacsgaagttagcagagtcaagaactgaattcgggactgttgattcctagtatttccatcaattagaatcaaatcaagtttttaaaaacacatatgtgcaaaatctggtgattagattttgggtttcttagggctggtaaagagagacgcatctataatttctggaggaaaacctagtgttgaaatgtccaacacatctcattgggttggggttaaggtggtatacttgggacctatattgcagacagcaccaagattagaatgggaatttttagtatttaactttgatttcccatgttttaaagtattaactatctagcactgctattgaaaattatgccattaagcccttccacatcataatattgtctttcagcaagatgtacggaactaaaataagac

SEQ ID NO: 694610 - DNA, 1333 bp, Homo sapiens
cagttcacagagggggacacagcagaatggcttgagatttcatcacactatgcaaaacaatgcgcaatttaaaacttaagaattgtttatttctgaaatcttccttttaatatttctggactgtggttgactgtgggtaactgcaactacagaaagtggaaccatggaagcagaccactgtacttcattccagtgattgctgaatcatattccattgtgtatttacaccatgttctatttgttcattcatcagttcatggacatttgggtagtttccactttttggctgttatgaacattcatatacaagtttttgtgtggaggtatgctttcatctcatttgggtatgcactaggaatagattgtagtgacctttttgcttctggaaggttgacatgtagtgacctttttgcttctggaaggttgacagatggacttcgttgttgttggcttgcagtgggaatccatcaagaattattgcaggaattcttgtgtaactgggcgtctcagccgcattacttaataataccaaacttaaactggatagtaaagtatatcataggtagcaagggcgtaactgtcagtttgaagtttatgtgaaataagcagtgactcttacatgtgatagagatgtaccatttcccaaaatgaatgtgatcccacagcgatgcctytcctagtaattcacagggaggtaagtaggtaattgttgagacttgctaatgtgtgtgtgaaacatttctgcaaaaaatgacgccatctttttgctgttgagaacccatgattatattaagcatttgaactatacttaaaatatcctgataatgattgttcacatctacttgtgccttgtgtggtagttatttaaaaactccttaatctagaaaaaaataatttaaggctagacttttttcccttaggatattttccttattgtctgcaacaatataatttggagtataaacctgtgtttatagacaaaatgcaatgtcctcattagaagtgatttttgtgattgttaacataatgaagcataggctgtaaaactagcacattttgtatgtgttttcggtgaacttacctggcccctaataggactcaggttgtcttggattttgatggattgatgaaaccttgtacataaattgccagtcctggaaccaatcttccttcatttcttccctgttttatttagtttttcttccagttgtatttcatttttggcttgttaataattgtggtttagtaaaaataacttgagactgtaagctaaaagttggctatggtctagggaagtgggcttcttctcgtggactagaaatgtttaaactta

SEQ ID NO: 694611 - DNA, 1008 bp, Homo sapiens
cccctcggcccctcgcccccctcgccccccagcctctgctgcagcccgggctgcttctcccgcgggcgggtggtgcttggaggcggcggcggcgtgcgggccagctcgtggtaatccccgatgctgacgctagagggcgcgcaaaggttgctgcgccgcgccaggtctgcgaggagcggcgggtagaaacgcaaaaagcgtagggcctgcgggtgtcggcaccagcagtggggtgctaggggctggacagtggggtgccgcggagccgggcagtggggtgctggaggcgctggcccggatggctgatgggagggtgccatgcaaagaggtgttgctcactttatttatttggagagaggttgcccctgcattaaatctttgcaagactgaaacaagccggtgcaaaactaaatgagagacaggcggaggcaggcagggcaggagatgccccacacctcgctccctgggttatggaacccccaaaactgctttgggggagaaatagtctgatcccaccagtactcacctctccacacacacgcacgtcctttcagaatggggttgggcgggggaggtggtgaactttaaaaggcttttaaaggaacaacaamaaaaaaaaaaaaggtttgcacaaggctgaggtacttgaaatgatttttgtgttgcaaattgctatgcttttactgaggcgctgatgaaaataaatgaagctcctctctctctttttgctaataaatgaaatgaaaaaagcgccattattatgccacctgcttctaattcctaattgtggtaacttaattctcagattgttgttagctgcttaatatcgcaggcgcacaagcaaaaataaaaatatgagggccgtttgggtcttttttggccaacgaggtggaaggtgcttggactcagttttttgtttagtttggtgacagttcccacagtgaaatgtgtgcacggtattggaagggagaaatctttattctcttcagcatcccaaggggagctcaa

SEQ ID NO: 694612 - DNA, 670 bp, Homo sapiens
taaatgtatgttctccctacagaaagtctagaagaaaagctcactaatgcgatcatcactggaygatttttacttttattatatacacatatatttcccactttttctaattttttctacaaaggaagtgatgattgcataatattttaagggtttgtttttaaaagatcccgtgatagtgtctaaatataatcttttaaagtgaagtccttgatataaaatcatcagcaaagttgtctgcctacctagaaaagcctctaacactgctggtgggaatgtgaattacttcagtccttttagagaataattgggcagcacgtattaaaatttaaactgcacataccctttgatccagcaaattcattccccagcatctatcttagagactttctcaaacatccatgcaaatagcttgtatatggtattcatggaaacactgattgtattaatagtatcaaaaaagtgggagtgagctaaatgttcataatggagaagtgtaaataaatgatgtttattactattgtggaatactatgtaagcattaaaatgaaagaggacgatctatatacaatgtgtgtgtgtatgtatgtatgtgtgtgtgtatatatgtatagtgtgtgtatatatgtatagtgtgtgtgtatatatgtatagtgtgtgtgtatatatt

SEQ ID NO: 694613 - DNA, 670 bp, Homo sapiens
taaatgtatgttctccctacagaaagtctagaagaaaagctcactaatgcgatcatcactggatgatttttacttttattatatacacatatatttcccactttttctaattttttctacaaaggaagtgatgattgcataatattttaagggtttgtttttaaaagatcccgtgatagtgtctaaatataatcttttaaagtgaagtccttgatataaaatcatcagcaaagttgtctgcctacctagaaaagcctctaacactgctggtgggaatgtgaattacttcagtccttttagagaataattgggcagcacgtattaaaatttaaactgcacataccctttgatccagcaaattcattccccagcatctatcttagagactttctcaaacatccatgcaaatagcttgtatatggtattcatggaaacaytgattgtattaatagtatcaaaaaagtgggagtgagctaaatgttcataatggagaagtgtaaataaatgatgtttattactattgtggaatactatgtaagcattaaaatgaaagaggacgatctatatacaatgtgtgtgtgtatgtatgtatgtgtgtgtgtatatatgtatagtgtgtgtatatatgtatagtgtgtgtgtatatatgtatagtgtgtgtgtatatatt

SEQ ID NO: 694614 - DNA, 1546 bp, Homo sapiens
  misc_feature 260, 544: n = A,T,C or G
tgattacattttggggcccacctgagcatctagaataattcccccatctcaagagccttaactcaatcacatctgcctcttgcttcaggtgtctcattgcggtagtcaagtggcatcgagaacagaagtggcatcgagaggagagtagtggacacttcacctttgctcccactaattatgtatggcttgaatatatacagtaagaatatagttgtgtttaatagaataaatacataagctgaatgactaaaggagcgtgnaggctctgatacccctaaatgagcgcaggactatgagttggccccgccccgtgcttgcctggtgatcatatagtctacaggtcacctcttctttttgctccttgacctcctcgtctgtccagccagggagctggataccgcagcttcacgaagctctttcagctcaaagaatccccagttgtctgtctgccatgacaagagaaacgattaaatgtccttctgtcctatgacccctaacggacacaatgaggcaaagggtttggcaggagacatgttgctctgtntgcaaagtgagcaaaaaaatttaaaaacctctgctcatgtgacttccagagcccacccaatacgccaagccctcaaagggcctcttctgcagaaaacactgttcatctcaagtagactttaaaaatagttgataagcgaaaagattttctgagactctttgagagtgattttttagtaccctgctctgtaataaccagaaggtgtttaataaacatgatatgcagcagtcgctaagagaatctgatttatgtacaaaagcaatacagagcaactgtgcatcagggtggtgcccttttatttgactgtgaatgctgatattctgatggaagcaattgtgctgaactttatttataatcagcttacggcatggatagctgtattgtaagtgcttctcaaattacatagcaaatcttgttgtctccttaggcaaataagagacctacatcataagctttaacggtaatacaggtcactgtcaagggtaaaatatttcccaagcccttctgattagcaaaatcacatatagcttaagcatgggctggggctrcagccacagcacctgaagacagctcagaaagcagccaataattaaatgtccaaggaaattgacattaaggaaatctcattcaagaaaaaacatttaatttctctacatttgtgttgaacagttcaccaagaagtgcaaatcgcttgggctaaggagcttcctggttctaaaatgagtcctgaataaatatccgacaagtgtgaggcagtgaagaaaccttatttcattggctgagagggaaatcagaacagatgcggaagaccagtttcccagatacacaaataggacgcaggaccagacttggaggcttttttttcttttgctggggctgcctgtcagaagatcgcagagcgattccttaaatgttaagtctaaaattcctccccgaagacatatccacagaaaggatcccagaggggcccaccacacctttctgaaatgttctcataattca

SEQ ID NO: 694615 - DNA, 1546 bp, Homo sapiens
  misc_feature 260, 544: n = A,T,C or G
tgattacattttggggcccacctgagcatctagaataattcccccatctcaagagccttaactcaatcacatctgcctcttgcttcaggtgtctcattgcggtagtcaagtggcatcgagaacagaagtggcatcgagaggagagtagtggacacttcacctttgctcccactaattatgtatggcttgaatatatacagtaagaatatagttgtgtttaatagaataaatacataagctgaatgactaaaggagcgtgnaggctctgatacccctaaatgagcgcaggactatgagttggccccgccccgtgcttgcctggtgatcatatagtctacaggtcacctcttctttttgctccttgacctcctcgtctgtccagccagggagctggataccgcagcttcacgaagctctttcagctcaaagaatccccagttgtctgtctgccatgacaagagaaacgattaaatgtccttctgtcctatgacccctaacggacacaatgaggcaaagggtttggcaggagacatgttgctctgtntgcaaagtgagcaaaaaaatttaaaaacctctgctcatgtgacttccagagcccacccaatacgccaagccctcaaagggcctcttctgcagaaaacactgttcatctcaagtagactttaaaaatagttgataagcgaaaagattttctgagactctttgagagtgattttttagtaccctgctctgtaataaccagaaggtgtttaataaacatgatatgcagcagtcgctaagagaatctgatttatgtacaaaagcaatacagagcaactgtgcatcagggtggtgcccttttatttgactgtgaatgctgatattctgatggaagcaattgtgctgaactttatttataatcagcttacggcatggatagctgtattgtaagtgcttctcaaattacatagcaaatcttgttgtctccttaggcaaataagagacctacatcataagctttaacggtaatacaggtcactgtcaagggtaaaatatttcccaagcccttctgattagcaaaatcacatatagcttaagcatgggctggggctacagccacagcacctgaagacagctcagaaagcagccaataawtaaatgtccaaggaaattgacattaaggaaatctcattcaagaaaaaacatttaatttctctacatttgtgttgaacagttcaccaagaagtgcaaatcgcttgggctaaggagcttcctggttctaaaatgagtcctgaataaatatccgacaagtgtgaggcagtgaagaaaccttatttcattggctgagagggaaatcagaacagatgcggaagaccagtttcccagatacacaaataggacgcaggaccagacttggaggcttttttttcttttgctggggctgcctgtcagaagatcgcagagcgattccttaaatgttaagtctaaaattcctccccgaagacatatccacagaaaggatcccagaggggcccaccacacctttctgaaatgttctcataattca

SEQ ID NO: 694616 - DNA, 1546 bp, Homo sapiens
  misc_feature 260, 544: n = A,T,C or G
tgattacattttggggcccacctgagcatctagaataattcccccatctcaagagccttaactcaatcacatctgcctcttgcttcaggtgtctcattgcggtagtcaagtggcatcgagaacagaagtggcatcgagaggagagtagtggacacttcacctttgctcccactaattatgtatggcttgaatatatacagtaagaatatagttgtgtttaatagaataaatacataagctgaatgactaaaggagcgtgnaggctctgatacccctaaatgagcgcaggactatgagttggccccgccccgtgcttgcctggtgatcatatagtctacaggtcacctcttctttttgctccttgacctcctcgtctgtccagccagggagctggataccgcagcttcacgaagctctttcagctcaaagaatccccagttgtctgtctgccatgacaagagaaacgattaaatgtccttctgtcctatgacccctaacggacacaatgaggcaaagggtttggcaggagacatgttgctctgtntgcaaagtgagcaaaaaaatttaaaaacctctgctcatgtgacttccagagcccacccaatacgccaagccctcaaagggcctcttctgcagaaaacactgttcatctcaagtagactttaaaaatagttgataagcgaaaagattttctgagactctttgagagtgattttttagtaccctgctctgtaataaccagaaggtgtttaataaacatgatatgcagcagtcgctaagagaatctgatttatgtacaaaagcaatacagagcaactgtgcatcagggtggtgcccttttatttgactgtgaatgctgatattctgatggaagcaattgtgctgaactttatttataatcagcttacggcatggatagctgtattgtaagtgcttctcaaattacatagcaaatcttgttgtctccttaggcaaataagagacctacatcataagctttaacggtaatacaggtcactgtcaagggtaaaatatttcccaagcccttctgattagcaaaatcacatatagcttaagcatgggctggggctacagccacagcacctgaagacagctcagaaagcagccaataattaaatgtccaaggaaattgacattaaggaaatctcattmaagaaaaaacatttaatttctctacatttgtgttgaacagttcaccaagaagtgcaaatcgcttgggctaaggagcttcctggttctaaaatgagtcctgaataaatatccgacaagtgtgaggcagtgaagaaaccttatttcattggctgagagggaaatcagaacagatgcggaagaccagtttcccagatacacaaataggacgcaggaccagacttggaggcttttttttcttttgctggggctgcctgtcagaagatcgcagagcgattccttaaatgttaagtctaaaattcctccccgaagacatatccacagaaaggatcccagaggggcccaccacacctttctgaaatgttctcataattca

SEQ ID NO: 694617 - DNA, 1546 bp, Homo sapiens
  misc_feature 260, 544: n = A,T,C or G
tgattacattttggggcccacctgagcatctagaataattcccccatctcaagagccttaactcaatcacatctgcctcttgcttcaggtgtctcattgcggtagtcaagtggcatcgagaacagaagtggcatcgagaggagagtagtggacacttcacctttgctcccactaattatgtatggcttgaatatatacagtaagaatatagttgtgtttaatagaataaatacataagctgaatgactaaaggagcgtgnaggctctgatacccctaaatgagcgcaggactatgagttggccccgccccgtgcttgcctggtgatcatatagtctacaggtcacctcttctttttgctccttgacctcctcgtctgtccagccagggagctggataccgcagcttcacgaagctctttcagctcaaagaatccccagttgtctgtctgccatgacaagagaaacgattaaatgtccttctgtcctatgacccctaacggacacaatgaggcaaagggtttggcaggagacatgttgctctgtntgcaaagtgagcaaaaaaatttaaaaacctctgctcatgtgacttccagagcccacccaatacgccaagccctcaaagggcctcttctgcagaaaacactgttcatctcaagtagactttaaaaatagttgataagcgaaaagattttctgagactctttgagagtgattttttagtaccctgctctgtaataaccagaaggtgtttaataaacatgatatgcagcagtcgctaagagaatctgatttatgtacaaaagcaatacagagcaactgtgcatcagggtggtgcccttttatttgactgtgaatgctgatattctgatggaagcaattgtgctgaactttatttataatcagcttacggcatggatagctgtattgtaagtgcttctcaaattacatagcaaatcttgttgtctccttaggcaaataagagacctacatcataagctttaacggtaatacaggtcactgtcaagggtaaaatatttcccaagcccttctgattagcaaaatcacatatagcttaagcatgggctggggctacagccacagcacctgaagacagctcagaaagcagccaataattaaatgtccaaggaaattgacattaaggaaatctcattcmagaaaaaacatttaatttctctacatttgtgttgaacagttcaccaagaagtgcaaatcgcttgggctaaggagcttcctggttctaaaatgagtcctgaataaatatccgacaagtgtgaggcagtgaagaaaccttatttcattggctgagagggaaatcagaacagatgcggaagaccagtttcccagatacacaaataggacgcaggaccagacttggaggcttttttttcttttgctggggctgcctgtcagaagatcgcagagcgattccttaaatgttaagtctaaaattcctccccgaagacatatccacagaaaggatcccagaggggcccaccacacctttctgaaatgttctcataattca

SEQ ID NO: 694618 - DNA, 649 bp, Homo sapiens
tctgtttcttacccacaacctagcaatgacattgctgagaagtagtcggtgaccccacctagatgctgggggccaggggctcscctggctggacagccattcccagacattcctgaagggattcatgaatccctggtgaatagctggccatttatgccacagctagcaatgagaaaatgagtaaaatttcttacacacataagctaatggtctgagttttgtgcccattacacaactgtaacaaatgtattttccaggccacaccctctggggacacatttaggtcctgttttattctgtttgggctgctataacacacgataaactgagtcacttttaaacaacagcttattatttttcacaatttattgcactcagttctggaagcagggaagtccaaaatcaaggtgctagcagactcagcgtctggtgagggcctactttctggttcacagaaagcaccggtggaaggccagccacagtggctcacacctgtaattccagcatttggggaggctgaggtgggccaatcatttgaggccaggagttcaagaccagccttgccaacatggtgaaaccccatctctatgaaaaatacaaaaaaattagctgggcatggtggcatgcacctgtagtcccagctacgtgg

SEQ ID NO: 694619 - DNA, 649 bp, Homo sapiens
tctgtttcttacccacaacctagcaatgacattgctgagaagtagtcggtgaccccacctagatgctgggggccaggggctcgcctggctggacagccattcccagacattcctgaagggattcatgaatccctggtgaatagctggccatttatgccacagctagyaatgagaaaatgagtaaaatttcttacacacataagctaatggtctgagttttgtgcccattacacaactgtaacaaatgtattttccaggccacaccctctggggacacatttaggtcctgttttattctgtttgggctgctataacacacgataaactgagtcacttttaaacaacagcttattatttttcacaatttattgcactcagttctggaagcagggaagtccaaaatcaaggtgctagcagactcagcgtctggtgagggcctactttctggttcacagaaagcaccggtggaaggccagccacagtggctcacacctgtaattccagcatttggggaggctgaggtgggccaatcatttgaggccaggagttcaagaccagccttgccaacatggtgaaaccccatctctatgaaaaatacaaaaaaattagctgggcatggtggcatgcacctgtagtcccagctacgtgg

SEQ ID NO: 694620 - DNA, 649 bp, Homo sapiens
tctgtttcttacccacaacctagcaatgacattgctgagaagtagtcggtgaccccacctagatgctgggggccaggggctcgcctggctggacagccattcccagacattcctgaagggattcatgaatccctggtgaatagctggccatttatgccacagctagcaatgagaaaatgagtaaaatttcttacacacrtaagctaatggtctgagttttgtgcccattacacaactgtaacaaatgtattttccaggccacaccctctggggacacatttaggtcctgttttattctgtttgggctgctataacacacgataaactgagtcacttttaaacaacagcttattatttttcacaatttattgcactcagttctggaagcagggaagtccaaaatcaaggtgctagcagactcagcgtctggtgagggcctactttctggttcacagaaagcaccggtggaaggccagccacagtggctcacacctgtaattccagcatttggggaggctgaggtgggccaatcatttgaggccaggagttcaagaccagccttgccaacatggtgaaaccccatctctatgaaaaatacaaaaaaattagctgggcatggtggcatgcacctgtagtcccagctacgtgg

SEQ ID NO: 694621 - DNA, 649 bp, Homo sapiens
tctgtttcttacccacaacctagcaatgacattgctgagaagtagtcggtgaccccacctagatgctgggggccaggggctcgcctggctggacagccattcccagacattcctgaagggattcatgaatccctggtgaatagctggccatttatgccacagctagcaatgagaaaatgagtaaaatttcttacacacataagctaatggtctgagttttgtgcccattacacaactgtaacaaatgtattttccaggccacaccctctggggacacatttaggtcctgttttattctgtttgggctgctataacacacgataaactgrgtcacttttaaacaacagcttattatttttcacaatttattgcactcagttctggaagcagggaagtccaaaatcaaggtgctagcagactcagcgtctggtgagggcctactttctggttcacagaaagcaccggtggaaggccagccacagtggctcacacctgtaattccagcatttggggaggctgaggtgggccaatcatttgaggccaggagttcaagaccagccttgccaacatggtgaaaccccatctctatgaaaaatacaaaaaaattagctgggcatggtggcatgcacctgtagtcccagctacgtgg

SEQ ID NO: 694622 - DNA, 658 bp, Homo sapiens
ggcagcaggggctttggggactcacttggccgggggagggagtttccagaatcctcccaggacagactttcagaagctcagggcctgagggggactgagcctatgggaggctggagatgggggcagccagttgggcaggggctgaaaagtgaggaagagtctggatttagatgagatgggccatttttctccaggtccacagaagaccaaacagaaggagtgccacacgaatgactgggagctgccaaccaggacgacttgctgggggtctttcatgcagctgaggagcgtggtcacagctcccacctctcaagaagacttcagttcaggctttcatccagcaaggctcaagcaaacgccttctctgtgccaggctctcgctagcactggacgtacagcaatgaatcaggcctcaccaggccccaaagcagagggctgggccagacccgctctaagcctcccaaactctacacctcaggggtggtgggggactcaggaagggagaggagaggcccagctcttctgacagctctcttgaggtgagaaagattttcgaaagagaacaaaggcagagaactgtggtgatkatggtcatgataagtccatgaggaagaagatgacagtggtgaggagaggccctcatgcttgctgagaccgc

SEQ ID NO: 694623 - DNA, 2232 bp, Homo sapiens
attctcctgcctcaacctcctgaatagctgggactacaggtgcacgccaccacacccagctaatttttgtatttttcgtaaagatggggtttcaccatgttggccaggatggtctcgatctcttgacctcatgatctgcccgccttggcctcccaaaatgctgggattacaggcatgagccaccgcatccggcctagagatcttcttaagagatgtcttcccccatgctcaggacttgatgtgggcagagctcatgcccgttccatcttggaggggtagagaatgttccttccatacccctcccttctggccacatcaggaatgtttcaaaaaagagcctgttatcagccaatgaggtggatttccaggacttttgttgaaagtagtgagcaacagtaggtttgttcactggcattgctggaagcaggggtgaaaccagtctgggagttctgggggatagccaggtggtttagaaaagaagccagcacgagagagcaagacatgagacagggaaaaacaagacccagtgatattctttgagctcctggatccagcaatgcctgaaactaaatctccctggactgttacattatatatgtattctgattctgcaaacgatccatctcaaaatacagtggtgtagaacagtcatttatcgttatctgcatggttctgtgggttgatgagctcaactagatggtcttgctcagggttgttgacactattgtgttcagatgccaatcaagctggatgagctggggaccggccaggcatctctctccatgcagcctcccacatggctggtgtggacttcctcatagaacggaggtctcgggagagcmggacttcctacttagtgtctggcttcccctagagtgagtgttccgagggaacaaggtgagagcttcaacttctgccttggaggccagcagcgttatttccatgggttaccagccatgtccatgtgttaccagcaagtctcagggccaacccagatccaaggggaggaagctacacaagggcatgtatacacggaagacatgagtcatcgagaagctacttttggagacccgctaccatgatatgccagccaatacattcacttcgatgcccgtaaatttaggtttctgccacttgcaaccacaagcaagtttgccactcacaaccataaccacagcctaagttaggatgcagccctgctctcctgtctccctctcaagcccaattcagatgccgcttctttgtgcaccctcctccatcctcttccccctaccagaattaatctcttccttattgaaatccacaactgtgttggaaatcggtagaaagaactgaacaaagcctgagtcatcaatgaggctcaacactctgctgaggaaacttaagctggggaaaccgagacccagagaggcaacaccaaagtcactcaacaagtttctggattcgggaaagcacccagagcccttatcacattctctctcatagaatggatattatgtacatagctgattctctccaccggactgtaaactcctgataagcagggagtatgctacttcctctctgtaccccccaccacaccttggatggggtttgaacaggggacaactgcagaacttgtttgctgaagcaacttttacctcgggactttcccaagtccgctctgccctaagctatcattcagtttctggggagccatctctctgcccccactagaaagtaagggcaggagggacaaaaagcagcatgatgtggcaaaaaagcagcacacaggcttggcgtcaggcaggcctgcattctatttattttattttattttatttgtttatttatttttttggagacggagtctcactccgttgcccaggttggagtgcagtggcgccatcttggctcactgcaacctccacctcccaggttcaagtgattctcctgcctcagcctcctgagtagctggggtaacaggcgcgcaccaccatgcccagctaatttttgtatttttagtagagatggggtttcaccatgttggccaggctgatctcgaactcctgacctcaggcgatctgcctgcctcggcctcccagactgctgggatgacaagtgtgagccaccgcacctggccaggcctgcattctaatacaggctctgcaagtagaacctccattttcttatctgtaaaatgggatgtgataactacacctgcctccttgtcatgtggctgtgcaatgcaat

SEQ ID NO: 694624 - DNA, 2232 bp, Homo sapiens
attctcctgcctcaacctcctgaatagctgggactacaggtgcacgccaccacacccagctaatttttgtatttttcgtaaagatggggtttcaccatgttggccaggatggtctcgatctcttgacctcatgatctgcccgccttggcctcccaaaatgctgggattacaggcatgagccaccgcatccggcctagagatcttcttaagagatgtcttcccccatgctcaggacttgatgtgggcagagctcatgcccgttccatcttggaggggtagagaatgttccttccatacccctcccttctggccacatcaggaatgtttcaaaaaagagcctgttatcagccaatgaggtggatttccaggacttttgttgaaagtagtgagcaacagtaggtttgttcactggcattgctggaagcaggggtgaaaccagtctgggagttctgggggatagccaggtggtttagaaaagaagccagcacgagagagcaagacatgagacagggaaaaacaagacccagtgatattctttgagctcctggatccagcaatgcctgaaactaaatctccctggactgttacattatatatgtattctgattctgcaaacgatccatctcaaaatacagtggtgtagaacagtcatttatcgttatctgcatggttctgtgggttgatgagctcaactagatggtcttgctcagggttgttgacactattgtgttcagatgccaatcaagctggatgagctggggaccggccaggcatctctctccatgcagcctcccacatggctggtgtggacttcctcatagaacggaggtctcgggagagccggacttcctacttagtgtctggcttcccctagagtgagtgttccgagggaacaaggtgagagcttcaacttctgccttggaggccagcagcgttatttccatgggttaccagccatgtccatgtgttaccagcaagtctcagggccaacccagatccaaggggaggaagctacacaagggcatgtatacacggaagacatgagtcatcgagaagctacttttggagacccgctaccatgatatgccagccaatacattcacttcgatgcccgtaaatttaggtttctgccacttgcaaccacaagcaagtttgccactcacaaccataaccacagcctaagttaggatgcagccctgctctcctgtctccctctcaagcccaattcagatgccgcttctttgtgcaccctcctccatcctcttccccctaccagaattaatctcttccttattgaaatccacaactgtgttggaaatcggtagaaagaactgaacaaagcctgagtcatcaatgaggctcaacactctgctgaggaaacttaagctggggaaaccgagacccagagaggcaacaccaaagtcactcaacaagtttctggattcgggaaagcacccagagcccttatcacattctctctcatagaatggatattatgtacatagctgattctctccaccggactgtaaactcctgataagcagggagtatgctacttcctctctgtaccccccaccacaccttggatggggtttgaacaggggacaactgcagaacttgtttgctgaagcaacttttacctcgggactttcccaagtccgctctgccctaagctatcattcagtttctggggagccatctctctgcccccactagaaagtaagggcaggagggacaaaaagcagcatgatgtggcaaaaaagcagcacacrggcttggcgtcaggcaggcctgcattctatttattttattttattttatttgtttatttatttttttggagacggagtctcactccgttgcccaggttggagtgcagtggcgccatcttggctcactgcaacctccacctcccaggttcaagtgattctcctgcctcagcctcctgagtagctggggtaacaggcgcgcaccaccatgcccagctaatttttgtatttttagtagagatggggtttcaccatgttggccaggctgatctcgaactcctgacctcaggcgatctgcctgcctcggcctcccagactgctgggatgacaagtgtgagccaccgcacctggccaggcctgcattctaatacaggctctgcaagtagaacctccattttcttatctgtaaaatgggatgtgataactacacctgcctccttgtcatgtggctgtgcaatgcaat

SEQ ID NO: 694625 - DNA, 2232 bp, Homo sapiens
attctcctgcctcaacctcctgaatagctgggactacaggtgcacgccaccacacccagctaatttttgtatttttcgtaaagatggggtttcaccatgttggccaggatggtctcgatctcttgacctcatgatctgcccgccttggcctcccaaaatgctgggattacaggcatgagccaccgcatccggcctagagatcttcttaagagatgtcttcccccatgctcaggacttgatgtgggcagagctcatgcccgttccatcttggaggggtagagaatgttccttccatacccctcccttctggccacatcaggaatgtttcaaaaaagagcctgttatcagccaatgaggtggatttccaggacttttgttgaaagtagtgagcaacagtaggtttgttcactggcattgctggaagcaggggtgaaaccagtctgggagttctgggggatagccaggtggtttagaaaagaagccagcacgagagagcaagacatgagacagggaaaaacaagacccagtgatattctttgagctcctggatccagcaatgcctgaaactaaatctccctggactgttacattatatatgtattctgattctgcaaacgatccatctcaaaatacagtggtgtagaacagtcatttatcgttatctgcatggttctgtgggttgatgagctcaactagatggtcttgctcagggttgttgacactattgtgttcagatgccaatcaagctggatgagctggggaccggccaggcatctctctccatgcagcctcccacatggctggtgtggacttcctcatagaacggaggtctcgggagagccggacttcctacttagtgtctggcttcccctagagtgagtgttccgagggaacaaggtgagagcttcaacttctgccttggaggccagcagcgttatttccatgggttaccagccatgtccatgtgttaccagcaagtctcagggccaacccagatccaaggggaggaagctacacaagggcatgtatacacggaagacatgagtcatcgagaagctacttttggagacccgctaccatgatatgccagccaatacattcacttcgatgcccgtaaatttaggtttctgccacttgcaaccacaagcaagtttgccactcacaaccataaccacagcctaagttaggatgcagccctgctctcctgtctccctctcaagcccaattcagatgccgcttctttgtgcaccctcctccatcctcttccccctaccagaattaatctcttccttattgaaatccacaactgtgttggaaatcggtagaaagaactgaacaaagcctgagtcatcaatgaggctcaacactctgctgaggaaacttaagctggggaaaccgagacccagagaggcaacaccaaagtcactcaacaagtttctggattcgggaaagcacccagagcccttatcacattctctctcatagaatggatattatgtacatagctgattctctccaccggactgtaaactcctgataagcagggagtatgctacttcctctctgtaccccccaccacaccttggatggggtttgaacaggggacaactgcagaacttgtttgctgaagcaacttttacctcgggactttcccaagtccgctctgccctaagctatcattcagtttctggggagccatctctctgcccccactagaaagtaagggcaggagggacaaaaagcagcatgatgtggcaaaaaagcagcacacaggcttggcgtcaggcaggcctgcattctatttattttattttattttatttgtttatttatttttttggagacggagtctcactccgttgcccaggttggagtgcagtggcgccatcttggctcactgcaacctccacctcccaggttcaagtgattctcctgcctcagcctcctgagtagctggggtwacaggcgcgcaccaccatgcccagctaatttttgtatttttagtagagatggggtttcaccatgttggccaggctgatctcgaactcctgacctcaggcgatctgcctgcctcggcctcccagactgctgggatgacaagtgtgagccaccgcacctggccaggcctgcattctaatacaggctctgcaagtagaacctccattttcttatctgtaaaatgggatgtgataactacacctgcctccttgtcatgtggctgtgcaatgcaat

SEQ ID NO: 694626 - DNA, 3260 bp, Homo sapiens
  misc_feature 136, 137, 138, 139, 140, 141, 142, 143, 144, 145, 146, 147,148, 149, 150, 151, 152, 153, 154, 155, 156, 157, 158, 159,160, 161, 162, 163, 164, 165, 166, 167, 168, 169, 170, 171,172, 173, 174, 175, 176, 177, 178, 179, 180, 181, 182: n = A,T,C or G
  misc_feature 183, 184, 185, 186, 187, 188, 189, 190, 191, 192, 193, 194,195, 196, 197, 198, 199, 200, 201, 202, 203, 204, 205, 206,207, 208, 209, 210, 211, 212, 213, 214, 215, 216, 217, 218,219, 220, 221, 222, 223, 224, 225, 226, 227, 228, 229: n = A,T,C or G
  misc_feature 230, 231, 232, 233, 234, 235: n = A,T,C or G
attcaactcaggctctgtgttggaatcctgggaaaaagaaaaccactgcaactttagctaacagctgagctggttgggaatcagaattgagcccaaggtaatggtgattcagccaaggaaggctaatctagttagnnnnnnnnnnnnnnnnnnnnnnnnnnnnnnnnnnnnnnnnnnnnnnnnnnnnnnnnnnnnnnnnnnnnnnnnnnnnnnnnnnnnnnnnnnnnnnnnnnnntcttsgtcaggagaaagggcctcatttcctctgcctaattctcctatttcttaatgcctggtctgggtgacccacagccccatggctccctctttagccagtcttcagtgatctttatctggaaaccactgccctattccaaggagaatgttcccaaggctgacttcagtctgactcaaacttggtcaagccatagttaaaattacaatacagatactaggaggttttcttgaaatagtgctgattttcttgaatagcattgcctggtctctgaagcagttaaccagttaaccccaggactaatctgactgatttagagttaggaacagaagtcaacaatgtatgctagtatttcccaaggtgggttaacaacaacaacaaccttgttaccatgagattttctataaaaatagatctttgtggtctaataaattcagaaaacttagaatattaaagcctttcttttgaggtttcccagtgcacaactatatattaaagggtcttatgaattctcatagtaaaactatctgcatagtgttatttaacccaatgtcacaaacatatttgactaaggagctcttttaataagcaccaattaacaatatctcaaggacacagggaaataaaggaaaggggatagagcatgactcttttttttttttttagacgaagtctcactctgtcacccaggttggagtgcaatggcgccatcttggctcactgcaacctccacctccctgattcaagcagttctcctgcctcagcctctggagtagctgggattactggcgcctgccaccacgccaggctaatttttgtatttttagtagagacggggtttcaccatgttggccaggctggtctcgaacccctgacctcagatgatcctcctgcctcggcctcccaaagtgctgggattacaggcatgagccaccgcgccgggccgagcatgacgctctgagcagagctgcaggccagaaagactttggcccaaaaggcagagttacaacttgattccacagagattcctccatgtccagggaggtgttctgggtgttacaggggcatgtgaagatgagcaagacatagctcttgcacccaagggacttagaatcgagggtgttctaggccattctgaagtctaatctaaattcccagctttaccccgctctcccggctggcctgtgtatctgctgagccctggcaaacacaaatacagctacacagcagtcacatgaggttatataattttagtccttttcagcaaaggtggttcattaaatgtataattaaaggttgatttaattttgatacctgggtaagaggttattacaaagaaattctcaaatcagaataaactatttgtcaagccatgtgcctcaatttttggttcagacagtatggttcctttaactatgcaagtcatcttttgctagctaccatgcctctgaaaatgcatctgcctccctccttcccatgtcttcatgtttcttcccttctcttctgcagcctctggtgctgttgatggagtggcctgaagccaccaactttgcctgcctgatcgcggggtactgccgcctcttgctggattccaggaagatggtcttctccaggcctgccagccagccacttccacctccaatgatcaaggcaggtagggctcaacctcggttggtttttgctgtgccagaggccctttggaccctgaagacatggagggaagagcttctctgccttagtgctcaccccgtgccaacagtgcctgatttgccaggagccaacactgtaccactatatcctagctggcacagcccagtgggaaagacagctggccttcacatgtacttgtttcacaaaggatacctgtgacaacattgtgattgagtcagccaatgaatgtattattaaaatagcaaacatgataaatagagccaattaaatggctgcattggatctaaggcaaacttagcggtgcagagatctagaggaaacttacaggtgttctggctcagttgaagtgaagatgaaaatgaatataaaggtctgatgaaaaggaggtggctcaaagaacaggtacttcacatattagacctaaggctcatgtagatgcagtaagtgctccccaaccccagcacccagaaataatgagtgaagctgagactgacatccagtagtttgctctcctcacatgctgaatactctcaacccacttgcccttgctgcttgactatttctttcttcaaggctgtggttttctgagtagtcatatcacactttgggaggctgaggcaggcggatcacttgaggtcaggagtctgaaaccagcctggctaacaaggtgaaaccctgtctctactaaaaaaaaaaaaaaaaaaaaaaaaaaaatccaaaaaataggccaggcatggtggctcacaccagtaattccagcactttgggaggctgaggtgggcagatcacctgaggtcaggagtttgagaccagtctggccaacatggtgaaaccccatctctaccaaaaatacaaaaattagctggacgtggtggtgtggacctatagtcccagctgtttgggaggctgaggcaggagaatcacttgaatctaaaaggcggaggttgtagtgagctgagatcacgccactgcactccagcctgggtgacagagtgagactgtctcaaaaaaaaaaaaaaaaaaaaagccaagtgtggtggtaggtccctgtaatcccagctactcgggaggctgagacaggagaatcgcttgaaccctggaggcagaggttgcagtgagccgagatcccgcctttttacttcagcctgggcgacagagcaaaactccctctcaaaaacaaacaaacaaacaaacagtagtcagatcagatctcgatcgaggtgtttgagagcagacacatactcctgatggatggcccagacctagaaggctgtggacaccccccacccacacacatcttctcacctcttgtctcttcatcacgatcatcatgacatgcctgagtttacatctc

SEQ ID NO: 694627 - DNA, 1470 bp, Homo sapiens
taatacaaaacatcctagtacaaagtcaggttgacttgctttcccctaatgactaatgatgttgaacatgttttgatgtgtttattgggcatttgtatatttcccttggagacatgtctatcacatcatttgctcattttcagttactgagttttcagtgcacaggtcttgtgcctccttgattaaattgattcctaagtattttattctttttgrtgctactgtcaataggattctgaccatatttagaagcctttgtctttcaaaaggggggattggaatcattcacatttactattataactgatgagtttgatcttatagtgttctttcctttttatttatttaacaattctatgggttggaactcagcactgtacaaaacaaactccattcttgctctgctaaatggagtttgtttttttttttgtaatacatagtagtatattttgtaatataaaatatgttatatttaaatattgtatatcatgtaaataaaatttatatcaatatttttattgatataaaataatagattttatcactacaactaggaagttaggaatgaagtaagaaaaactatgataaacttatactatgtaggggatacatattcttgatgtaaaaaataaagagaaaatagtactttacaccagtataaaatcaaaatatgttaaaaatcagatttatataatattttatatcaaatttatatcatatttattatttttataatatatatgaattttatgttatattatatatatattatatatatacttatgaaaccttccccctgtgctttgtaccgtacttgcaatagccttttcctatctttgcttgaacatcatcaagccctagttcttaaacttttttggtctcaagaattcttttcactcttaaacatttttgttattgttattgttattattattattattattttttgagacagagtttcgctcttgttgcccaggctggggtgcagtggcaccatctcggctcactgcaacctccgcctcccgggttcaagtgattctcctgcctcagcctcccgagtagctgggattacaggcatgcgccaccacacctggctaattttgtattttttagtagagacagggtttctccatgttggccaggctggtcttgaactcccgacctcaggtgttctgcccgcctcagcctcccaaagtgctgggattacaggcatgagccacagcgcccggccactttaagaagtattaaggacctcaaagtgattttaccaatggagtttatatctgttaatatttattatattagaaagaaaaactgaggcattaaaatacatgtattaattcactttaacgtaataatgctagtttcccaaaagagagacagaaagcttgctagctcttgtttctctcacccctcttttgttttatggaccaagtggtttcgcccttctgattatcttttaaaatttga

SEQ ID NO: 694628 - DNA, 2006 bp, Homo sapiens
  misc_feature 573, 574, 575, 576, 577, 578, 579, 580, 581, 582, 583, 584,585, 586, 587, 588, 589, 590, 591, 592, 593, 594, 595, 596,597, 598, 599, 600, 601, 602, 603, 604, 605, 606, 607, 608,609, 610, 611, 612, 613, 614, 615, 616, 617, 618, 619: n = A,T,C or G
  misc_feature 620, 621, 622, 623, 624, 625, 626, 627, 628, 629, 630, 631,632, 633, 634, 635, 636, 637, 638, 639, 640, 641, 642, 643,644, 645, 646, 647, 648, 649, 650, 651, 652, 653, 654, 655,656, 657, 658, 659, 660, 661, 662, 663, 664, 665, 666: n = A,T,C or G
  misc_feature 667, 668, 669, 670, 671, 672: n = A,T,C or G
caactcacccttcattacaagaataattaactgttgatccaaactgtgtatctgtgtttatatgcaccattccattgaagggttctggtggaggtccacatgattttcctaggggaagaagcagaatttgggattaaatatagagttcaacttacctttgtaaggttcagactggagtgtggcatactaaacagcatatacagttccaattgtttcatggaattgactgctttgaggaaacttggcagacaacttcagaatcatgtagctacgaacacaactttgaaaaagactatcttgcacctcctaataaaggttatgtatgggctctcgcctgtaatcctagcactttgggaggccgaggccggcagatcacctgaggtcaggagttcaagaccagcctgaaaaacgtggcaaaaccccatctctactaaaaaatacaaaaattagctgggcatgggagtgggtgcctgtaatcccagttactcgagaggctgaggcagggagacttgctcgaacccaggaggttgcagccaagatcgcgccactacataccggcctgggtgacagagnnnnnnnnnnnnnnnnnnnnnnnnnnnnnnnnnnnnnnnnnnnnnnnnnnnnnnnnnnnnnnnnnnnnnnnnnnnnnnnnnnnnnnnnnnnnnnnnnnnntaaaaaaattagatgggcatggtggtgtatgcccgggtctttattactccataggctgaggtgggagggtgcgcttgagcccaggaggagaagactgcagtgagctgcgatcatgccactgcactccagcctggatgacagtgtgagaccctgtctcaaaaaaaaaaaaaaaaaaaaaaaaagccaataaatacatgcttaaatacaggcttattgtgcaaaatgaacaaaataaaaggacaactgtttttaatattttgttatatttccttctgactttattgtgtttcatgtgtatctatgtccaaattatatttaggatcttattccatgtacagattgtacgttgcatttcttctcttaggaacattcattcaacaaatatgggtcttgtatgtctggtgctgttacactagtaggtaataacagacaattcctattttctttatcctttttttactatttgtttacacacacgtacatgcaggaagataagcagggactttttttgctcattgttaagtgcttaatgccgggaacacagtaggcaatcaacagatgtttgctaaaatgtattgggagtggcagacattaaccaaaacataatagtaacaaatatattaaccagggaagtgttctggaggaaaggagtataattttctgacagcatttaacaaatgactggggggagggaaggctttgcttctcatcaaacagacaaaactctgccactttggggcatctgtgctttctgttccctcagtcctggaacgttctccccatgacctgctgcataaatgggctgtttcttctgcaagctcagctggaatgtaccgctcagagaccttcttggaaccccccaactcaggttgaacacatacaacccagttcaagtacctcttgtaatcacccttttaaagtgatcttttttgttctctgtctctccccatcagaatgcagaattcttctgtcttcccccatttgtggtycaaaaagccccatttgtttgcttctgtatgaaccctaactcagtatccatatagacatctgttaaatatcagaaaattaaatatactatttggctggggcttagagcctaggaaaaagtccctcctgcctccaagaggaaggttctttaaagagctatgctcaggatggtctttctgttgtacctaaaaagctagggcagcagcagctgagggccagaaaggatctgtctcccctgtttatgttgactctgcagggcttccagtacttcagtcttgcatctcactgatcattaaaacgttcattttgaaggagggtgatgggattagggagcagtggtgttaaga

SEQ ID NO: 694629 - DNA, 1583 bp, Homo sapiens
tttttaatgaaaaataacaattttccaaaacaaaataaaattagtgagaatagtggcattgttcacattttttgcacatctcttcaacacctaacttaaaggaagacttggatttgggctgttgtgtaatcacacaatatgtagactttggaaaatatcactatacacttctgcccggcgcagtggctcaggcctgtaatcccagctctttgggaggccgacgcgggtggatcgcgaggtcaggagatccagaccatcctgtctaataccctgaaaccccgtctctactaaaaatacaaaaaattagccaggcgtggtggtagcagcctgtagtcccagctactctggaggctgaggcaggagaatggcgtgaacccgggaggcggagcttgcagcgagccgagatcgcgccactgcaytccagcctgggcgacagagcgagattccgtctcaaaatcaatcaaatcaatcaatcaatcaatcactatacacttataaggatgagagtgaaaaaagacaatattttggtggtattgtgaatcaccaatttagaaaatggatatatttaaaaattgcaaaggatttctcagctagcgctcagttaagcatattttctcattaaattgtcagcatttcttgtgataactagaagaaaacttagcatggccttgcaaataaatataggcgtattaggccgttttcgtattgctataaagaaatgcctgagactgggtaatttataaagaaaagaggtttaattggctcgtgattctacaagctgtacaggaagcatgatgctggcatctgctgggggtttggggaggcctcaggaaacaacaaccattgggaaaggcaaagggggagcaaggtgtctcacatggcaggagcaggagcaaggtggggaggacgggaggtgttgcgcacttttaaataaccagatctcccaagcactcagtatcacgagaacagcaccaaggggacggtgctaaaccattcatgagaaatccacccccatgattcagacccctcccaccaggccccacctccaacattgtggactacaatttgacatgagatttggtggggacacagatccaaaccatatcaataggtatttacactttaagaaaatgagatttgttctgaaagttagttactacattaatggtttgaatttgggatgatatatttgctcatagaaaccttcttttaaatccatattgaattcacaaccagcttgtagaaaccctatattgacaaattcactgaagacacagaaattttactaatgctgccttaatcttttacatttctttcctctttttcttcaattttaagagattttgtgcacatgacctccaaaaataaaaaatggaaaacacacctttagtgaagtagaagtatttgagtatcttaatgcagtaactgatagttgtgatcctgcacctggaccagatccattttcacttattggagagagcacgatttattgtggtgacaattcagtatggaatcatgctgctccagagtgtaaaagtcacctttcaatttatttccttcttcatctgtaagtactctggaaa

SEQ ID NO: 694630 - DNA, 1583 bp, Homo sapiens
tttttaatgaaaaataacaattttccaaaacaaaataaaattagtgagaatagtggcattgttcacattttttgcacatctcttcaacacctaacttaaaggaagacttggatttgggctgttgtgtaatcacacaatatgtagactttggaaaatatcactatacacttctgcccggcgcagtggctcaggcctgtaatcccagctctttgggaggccgacgcgggtggatcgcgaggtcaggagatccagaccatcctgtctaataccctgaaaccccgtctctactaaaaatacaaaaaattagccaggcgtggtggtagcagcctgtagtcccagctactctggaggctgaggcaggagaatggcgtgaacccgggaggcggagcttgcagcgagccgagatcgcgccactgcactccagcctgggcgacagagcgagattccgtctcaaaatcaatcaaatcaatcaatcaatcaatcactatacacttataaggatgagagtgaaaaaagacaatatkttggtggtattgtgaatcaccaatttagaaaatggatatatttaaaaattgcaaaggatttctcagctagcgctcagttaagcatattttctcattaaattgtcagcatttcttgtgataactagaagaaaacttagcatggccttgcaaataaatataggcgtattaggccgttttcgtattgctataaagaaatgcctgagactgggtaatttataaagaaaagaggtttaattggctcgtgattctacaagctgtacaggaagcatgatgctggcatctgctgggggtttggggaggcctcaggaaacaacaaccattgggaaaggcaaagggggagcaaggtgtctcacatggcaggagcaggagcaaggtggggaggacgggaggtgttgcgcacttttaaataaccagatctcccaagcactcagtatcacgagaacagcaccaaggggacggtgctaaaccattcatgagaaatccacccccatgattcagacccctcccaccaggccccacctccaacattgtggactacaatttgacatgagatttggtggggacacagatccaaaccatatcaataggtatttacactttaagaaaatgagatttgttctgaaagttagttactacattaatggtttgaatttgggatgatatatttgctcatagaaaccttcttttaaatccatattgaattcacaaccagcttgtagaaaccctatattgacaaattcactgaagacacagaaattttactaatgctgccttaatcttttacatttctttcctctttttcttcaattttaagagattttgtgcacatgacctccaaaaataaaaaatggaaaacacacctttagtgaagtagaagtatttgagtatcttaatgcagtaactgatagttgtgatcctgcacctggaccagatccattttcacttattggagagagcacgatttattgtggtgacaattcagtatggaatcatgctgctccagagtgtaaaagtcacctttcaatttatttccttcttcatctgtaagtactctggaaa

SEQ ID NO: 694631 - DNA, 1583 bp, Homo sapiens
tttttaatgaaaaataacaattttccaaaacaaaataaaattagtgagaatagtggcattgttcacattttttgcacatctcttcaacacctaacttaaaggaagacttggatttgggctgttgtgtaatcacacaatatgtagactttggaaaatatcactatacacttctgcccggcgcagtggctcaggcctgtaatcccagctctttgggaggccgacgcgggtggatcgcgaggtcaggagatccagaccatcctgtctaataccctgaaaccccgtctctactaaaaatacaaaaaattagccaggcgtggtggtagcagcctgtagtcccagctactctggaggctgaggcaggagaatggcgtgaacccgggaggcggagcttgcagcgagccgagatcgcgccactgcactccagcctgggcgacagagcgagattccgtctcaaaatcaatcaaatcaatcaatcaatcaatcactatacacttataaggatgagagtgaaaaaagacaatattttggtggtattgtgaatcaccaatttagaaaatggatatatttaaaaattgcaaaggatttctcagctagcgctcagttaagcatattttctcattaaattgtcagcatttcttgtgataactagaagaaaacttagcatggccttgcaaataaatataggcgtattaggccgttttcgtattgctataaagaaatgcctgagactgggtaatttataaagaaaagaggtttaattggctcgtgattctacaagctgtacaggaagcatgatgctggcatctgctgggggtttggggaggcctcaggaaacaacaaccattgggaaaggcaaagggggagcaaggtgtctcacatggcaggagcaggagcaaggtggggaggacgggaggtgttgcgcacttttaaataaccagatctcccaagcactcagtatcacgagaacagcaccaaggggacggtgctaaaccattcatgagaaatccacccccatgattcagacccctcccaccaggccccacctccaacattgtggactacaatttgacatgmgatttggtggggacacagatccaaaccatatcaataggtatttacactttaagaaaatgagatttgttctgaaagttagttactacattaatggtttgaatttgggatgatatatttgctcatagaaaccttcttttaaatccatattgaattcacaaccagcttgtagaaaccctatattgacaaattcactgaagacacagaaattttactaatgctgccttaatcttttacatttctttcctctttttcttcaattttaagagattttgtgcacatgacctccaaaaataaaaaatggaaaacacacctttagtgaagtagaagtatttgagtatcttaatgcagtaactgatagttgtgatcctgcacctggaccagatccattttcacttattggagagagcacgatttattgtggtgacaattcagtatggaatcatgctgctccagagtgtaaaagtcacctttcaatttatttccttcttcatctgtaagtactctggaaa

SEQ ID NO: 694632 - DNA, 616 bp, Homo sapiens
gagaagagacacaagggtggaccccagatgaagtcagggggtyattctctcagtgtggctggttctggagcctttatggactcagaattggaagtgtgtgttaattggttggtgagtatgcaaaaaaggctaaaacaaagccaccactcaaaggtgggcacaacagtgcaaaaaaccaattagggaagagcaggtatatgtgaaatagatgaagagtggggatcaatcagaggaaagcacacccaacaggaagagaggttctcaagccagtccatggatttacctggaacttgtagctaggctttaaactgtcttcagcttgaaggtcgggtttcaccgggatccgccccatctgcctgtgatttgtctgcctcctgcttctaccactgtcaagtggtattattcgttgcttatgtgtatccattattcttggtgatacagtatgagtctgggggataactagattgagcaattaaggagttatttttaataatttccaaggattctttggcatttacaaagtccaccacctaataatgatttccaatttcagaacgattttagatttcagaagggaagcagtactcaatagtaagttgagcatttcagggtggca

SEQ ID NO: 694633 - DNA, 1020 bp, Homo sapiens
taataataacaaaaaaccagcattttggccaggtacagtgactcatgcctgtaaattcagcactttgggaggccaaggtgggcagattactagaggccaggagttcgagaccagcctgggcaacatggtaaaaccccgtctctactaaacatacaaaaaattagccgggcgaggtggcacacgcctgtaatgtcagctgcttgggaggctgaagcacaagaattgcttgaacccaggaggcagaggttgtagtaagctgagattgagctgttgcactccagcctgggcgacagagtgagactacatctcaaaacacacacacacacgcacacacacacaaacacatagcattttaagcaagaattgagttttacagaaagagaaagtaggcagaaggggtttttaaaaagttgttcatgaggctgtttgatatcctagttttgctaagacattgcagatactgacctctaagcccagatcctatcatagcactagaagttagattgggtcacttatggcacacataggctgccagtggggaagaactgagactttccattgggtattttaatatatgaacaaatattttgtaattacaattaacttttttttttttttgagacagagtcttgctctgtcacccagcctagagtgcagtggtgcgatcttggctcaatgaaacctctgcctcccgggttcaagggattctcctgcctcagcctcccgagtagctgggactacaggcmtgtgccactacgccaggttaatttttgtatttttagtagagacagttttgccatgttggccaggctggtctcaaactcctggcctcaagtgatccacccgccttggcctcccaaagtgctgggattgcaggcatgagccaccatgccaggctaccattaactttttacacttgaaaaaaaattccaaaaattaagatctgagtaaagaaatgtctttgacagggaagagaacatacgcagcttttgtactggttgactgaaatataacaacatc

SEQ ID NO: 694634 - DNA, 623 bp, Homo sapiens
tggcttgtggcagcacagctccaatctctgcttccttcttcacatggccttcctccctgtgtgtctgtgtcctttcctgtctcttataatgacacctatcattggatttaggacccaccctaattcagtatgatctcatttcacatctgcaaagaccctgtttccaaatgaggtcacatttcaaggttctgggtagacatgaattttggggagacactattcaacccgctgtagccccatttttccttctattgcgttccaaattccccaagcttagctcaggcccacagttgggcatctatcttccttttggccttggggcagctgagctctgttcttgkctcctcctgctctttgctggtttcagtgcttctcagcaagagtgcctcctacagcctcttctttcttttccctcgggaagtagcaccccagagatggctgaggtctggggcaggaactcctccaaattcaaaccttaaggccaggcacagtggctcatacctataatcccagcaatttgggaggccaaggcaggaggatcccttgagcccaggagtttgagaccagcctgagtgacatggtgaaaccccatctctacaaagaatacaaaaattagctgggca

SEQ ID NO: 694635 - DNA, 597 bp, Homo sapiens
ttaatgctccaattagagcctgaacacaagacctttccttttgtctggtgaaatcaggctgggccagttacatgagacttgactaaaggcttaggaataacagagaaaaaataaatgcaggcaatagaatatgaccatagaacatgacttcaagacaccctgcccactcagcaataggctttaaagacaatcttttgtcccttagacagaagggctggacctttagacgtgaagcccaatgagagaggcagcagtcattgtcagaacatccctgaggggagtatgaatccctgggttggacgcagtgaggcccaggtccccttatatgctggttttggaggtctgggatcttattaagagagatggcaggtctccctggcccactgcccctttcccacttcctgattsctgcttacctcaaagtggtggatgctgcctttgcacttaactttccaggaggccacacctacgtggggcattccctctgcttcctgaattctagtctgagaatcctctttgtctccattatgggctctttcatcactattcaccctattgaaggagatactccttttactcacccaaacattgtagcct

SEQ ID NO: 694636 - DNA, 633 bp, Homo sapiens
atcctggctaacatggtgaaaccccatatctaccaaaaatacaaaaattagctggtgtggtggcaagcatctgtagtcccagcctcaggaggctgaggcaggacagttgcttgaatctggtggcgaaggttgcagtgagccaagatggtgccactgtactcaagcctgggcggcagagcaagactccgtctaaaaaaaaaaaaagaaaaggcggtggggggggcgcgtgaaatttggctgcaggaggaatgtagtggggagtaggggttgsaattgtttaattcaagaggcagggggaaaaagtgatgcagtataatggaataagaactggactgaggctgagcacagtagctcacgcctgtaattccagcactttgggaggccaaggcaggaggattgcttgagcccaggagttcgagaccagcctggccaatgtgagaccccgtcgctacaaaaaatacaaaaacttaactgggcatggtggtgtgtgtctgtagtccctgagagtgcctgagagaaaaggattgcttgaagcccaggagcttgaggctgtgatgagcaatgattgtgccactgcactccagcctgggcaacagggcgagaccctgtctcaaaaaacaaacagacaaaaca

SEQ ID NO: 694637 - DNA, 683 bp, Homo sapiens
tgtgaaaaacagtatggagattcttcaaaaaaataaaaataaaactaccatatgatccagcaatcctacttctgggtatgtatccaaaagaattgaaaacaggatatttaagagatatttgtacacccatgtttacagcagaattattcacaaaagcytagaggtgaaagcaacgtaaatatccatcaatgggtgaatggataaagaagtgtgctctgtaaagacaatggaatattattcatccttaaaaaggaaggaaattcagttgcatgttactcagtggatgaaccttgaggatattatgctatgtgaaataagccaatcacaaaatacaaaaagtgtatgatgccacttgtaaaaggtgtctagagtaatcaaactcacaggaacacaatggtggctgccagaagccagggaagtaggggtgaggagttgcttttcagtcggtgcagagtttcagtcatgcaggaggggaaagggggcttaggaatctgttgcacaacactttaagtgtggttaacaatattgtactctacaagtagaaattgttgggagggtgaattttaggttatgtggttttttgccctaattttctaaaataaaaagcaagttgcagaatcatatgtacagtaaaaagtcaaaggattttaaaacacaaaacaatgtcacatagagtttattta

SEQ ID NO: 694638 - DNA, 1534 bp, Homo sapiens
tcaaatcaaatcaaaataaaagaggccccaaagagtaccctcacgccttccaccatgtgaggacattgtgacaggacagctgtctgtgaacccagaaatgggccctcaccagacactgaatctgctggttttctaatcttggactttccagtctcagaactgtgaggaataaatatctgttatttataagccaccagtccatggtcttctgttgtagctgcccacatggcctgagatgcagcttttggactggggagatatcattgaaatgtttctttgttctttaagattccaggaaaaaaaatatacccagcttgcatgcagtgtgtgtatgttgcaacggtgtattataggacatacatctatgtggggacaaagggctgcatcatcactccagtaccagtgcctcttaggctgggccacagggcctcgtggagaactaaagaacaactctgcatctctccaggcatccagctggagtcaacgtctttcttggttcacctactcacaacattcaaataaatatttattgagaacctaccaggcactgttctaggtgctggggaaatattttaacatttccccattaaaagtaatgacaaaaccgaatttacttctgcaccaacctagtagcagtgaacacaacagacatacattattcctgtcctcatgagcttaacaagaagtgagatgtggggtatgttctggagtacctggctgtgtcctgcggattctactgattcgagggaaggtgtggattcactttgagtaggttagcacctccaccaacaccagcaccctcaccttccaggtgcacctctggcagacattaacagacaattgcagcatggcagacactagcggacgactgcagctctctctcgacttcatgattgctgacatgggaacaactcaggcaaccctcccttccatttgcttttcaccctacagccaccctagagttatggctgttatagagcacagccatcactctggatgcaaggattgctaatatgccaggcagagctctgaaagcattgcyttgccagctcatccaatcctctctacagcttcatgaggcataattttctctgttttccaagtggagaaattgaggccacctgagttgcaaactcagtagcaagaagggatgtgcagcctggatctagagactgtgctcttaacaaccaaggcagatccaggccctggggcttggctggatgactgggtgctggccactcttcctccatagcacagcttgggagagccacgtcgggttctgcagaaaatccgactcccaatgtctcaggagagcaggcagttggagacacgtcccctcgggaaatctctcaattttccgagctctcacatttccttatccataaactatggataaaaatacctaccccttgggattcttaagagagtaagaataaaatcaagcccagagaggcttgccatgagtaggacaggtgacaagtgacaagaacatccttttccctggtgatggcttcacggacatgagacctgaaca

SEQ ID NO: 694639 - DNA, 1534 bp, Homo sapiens
tcaaatcaaatcaaaataaaagaggccccaaagagtaccctcacgccttccaccatgtgaggacattgtgacaggacagctgtctgtgaacccagaaatgggccctcaccagacactgaatctgctggttttctaatcttggactttccagtctcagaactgtgaggaataaatatctgttatttataagccaccagtccatggtcttctgttgtagctgcccacatggcctgagatgcagcttttggactggggagatatcattgaaatgtttctttgttctttaagattccaggaaaaaaaatatacccagcttgcatgcagtgtgtgtatgttgcaacggtgtattataggacatacatctatgtggggacaaagggctgcatcatcactccagtaccagtgcctcttaggctgggccacagggcctcgtggagaactaaagaacaactctgcatctctccaggcatccagctggagtcaacgtctttcttggttcacctactcacaacattcaaataaatatttattgagaacctaccaggcactgttctaggtgctggggaaatattttaacatttccccattaaaagtaatgacaaaaccgaatttacttctgcaccaacctagtagcagtgaacacaacagacatacattattcctgtcctcatgagcttaacaagaagtgagatgtggggtatgttctggagtacctggctgtgtcctgcggattctactgattcgagggaaggtgtggattcactttgagtaggttagcacctccaccaacaccagcaccctcaccttccaggtgcacctctggcagacattaacagacaattgcagcatggcagacactagcggacgactgcagctctctctcgacttcatgattgctgacatgggaacaactcaggcaaccctcccttccatttgcttttcaccctacagccaccctagagttatggctgttatagagcacagccatcactctggatgcaaggattgctaatatgccaggcagagctctgaaagcattgccttgccagctcatccaatcctctctacagcttcatgaggcataattttctctgttttccaagtggagaaattgaggccacctgagttgcaaactcagtagcaagaagggatgtgcagcctggatctagagactgtgctcttaacaaccaaggcagatccaggccctggggcttggctggatgactgggtgctggccactcttcctccatagcacagcttgggagagccacgtcgggttctgcagaaaatccgactcccaatgtctcaggagagcaggcagttggagacacrtcccctcgggaaatctctcaattttccgagctctcacatttccttatccataaactatggataaaaatacctaccccttgggattcttaagagagtaagaataaaatcaagcccagagaggcttgccatgagtaggacaggtgacaagtgacaagaacatccttttccctggtgatggcttcacggacatgagacctgaaca

SEQ ID NO: 694640 - DNA, 1534 bp, Homo sapiens
tcaaatcaaatcaaaataaaagaggccccaaagagtaccctcacgccttccaccatgtgaggacattgtgacaggacagctgtctgtgaacccagaaatgggccctcaccagacactgaatctgctggttttctaatcttggactttccagtctcagaactgtgaggaataaatatctgttatttataagccaccagtccatggtcttctgttgtagctgcccacatggcctgagatgcagcttttggactggggagatatcattgaaatgtttctttgttctttaagattccaggaaaaaaaatatacccagcttgcatgcagtgtgtgtatgttgcaacggtgtattataggacatacatctatgtggggacaaagggctgcatcatcactccagtaccagtgcctcttaggctgggccacagggcctcgtggagaactaaagaacaactctgcatctctccaggcatccagctggagtcaacgtctttcttggttcacctactcacaacattcaaataaatatttattgagaacctaccaggcactgttctaggtgctggggaaatattttaacatttccccattaaaagtaatgacaaaaccgaatttacttctgcaccaacctagtagcagtgaacacaacagacatacattattcctgtcctcatgagcttaacaagaagtgagatgtggggtatgttctggagtacctggctgtgtcctgcggattctactgattcgagggaaggtgtggattcactttgagtaggttagcacctccaccaacaccagcaccctcaccttccaggtgcacctctggcagacattaacagacaattgcagcatggcagacactagcggacgactgcagctctctctcgacttcatgattgctgacatgggaacaactcaggcaaccctcccttccatttgcttttcaccctacagccaccctagagttatggctgttatagagcacagccatcactctggatgcaaggattgctaatatgccaggcagagctctgaaagcattgccttgccagctcatccaatcctctctacagcttcatgaggcataattttctctgttttccaagtggagaaattgaggccacctgagttgcaaactcagtagcaagaagggatgtgcagcctggatctagagactgtgctcttaacaaccaaggcagatccaggccctggggcttggctggatgactgggtgctggccactcttcctccatagcacagcttgggagagccacgtcgggttctgcagaaaatccgactcccaatgtctcaggagagcaggcagttggagacacgtcccctcgggaaatctctcaattttccgagctctcacatttccttatccataaactatggataaaaatacctaccccttgggattcttaagagagtaagaataaaatcaagcccagagaggcttgccatgagyaggacaggtgacaagtgacaagaacatccttttccctggtgatggcttcacggacatgagacctgaaca

SEQ ID NO: 694641 - DNA, 647 bp, Homo sapiens
ttgtagctttaaccaacagcagccaccatccaggagccaccatccaggatgtttctttttttgactgaggcaaawaaagccttggctctgtggggttgcataaggatcacctaggatgctttttcaaaatgcagactcctgggagtcacccttgcctcaatcttctaggttcaataggtccagggtaggacctgagaacaacaggttccacaagtgaatctgatgatggtggatttggggaaaaagccctagatagtaacctttgtcttcttgtcttttcactgtacacaatcccccttccaacttgttttaattacctggagctttaattatcacctatatgccaatgacttccaagtctctatacctatagtcctaacctctctcttgaatgctaggtttaaatttccatcagccagcagataaatctcccttaatataccatggataatttcaaaaacactttcaaaacataattgtgagaacttatttcctcctaagacacttgaaattaattgcccctctttgaggtctacgtaggtagtaaaaggccagggttgaccaaaacgtgaaatccactcagggtaaagaaagttttatttaaatttcttgtaaagttaaaaaaaaaagaaaagaaaaagcaatgt

SEQ ID NO: 694642 - DNA, 647 bp, Homo sapiens
ttgtagctttaaccaacagcagccaccatccaggagccaccatccaggatgtttctttttttgactgaggcaaataaagccttggctctgtggggttgcataaggatcacctaggatgctttttcaaaatgcagactcctgggagtcacccttgcctcaatcttctaggttcaataggtccagggtaggacctgagaacaacaggttccacaagtgaatctgatgatggtggatttggggaaaaagccctagatagtaacctttgtcttcttgtcttttcactgtacacaatcccccttccaacttgttttaattacctggagctttaattatcacctatatgccaatgacttccaagtctctatacctatagtcctaacctctctcttgaatgctaggtttaaatttccatcagccagcagataaatctcccttaatataccatggataatttcaaaaacactttcaaaacataattgtgagaacttatttcctcctaagacacttgaaattaattgcccctctttgaggtctacgtaggtagtaaaaggccagggttgaccaaaacrtgaaatccactcagggtaaagaaagttttatttaaatttcttgtaaagttaaaaaaaaaagaaaagaaaaagcaatgt

SEQ ID NO: 694643 - DNA, 2241 bp, Homo sapiens
acgaactcaaacaaatttacaagaaaaaaacaaacaaccccatcaaaaagtgggcgaaggacatgagccttattctttcacggccaattgttccaaggaaatattccattcatcagagaagacatccatcctactgagacggctccagcctcaacaagaggctgccaaggtcccatccggaccctcacccagtctgcagcagtgtgaaatgtcatttttggaattgactccgcatctggagtctccccaaaacacaaaggtgtttcctatttcccaagtgtgggaggtgaaaagggaaggctggggcaatggcaggtccatttgataaaaggaagacatatgcaggtatctcagctcctcactgaaacagacacaggctatatataatcaaacaaccacagcttacacacaaacacacacagttgcaggcaagcacatgaacgtttcgtgcaaaaatacacgtacgcagacattcttggcaaggcattcacagaagcctccttaatcacagacacaaactgaatgtcatttcccacagttccacacacagacatgctcacagatatctactcatgcagcagagacatctacacacaaacattacactcacatccatttgtatattacacatattcatccaacacatatttattaagcacccacttactaaatagcaaagtccctaacttcatggaatttacattcctggatagagggatgtataacaatgaataaaaatatatgtactamtgtcggactggaatatgggctctgaagaaaaataaggcagaggaggagaatgacaagagggaaaggagagattgttttagaacatgtggtcaggaaagggctctccgacatttgagcagaaacttgaagtcagccatgtggagctctcaggaaaggctttccaggcagaggtaacagcaaggacaaaggccctgaggcatagacaagcttgtgtgtgtagaacagcaagaaaaccagggtggctggagcacagatggagggagcaggtgaaggaggtaaggttagagggagaggggccgctagccagagggctccacggcccattgtaatcccactaatcccacggcccaatggaaatcccagctggattttatcccgagtgtgatgggaagcccctggagggtcttgagggaagtaacataatatgatctgggtttttttgttttgttttgttttttttatttctgagacagggtctcgctgtgtctcccaggctgaagtgcagtggtgcaatcttgactcaccgtagcctcaatctctggggctcaggcagtcctcccacctcagcctcctgggtgtgctgggactaccatcatgctgggataatttatttattttttttgtagagatagggtctcactatgttgtccaggctggtctcaaactcctgggctcaagcagtcctcctgccttggcctcccaaagtgctggaattacaggcgtgaaccaccacacctggcctatggtttgtttttaaaagctcattttggctgctatacagagaaaaaactgcagagatgcaagaagaaaagtggagagaccaggccactaggacactgcagaagtccaggctagtgaccatgctgccttcactagagtgggaggaggtgccgaaaatggtcagattctggtattttgaaggtagaatcagcatgattgctgatagcttagttataagatgtgaggaaaagaggggaaaaaaaaaaggataactcaggtttccatcctgaacagctgagtgaagatgggtcttttcctgaatgaagagcattgagttggagaagcagatctgaggagggagagaatggaaaccaaggttttgggggacatggcaagaatgactgacacgtgaatccaacttccaagtaagcatatgttgaattggctgttggatatagaagtctggagctgagggctagatttacagacttcagagtcagcattcacacattaacttcctccaacaacattcacttgcagaagcccactccacacaccataaccataacctcaaggcagaaagctaagagaaaagagtgatagacatggtgagatgaagaatttacacctcagtataacagaatataccataaacaaagctaaaaggcaaacaataaatttggaaaaatatctgttatatactgtatatgacatagaggaattcataaaaaataaatagcacaaatcaaataaaagggaatatccatgata

SEQ ID NO: 694644 - DNA, 2241 bp, Homo sapiens
acgaactcaaacaaatttacaagaaaaaaacaaacaaccccatcaaaaagtgggcgaaggacatgagccttattctttcacggccaattgttccaaggaaatattccattcatcagagaagacatccatcctactgagacggctccagcctcaacaagaggctgccaaggtcccatccggaccctcacccagtctgcagcagtgtgaaatgtcatttttggaattgactccgcatctggagtctccccaaaacacaaaggtgtttcctatttcccaagtgtgggaggtgaaaagggaaggctggggcaatggcaggtccatttgataaaaggaagacatatgcaggtatctcagctcctcactgaaacagacacaggctatatataatcaaacaaccacagcttacacacaaacacacacagttgcaggcaagcacatgaacgtttcgtgcaaaaatacacgtacgcagacattcttggcaaggcattcacagaagcctccttaatcacagacacaaactgaatgtcatttcccacagttccacacacagacatgctcacagatatctactcatgcagcagagacatctacacacaaacattacactcacatccatttgtatattacacatattcatccaacacatatttattaagcacccacttactaaatagcaaagtccctaacttcatggaatttacattcctggatagagggatgtataacaatgaataaaaatatatgtactactgtcggactggaatatgggctctgaagaaaaataaggcagaggaggagaatgacaagagggaaaggagagattgttttagaacatgtggtcaggaaagggctctccgacatttgagcagaaacttgaagtcagccatgtggagctctcaggaaaggctttccaggcagargtaacagcaaggacaaaggccctgaggcatagacaagcttgtgtgtgtagaacagcaagaaaaccagggtggctggagcacagatggagggagcaggtgaaggaggtaaggttagagggagaggggccgctagccagagggctccacggcccattgtaatcccactaatcccacggcccaatggaaatcccagctggattttatcccgagtgtgatgggaagcccctggagggtcttgagggaagtaacataatatgatctgggtttttttgttttgttttgttttttttatttctgagacagggtctcgctgtgtctcccaggctgaagtgcagtggtgcaatcttgactcaccgtagcctcaatctctggggctcaggcagtcctcccacctcagcctcctgggtgtgctgggactaccatcatgctgggataatttatttattttttttgtagagatagggtctcactatgttgtccaggctggtctcaaactcctgggctcaagcagtcctcctgccttggcctcccaaagtgctggaattacaggcgtgaaccaccacacctggcctatggtttgtttttaaaagctcattttggctgctatacagagaaaaaactgcagagatgcaagaagaaaagtggagagaccaggccactaggacactgcagaagtccaggctagtgaccatgctgccttcactagagtgggaggaggtgccgaaaatggtcagattctggtattttgaaggtagaatcagcatgattgctgatagcttagttataagatgtgaggaaaagaggggaaaaaaaaaaggataactcaggtttccatcctgaacagctgagtgaagatgggtcttttcctgaatgaagagcattgagttggagaagcagatctgaggagggagagaatggaaaccaaggttttgggggacatggcaagaatgactgacacgtgaatccaacttccaagtaagcatatgttgaattggctgttggatatagaagtctggagctgagggctagatttacagacttcagagtcagcattcacacattaacttcctccaacaacattcacttgcagaagcccactccacacaccataaccataacctcaaggcagaaagctaagagaaaagagtgatagacatggtgagatgaagaatttacacctcagtataacagaatataccataaacaaagctaaaaggcaaacaataaatttggaaaaatatctgttatatactgtatatgacatagaggaattcataaaaaataaatagcacaaatcaaataaaagggaatatccatgata

SEQ ID NO: 694645 - DNA, 2241 bp, Homo sapiens
acgaactcaaacaaatttacaagaaaaaaacaaacaaccccatcaaaaagtgggcgaaggacatgagccttattctttcacggccaattgttccaaggaaatattccattcatcagagaagacatccatcctactgagacggctccagcctcaacaagaggctgccaaggtcccatccggaccctcacccagtctgcagcagtgtgaaatgtcatttttggaattgactccgcatctggagtctccccaaaacacaaaggtgtttcctatttcccaagtgtgggaggtgaaaagggaaggctggggcaatggcaggtccatttgataaaaggaagacatatgcaggtatctcagctcctcactgaaacagacacaggctatatataatcaaacaaccacagcttacacacaaacacacacagttgcaggcaagcacatgaacgtttcgtgcaaaaatacacgtacgcagacattcttggcaaggcattcacagaagcctccttaatcacagacacaaactgaatgtcatttcccacagttccacacacagacatgctcacagatatctactcatgcagcagagacatctacacacaaacattacactcacatccatttgtatattacacatattcatccaacacatatttattaagcacccacttactaaatagcaaagtccctaacttcatggaatttacattcctggatagagggatgtataacaatgaataaaaatatatgtactactgtcggactggaatatgggctctgaagaaaaataaggcagaggaggagaatgacaagagggaaaggagagattgttttagaacatgtggtcaggaaagggctctccgacatttgagcagaaacttgaagtcagccatgtggagctctcaggaaaggctttccaggcagaggtaacagcaaggacaaaggccctgaggcatagacaagcttgtgtgtgtagaacagcaagaaaaccagggtggctggagcacagatggagggagcaggtgaaggaggtaaggttagagggagaggggccgctagccagagggctccacggcccattgtaatcccactaatcccacggcccaatggaaatcccagctggattttatcccgagtgtgatgggaagcccctggagggtcttgagggaagtaacataatatgatctgggtttttttgttttgttttgttttttttatttctgagacagggtctcgctgtgtctcccaggctgaagtgcagtggtgcaatcttgactcaccgtagcctcaatctctggggctcaggcagtcctcccacctcagcctcctgggtgtgctgggactaccatcatgctgggataatttatttattttttttgtagagatagggtctcactatgttgtccaggctggtctcaaactcctgggctcaagcagtcctcctgccttggcctcccaaagtgctggaattacaggcgtgaaccaccacacctggcctatggtttgtttttaaaagctcattttggctgctatacagagaaaaaactgcagagatgcaagaagaaaagtggagagaccaggccactaggacactgcagaagtccaggctagtgaccatgctgccttcactagagtgggaggaggtgccgaaaatggtcagattctggtattttgaaggtagaatcagcatgattgctgatagcttagttataagatgtgaggaaaagaggggaaaaaaaaaaggataactcaggtttccatcctgaacagctgagtgaagatgggtcttttcctgaatgaagagcattgagttggagaagcagatctgaggagggagagaatggaaaccaaggttttgggggacatggcaagaatgactgacaygtgaatccaacttccaagtaagcatatgttgaattggctgttggatatagaagtctggagctgagggctagatttacagacttcagagtcagcattcacacattaacttcctccaacaacattcacttgcagaagcccactccacacaccataaccataacctcaaggcagaaagctaagagaaaagagtgatagacatggtgagatgaagaatttacacctcagtataacagaatataccataaacaaagctaaaaggcaaacaataaatttggaaaaatatctgttatatactgtatatgacatagaggaattcataaaaaataaatagcacaaatcaaataaaagggaatatccatgata

SEQ ID NO: 694646 - DNA, 1062 bp, Homo sapiens
gagctattggctcatgttccctatgttctattaagtatcatgagcagaaattgagctctttggcttttacccactgagtatggctataggacaggtctctctctctctctctctctctctctctctctctctttctctctcattctttgcatcattattttttgccatcagtgtgggtttttggttttgaggttatgaagtgaatttctggggacaatctctgttgggtcgtgttaacaaggatccagtccctgtttggtgatacatgacagctaatctggtctgtgagtcttctttattgtctatttattgtcctgagaataatggcatttcctgatatttgagactgcagcaatgataagttgttcagatcttgtctttccaatgtttggtaaacattttataggcccaatttttgtcaatatctgcaagagtggcatctctgttacaagagtgatcttactactcgatgtcccccctcccacccaacttcrtttcctaggggctcttggctttaacgaatttactgtatctaaaagacatcttagtacaggaagaaaactaaatctgtagcatgtaaggagcagttttatttgattggtatattcaggtttctaaccagctgaaaaattcaaatacatgccctttaaggattaagtttaaaccacactacagaaagagaaaagatttatatgatcacatataagcaatggaatcagcaatatgagtacttttcacaactatacaaatcaaatttaataatctccagaacattaaggaagttcagcccttaatggaaatgaatgaaaagaaattattcacccactgttacatgccctggaaagagaatgtcctgccagactcaaaagagtatcacaatattactcagattttcagcaatgaaggccctccgaggatctaatgatgttcatattttcagtttatttccttcactgataaacattgttaatagataccattgcctctgtttgcactttaagtgatgttacttagaacaattcgtttctttagaatgcaccctagtttggtggaaggaatttt

SEQ ID NO: 694647 - DNA, 1062 bp, Homo sapiens
gagctattggctcatgttccctatgttctattaagtatcatgagcagaaattgagctctttggcttttacccactgagtatggctataggacaggtctctctctctctctctctctctctctctctctctctttctctctcattctttgcatcattattttttgccatcagtgtgggtttttggttttgaggttatgaagtgaatttctggggacaatctctgttgggtcgtgttaacaaggatccagtccctgtttggtgatacatgacagctaatctggtctgtgagtcttctttattgtctatttattgtcctgagaataatggcatttcctgatatttgagactgcagcaatgataagttgttcagatcttgtctttccaatgtttggtaaacattttataggcccaatttttgtcaatatctgcaagagtggcatctctgttacaagagtgatcttactactcgatgtcccccctcccacccaacttcatttcctaggggctcttggctttaacgaatttactgtrtctaaaagacatcttagtacaggaagaaaactaaatctgtagcatgtaaggagcagttttatttgattggtatattcaggtttctaaccagctgaaaaattcaaatacatgccctttaaggattaagtttaaaccacactacagaaagagaaaagatttatatgatcacatataagcaatggaatcagcaatatgagtacttttcacaactatacaaatcaaatttaataatctccagaacattaaggaagttcagcccttaatggaaatgaatgaaaagaaattattcacccactgttacatgccctggaaagagaatgtcctgccagactcaaaagagtatcacaatattactcagattttcagcaatgaaggccctccgaggatctaatgatgttcatattttcagtttatttccttcactgataaacattgttaatagataccattgcctctgtttgcactttaagtgatgttacttagaacaattcgtttctttagaatgcaccctagtttggtggaaggaatttt

SEQ ID NO: 694648 - DNA, 1062 bp, Homo sapiens
gagctattggctcatgttccctatgttctattaagtatcatgagcagaaattgagctctttggcttttacccactgagtatggctataggacaggtctctctctctctctctctctctctctctctctctctttctctctcattctttgcatcattattttttgccatcagtgtgggtttttggttttgaggttatgaagtgaatttctggggacaatctctgttgggtcgtgttaacaaggatccagtccctgtttggtgatacatgacagctaatctggtctgtgagtcttctttattgtctatttattgtcctgagaataatggcatttcctgatatttgagactgcagcaatgataagttgttcagatcttgtctttccaatgtttggtaaacattttataggcccaatttttgtcaatatctgcaagagtggcatctctgttacaagagtgatcttactactcgatgtcccccctcccacccaacttcatttcctaggggctcttggctttaacgaatttactgtatctaaaagacatcttagtacaggaagaaaactraatctgtagcatgtaaggagcagttttatttgattggtatattcaggtttctaaccagctgaaaaattcaaatacatgccctttaaggattaagtttaaaccacactacagaaagagaaaagatttatatgatcacatataagcaatggaatcagcaatatgagtacttttcacaactatacaaatcaaatttaataatctccagaacattaaggaagttcagcccttaatggaaatgaatgaaaagaaattattcacccactgttacatgccctggaaagagaatgtcctgccagactcaaaagagtatcacaatattactcagattttcagcaatgaaggccctccgaggatctaatgatgttcatattttcagtttatttccttcactgataaacattgttaatagataccattgcctctgtttgcactttaagtgatgttacttagaacaattcgtttctttagaatgcaccctagtttggtggaaggaatttt

SEQ ID NO: 694649 - DNA, 1062 bp, Homo sapiens
gagctattggctcatgttccctatgttctattaagtatcatgagcagaaattgagctctttggcttttacccactgagtatggctataggacaggtctctctctctctctctctctctctctctctctctctttctctctcattctttgcatcattattttttgccatcagtgtgggtttttggttttgaggttatgaagtgaatttctggggacaatctctgttgggtcgtgttaacaaggatccagtccctgtttggtgatacatgacagctaatctggtctgtgagtcttctttattgtctatttattgtcctgagaataatggcatttcctgatatttgagactgcagcaatgataagttgttcagatcttgtctttccaatgtttggtaaacattttataggcccaatttttgtcaatatctgcaagagtggcatctctgttacaagagtgatcttactactcgatgtcccccctcccacccaacttcatttcctaggggctcttggctttaacgaatttactgtatctaaaagacatcttagtacaggaagaaaactaaatctgtagcatgtaaggagcagttttatttgattggtatattcaggtttctaaccagctgaaaaattcaaatacatgccctttaaggattaagtttaaaccacactacagaaagagaaaagatttatatgatcacatataagcaatggaatcagcaatwtgagtacttttcacaactatacaaatcaaatttaataatctccagaacattaaggaagttcagcccttaatggaaatgaatgaaaagaaattattcacccactgttacatgccctggaaagagaatgtcctgccagactcaaaagagtatcacaatattactcagattttcagcaatgaaggccctccgaggatctaatgatgttcatattttcagtttatttccttcactgataaacattgttaatagataccattgcctctgtttgcactttaagtgatgttacttagaacaattcgtttctttagaatgcaccctagtttggtggaaggaatttt

SEQ ID NO: 694650 - DNA, 613 bp, Homo sapiens
gcaaacattacctagagtggtgttaaagaaatcctaaaatatatatcagaattattagtcccccaaatgaaataacctattatcaaccaaaatatgtcttttcctgtgattctaattgaaaaaataaagaccaaacttttgctagaaccatattctgtattatctgaaatgctggtagaacatgctggcagattagcaatctgaatgatacacattagcartctctcaatattgatgaaaagaggcatcacagaagatgtaataattcatatgtcccttaggtggcagcttaattttttgctttagatattttctctcatatttcacaaaggttattcaaactgtgttagaccatacctattaaattcaggctctctttgaaagcactagtgagttagcaagcatgagaaacagaaggccaatcagactgtcagaatgtacaaacattcccctaaaaggaaaaccacagagttcacttgttcctccaactctagtaccccaccactagggctgtctttcctggctgtatgtaacggtaagaagagacagtatctttatattttaagatgaactgatcaaaaagcagatccactgatatggatacagcagtacc

SEQ ID NO: 694651 - DNA, 628 bp, Homo sapiens
gccgactctcgggaattgaactgaagacctctttgtacgcttttcatttgtttatttgaattcttcatgtgaggcttagtcttaaggatttgtgactccttgtacactcccttgttcccagttgctgtcctggggaaaaggcatttttcacatttcaaagtgaacttgaagtaaaaccagtttgtttcttatctattacagtattccttaattttttgtttgagttgaagggaagagatttttattccatttttttctgtacatgaactgtttgatgttgccttacagtaacactcaatttgaataatatttgtttatttgaagcataaagattgaaagttattttgattctcaccattttctctgtcatctctactcacagtaattctgacagctcttaggaaccattgattttacaatgacaaatgaaaactttcagtgtacctttgattatagaaataaatacttccaaggtggcttggcaccaaataggaagttcctcccctgcatattttgatggtatatttaaggagaatctctttgaaagttttgctttgtggcccagcatgtatattgaccarggtcacaacttagaaaatgccttttttaagccacatttaagaccctg

SEQ ID NO: 694652 - DNA, 1264 bp, Homo sapiens
catatacctgttggccatttggttttttttttgtttgtttctttgttttttgtttttttgaggcagagtctccctctgtcacccaggctggagtatagtggcacaatcttggctcactgcaacctccacctcccgagttcaagcagttcagcctcctgagtagctcggactacaggcacatgccaccacacccagctaatttttgtattttttgtagagacagggtgtcaccatattagtcaggctggtctcgaactcctgacctcaggtgatccacctgccttggcctcccaaagtgctgggattacaggcaagagccaccgtgcccggcccttttggccatttgtatatcttcttttgagaaatgtctcctcatttgcccattttcttatagtctggataattcccatgttagatgcagtaaatttggttttctgcttatcctgaggtcaaaaaaacatgtttatccaaaccctattgaaaatctttaaatgtcttgttttcctttccttaccatgtaggaaattgaacataatttgatatttttaatgagtcaatatttttcagtgcctcagagcatcacgttcaataaaatttcactatatatctagcacttcaggtgtagatatatagtgaatatagggagggatattttacattgtttatttctataaacttcatagtataataccatacttattttatttgattttttttctcaaaaaggtgaggtagaatacagtgtcaggtaaggaggttacctgttaattcaagtcttaccaccttttttctatctcttgaacactaaaatgatacaatactgctaactcatcaaaatacaacatctgttaaggggtttgggtttgcggttttgtttttgttgttgttacattgctgatgtgtttgtggtgatttttccacatccctcacttagaaattgttatgaacagtaatacatcttcacaagatgactacgctgagttgagtcattctgtggccacaaagaggcatgctttcacatacaagtggactcagatgaattacttggtatcacagaagaaagatatatgtgaacttgaccacataccttttttccactctagttccacatcagtacckatccttccccagtccaaggctgatccttatatcacaccttatttgttttctcacagtacacactagctcaggtctcaccagctataaactttccttaccccttccttactgcatatcttccttttgctaccacacctctggaaaa

SEQ ID NO: 694653 - DNA, 1428 bp, Homo sapiens
aaagaaagaaagaaagaaagaaaaagaaaaaaagaaaaaagaaaagaaaaagaaataagtaggaacacagaacacgatttgtatcctcaatattataaactatattaaattatttctaataattggaaaaaacacattttcttaaaccacatgtagatcatttgcaaattataaaatgttcttttatgaaaatataataattacaaaaatttatagtcacagaaaacttattaaatgctcatacacttgaaaaataaaaatatacttgtaagtaactcagtgatgtcggtaataaaatatttagagaaaaaattaatgcattcaatgcctacatcatgagtaagaaaagactgaaaaatactgaactaaggcaaaaacttagaaattaaaaaaatagaatggccccaaataaagtaagtggaaaataaaaaagaattaaaacatacaataggggatcaaaaatgcaaagctggccctttcaaaaagactattaaattcacaaacctctgccaagtttgattaatagggacatcatacaaataaacaatattgtaatgaaatgggtatataactacaggggctccaacaattaaaaaaatagtaaaagaatattatcaagtttattctaccaataaagttataaattctttaaaaaatatattttacttagcttgcaagatggactcaagaagaaatagaccacatgaatagttttaaaactattaaaggaaaaatctttttaaggtttgaagcctgattttattaggcagctgtgtgatgttggtttagttataaacttttatacataaacagggatggtattaagtaactcacaagtacatttcagctcaaatgtaggtaatttatggagaaagtactttgtgaaatgttactggtaatatagttatagttatatgggcaataaaagcaacatgacctctgcattggggtagattaagtaacaagcatgattctcccctcacttcccctccacaaattcagacacaagtaacattagaggcaacttttaatacatctaaggcctttgggatggattgggcataggaggaaactaggggactactggtcttttgggtagatgttggtctcttcagcctttagtagaattagatggggtagagtattacgattgtatctcattctttttatttttccttttctctttttttttgacaacttttttcgttttttgacaactaaaaattgcatatatttatcgtgtacaacattatgctttgaaatctgtatacattatggaatgattaaatcaagctaattaacaaaygcattacctcatatacttatttttttgtgtggtgagaacacttaaactatactctcagcaattttcaagaatacagttttcgagaatgcattgttattaactatagtcaccatgtttcacga

SEQ ID NO: 694654 - DNA, 1444 bp, Homo sapiens
ggagaggaaaatcaacgcagaaaaatcagtactgttgcaatatagcaattgccaactagttgataagacatcaagaaagcaatctcgtttgtaatagatacaaaaaatctaaaaatttatagggatatgttaaaccaaggagctgaatgtttttaacagttgacactttttagtcttgcatttcattttctaaataggccaagtaatgtacattgaatagtctttgcaagccaatgaatttcttgagtgatttttgattgccttttagtgcctttgttcactctaatgaacaaagtaatgaggaaactaccatagattatctaatagtaatatttggattacttgcttcattgttggaaatctttgggcaaatgtgcttgtttaagtagtaaagattactcctataatggaaataatatgatggtactaattttctaggtcctgtagtacataaaggttataatatttttcttctacatcttcagatgtaatctcttggtttgaagaagttggggattggtagagggagaatagaagaagacttgagagaatggtttaggaaatccgctggattggatcttagartctccatgcttttttcaagctgtttgtcccttcatgtgacagtacctagaatacagagacactcaatatttgttgaataaatgaatttgccatctatatagttggctattcatgacctcactggcccagaaatctggtaaatgacaaaatcataaagtcataaaatactgaagaggggagaggctttcaagaacattcagttcaggaatttttacactgtggtctattgacttcgtggttgactaggcagaggggtctgggccctcaggcctttacttcaaccagagcagaaattccccaatttatgttatatacttcggtctgtagatttggaaggaacacctcatattctcactcataagtgggagttgagcaatgagaacacatggacacaaggtggggaacaacacacaccggggcctgttggggtagggggcaaggggagggagagcattaggaaaaatacctaattcatgcaggtcttaaaacttggatgagtggttgataggtgcagcaaaccaccatggcacatatatacctatgtaacaaacctgcacattctgcacatgtatccaggaacttaaagttaaaaaaaaaaagaaaaggaatttgttctaattttcccaaaagggctacataagaaagctgcagcattagtcaaggaagatgtttctgaggaggtggcatttgaaacttgacttcaaagatgaaaaggagtccatgtgagcatttgcatttgaagtagaaagaatggcaagaatgtgtctggcggtcttttagctgagagtgtgtatggtgtgtttgaggaataagaaaacagactagtgtgtctagaatagaatacatggagtagagagga

SEQ ID NO: 694655 - DNA, 174 bp, Homo sapiens
tgaaataaaaatagaattttcaaatagggccaatctacttaatttaaaaattacctactcattgagatgcatagataaagaaaagtgagagtttatgttagaaaatgtattaaggagraaaaattagaccaaatgcagattgtttctcattcagttttcttttcaataacaata

SEQ ID NO: 694656 - DNA, 615 bp, Homo sapiens
actgactagttgaccttatttttcttagctcttttgaacttatttctaagttctgttaaacttttcttatactggttctattttctggcaaactctaagtcacaattttcaatttttattttccataatcacttacacctaataactcattcagtttcattttatttctgattgatttactggtatgaagttattattcaatgtatgattatagtgtatccatctaaaatttgtcagggcctaataatcattgtaaatatcactaatattatcagtactaatgtaattgctattgccttattgctgatcatgaatactattgttaatatactgttagggttagtaatwattgcatgatacttcatggtgtggaatattcagagcgcatttttaattatattgttaatgtagttaactgctttccaaaaattgtctcaaacatttaaagttttatttcagtattgatatcagggtctgtcttgatcaagaaatgtttaatgagcatctactatgtttgagataaagaaatacgtaccaaggatggaaagtgatgtgatagtctgggtctttaagaaatttatagagtagttgagaaggcaaagcatattaaaaatc

SEQ ID NO: 694657 - DNA, 615 bp, Homo sapiens
actgactagttgaccttatttttcttagctcttttgaacttatttctaagttctgttaaacttttcttatactggttctattttctggcaaactctaagtcacaattttcaatttttattttccataatcacttacacctaataactcattcagtttcattttatttctgattgatttactggtatgaagttattattcaatgtatgattatagtgtatccatctaaaatttgtcagggcctaataatcattgtaaatatcactaatattatcagtactaatgtaattgctattgccttattgctgatcatgaatactattgttaatatactgttagggttagtaataattgcatgatacttcatggtgtggaatattcagagcgcatttttaattatattgttaatgtagttaactgctttccaaaaattgtctcaaacatttaaagttttatttcagtattgatatcagggtctgtcttgatcaagaaatgtttaatgagcatctactatgtttgagataaagaaatacrtaccaaggatggaaagtgatgtgatagtctgggtctttaagaaatttatagagtagttgagaaggcaaagcatattaaaaatc

SEQ ID NO: 694658 - DNA, 587 bp, Homo sapiens
ctcgcaccatcgcagcctgtctgtagcagggattgctaactaacacggccagcctgcatgttgagacagcatcatccactagaggccagaatgagactgtcatgtacaggcaaatcaaatatagactcaggaagcaccagagcatcagggagtgacaccaatattgcaggtgacacgccaacaaaatgcacttctaaatcctcttacgcagtttctttccacatccaaatcagtgggtaaatgaggcactaaaggacaacatstgtcagcaagaggctgacactgtattgaagactcagaaactagaacaaaaatggaccattctttcctgaactgaagttgagaaggaaggaaaagaggaggcagggcatgggtgctggtgagacagaggccaaggacacaaatgcgtatctgatataggaggcaggagaggagagcagagaaatgggcagggaaaatgcctctggagttcctggacctggaactggactaggagctagttgcagccttgtgcatcagtcaggaactggttaaaaacacacagcacaggcacaccatggagcatgatgccgccacctagcaactga

SEQ ID NO: 694659 - DNA, 587 bp, Homo sapiens
ctcgcaccatcgcagcctgtctgtagcagggattgctaactaacacggccagcctgcatgttgagacagcatcatccactagaggccagaatgagactgtcatgtacaggcaaatcaaatatagactcaggaagcaccagagcatcagggagtgacaccaatattgcaggtgacacgccaacaaaatgcacttctaaatcctcttacgcagtttctttccacatccaaatcagtgggtaaatgaggcactaaaggacaacatctgtcagcaagaggctgacactgtattgaagactcagaaactagaacaaaaatggaccattctttcctgaactgaagttgagaaggaaggaaaagaggaggcagggcatgggtgctggtgagacagaggccaaggacacaaatgcgtatctgatataggaggcaggagaggagagcagagaaatgggcagggaaaatgcctctggagttcctggacctggaactggactaggagctagttgcagccttgtgcwtcagtcaggaactggttaaaaacacacagcacaggcacaccatggagcatgatgccgccacctagcaactga

SEQ ID NO: 694660 - DNA, 635 bp, Homo sapiens
ttgaaccataaaaggaatgagatcatgtcttttgcagtaacatggatagaagcagaggctattatccttagtgaaataactcagaaacagaaaaggcaaatactgcatgttctcatttataagttggaactaaacaatgaagacgcatgggcatatagaggagagtaatagacattggaaagtacaagatatgggatggtgggaggaggtgagggttacagtgttcactatttgggtgatagttgcactaaaagcccagactttaacactatggaatatatgcacataggaaatctgcacttgtacctcctaaatatatagaaaatagacattaaaaattaaataaaataatttacattttcttgatcataagaagctaagcacattttcatgtagttattggctagttagacgtcctatttggtaagtgcctattaagtcttttgcttattktgcagaggttggagtcgtggttactggttttgaaacatattttgttgctctttattgatttacaggagtttaaaaaatattccagataggtgtccttttttggttgtacgtgttgctgacagcttttcccatactgtagcttgcctttttccaccctggctggtatctcctgatgaacagat

SEQ ID NO: 694661 - DNA, 3497 bp, Homo sapiens
ctgttgttaagctacacatgactataaatatttacaaaattatgagtgtacaccaaggcctccagttctactctagcttatccccagtttatagtatgtatgtgtttatgtgtctatatacatactatcatttcacatttctatgtcctttcttccatattgagaaacttggctcctagaaatatcaacaaagttattcatttgctcaatcctattgggttttttttttgttttgtttttgttttttttgagatgaggtgtcactctgttgcccaggctggagtgcagtggtgcaaacccggctcactgcaacctccacctctcaggctcaagtggtcctcccacctcagcctcctgaatagctggaaccacaggcatgcaccaccatgcccagctaattttttgtatttttggtagagatgggtttttgccatgttgcccaggctggtcttgaactcctgggttcaggtgatccatccactttggcatcccaaagtgctgggattataggcatgagccactgtactcagccaatcctgttgtttcttgtagtgaaggcctgctttttttttttcaattagaaaaaaaaatttttttagaaatgggggtctcactatgtgacccaggctggtctcacactcctgggctcaagcagtcatcctgccttggcctcccaaagtgctgggattacagatgtgagccactgtgcctggcctaatattctgcttttaatggaatttttagctttttctatgattttggtcttaaaagtctttatttcatttttggttttgaaagatatcattctgggtatagaatccttggttgactgttttggttctttgggttttttctcctgagtactttggaggcatttgtctgttgtcttatggcttaacagtaaatttgctgtgattcttctttatgttcccctgtgtgtatggaactggttgttgtgttggatacacaactctattcatttggccaaaatcataaaattaagaaaaagagtgaattttactgtatgtaaattcttaaataaataaatacatatatgttaaaagcatattatgtactttgcattgtattagtctctaagaatacaatgatgaacaagataattttcagttttatgaagcttacaacctagtgtatgcacaaaaccaatgatacatggtaattgatggtagagtacatgctataggaatataaatgcatacaatgtctactctaggggagagggagggatagtattagccccaggtaacctaggagagtgccttgtacatggttggtgttcaaacagttcttgagtgaattgtctaacaaaccacttgaaaatataagacctgaagttaagcagagattagacagacaagtcgctagtgttccttcatttatccagcagttacgtgttgcctgttctgcagccaagcattgtcgttgtgcttaatatgtagcagtgaacaaaagaaaagcccgtcttcataaactcaagagatttattttctagtaggggaaacaggcaataaacaaaacagatatgtaaaataaataatatattagatatcgataagtggtggggagaaaataaacaaggatgggctgcacaggaggagggaaggtatgcatttttaaatagcttgactggggaaggcctcattgagaatgtgacctaggagtacatggaggaggttgcctggcctaatcatatcagtttgttatcaaccctaggtactctctaaaaatgtatcaatgtatcaaattatgccttgtattataactactcttttttttttttttttttttttgagacagagtctcgtgctctcactcacgctggagttcaggggcatgatcttggctcactacaacctccacctcctgggttcaagcgattctcctgcctcagcctcctgagcagctgggattacaggcatccaccaccacgccctgctaatttttgtattcttagtagagatggggtttcaccacgttggccaggttggtctcgaattcatgaccttaggtgatccacccgtctgggcctcacaaagtgctgggattataggcgtgagccactgtgcccagcctataactattcttatcctcatgtaaattataaatttgtgataataaggacaatgtacctttatgtatttcatttctttcttttttttttcttaaactaatgactaacagcattgaattagaaaaggtgtttaatctctgtggagttatctgcaaaatgaaagaactggaaataattatttccagggttcgctgggcatggtggctcacgcctgtaatcccagcactttgggaggccaaggcgggcggatcacgaggtcaggagatcgagaccatcctggctaacatggtgaaaccccgtctctactaaaaattcaaaaaattagccaggcgcggtggcgggcacctgtagtcccagctactcagtaggctgaggcaggagaatggtgtgaacctgggaggcggagctggcagtgagccaagacggcgccactgcactccagcctgggtgacagtaagactccgtctcaaaaaaaaaaaaaaaaaaaaagaattatttccagggttctgtcccattctaaaaacttatatatttatgaattgaagaataaaatatatctgagaaatgatggaatttactggaattggaatgatagagctgtagaagaacatccacaacttagatctcttctttataacatgagatgattaccaatacttggggaatccttctcagtgaaaccagatatacaaaacactgtttctttgggccaccctctagacataaaattacttcattttacagattgyttattgtttggtattacttgtggcacagattcctaaactcctttagtaagtatatgtgcccaccactatttacagatcactcaactgatctagttaaagtcctcagtaatgaattttatgtgccagatgctttcttcagtatttgtggtctttttctttttaaaaaggcattatttttaaaataaaacacagaaaagtataaaaagttatacctggaagggatttgggaagaaattattcctctgattaatcattgtacaggtaagctgaatgattattacacacacatgctcattttttcaaacatctgaggctgttttgaggatattgtttgagaggatcacgattcagttagttcagtactgacttccccaagagctctcatggagttactgcaggttgaacatccataatctgaaatccaaactgctctaaaatctgaaattttttgattgccgacatgattccttaagtggaaaattccacacctgacttgcgtttgcagtcaaaacgcaggtgtacaacacagttcattcaacatcctcaagggaaaaagaccctccctgctcccttcagctgcggtagcagcacacattcataacagaacaagaaatcatatcagattctaaaatcaaagctagattaataagacaaaa

SEQ ID NO: 694662 - DNA, 629 bp, Homo sapiens
ctcaggtgatctgcccgcctcagcctcccaaagtgctaggattacaggtgtgagccaccacgcccggcctattttttgaaattttaattgatattttcatatcaatatgaattgtgtcccataagtcataatctgtgtttattttaatagtcaaattgtcacagattaggccctttcaagcttttttttcctgctacagctttttgtggttagctgacttacaattaattgcgtgtatttaaatcgtacaacatatacgatttttacatatgtacacccccatgaaacgttcactacaagtgagttaattaacatacctgtcactccaaaaagttttctcctgccctttggtaatctctccctcccactcttgtcctcgagcaatgactgacctgcttttggtcagtatacattagtttgcatttaggagaattttatattaaaagaatcatggagtatctacttccttttctggcttcttttactcagcattattattttgattttcaatctttatcagtagttcattcttctttattactcagtagtattcarttgtctcaatatatacaatttacatggtcatttcatatggacattgggttgtttccaggttttcactatttcaa

SEQ ID NO: 694663 - DNA, 1611 bp, Homo sapiens
tgaaattgcagtagtgcgcctccacttcgcaagccccttaaaatatctccattccagatcccttagattcatgaattgttttcctgaaaagaatcatattttcaaagaatcacatggtgttgttactcagcctttcattactcagagatgcttcatggacagggtaaacctttgatgaactcgagtcccctctttctggcagaaagccatttctaaagctttwtttttaatttttatttatttatttattttgagacggagttttgctcttgttgcccaggctggagtgcaatggtgcgatatcggctcatcacaacctccgcctcccgggttcaaatgattctcctgcctcagcctcctgagtagctgggatgacaggcacccgccaccacacccggttactttttttgtatttttagtagagacggggtttcaccatgttggccaggctagtctcaaactcctgacctcaggtgatccacccgcctcagactcccaaaatactgggattacagaagtgatccactgtacccggcctaaagctttataaacttaagggagaccctgtgatgtcaatttcatgtaaagcctgcccctaaacagcaattgagtgggtctggctaactgggcttgagtggaccctgcagagccccggcaggtggacggagtatttcattctgtgcttggatcctaacagaatgtgcaaatggagagctctgcagagcaccgaaagcagcagggaggagaaaaggatccaaaaacagggaggaagatgggttagaagtgcacagattgttagtgtcatttcttccaagatgctaatgtaagccctaagtataaaagggcagtggctgagctagaatctggccattctccatactcattcagaaaccacaagcttgaggtgtcattagcagttacaattccttcaagtagccaatgagccaaggagaaagaatcaagcaaagacacagcacatgttctccccaccagcagcgattcccctctcccttctcttccacccttttcatggctaaataacgctgaaaacaacaacaaatcaaggctaaaggcatgggttggagtgtaaaaccaggagccaacgggccacgggaacaagtataaggagaattatggtcacagcagacaagcaggatgactggtctatttctggtgggtgaccttactgtcccacatgtggtgacatttgagcatgtcacctgtagtccaaagactgagcaggcaccactccactccaatcagtcctccatccctgtactgggagggcctgggcctgcctggtgggaagtctttatatagactttgtacatgtctgaagtagaagacaggtgccagagactcttcgttgggctcatacctccccaagtagaacagatactgccatggtgttcagcagtccattcataaggccagttgccaagtttcagggagtttgacaagatctttggaggcctggcatagcaagaagtggtggcaaaaggaaggaaggggatctttaacaagagaaggtttagagctgatgattttgatgactaaagagcctcatgtcccaaactcctgacctcaggtgacccacctacctcggcctcc

SEQ ID NO: 694664 - DNA, 621 bp, Homo sapiens
ttgccatttttataggtcaaaatcagtagaatattggaatttcgtatcgagtcattttgtagtttcatattgagcatttgcatgttctgattaaattaaaccggttttaaaaaacgaatgatggccttttagcatcttagattatacaattagaaattagaataatacatttagccaacacatatttgagtctcaaaaatcctagaaagagggtcttagaccttggaagggccttaggggttccccrtctagccccacaccttcagcccatcttgagctgtgacaaccaggcccaccacctgttaccactggcccatctcttttctcacctcgtctttctctctcctcccaatctcttcctcttttctcctgccctggccccttgaacccatgatggcaatcagaaacagatccaggcaaactgtctgcctgtaccatggatgggtgcccatcctagtgaggacgagggattgaggcccaggctgtgtcctggttgggatgtatcctcgtgttgtcctggttttggggggcttccacagtggccacggcagccctcctgggccccaaggcaaacccatggggataggggctgggagcagtggcagaggcagctctgggcag

SEQ ID NO: 694665 - DNA, 613 bp, Homo sapiens
gaattcatcattgtgaataggtatttgtttggtagaaatttctatttaccactctccaaaggtaatgcaaaattctactcaggcctagtaaaagcctgcacaatgaaaggctaaactagtctcgcaataaacagaagcttgccttcactgtgggctggttaaagttatgacagaacattttaatgtcaacttattcttcacgtatcttgcaggactcaaatataaggaataagacagagagaaatatgtcaaagtgtattcttctgggagggatgcagaccccagtggttcatggtgcactgatgatggagagagacaaagyatacatctctatgggaaaggcatcattcagtggctttcttagtgatgagatctgatatacaactttaagttttctgtttgtgtgcaataattctgtttaacctcaagtcttcagtaacgtttgttcaacatgacagtttactatcaaatgtggtactgtttggtgggaagtgtgaacttgaaggatgaaacccacatggaaatgaaatgattataacatattgagaaatcctgaaagcatttggttttaggaagataatgaacaacagcaaggagatactggaccttcact

SEQ ID NO: 694666 - DNA, 1421 bp, Homo sapiens
gcaagttcccgtagcgtatgagattttcagtgcgtaactattcaagcttgggaagtgcactggatgtcacataagaagttcacagaatataaataaactcaaacaataaattacttgctccaaaatattttattctgcactatttttccctgttcacaggccaagacactctactgagggggagataatcgacatattccctaggtgattaaaacttttaaatcggccaggtgcggtggctcacgcctgtaatcccagcactttgggaggccgaggcgggcggatcacgagatcaggagatcaagactatcctggctaacacgatgaaaccccgtccctactaaaaatacaaaaacttagctgggcgtggtggtgggcgcctgtagtcccagctacacaggaggctgaggaaggagaatggcgtgaacctsggaggcagagcttgcagtgagccgagattgcgccactgcactccagcctgggcaacagagccaaactcaaaaaaaaaaaaaaaaaaaaaaaaaaaaaattaaatcgagtcgtaatttatcaggacaagtgcaaatcaaacttaaggtaaacattgtagctactgaaatctctcataaattctctggatgaacttcaattatattcaggtcttcaaaaacagaggttaatcatttgagcaaatattttatttatctttgtgaaacaactaaaagaacacacataatttcttaacttcatgggatcaaagatgatcttagcaggccagaacctctttctaatctggtcccaatttcctctaattttaatgtagaggtgggaatatctggctgggaatctagactgtactattcgttagctctccatcctcagatttaatgtacccaagtctcgagtttcatagccttaaaaagtgaatgtttgttttgttttcttggtgtattgtcttggacattggacaatttttcttaaatgagaaaaaatatggcaaagaattttataaaatgtttatcctcctcatcatctaatttgtttcctgccgctgaaagccaccttccccacgggcttgagaatgacacctgtccactgtgtcagcagttggtttgcttccctgcttattgttttctctatgaaatcttaaaacctaactaaggctttgctgcccactgcaggtggagaggagaataaatcaattcccttctgcctgatttcagtggctttatctcaaatgttttgtaagttattctgttgctaattaaacaatctcatttatagatattttcttcctatgaactcaatactaggttaataggtataaatataagttttgatcaattattaaatccataacaaagaaaaataacaaggacttaatgtatatcaataattatgttagcttgaaattagacattcacacaaatgtttgtctgtca

SEQ ID NO: 694667 - DNA, 1421 bp, Homo sapiens
gcaagttcccgtagcgtatgagattttcagtgcgtaactattcaagcttgggaagtgcactggatgtcacataagaagttcacagaatataaataaactcaaacaataaattacttgctccaaaatattttattctgcactatttttccctgttcacaggccaagacactctactgagggggagataatcgacatattccctaggtgattaaaacttttaaatcggccaggtgcggtggctcacgcctgtaatcccagcactttgggaggccgaggcgggcggatcacgagatcaggagatcaagactatcctggctaacacgatgaaaccccgtccctactaaaaatacaaaaacttagctgggcgtggtggtgggcgcctgtagtcccagctacacaggaggctgaggaaggagaatggcgtgaacctcggaggcagagcttgcagtgagccgagattgcgccactgcactccagcctgggcaacagagccaaactcaaaaaaaaaaaaaaaaaaaaaaaaaaaaaattaaatcgagtcgtaatttatcaggacaagtgcaaatcaaacttaaggtaaacattgtagctactgaaatctctcataaattctctggatgaacttcaattatattcaggtcttcaaaaacagaggttaatcatttgagcaaatattttatttatctttgtgaaacaactaaaagaacacacataatttcttaacttcatgggatcaaagatgatcttagcaggccagaacctctttctaatctggtcccaatttcctctaattttaatgtagaggtgggaatatctggctgggaatctagactgtactattcgttagctctccatcctcagatttaatgtacccaagtctcgagtttcatagccttaaaaagtgaatgtttgttttgttttcttggtgtattgtcttggacattggacaatttttcttaaatgagaaaaaatatggcaaagaattttataaaatgtttatcctcctcatcatctaatttgtttcctgccgctgaaagccaccttccccasgggcttgagaatgacacctgtccactgtgtcagcagttggtttgcttccctgcttattgttttctctatgaaatcttaaaacctaactaaggctttgctgcccactgcaggtggagaggagaataaatcaattcccttctgcctgatttcagtggctttatctcaaatgttttgtaagttattctgttgctaattaaacaatctcatttatagatattttcttcctatgaactcaatactaggttaataggtataaatataagttttgatcaattattaaatccataacaaagaaaaataacaaggacttaatgtatatcaataattatgttagcttgaaattagacattcacacaaatgtttgtctgtca

SEQ ID NO: 694668 - DNA, 1421 bp, Homo sapiens
gcaagttcccgtagcgtatgagattttcagtgcgtaactattcaagcttgggaagtgcactggatgtcacataagaagttcacagaatataaataaactcaaacaataaattacttgctccaaaatattttattctgcactatttttccctgttcacaggccaagacactctactgagggggagataatcgacatattccctaggtgattaaaacttttaaatcggccaggtgcggtggctcacgcctgtaatcccagcactttgggaggccgaggcgggcggatcacgagatcaggagatcaagactatcctggctaacacgatgaaaccccgtccctactaaaaatacaaaaacttagctgggcgtggtggtgggcgcctgtagtcccagctacacaggaggctgaggaaggagaatggcgtgaacctcggaggcagagcttgcagtgagccgagattgcgccactgcactccagcctgggcaacagagccaaactcaaaaaaaaaaaaaaaaaaaaaaaaaaaaaattaaatcgagtcgtaatttatcaggacaagtgcaaatcaaacttaaggtaaacattgtagctactgaaatctctcataaattctctggatgaacttcaattatattcaggtcttcaaaaacagaggttaatcatttgagcaaatattttatttatctttgtgaaacaactaaaagaacacacataatttcttaacttcatgggatcaaagatgatcttagcaggccagaacctctttctaatctggtcccaatttcctctaattttaatgtagaggtgggaatatctggctgggaatctagactgtactattcgttagctctccatcctcagatttaatgtacccaagtctcgagtttcatagccttaaaaagtgaatgtttgttttgttttcttggtgtattgtcttggacattggacaatttttcttaaatgagaaaaaatatggcaaagaattttataaaatgtttatcctcctcatcatctaatttgtttcctgccgctgaaagccaccttccccacgggcttgagaatgacacctgtccactgtgtcagcagttggtttgcttccctgcttattgttttctctatgaaatcttaaaacctaactaaggctttgctgcccactgcaggtggagaggagaataaatcaattcccttctgcctgatttcagtggctttatctcaaatgttttgtaagttattctgttgctaattaaacaatctcatttatagatattttcttcctatgaactcaatactagkttaataggtataaatataagttttgatcaattattaaatccataacaaagaaaaataacaaggacttaatgtatatcaataattatgttagcttgaaattagacattcacacaaatgtttgtctgtca

SEQ ID NO: 694669 - DNA, 643 bp, Homo sapiens
taaatttaaaattgtaaggaaacattatcttgcagatttatcctgcctaatacatctgaaatgagttgatacaaattattattttactactgatgcatcctgatgtttaaatgaatgaggtatagcggggaataaaaaatttaaacatattttacatttwtctatgactttgctatttatatttataaggcatactaaagaatattacgtagaacattgtattaaaagttaggaaagatgaattcaaattggtgttgacatatttctataaactggtagcatgtataacataagaatacctacagtgatgttcgtcttctgaatgtttacagataatctaaaaatacctatcttttgatttctactaatctataagaactgatctgtgataaatatatcaaataaaacaagtccatatttattcatgggtattaagcttttatagtgaaatctgtaataaatgtatacaagcacaggtgttgtggaattcattttgttctgattttaatatcccaattcctctggctttaatgtggtcaaatgatgatcctagagaaaaatccctaaaataatatttgtaatctttgttacagaaagattttaaatatatggatggctatttggcagtatgttacctattatt

SEQ ID NO: 694670 - DNA, 3227 bp, Homo sapiens
attaagcctgacacagaaataaaaacatactccaaggaatagtgacaaacaaaataaaaatatcagaagactgagagtcccaaagaaaaaaatatctcaccagatttttgaagttaccagaagatcaaggagtccaagcctgataaaaagcaaaacagaggaaagacagaaaataagagtttttgtttcagaaaaaatagacaataaaatgctataattctacaatattattctatttacaagtactgctggctgaataaacactttaagacataatttctgtagatgaaaatgtgtctttaacttaaactgaagtgtttaacttacattgtgccattaaaacaaaggaaaaaaggaaatgttctagctctagaaaatattttttccaattatttaggtgacgataattatttggttaattctttaagttctcaaagaagggagattattattaaatgcacttgaaattctctaataattagtacataaatttaatgtttttatgggagaagcagaccaaagtttcattttaaaagacttttcccatttttcaggtttttgctggctatgacaataattagttctggctttgatttatttttgaaaagtaaaaccatgaaagatattataatgacaaagataaaaggcttttaatttttaaatgatactaaaatgcagcctctattttttaaaggtgtttgaagttcaaatgaaaggcaatatctgaacagcacaaattcccaagaggagacccagcacctgccatgggatgcaaaggttttataaatgttgtcttgtgtaaagaaaatggcaaacattgtgaggccttttgcaaatatgcctgcctgcttctgtgtttgagcagaaatattgaacttctaaccattattattataaaataaaggagattattctttaaacatttgatggtagccttttccttttgtcttgggaatcgagtttgaaactacacatttgaaaaacacatgtctttctttgaaagagaatggagaacacggtaagtgtgaaaggagttgacactattgtgtaaggttttatatgtgcatatgaatatgtgtctgcatcttactgtcagaaaatttaaattaggttatttctgttgggccagaataatctccataatgctggaccactaattggtaacaaatcatcccgaaggaagctattaatattccttctctagtgtctaaaatcatttgagaagatcaatgcttcacttttgaagagtaagtaatggatcttgtcatattattagagaccttactgaattctctagcctggcttcaaagatgtaaaacggatgatctatctcttagaaacctttgtccatggatcttagttctattaacgacctaagaaaataatctgatacattcttttattgtcatattttaagttatttctttgcggtgcgttataaaccacaaaagatttgcaaaaatagaaatgtatacagctcaataaattatcacaaagtcaatgctcatgtaattattacacagataaacaccttgaagttaaccagtacatagaagcctgtggcttgttctgtcacactgggtaagtgtatatgtatatacaaagatacatgtgcagagatctgtaatcatgctgcattaatgtctcatgttcatcacaatttttcaagtcatttgactgtgtgttaccagggagggacaacaccttgaacatatcataggatgtcattgaatatattgtacactgtaatctcagtaaactattaattatctgtatttgtcaaagtatctggattttttgtccagcctatggttctaacytaagttttaaactttatctacttggaatcatgtactacatctctctctctgtgtacttcctttcctttaaaatcttatttatgagattcattcatcttgttgctcataactgcagttagttttcattactcctatagtattccattggataaatattccacaatttacatattcaatccactattggcagatatgtggattgtttccactttggggttattaagaattaccctaccataagcatcctttgttaagagtgacattactgggtcagaaaatatgcctatgttctactttagcaaataatttaaatagtgttacgagaattgccattattgcacttttccagaaaatatttcttttctgcttaattttagctatcagtttactatttagtggaatatttctgtacttttcatttacattatcttcataacaaattttagtgcattttcatatgtttattagtcatacacatgtgtattcatctgagaaggtttttttaagttatttttatgcattttatatgggtagtctttccttatcgattcacagaagtgctttatgtattctagatgcgagtcctttgttggttatatattgtgaaaatctgttccctactccatggcttccttttttactcacttattgtttcttacgttgaacacctattgttaattttaatgcagtcctattgaatcatctttacttatgtgtcctgtttattacataaaataatcatatatacacatctgtatttgcttctaaaaatctttttatgttatgattactttgcctttcacgtctaatccaaaaatctacctgaaatttacattttgagttggggtaaaatttcattatttttccaaattggtccagcaaaatttattgaaaatatgacattttcaaactgctctacaatattagtcatgaattcagtacccatggatgcttggctctgtttctagacatttgtgtgttccactgaacaatttgtctatattgtactgtcttacacaatatgcctaataatatgctttgatagctggtagagatttttctaccctttctttcaatatgagtgtgttgactttttactatattgatataatttacataatgtttactatttaaaattctacaattgttttttcagtatgttcagtttgtgcaaagataactactaattccagaatgtttctaacaccttaaaagaaaaccctatatagtacctattagcagccaatatctgattctcttgtatcttcttcccctgataactcctaatctattgtctctctggatttgcctattctgtacacttcatataaatggaatcacacaacatgtgaccttttgtgtctgccttaatttaaaatatttttaaagtccatttatactgttgca

SEQ ID NO: 694671 - DNA, 3227 bp, Homo sapiens
attaagcctgacacagaaataaaaacatactccaaggaatagtgacaaacaaaataaaaatatcagaagactgagagtcccaaagaaaaaaatatctcaccagatttttgaagttaccagaagatcaaggagtccaagcctgataaaaagcaaaacagaggaaagacagaaaataagagtttttgtttcagaaaaaatagacaataaaatgctataattctacaatattattctatttacaagtactgctggctgaataaacactttaagacataatttctgtagatgaaaatgtgtctttaacttaaactgaagtgtttaacttacattgtgccattaaaacaaaggaaaaaaggaaatgttctagctctagaaaatattttttccaattatttaggtgacgataattatttggttaattctttaagttctcaaagaagggagattattattaaatgcacttgaaattctctaataattagtacataaatttaatgtttttatgggagaagcagaccaaagtttcattttaaaagacttttcccatttttcaggtttttgctggctatgacaataattagttctggctttgatttatttttgaaaagtaaaaccatgaaagatattataatgacaaagataaaaggcttttaatttttaaatgatactaaaatgcagcctctattttttaaaggtgtttgaagttcaaatgaaaggcaatatctgaacagcacaaattcccaagaggagacccagcacctgccatgggatgcaaaggttttataaatgttgtcttgtgtaaagaaaatggcaaacattgtgaggccttttgcaaatatgcctgcctgcttctgtgtttgagcagaaatattgaacttctaaccattattattataaaataaaggagattattctttaaacatttgatggtagccttttccttttgtcttgggaatcgagtttgaaactacacatttgaaaaacacatgtctttctttgaaagagaatggagaacacggtaagtgtgaaaggagttgacactattgtgtaaggttttatatgtgcatatgaatatgtgtctgcatcttactgtcagaaaatttaaattaggttatttctgttgggccagaataatctccataatgctggaccactaattggtaacaaatcatcccgaaggaagctattaatattccttctctagtgtctaaaatcatttgagaagatcaatgcttcacttttgaagagtaagtaatggatcttgtcatattattagagaccttactgaattctctagcctggcttcaaagatgtaaaacggatgatctatctcttagaaacctttgtccatggatcttagttctattaacgacctaagaaaataatctgatacattcttttattgtcatattttaagttatttctttgcggtgcgttataaaccacaaaagatttgcaaaaatagaaatgtatacagctcaataaattatcacaaagtcaatgctcatgtaattattacacagataaacaccttgaagttaaccagtacatagaagcctgtggcttgttctgtcacactgggtaagtgtatatgtatatacaaagatacatgtgcagagatctgtaatcatgctgcattaatgtctcatgttcatcacaatttttcaagtcatttgactgtgtgttaccagggagggacaacaccttgaacatatcataggatgtcattgaatatattgtacactgtaatctcagtaaactattaattatctgtatttgtcaaagtatctggattttttgtccagcctatggttctaacctaagttttaaactttatctacttggaatcatgtactacatctctctctctgtgtacttcctttcctttaaaatcttatttatgagattcattcatcttgttgctcataactgcagttagttttcattactcctatagtattccattggataaatattccacaatttacatattcaatccactattggcagatatgtggattgtttccactttggggttattaagaattaccctaccataagcatcctttgttaagagtgacattactgggtcagaaaatatgcctatgttctactttagcaaataatttaaatagtgttacgagaattgccattrttgcacttttccagaaaatatttcttttctgcttaattttagctatcagtttactatttagtggaatatttctgtacttttcatttacattatcttcataacaaattttagtgcattttcatatgtttattagtcatacacatgtgtattcatctgagaaggtttttttaagttatttttatgcattttatatgggtagtctttccttatcgattcacagaagtgctttatgtattctagatgcgagtcctttgttggttatatattgtgaaaatctgttccctactccatggcttccttttttactcacttattgtttcttacgttgaacacctattgttaattttaatgcagtcctattgaatcatctttacttatgtgtcctgtttattacataaaataatcatatatacacatctgtatttgcttctaaaaatctttttatgttatgattactttgcctttcacgtctaatccaaaaatctacctgaaatttacattttgagttggggtaaaatttcattatttttccaaattggtccagcaaaatttattgaaaatatgacattttcaaactgctctacaatattagtcatgaattcagtacccatggatgcttggctctgtttctagacatttgtgtgttccactgaacaatttgtctatattgtactgtcttacacaatatgcctaataatatgctttgatagctggtagagatttttctaccctttctttcaatatgagtgtgttgactttttactatattgatataatttacataatgtttactatttaaaattctacaattgttttttcagtatgttcagtttgtgcaaagataactactaattccagaatgtttctaacaccttaaaagaaaaccctatatagtacctattagcagccaatatctgattctcttgtatcttcttcccctgataactcctaatctattgtctctctggatttgcctattctgtacacttcatataaatggaatcacacaacatgtgaccttttgtgtctgccttaatttaaaatatttttaaagtccatttatactgttgca

SEQ ID NO: 694672 - DNA, 3227 bp, Homo sapiens
attaagcctgacacagaaataaaaacatactccaaggaatagtgacaaacaaaataaaaatatcagaagactgagagtcccaaagaaaaaaatatctcaccagatttttgaagttaccagaagatcaaggagtccaagcctgataaaaagcaaaacagaggaaagacagaaaataagagtttttgtttcagaaaaaatagacaataaaatgctataattctacaatattattctatttacaagtactgctggctgaataaacactttaagacataatttctgtagatgaaaatgtgtctttaacttaaactgaagtgtttaacttacattgtgccattaaaacaaaggaaaaaaggaaatgttctagctctagaaaatattttttccaattatttaggtgacgataattatttggttaattctttaagttctcaaagaagggagattattattaaatgcacttgaaattctctaataattagtacataaatttaatgtttttatgggagaagcagaccaaagtttcattttaaaagacttttcccatttttcaggtttttgctggctatgacaataattagttctggctttgatttatttttgaaaagtaaaaccatgaaagatattataatgacaaagataaaaggcttttaatttttaaatgatactaaaatgcagcctctattttttaaaggtgtttgaagttcaaatgaaaggcaatatctgaacagcacaaattcccaagaggagacccagcacctgccatgggatgcaaaggttttataaatgttgtcttgtgtaaagaaaatggcaaacattgtgaggccttttgcaaatatgcctgcctgcttctgtgtttgagcagaaatattgaacttctaaccattattattataaaataaaggagattattctttaaacatttgatggtagccttttccttttgtcttgggaatcgagtttgaaactacacatttgaaaaacacatgtctttctttgaaagagaatggagaacacggtaagtgtgaaaggagttgacactattgtgtaaggttttatatgtgcatatgaatatgtgtctgcatcttactgtcagaaaatttaaattaggttatttctgttgggccagaataatctccataatgctggaccactaattggtaacaaatcatcccgaaggaagctattaatattccttctctagtgtctaaaatcatttgagaagatcaatgcttcacttttgaagagtaagtaatggatcttgtcatattattagagaccttactgaattctctagcctggcttcaaagatgtaaaacggatgatctatctcttagaaacctttgtccatggatcttagttctattaacgacctaagaaaataatctgatacattcttttattgtcatattttaagttatttctttgcggtgcgttataaaccacaaaagatttgcaaaaatagaaatgtatacagctcaataaattatcacaaagtcaatgctcatgtaattattacacagataaacaccttgaagttaaccagtacatagaagcctgtggcttgttctgtcacactgggtaagtgtatatgtatatacaaagatacatgtgcagagatctgtaatcatgctgcattaatgtctcatgttcatcacaatttttcaagtcatttgactgtgtgttaccagggagggacaacaccttgaacatatcataggatgtcattgaatatattgtacactgtaatctcagtaaactattaattatctgtatttgtcaaagtatctggattttttgtccagcctatggttctaacctaagttttaaactttatctacttggaatcatgtactacatctctctctctgtgtacttcctttcctttaaaatcttatttatgagattcattcatcttgttgctcataactgcagttagttttcattactcctatagtattccattggataaatattccacaatttacatattcaatccactattggcagatatgtggattgtttccactttggggttattaagaattaccctaccataagcatcctttgttaagagtgacattactgggtcagaaaatatgcctatgttctactttagcaaataatttaaatagtgttacgagaattgccattattgcacttttccagaaaatatttcttttctgcttaattttagctatcagtttactatttagtggaatatttctgtacttttcatttacattatcttcataacaaattttagtgcattttcatatgtttattagtcatacacatgtgtattcatctgagaaggtttttttaagttatttttatgcattttatatgggtagtctttccttatcgattcacagaagtgctttatgtattctagatgcgagtcctttgttggttatatattgtgaaaatctgttccctactccatggcttccttttttactcacttattgtttcttacgttgaacacctattgttaattttaatgcagtcctattgaatcatctttacttatgtgtcctgtttattacataaaataatcatatatacacatctgtatttgcttctaaaaatctttttatgttatgattactttgcctttcacgtctaatccaaaaatctacctgaaatttacattttgagttggggtaaaatttcattatttttccaaattggtccagcaaaatttattgaaaatatgacattttcaaactgctctacaatattagtcatgaattcagtacycatggatgcttggctctgtttctagacatttgtgtgttccactgaacaatttgtctatattgtactgtcttacacaatatgcctaataatatgctttgatagctggtagagatttttctaccctttctttcaatatgagtgtgttgactttttactatattgatataatttacataatgtttactatttaaaattctacaattgttttttcagtatgttcagtttgtgcaaagataactactaattccagaatgtttctaacaccttaaaagaaaaccctatatagtacctattagcagccaatatctgattctcttgtatcttcttcccctgataactcctaatctattgtctctctggatttgcctattctgtacacttcatataaatggaatcacacaacatgtgaccttttgtgtctgccttaatttaaaatatttttaaagtccatttatactgttgca

SEQ ID NO: 694673 - DNA, 3227 bp, Homo sapiens
attaagcctgacacagaaataaaaacatactccaaggaatagtgacaaacaaaataaaaatatcagaagactgagagtcccaaagaaaaaaatatctcaccagatttttgaagttaccagaagatcaaggagtccaagcctgataaaaagcaaaacagaggaaagacagaaaataagagtttttgtttcagaaaaaatagacaataaaatgctataattctacaatattattctatttacaagtactgctggctgaataaacactttaagacataatttctgtagatgaaaatgtgtctttaacttaaactgaagtgtttaacttacattgtgccattaaaacaaaggaaaaaaggaaatgttctagctctagaaaatattttttccaattatttaggtgacgataattatttggttaattctttaagttctcaaagaagggagattattattaaatgcacttgaaattctctaataattagtacataaatttaatgtttttatgggagaagcagaccaaagtttcattttaaaagacttttcccatttttcaggtttttgctggctatgacaataattagttctggctttgatttatttttgaaaagtaaaaccatgaaagatattataatgacaaagataaaaggcttttaatttttaaatgatactaaaatgcagcctctattttttaaaggtgtttgaagttcaaatgaaaggcaatatctgaacagcacaaattcccaagaggagacccagcacctgccatgggatgcaaaggttttataaatgttgtcttgtgtaaagaaaatggcaaacattgtgaggccttttgcaaatatgcctgcctgcttctgtgtttgagcagaaatattgaacttctaaccattattattataaaataaaggagattattctttaaacatttgatggtagccttttccttttgtcttgggaatcgagtttgaaactacacatttgaaaaacacatgtctttctttgaaagagaatggagaacacggtaagtgtgaaaggagttgacactattgtgtaaggttttatatgtgcatatgaatatgtgtctgcatcttactgtcagaaaatttaaattaggttatttctgttgggccagaataatctccataatgctggaccactaattggtaacaaatcatcccgaaggaagctattaatattccttctctagtgtctaaaatcatttgagaagatcaatgcttcacttttgaagagtaagtaatggatcttgtcatattattagagaccttactgaattctctagcctggcttcaaagatgtaaaacggatgatctatctcttagaaacctttgtccatggatcttagttctattaacgacctaagaaaataatctgatacattcttttattgtcatattttaagttatttctttgcggtgcgttataaaccacaaaagatttgcaaaaatagaaatgtatacagctcaataaattatcacaaagtcaatgctcatgtaattattacacagataaacaccttgaagttaaccagtacatagaagcctgtggcttgttctgtcacactgggtaagtgtatatgtatatacaaagatacatgtgcagagatctgtaatcatgctgcattaatgtctcatgttcatcacaatttttcaagtcatttgactgtgtgttaccagggagggacaacaccttgaacatatcataggatgtcattgaatatattgtacactgtaatctcagtaaactattaattatctgtatttgtcaaagtatctggattttttgtccagcctatggttctaacctaagttttaaactttatctacttggaatcatgtactacatctctctctctgtgtacttcctttcctttaaaatcttatttatgagattcattcatcttgttgctcataactgcagttagttttcattactcctatagtattccattggataaatattccacaatttacatattcaatccactattggcagatatgtggattgtttccactttggggttattaagaattaccctaccataagcatcctttgttaagagtgacattactgggtcagaaaatatgcctatgttctactttagcaaataatttaaatagtgttacgagaattgccattattgcacttttccagaaaatatttcttttctgcttaattttagctatcagtttactatttagtggaatatttctgtacttttcatttacattatcttcataacaaattttagtgcattttcatatgtttattagtcatacacatgtgtattcatctgagaaggtttttttaagttatttttatgcattttatatgggtagtctttccttatcgattcacagaagtgctttatgtattctagatgcgagtcctttgttggttatatattgtgaaaatctgttccctactccatggcttccttttttactcacttattgtttcttacgttgaacacctattgttaattttaatgcagtcctattgaatcatctttacttatgtgtcctgtttattacataaaataatcatatatacacatctgtatttgcttctaaaaatctttttatgttatgattactttgcctttcacgtctaatccaaaaatctacctgaaatttacattttgagttggggtaaaatttcattatttttccaaattggtccagcaaaatttattgaaaatatgacattttcaaactgctctacaatattagtcatgaattcagtacccatggrtgcttggctctgtttctagacatttgtgtgttccactgaacaatttgtctatattgtactgtcttacacaatatgcctaataatatgctttgatagctggtagagatttttctaccctttctttcaatatgagtgtgttgactttttactatattgatataatttacataatgtttactatttaaaattctacaattgttttttcagtatgttcagtttgtgcaaagataactactaattccagaatgtttctaacaccttaaaagaaaaccctatatagtacctattagcagccaatatctgattctcttgtatcttcttcccctgataactcctaatctattgtctctctggatttgcctattctgtacacttcatataaatggaatcacacaacatgtgaccttttgtgtctgccttaatttaaaatatttttaaagtccatttatactgttgca

SEQ ID NO: 694674 - DNA, 602 bp, Homo sapiens
catgtgaaaagcattgttccttcccccccrtgctggggctgagtcctggaggggatggaagagccccccatgtagcagctacaaatttcagttcagaagtccatgagatgtggcttgttgtcttttctcatgatcctgacacatctggatcctatcccagggtgtgtctcactccagggcccattcaccatcttggcatctgtagaagcatcccctgccctcccctcggccacggagtcatgcagggagctgggcttgatctgcctgcaggcctgcttcgagtcagcctcattgggcttcttctatgccataccagttgcaggaaacactgtgtggccacctgcagccacagcccctggatacctcagcatccctttcttcctgggactccaggagggaaagctgctccacgcccctctgctctcagatcctttccttcccaggcataactccaggaggcaggcgggaaggaagcccccaggataggagtccattctgtatttaacaggtattgattgagtgcctcccttggggaaaataaaaccaaaaggtccctgcccttacatagcatagagtctagtgatgggcaggccgattgtaaa

SEQ ID NO: 694675 - DNA, 1064 bp, Homo sapiens
agcaattaaatacctcttagatgcctagaaaacagactctagccacagaaaaacaaaatgatgctatatcatcatttgtgttcatcagtattcaaattccaaccacactttaagaactacagattcgacttcagctatataactttctctgagtaacttgacctacataattttgttcatattccagattcctatagtaggtctaatttatttaaaaatcacaaattgcatataaaatgttatattactgctaattacttttttaaattgtgatttcctctatttactagactatgagcttcttcacaatacggacaggacacttaaatgttttatattcccatccccattcctcaggtttcatggccaatgcaccatacccaatgaattttagattaaaatgctttagaaaaaaaacatgataacttcacgaatccttatttcctcataaggtatacatcaaattatcctttacatttcttttgcttctaacatttgatttgtagcatgcttctgatatttaaaaagayagcctttttttcttttttaaaaaactatatctattcacataacacagacgtatatgttagctagatgagaatgccaagggagagggtagaagagaaaagcaggaggagagagaaggaaaaaaggagaggacaaaagagagggaggtggggaaaagaaacacagaacactttaccaataaatcacagggaagttttaaaaacatagtaatattacgtatggaagcattacccctaactcatcacaaaaccaaagttctatctttcaataatcaaacatcatgtaaatgccaaaagaaaactctgagagcaaataatgagccatgaatatttcaaatctactgagtttcagctgtgatcaaaaatttagtgctataacttagaaagactccttggcagagtagttacaaggaacctctcctaattcaaatatgagtttgattccaagctctgacagttactagtgatcttgaccaagttacttaatctctctgactctcaggaaaattttaaatgtatagatatatattttttaag

SEQ ID NO: 694676 - DNA, 1064 bp, Homo sapiens
agcaattaaatacctcttagatgcctagaaaacagactctagccacagaaaaacaaaatgatgctatatcatcatttgtgttcatcagtattcaaattccaaccacactttaagaactacagattcgacttcagctatataactttctctgagtaacttgacctacataattttgttcatattccagattcctatagtaggtctaatttatttaaaaatcacaaattgcatataaaatgttatattactgctaattacttttttaaattgtgatttcctctatttactagactatgagcttcttcacaatacggacaggacacttaaatgttttatattcccatccccattcctcaggtttcatggccaatgcaccatacccaatgaattttagattaaaatgctttagaaaaaaaacatgataacttcacgaatccttatttcctcataaggtatacatcaaattatcctttacatttcttttgcttctaacatttgatttgtagcatgcttctgatatttaaaaagatagcctttttttcttttttaaaaaactatatctattcacataacacagacgtatatgttagctagatgagaatgccaagggagagggtagaagagaaaagcaggaggagagagaaggaaaaaaggagaggacaaaagagagggaggtggggaaaagaaacacagaacactttaccaataaatcacagggaagttttaaaaacatagtaatattacgtatggaagcattacccctaactcatcacaaaaccaaagttctatctttcaataatcaaacatcatgtaaatgccaaaagaaaactctgagagcaaataatgagccatgaatatttcaaatctactgagtttcagctgtgatcaaaaatttagtgctataacttagaaagactccttggcagagtagttacaagraacctctcctaattcaaatatgagtttgattccaagctctgacagttactagtgatcttgaccaagttacttaatctctctgactctcaggaaaattttaaatgtatagatatatattttttaag

SEQ ID NO: 694677 - DNA, 1436 bp, Homo sapiens
  misc_feature 780, 816, 817, 818, 819, 820, 821, 822, 823, 824, 825, 826,827, 828, 829, 830, 831, 832, 833, 834, 835, 836, 837, 838,839, 840, 841, 842, 843, 844, 845, 846, 847, 848, 849, 850,851, 852, 853, 854, 855, 856, 857, 858, 859, 860, 861: n = A,T,C or G
  misc_feature 862, 863, 864, 865, 866, 867, 868, 869, 870, 871, 872, 873,874, 875, 876, 877, 878, 879, 880, 881, 882, 883, 884, 885,886, 887, 888, 889, 890, 891, 892, 893, 894, 895, 896, 897,898, 899, 900, 901, 902, 903, 904, 905, 906, 907, 908: n = A,T,C or G
  misc_feature 909, 910, 911, 912, 913, 914, 915: n = A,T,C or G
tgaccttaaaatagagagcgtatcctgcaatatccaggtacccaatataatcacagaggtccttaaaattgggagagggagatagagaatgaagagatgataccaggaraaagactcagcccaccactgctggctttgaagatgtaggaaggggccattagcccaggaatgtgggtagcctctagaagctggaaaagaccaggaaactgattatttccctttgagcctccagaaggaacacagcctttctggcaccttgattttagcccattgatacccgttttgtacttctgacctccagagctgtaagataataaatttgtattgttttaagctgttaactttgtggtaatttattataccagcaataggaaactaatactactcatgtggttttataatgatgcattaatttcttttccaagaaatctataaagcagagacaacgtctctaagacattagagcattagagtaaaaaagcagtctaccagatgcaagtgttttgccactggttctttcagtataaatagacaggttttcctaactccccacagcaagcatttcacccaaatttagtgctatgggagtaaatcacattttccccccataatcacatgataaataataattttattttcccagactttcataatacccacaaacctaaaatatgaaaatcttctaactccattttaaagactctctcaatttcctgggttcatcttattctgccttcgatctacatatgtttgagataatatacggtattatatagtttnccagggtaccgagctcgaattcgtaaaaagtgaatnnnnnnnnnnnnnnnnnnnnnnnnnnnnnnnnnnnnnnnnnnnnnnnnnnnnnnnnnnnnnnnnnnnnnnnnnnnnnnnnnnnnnnnnnnnnnnnnnnnncatttccatttttgaaaactttcagggaacatcagtgtttccaattaatgtggctcctacatcatgcatttctttgtggatgacttggtggaagcattaagcctttggttattgaaatgtaataggatctcgctaattaaccccataatgtggtaatgttagtatctctaaaataaacatgtggtactaagagtgtaggctgatagcttttctgtgcttcacttaccttatttgtaaaatgggtataataatgtaatagtgagactggtaggactagaggatgcaatatatacacagcccttagtacaatacctagcacttggtaagcactcagtaaagtaccctaacctaattataaatgtaaagaagtgctttaacactatctcgttggaatctattatatcaacctcttggaaggggggcgtagagagtattattatttttatgcatgaattggatgggttcaattatttcatttctactaaacccacatgaatgaagttgctggagagaaaaacata

SEQ ID NO: 694678 - DNA, 1436 bp, Homo sapiens
  misc_feature 780, 816, 817, 818, 819, 820, 821, 822, 823, 824, 825, 826,827, 828, 829, 830, 831, 832, 833, 834, 835, 836, 837, 838,839, 840, 841, 842, 843, 844, 845, 846, 847, 848, 849, 850,851, 852, 853, 854, 855, 856, 857, 858, 859, 860, 861: n = A,T,C or G
  misc_feature 862, 863, 864, 865, 866, 867, 868, 869, 870, 871, 872, 873,874, 875, 876, 877, 878, 879, 880, 881, 882, 883, 884, 885,886, 887, 888, 889, 890, 891, 892, 893, 894, 895, 896, 897,898, 899, 900, 901, 902, 903, 904, 905, 906, 907, 908: n = A,T,C or G
  misc_feature 909, 910, 911, 912, 913, 914, 915: n = A,T,C or G
tgaccttaaaatagagagcgtatcctgcaatatccaggtacccaatataatcacagaggtccttaaaattgggagagggagatagagaatgaagagatgataccaggaaaaagactcagcccaccactgctggctttgaagatgtaggaaggggccattagcccaggaatgtgggtagcctctagaagctggaaaagaccaggaaactgattatttccctttgagcctccagaaggaacacagcctttctggcaccttgattttagcccattgatacccgttttgtacttctgacctccagagctgtaagataataaatttgtattgttttaagctgttaactttgtggtaatttattataccagcaataggaarctaatactactcatgtggttttataatgatgcattaatttcttttccaagaaatctataaagcagagacaacgtctctaagacattagagcattagagtaaaaaagcagtctaccagatgcaagtgttttgccactggttctttcagtataaatagacaggttttcctaactccccacagcaagcatttcacccaaatttagtgctatgggagtaaatcacattttccccccataatcacatgataaataataattttattttcccagactttcataatacccacaaacctaaaatatgaaaatcttctaactccattttaaagactctctcaatttcctgggttcatcttattctgccttcgatctacatatgtttgagataatatacggtattatatagtttnccagggtaccgagctcgaattcgtaaaaagtgaatnnnnnnnnnnnnnnnnnnnnnnnnnnnnnnnnnnnnnnnnnnnnnnnnnnnnnnnnnnnnnnnnnnnnnnnnnnnnnnnnnnnnnnnnnnnnnnnnnnnncatttccatttttgaaaactttcagggaacatcagtgtttccaattaatgtggctcctacatcatgcatttctttgtggatgacttggtggaagcattaagcctttggttattgaaatgtaataggatctcgctaattaaccccataatgtggtaatgttagtatctctaaaataaacatgtggtactaagagtgtaggctgatagcttttctgtgcttcacttaccttatttgtaaaatgggtataataatgtaatagtgagactggtaggactagaggatgcaatatatacacagcccttagtacaatacctagcacttggtaagcactcagtaaagtaccctaacctaattataaatgtaaagaagtgctttaacactatctcgttggaatctattatatcaacctcttggaaggggggcgtagagagtattattatttttatgcatgaattggatgggttcaattatttcatttctactaaacccacatgaatgaagttgctggagagaaaaacata

SEQ ID NO: 694679 - DNA, 1341 bp, Homo sapiens
tatttcttccagtttttaaaaatgaaaatgggattggttggatgcggtggctcatgcctgtcatcccagcactttgggaggctgaggcaggaggattgcatgagccyaggagttcgagaccagtgtgggcaacatagggagactttgtccctacaaaagagagagaaaacaagagaaaaataattaatggggtgtggtatcacgtacctgtagtcccagctactccagaggctgaagcaggaggatcgcttgagcccagactgagttgaggctgcagtgagctgtgatcacaccactgccctctagcctgggtgacagagaaaaaccctgtcgaaaagaaagaaagagagagagagagagagagagagagagaaagaaaatgagatcagaaagaaagaaggaaagagaaaatgggatcataatatacatattgttctgcatcctgcttttcagtaaaaaaaaaataacattgttaagtcatagggggatgacatcagtcatcctgaaaggggagatatgagcaaatgggtgtggggtgaaggcaggtgaggggaaccaagcttaagggcaaaccaagttttgtccagattatagttctttctcctggcaaaccaagtcctgaacctgtcgccaggctgttgtttaggctcagggcttggatggccaggagaaagaactgtaacctgggcaagacttcacattcattaatatcatcatatgtattaagaggaaatctgaattgatttacatttcaatttcattcagaaggccagtgggaagtagtgtagtctaggagatgagcagttcttggtgaagttgattctgtttataaactgaattacaggagaaagaagcagagggcagggcagctaggaggatacgcaggataggccacaccaccccaatgtgaacatgaaaaaggaagaagtaccttgtgtaagggagttaaaatccagtcactttctttttttaaaaaaataaaactagttaccctctgctgctgctttttctttttgtaaatctaattggtgtgtccttctgaattcagctaagatgactcctcacccagagaaagggttcatctcctctggctttttttgtttcttctattttcacaccagttttagaaaaggcagggccctcatttggaagtagcagacaaaatggcagtgcaggtttgtgcattctttcaaaagaattcttgatttttggctgggcgctgtggctcacgcctgtaatcctagcactttgggagtccaaggcgggtggatcacctgaggtcaggagttcgagactgcccaacgtggtgaaaccgcgtctctactaacaacacaaaaatca

SEQ ID NO: 694680 - DNA, 1341 bp, Homo sapiens
tatttcttccagtttttaaaaatgaaaatgggattggttggatgcggtggctcatgcctgtcatcccagcactttgggaggctgaggcaggaggattgcatgagcccaggagttcgagaccagtgtgggcaacatagggagactttgtccctacaaaagagagagaaaacaagagaaaaataattaatggggtgtggtatcacgtacctgtagtcccagctactccagaggctgaagcaggaggatcgcttgagcccagactgagttgaggctgcagtgagctgtgatcacaccactgccctctagcctgggtgacagagaaaaaccctgtcgaaaagaaagaaagagagagagagagagagagagagagagaaagaaaatgagatcagaaagmaagaaggaaagagaaaatgggatcataatatacatattgttctgcatcctgcttttcagtaaaaaaaaaataacattgttaagtcatagggggatgacatcagtcatcctgaaaggggagatatgagcaaatgggtgtggggtgaaggcaggtgaggggaaccaagcttaagggcaaaccaagttttgtccagattatagttctttctcctggcaaaccaagtcctgaacctgtcgccaggctgttgtttaggctcagggcttggatggccaggagaaagaactgtaacctgggcaagacttcacattcattaatatcatcatatgtattaagaggaaatctgaattgatttacatttcaatttcattcagaaggccagtgggaagtagtgtagtctaggagatgagcagttcttggtgaagttgattctgtttataaactgaattacaggagaaagaagcagagggcagggcagctaggaggatacgcaggataggccacaccaccccaatgtgaacatgaaaaaggaagaagtaccttgtgtaagggagttaaaatccagtcactttctttttttaaaaaaataaaactagttaccctctgctgctgctttttctttttgtaaatctaattggtgtgtccttctgaattcagctaagatgactcctcacccagagaaagggttcatctcctctggctttttttgtttcttctattttcacaccagttttagaaaaggcagggccctcatttggaagtagcagacaaaatggcagtgcaggtttgtgcattctttcaaaagaattcttgatttttggctgggcgctgtggctcacgcctgtaatcctagcactttgggagtccaaggcgggtggatcacctgaggtcaggagttcgagactgcccaacgtggtgaaaccgcgtctctactaacaacacaaaaatca

SEQ ID NO: 694681 - DNA, 1341 bp, Homo sapiens
tatttcttccagtttttaaaaatgaaaatgggattggttggatgcggtggctcatgcctgtcatcccagcactttgggaggctgaggcaggaggattgcatgagcccaggagttcgagaccagtgtgggcaacatagggagactttgtccctacaaaagagagagaaaacaagagaaaaataattaatggggtgtggtatcacgtacctgtagtcccagctactccagaggctgaagcaggaggatcgcttgagcccagactgagttgaggctgcagtgagctgtgatcacaccactgccctctagcctgggtgacagagaaaaaccctgtcgaaaagaaagaaagagagagagagagagagagagagagagaaagaaaatgagatcagaaagaaagaaggaaagagaaaatgggatcataatatacatattgttctgcatcctgcttttcagtaaaaaaaaaataacattgttaagtcatagggggatgacatcagtcatcctgaaaggggagatatgagcaaatgggtgtggggtgaaggcaggtgaggggaaccaagcttaagggcaaaccaagttttgtccagattatagttctttctcctggcaaaccaagtcctgaacctgtcgccaggctgttgtttaggctcagggcttggatggccaggagaaagaactgtaacctgggcaagacttcacattcattaatatcatcatatgtattaagaggaaatctgaattgatttacatttcaatttcattcagaaggccagtgggaagtagtgtagtctaggagatgagcagttcttggtgaagttgattctgtttataaactgaattacaggagaaagaagcagagggcagggcagctaggaggatacgcaggataggccacaccaccccaatgtgaacrtgaaaaaggaagaagtaccttgtgtaagggagttaaaatccagtcactttctttttttaaaaaaataaaactagttaccctctgctgctgctttttctttttgtaaatctaattggtgtgtccttctgaattcagctaagatgactcctcacccagagaaagggttcatctcctctggctttttttgtttcttctattttcacaccagttttagaaaaggcagggccctcatttggaagtagcagacaaaatggcagtgcaggtttgtgcattctttcaaaagaattcttgatttttggctgggcgctgtggctcacgcctgtaatcctagcactttgggagtccaaggcgggtggatcacctgaggtcaggagttcgagactgcccaacgtggtgaaaccgcgtctctactaacaacacaaaaatca

SEQ ID NO: 694682 - DNA, 1213 bp, Homo sapiens
gaaattacctacattagttaactcacagaaaacacttttgctcaaccagcaggatatttctttctggttgaaataattgggaaccttgaattatatggtgctgtgaactaaactatgtcctcccggaattcatatgttgaagccttaacccccagtgtgactgtatttttttttgtttttttgagacagagtctcacttgatcacccaggttggagtgcagtggcatgatcatggctcagtgtagycttgacctcttgggctcaagtgatcctcttccttcagcctcccaagtagctgggactgcaggtgtgcaccaccacacccggctaatatttgcatttttttgaagagatgaggtctcactatgttgtcccggatggtctcaaactcttgggctcaagtgatcctccagcctcgacctcccaaagtgctgggattataggtgtaagccaccacacccacaacgtattagaaataaggaaggaattaagggtaaatgaggtcatttagggtggagccccaatccagtaggatttgtgtctttataaggagagataccagagagctcatgtactctctctgtgccaaatgaggacctagggaaggaagccatctgcaagccaggaagagagccctcaccagaaactgagtcagctggcaccttggtcttgggcttccccaactccaaaacaaagagaaataaatttctgttgtttaagttacccagtctatggcattttgttatggcagcctgaactgactaagatacatgactatttaactcactttagttggcatttggagacagggcccatatttccagaagaaaacaatttccagaggcatttccccagaaagatatggctttagcttgtctcttactttatccactttatttctactatatcatgcgctagaaatctggaagcatgcaaggtgtttatattctatcaaaaactaaattgtgtttcacatgtgttctcgcagcatttgggaactgggaaagtgggatttgtaaagccttgttgctggcctctggtattggatagtagacaatgtaaatatcatctttagaagataaaacattttatctaaacagccttatgatcctgtcattgggttggaaacagttgctttcaatctgcagtcatacacaagagggagagaggcagaattcttgtctgattcccccaattccccagggatgagagc

SEQ ID NO: 694683 - DNA, 1213 bp, Homo sapiens
gaaattacctacattagttaactcacagaaaacacttttgctcaaccagcaggatatttctttctggttgaaataattgggaaccttgaattatatggtgctgtgaactaaactatgtcctcccggaattcatatgttgaagccttaacccccagtgtgactgtatttttttttgtttttttgagacagagtctcacttgatcacccaggttggagtgcagtggcatgatcatggctcagtgtagtcttgacctcttgggctcaagtgatcctcttccttcagcctcccaagtagctgggactgcaggtgtgcaccaccacacccggctaatatttgcatttttttgaagagatgaggtctcactatgttgtcccrgatggtctcaaactcttgggctcaagtgatcctccagcctcgacctcccaaagtgctgggattataggtgtaagccaccacacccacaacgtattagaaataaggaaggaattaagggtaaatgaggtcatttagggtggagccccaatccagtaggatttgtgtctttataaggagagataccagagagctcatgtactctctctgtgccaaatgaggacctagggaaggaagccatctgcaagccaggaagagagccctcaccagaaactgagtcagctggcaccttggtcttgggcttccccaactccaaaacaaagagaaataaatttctgttgtttaagttacccagtctatggcattttgttatggcagcctgaactgactaagatacatgactatttaactcactttagttggcatttggagacagggcccatatttccagaagaaaacaatttccagaggcatttccccagaaagatatggctttagcttgtctcttactttatccactttatttctactatatcatgcgctagaaatctggaagcatgcaaggtgtttatattctatcaaaaactaaattgtgtttcacatgtgttctcgcagcatttgggaactgggaaagtgggatttgtaaagccttgttgctggcctctggtattggatagtagacaatgtaaatatcatctttagaagataaaacattttatctaaacagccttatgatcctgtcattgggttggaaacagttgctttcaatctgcagtcatacacaagagggagagaggcagaattcttgtctgattcccccaattccccagggatgagagc

SEQ ID NO: 694684 - DNA, 1213 bp, Homo sapiens
gaaattacctacattagttaactcacagaaaacacttttgctcaaccagcaggatatttctttctggttgaaataattgggaaccttgaattatatggtgctgtgaactaaactatgtcctcccggaattcatatgttgaagccttaacccccagtgtgactgtatttttttttgtttttttgagacagagtctcacttgatcacccaggttggagtgcagtggcatgatcatggctcagtgtagtcttgacctcttgggctcaagtgatcctcttccttcagcctcccaagtagctgggactgcaggtgtgcaccaccacacccggctaatatttgcatttttttgaagagatgaggtctcactatgttgtcccggatggtctcaaactcttgggctcaagtgatcctccagcctcgacctcccaaagtgctgggattayaggtgtaagccaccacacccacaacgtattagaaataaggaaggaattaagggtaaatgaggtcatttagggtggagccccaatccagtaggatttgtgtctttataaggagagataccagagagctcatgtactctctctgtgccaaatgaggacctagggaaggaagccatctgcaagccaggaagagagccctcaccagaaactgagtcagctggcaccttggtcttgggcttccccaactccaaaacaaagagaaataaatttctgttgtttaagttacccagtctatggcattttgttatggcagcctgaactgactaagatacatgactatttaactcactttagttggcatttggagacagggcccatatttccagaagaaaacaatttccagaggcatttccccagaaagatatggctttagcttgtctcttactttatccactttatttctactatatcatgcgctagaaatctggaagcatgcaaggtgtttatattctatcaaaaactaaattgtgtttcacatgtgttctcgcagcatttgggaactgggaaagtgggatttgtaaagccttgttgctggcctctggtattggatagtagacaatgtaaatatcatctttagaagataaaacattttatctaaacagccttatgatcctgtcattgggttggaaacagttgctttcaatctgcagtcatacacaagagggagagaggcagaattcttgtctgattcccccaattccccagggatgagagc

SEQ ID NO: 694685 - DNA, 1213 bp, Homo sapiens
gaaattacctacattagttaactcacagaaaacacttttgctcaaccagcaggatatttctttctggttgaaataattgggaaccttgaattatatggtgctgtgaactaaactatgtcctcccggaattcatatgttgaagccttaacccccagtgtgactgtatttttttttgtttttttgagacagagtctcacttgatcacccaggttggagtgcagtggcatgatcatggctcagtgtagtcttgacctcttgggctcaagtgatcctcttccttcagcctcccaagtagctgggactgcaggtgtgcaccaccacacccggctaatatttgcatttttttgaagagatgaggtctcactatgttgtcccggatggtctcaaactcttgggctcaagtgatcctccagcctcgacctcccaaagtgctgggattataggygtaagccaccacacccacaacgtattagaaataaggaaggaattaagggtaaatgaggtcatttagggtggagccccaatccagtaggatttgtgtctttataaggagagataccagagagctcatgtactctctctgtgccaaatgaggacctagggaaggaagccatctgcaagccaggaagagagccctcaccagaaactgagtcagctggcaccttggtcttgggcttccccaactccaaaacaaagagaaataaatttctgttgtttaagttacccagtctatggcattttgttatggcagcctgaactgactaagatacatgactatttaactcactttagttggcatttggagacagggcccatatttccagaagaaaacaatttccagaggcatttccccagaaagatatggctttagcttgtctcttactttatccactttatttctactatatcatgcgctagaaatctggaagcatgcaaggtgtttatattctatcaaaaactaaattgtgtttcacatgtgttctcgcagcatttgggaactgggaaagtgggatttgtaaagccttgttgctggcctctggtattggatagtagacaatgtaaatatcatctttagaagataaaacattttatctaaacagccttatgatcctgtcattgggttggaaacagttgctttcaatctgcagtcatacacaagagggagagaggcagaattcttgtctgattcccccaattccccagggatgagagc

SEQ ID NO: 694686 - DNA, 432 bp, Homo sapiens
tgaggatatggtaaaggagtttatgagtactttgttcccaggctttcacaaaakttattgtggccaaagatgacgttaaatcagcttcaatgccatgaccaaaatgagtgcaggcaaaaaataaatctgagttcattcactggctgcagagagacctaaagagcaacaggtgagcagagcaggctgcttctgcattctctgtttcatttcatgaattgtacatcttgggaactttactccattcaacatttgtaggataatattaacagtgaacagctatggcataagagaaaatctttgcaatcatcgtgtcgattctttaaacccccttctccaaagaaaaactaaagaaagcaaagcatactactgtgctaatatggatctttaagaagatttaggccatatcaatatttcaatatctttcaagtctaa

SEQ ID NO: 694687 - DNA, 432 bp, Homo sapiens
tgaggatatggtaaaggagtttatgagtactttgttcccaggctttcacaaaagttattgtggccaaagatgacgttaaatcagcttcaatgccatgaccaaaatgagtgcaggcaaaaaataaatctgagttcattcactggctgcagagagacctaaagagcaacaggtgagcagagcaggctgcttctgcrttctctgtttcatttcatgaattgtacatcttgggaactttactccattcaacatttgtaggataatattaacagtgaacagctatggcataagagaaaatctttgcaatcatcgtgtcgattctttaaacccccttctccaaagaaaaactaaagaaagcaaagcatactactgtgctaatatggatctttaagaagatttaggccatatcaatatttcaatatctttcaagtctaa

SEQ ID NO: 694688 - DNA, 432 bp, Homo sapiens
tgaggatatggtaaaggagtttatgagtactttgttcccaggctttcacaaaagttattgtggccaaagatgacgttaaatcagcttcaatgccatgaccaaaatgagtgcaggcaaaaaataaatctgagttcattcactggctgcagagagacctaaagagcaacaggtgagcagagcaggctgcttctgcattctctgtttcatttcatgaattgtacatcttgggaactttaytccattcaacatttgtaggataatattaacagtgaacagctatggcataagagaaaatctttgcaatcatcgtgtcgattctttaaacccccttctccaaagaaaaactaaagaaagcaaagcatactactgtgctaatatggatctttaagaagatttaggccatatcaatatttcaatatctttcaagtctaa

SEQ ID NO: 694689 - DNA, 1049 bp, Homo sapiens
atctcaatagccccaaccatgattatgttttaacatatgtatcactgattagcttaaaatttgaaagcattatttattacttaatagacatgccttctggtttattttaccaataaatattggtggaaaaaagtaataaacactctggacttattaaggtcaagaaccactcctgtgatccaaartctttattttacaatgagggagaccagtcataaatagggcaagtaatgcaatcagaaaggtttaggtgtcatccccagtcaagaaaacagtgcaagtggctccttcctgcttcctattaatttgaagtccaccctcagtgaaggatcccttgagaatcaaaagaccccaggaagaacctgcttaatacatcagcattaaaattcagttaccctaagttcgggtggaataatttattagaaacttatttctaagttaataatattggtataaatcctaaacatgggccaggagtggtggctcacacctgtaatcccagcactttgggggggctgagacaggtggatcacttgtggccaggagttcgagaccagcctggccaacatggtgaaccccatctctagtaaaaaaaaatacaaaaattagccggatgtggtggcaggcacctatttgggaggctgaggcaggagaatcgcttgaacctaggaggtggaggttgcagtgagccgagatggcaccactgcactcccgagtgggcaacagagtgagactctgtctcaaaaaaaaaaaaaaaaagatactaaatatggaatcacttaacttcttgtagacttacctgtaaaacatggatttaatagctatattatagagtttctgagaaaataaaatgaattgataaatgtgaaattactaagtaaccataatgcataatatcaattgttcttaaaattaaactcttttaaacaaatgcatagatgtagacaggaaaggaagttgtgaccagatgcctatttgaaatgcacaagattgtctttatttctaagtaagaaccatgtatacaaggcatttaagcttagctgggttgc

SEQ ID NO: 694690 - DNA, 1490 bp, Homo sapiens
agatactatttttttgatgtagaatttaaaaaggtagcctatatactacaaaagcttacaagtacattaaaagatagaacatgtgtaaaaccactcatgttggaaaattcaagtagatttcaatatttcctcatgtgttttccaggtactaaagtccgtttatgtatctctttcattctctagtttcctacacaaaaacttaaccatctaaaaatagtgcaaatggaaatctaagactaatctagccattactgtcatgcacacaaaactctctgtgcccttatggctggatgagcaatagacagtgtctattgtcagctctctcagttattctcataatgggctttgctaacagcacacagcttcatgggcactgtgtctgatggtcacacagctctcataggctattcctctatatatctgtcccatttccttcccactgtgacaaacagacggttaaccagtagctgaattaataagtgaagtgattttcctccatacagtaaccacgtttgaagacacagtcattttgtaggtgactttaaaagtcataccttattcatgagccatcatagaatcttgtatactataagagaggatggtaatttctcaagtaacaaaaaagtcaataatatcacatgaacaaaatcacttacagctaaaatgctcttgttggtctaattctacatctgttttatcttagctccaatatttaaaacttcattttagttattcatcatctttttatttgcacataatttttaaatgtcagccattgatacctcatttttttcagaaatagatttgatacatccatggatcttaaagaaaacataattttttttttttaaggcagagttttgctcagtcgcccaggctggagtgcagtggtgtgatcttggctcactgcaacctctgcctccagggttcaagtgattctcctgcttcagcctcccgagtagctggggctacaggcacccaccaccaygcccggctaatttttgtatttttagtagagatagggtttcaacatgttggccaggctgagtcttgaactcctaacctcaagggatctacccaccacagcctcccaaagtgttgggattacaggcatgagccacttcgccggccttccagctccttcttgatcctgtattcctaagcagcagtttcttggcctgaccggttcactcagtcttgacatcttcccactgctctcttctgaccctgggcaggaggaattcaatgaaatcccttgcaaaaacatcctcataactagcatggcctaggatggcatctcaattttgatatctgaacttctcttcctcccccgcccaccccctaccctctggctcccgtcttatttgtggttcttgacttgcaacttggccagggaaacggattagagatttacaatggtcagaccccaccaacctcttccttcataaatgagagttctgctctaacaatctttgtctgtctgccagctg

SEQ ID NO: 694691 - DNA, 1490 bp, Homo sapiens
agatactatttttttgatgtagaatttaaaaaggtagcctatatactacaaaagcttacaagtacattaaaagatagaacatgtgtaaaaccactcatgttggaaaattcaagtagatttcaatatttcctcatgtgttttccaggtactaaagtccgtttatgtatctctttcattctctagtttcctacacaaaaacttaaccatctaaaaatagtgcaaatggaaatctaagactaatctagccattactgtcatgcacacaaaactctctgtgcccttatggctggatgagcaatagacagtgtctattgtcagctctctcagttattctcataatgggctttgctaacagcacacagcttcatgggcactgtgtctgatggtcacacagctctcataggctattcctctatatatctgtcccatttccttcccactgtgacaaacagacggttaaccagtagctgaattaataagtgaagtgattttcctccatacagtaaccacgtttgaagacacagtcattttgtaggtgactttaaaagtcataccttattcatgagccatcatagaatcttgtatactataagagaggatggtaatttctcaagtaacaaaaaagtcaataatatcacatgaacaaaatcacttacagctaaaatgctcttgttggtctaattctacatctgttttatcttagctccaatatttaaaacttcattttagttattcatcatctttttatttgcacataatttttaaatgtcagccattgatacctcatttttttcagaaatagatttgatacatccatggatcttaaagaaaacataattttttttttttaaggcagagttttgctcagtcgcccaggctggagtgcagtggtgtgatcttggctcactgcaacctctgcctccagggttcaagtgattctcctgcttcagcctcccgagtagctggggctacaggcacccaccaccacgcccggctaatttttgtatttttagtagagatagggtttcaacatgttggccaggctgagtcttgaactcctaacctcaagggatctacccaccacagcctcccaaagtgttgggattacaggcatgagccacttcgccggccttccagctccttcttgatcctgtattcctaagcagcagtttcttggcctgaccrgttcactcagtcttgacatcttcccactgctctcttctgaccctgggcaggaggaattcaatgaaatcccttgcaaaaacatcctcataactagcatggcctaggatggcatctcaattttgatatctgaacttctcttcctcccccgcccaccccctaccctctggctcccgtcttatttgtggttcttgacttgcaacttggccagggaaacggattagagatttacaatggtcagaccccaccaacctcttccttcataaatgagagttctgctctaacaatctttgtctgtctgccagctg

SEQ ID NO: 694692 - DNA, 1516 bp, Homo sapiens
tgtataatgtggtgactatagctaataacaatgtattatattcttgaagatcattgagagtatattttaagtgttatcaccacaaaaaaagataaggaaatgargtaacgcatatgttaattagctcaatttagccattgcataatgtatgcacatttcaaaatattatattgtaatcaataaatatatgcagtttttatttaattaaaaaaagaaatgaacctcttttacaaaaagaaaatcgtatgcatgactctaggcctaactcaaatcagtctttgagttcctctccttctaacccatggaccattctgctgagatggtaggcctttcagcatgcatatttacctgcatctttctcatttaaaactctgaactatttcatagtcctcaggaaagagccccagatagctcctgtacgacactttctctgccttcccttagccctgcacggtcacacttcaggcatacaaaccactcaaagtgctttaccatgcctgggccttcctcaccgttacaggtttgtgtatagtatactgatacatttgcctgaaataaaccatctcttatttttcatgatgagttcctattggtctttcaactccgcttcagattcccatcattacttccagagttaattgttctaagtactgtttttgtaccttaaacatacatttacaattgcacctatcccctatatctccagcattataattaggaattataatgagatatttgaagaaggtctgtcacttttcatcacttaatccctagcactagtgcctggcactgagatgtcaatggctatttactcaattggattaaccgctgaacatagcagaaggcttatgggtttatttagtcaggcattaactgctcatgtaagttccacagaaaaccctggttgaagtcagtaacctcaacaacaaggacgctttatattcttgtgcctatttctagaagttacacatataattagcttcctctgcctcttcttaacataatgtgaaatagtctaggcagcttcccaggagatcactgggttgcttgagggtagggtaagaaggctgcctcagtccaggttagaagtcagtgcttagaagctattcttttttattattatacttttaagttttagggtacatgtgcacaatgtgcaggtttgttacatatgtatacatgtgccatgttggtgtgctgcacccattaactcatcatttagcatcaggtatatctcctaatgctacccctcccccctacccccaccccacaacaggccccggtgtgcgatgttccccttcctgtgtccatgtgttctcattgttcaattcccacctatgagtgagaacatgcggtgtttggtttgtttgttcttgcgatagtttgctgaaatcaagtttttcttggaaagtacatctttacaaggagcagaaagtcagaatattttaaatagtcatcaaggaaatacatttcagagtaacgtgtttttattctacaggaactgatgaaagaaggg

SEQ ID NO: 694693 - DNA, 645 bp, Homo sapiens
caaaatttaaacaaaataaaacatccattaaaacatgttcctattcttattcttcacacccaggaactgaaaatgttaaaaggttagaaaataagaattggtcgggcgtggtggctcacgcctgtaatcccagcactttgggaggtcaagagatcgagaccatcgtggccaacatggtgaaacccccgtttctactaaaaatacaaaaaattagctaggtgtggtggcattygtccgtagtcccagctactcaggaggctgaggcaggaggatcgcttgaacccaagaggtgcaggtggcagtgagccaagatcgcgccactgcactctagcctggcgacaaagcgagactctgtctcaaaaaacacaaaacaaacaaacaaaaagaagcactaaatatggaaaagaagaactgataccagccagtgcaaaaacacacaaaaatataaagagcaatgacattacgaagaaactgcatcaactagtgtgcaaaataactaaatagcatcatgatgacaggatcaaattcacacgtaacaatagtaaccttaaatataaatgggctaaatgccccaataaaaagacacagactggcaaattgaataaagagtcaagactcatcggtgtgttgtatttaggagacgtg

SEQ ID NO: 694694 - DNA, 2672 bp, Homo sapiens
tggagtgcagtggcacagtctccgcccactgcaagctccgcctcccgggttcatgccattctcctgcctcagctccctgagtagctgggactacgggcgcccgccaccacgccccgctaattttttgtactttttttttagtagagacggggtttcaccatgttagccaggatggtctcgatctcctgacctcgtgatccgcccgccttggcctcccaaagtgctgggatttcaggcgtgagccaccgctcccggcctcaaattcttgagcttagcaaaagggcttctatagtccataccctagtctcctaccatgttccttcatgaaagcttcacacagttacatgcagttaccaagggttccctgagttacccatgcagacttacacgccccacctagatcctctccctgctctgcccttctccacctccaccccacttagctgggagacatccgctgaggcatcaccttctcagggaacctcccctgatgctgcttcgatctaatatagacaccccttctcccagcagtcaccacaacccccggaaacagtgagttgcttgtcacctccactgagatatgaactccttgggagtagggaccagttcttcattcccagtgcttgcccctctagcacagacctgtcccctagcacatgttcagtgcagaggcactctctgccttctcagggtatggttcacagatggacaaccagataaaaatgcatctgatggagtgtcagcaagtcagccaaagaaaaatgttcccaggccacgaagtaagtggccaacatagactggggctgtgagccttcattgaggatttgaaacaaccctgagagatgtgggcaggcaggtgagaggcatttaaggccaaggaaaattccagacaaaacgagagcgagggtaagaaatgaacataaccagtacataggacaagtgtacttcaagaaggtgcaggggaaatgttcttagctcctggaaggtccttgaatacctaggatgtggctaactttaccccgtaagggaagggagtaacttattagagatttctgtttcagggtagaatgaaatctattttaggtgattagtgtggcagcaatgtaggggaaatagtagatcagagactagttaggaggaaattatatttcaaacgaggcacaacgaggttctgggttcaaataggcctggagaaggcagcatgggtgcaattcaagggaaaattgggcaagtgttggggactgcagcagtggggaagtgtctatggtgatgcctacatttagaacctggctgatgctactaataggaattcaaaatctgaaagggtcttaaagaaacctaggaataaatattacaaattgtccaaactcttagcttactttacatgtggctgattccccaccatggagttgctctggaacctagaacctaatttcagaaacaatctttggctttgggttttttgggktttttttgttttttttttgtttgtttgtttttgcataagaaagcatctttcattggattttgtttttcagttaaatttcattttaggtttaagttaaacttcatttattgaagtcaaacttcccaagagactaccttatggatacatggagccctgtgaaaatccaaatgacagcctaaagaccctctccctaaaatatccatatttagagatgagattttgtccagtgtccaagagagtcacaggccctctaaaacagagttcttggcccccaggttttgaagacctggcttttactttatttattggatttacattctaactactgataaaggccacaaagcatgtcaaatccgaagtgtttaggtacagaaaaattactaaactggagactttaaggtaacacaaaaataaaaaaccagaatagtttaatactattgacaagtcacaaagagaaacaagtttgattttttttggcttagtaattaagtaggtctataaaattaataataaaggacttgagacaaaaaaaaaaaaaaaaagctgccttgaggttttaacacttaatgctttattgttgcaatctggaatgaccagctgggaggggctttaatatattgatcctttcagggtcatcacttctgcggagatttactccatcagcagataccaatttgcattttttcccttgtgagttactttaatgacacccagcaaattgcgatattttagttacctctcttagaaatggagccatttttcaccatgcttttttagtaaaaacaaaacaacaaaattattttctgtcaaagataagaaactagttattcccaaacaggtatatcaaatgcacacttcaaaataaggagattctgaattaccttagcaataaacttgagtacattattgtatgtgtgaatatgaacataatgatcatttatacttcattgaatgatatattcacttatacttgagtataggtctgatcattggaattcattgtaataaatatcacatagggccgagcatgatggctcacacctataatcccagcactttgggaggccgaggcgggcggattgcctgagctcagaaattcaagaccagcctgagcaacacggtgaaaccccatctctactaaaatacaaaaaattagccgggcgtggtggcatgcacctgtagtcccagctactagggaggctga

SEQ ID NO: 694695 - DNA, 591 bp, Homo sapiens
gagccatcgcgcccggcttttattcctatcttgtttccaagaagcaacagcgctgggctatactaatccattactataatatactgcatttttcaagaccctttgcaaatctcactaacgggtttaatgaaccagaacttgatcgtgcagatattaccaatcagccagatcttgctctaaaattgccagtgggacaggtaataaacttgtatggaaatgtctgctggggggccttcagcaagctccctgggcttgagtgttgttttttgccctcagcaagatttgctggtgcagcartggtgcatcccctgtttttatgcccaaaaagcagcattgtgtaagttcagcctccgtgctgttggcaattttcacaaattgtttacagtgctctaatttttacactctctttaaaggatctttgtgtatgctgattgcagaaggtaatatttctggcatcagtaaccatggtaatgaatcattctcctctccgaattggtgccagctgcactagtgtctagatagtagcaccctggtgttttgctaatgagcgacttttcatttgctgtaggaggacatttctacttcacatct

SEQ ID NO: 694696 - DNA, 2987 bp, Homo sapiens
  misc_feature 1193: n = A,T,C or G
aaatagcaaatgtctccaagcataaaaatattacacagattcttgtaaccaaatttataaactttactcctagaagattttcagagttcaacattgttccttttttttttttttttttttttttttttgagacagggtcttgctcagtcacccagcctggagtacagtggcacaaacacagtttactgcaaccatgaactcatgggctcaaacaatcctcccacctcagcctcctgagtagttgggaccacaggcatgtgccaccatgcccaacaatttttttttttgtagatacaaaatctcaccatgttgcccgggctggtctcaaactcttgggcttattcaatcctcctaccttgtcctcccaaagtgctgggattacaggcatgagccaatgtacctggctcatttacttttattttagacacatttgctattattttaggtaaacagtttaaaactgattacttcagcacatagcaagagatttgttttagatagtcaaaacagtcagcttatatggtaaaaattccttattgttacttggttctaaaagtaaattccctaaactctgtggttatattccataatttagtcartttcttcaataccatattgctttaattgaggagaagggactctagacaaagtaatgtaataatattaatattattcaataataaaattgtaatatgtttacagagtgctttttgcttttcagttaaaatactttcattcatattgtcttatttaaaaatagattatttcttcttagtcagatcctggtgacagtggggaaaaaaatcctacaaagctaacagaattcgtagcatagcattctgaagtttagtggaaaatagccctgagcacctacctaatatgtcctaaaagcatcattgtgtgataaatgatatttatgatgactccatgcagaaactggttatttgatagatattgaaaggtgttagacttacctacatcagaaatgtatagattattcagctgttctcaagttgaggtagctcccaaagataaagctaagatagacctgtatgagttcagttccttcattgcagtaggtaagttatccagactctttcattgagtgcttttgctatttgaattgggcatctgttttaatcactttgtgaatgacatggaaacccactcatctggtaactttagatagattnttaggcaattcagaaagcacactgagattttccctagaatgtcagtaacattgcctgaagttatatttatggttttgggttggaaagacagtacatatttgggaataaagtggcattcagaagagcaacaataaaatggggttttgtttgtttagtttagctgtgggttatacatattccttggcttctagacctcacaaatttatttgttcaggaagttattaacacatttctaacttggataaaatacttttaatatctttgatctatggtaggtgggtaattcatggtcatttcccaaagtatgtatttatcatttttggtatccagactagaggatctcagaagtttgaagctgatttattatatgagatatttctcccccccacacacccatttcccactcatctaactcgttctatttgaaatctcagctgagtctttagaattctctgggatgctgtttcagacccttgtaaatctgtattggtgctcactctttgtgccccagtgacacaggatttctgttgtagtacacactggattgacatttcaattgctactgtgttttgcgcagagttaggacaattcataggggatgggaactaatagttggtgaactaacacagtaataataatcttaaatatttgcccaacatatatttaatagaagaggaataaactgattttataacatttctatatagaaacaaatacctactaattcgttttctactggccaatgcagggtcagttttctagaaataattagacaaaacatttctgaaggtttggtagttttaatcccttagatcttattgcatgatttttctgaaccaggcagctttctaaaggccatttaaaattacacaataaaatttaattaattctggtaaaaatatattgttcagttttggaacttctgctgactgcaaccacacatggccaatcatattccagtggtgtatttctggacagcagcccgcctaggtcattctttaataaaactctggtctatctcattagcttatgtgctgggacagcatggcacatgggcatcttattcaactttataataggcccttacatcttgggcctattacagtgcttggaaaagagtgggtgttaatatttatttgatgacttgttgaaagagtattaaagtttttctctttactcatgtacaaaatttggcttggcatcccaaataaaatttttattattttttattatatagttgttatatatctctatatattaaatgattatttatgataacagtagaagctcttaataggttttcatgtcattgccattaatttgttctagattttctgtttggtagaatataaatttgttttccttgagaacgtctgtaagctagcaggcaggctcagttttagttaaggactgatgagtaaaatttgtaactgctgaaagaccttgtatgatttttgatatttgaagtaattaaaacaacctgtatttattcttattggctgtgcaatataacttcacaaaatctacagcaaaataacattagattctctttaaaaaaaagaaagattctaaattagacctaaaactactgtttcttcttggattagacctaataactcagaatagaaagtaaccctcttgaataagctgaagaagcgtgatttgcatgcattccttcttttgtaactctgaacattatttcattagataaccagaacagtgtcactaatattcattaattacatctttttcttctgaggattttaattttatttcaaaagtggctctgagtct

SEQ ID NO: 694697 - DNA, 642 bp, Homo sapiens
tactcatttattgtcctaaaacttggcatgtctttgaaaagtgatgaggtgttctttattcacatattttataaacctatcccacaattatgaaaggaggtagaagagatatttaaattaatttggtcgctattctttattacttttaatttcwcctaaaactcagcaagctgactttgaagggaccttagtgaaaaacattttttaattaaaaaaattcacatccagaacttttgtgctcagctgccttgatcctagcggttctgatagctgcaagttcttattcagaaattcagccctacagatcccccagggctacaagacaacaagcaaaaacagacttcagctcttgaaactgtgtaatgaagcccattccaagggcttctcatagattttccaaatatatttagttaatgcacaaacatacacacacacacacacccctactcctttgaactaaaaacatttaaagccagcagttcgcttatttctgaaatgtaaacctccttttgaatttgtttttggtctagctcatgataaggtatgctgtgtaattaactgagtgatttgctttaagatttgggtggggttcaggtgctgcacagcaaaggttgggatttttatgcagccctcacgtggcct

SEQ ID NO: 694698 - DNA, 642 bp, Homo sapiens
tactcatttattgtcctaaaacttggcatgtctttgaaaagtgatgaggtgttctttattcacatattttataaacctatcccacaattatgaaaggaggtagaagagatatttaaattaatttggtcgctattctttattacttttaatttctcctaaaactcagcaagctgactttgaagggaccttagtgaaaaacattttttaattaaaaaaattcacatccagaacttttgtgctcagctgccttgatcctagcggttctgatagctgcaagttcttattcagaaattcagccctacagatcccccagggctacaagacaacaagcaaaaacagacttcagctcttgaaactgtgtaatgaagcccattccaagggcttctcatagattttcyaaatatatttagttaatgcacaaacatacacacacacacacacccctactcctttgaactaaaaacatttaaagccagcagttcgcttatttctgaaatgtaaacctccttttgaatttgtttttggtctagctcatgataaggtatgctgtgtaattaactgagtgatttgctttaagatttgggtggggttcaggtgctgcacagcaaaggttgggatttttatgcagccctcacgtggcct

SEQ ID NO: 694699 - DNA, 620 bp, Homo sapiens
tagattttatcatcatacattgtgtacatctactgaaatattactctgcactccacaaacatgtatgattgtgtgttaattaaagataataataaagcaaaaagacaaaaacaaaacaaaaaatgtatagcacaattatgtacgatacataatacttgatgatgataaatgaccctttcyggtatatgtatttactatactctactttttattgctattttagaatatagtccttctacttcttaaagaaaaagttaactgtaaaacagcctcaagcgactgcttcaggaggtatccagaagaaggcattgttatcataggagatgacagctccatgcatgttaatgctcctgaagacctttcagtgggacaagatgtggaggtggaagacagtgatattgatgatcctcaccacgtgcaagctaggctaatgtgtgtgtttgtgttttagttcttttaaaagattaacaagtaaaaaaacaacacaaaacaaaaaaacttcaatagaaaaaagctacagaataagaatataaaggaaggatttctgtacagctgtacaatgtttttaaacaaacttagcttaagctaagtgttatttcaaaagtgtcagaaagcttaaa

SEQ ID NO: 694700 - DNA, 590 bp, Homo sapiens
tgagccacygtgcctggctgatctgatggctttataaaggagagttcccctgcaaatgctctctctttgcctgccaccatgtaagacgtgcttttgctccttgttcactttctaccatgattgtgaggcctccccagctatgcaaaactgtgagtcaattaaacctctttcctttataaattacccaatctctggtatgactttattagctacttgagaacagactaatgcatcccactattggcttagtaattcaaagagatggcatgatttcccaaggaaagccatgaggtcatcactgtgctaagaagccctgtgtaatgggggagccagatgcaggaggcactaataggattagcagatgtatggagggaaggcagcctgtcccagctgagaatagtacctgttagcaaacctacaggtcttcaacagcttcttgatatggaagagctgctcctgaatttcctaatgggagaaaccaaacacggggaaaagttaaatgtaataaatgacacgggaaaagtgcaagtcaaatttaaatgttatttctaagcttgaaatgctgcacttgtataaaacaaaccttgaaa

SEQ ID NO: 694701 - DNA, 650 bp, Homo sapiens
ggggttggggctgcggctcaccttcactctgtccagctccttggctttcgcatacaggctttggccgatgctcagcaaattgaaaatgggctggtgccatatgctgtcgagcagctgtttggagaaattgctgacgtagtacttcttgaagtcccacatcatcaggattcgggcagggatgcacgactctgcatatgagtggcagcagtcacagaaatacttccctaggtattcgcagtaccggagccgcttcacaaactctgccaagcataccggagggtgagtgccacacctggtgctgaaaacctatcctggtataccccgacttccaattcctacgcaagattcaaagactctgatgacttgtttcrtgatgataaagccatactcaacctcatgacagctgggaaggctccagcagagacttggggaattaaatcatggccattcatgagctctgctcttgtggaacagacgtcagaaaaacaaaaccttcccaaaatactcctggatttggaagatggaaattgcaaactgcagtgtagcaaaaggaacattcattttaggatctggaaatctgggtgggagtccagactcctctcactagcaggaagactgaaggcaggttaggctaactattctgagaccac

SEQ ID NO: 694702 - DNA, 970 bp, Homo sapiens
tcattcttgagtttccccatgggtccctggtattgcccacgtgggaacaacaggaagggtggaggtgagggcacagcactgtactacagctgcagggctgatcaagggaatctcatgaggtgctttttatcatttaatgtgccaacaacaggaggacaaccatgtgcttctagaacagggtgaaggccctcctcacgggagtgatccctaatctggccccagcaccgtgaaaggtgaatagctgtcaatatctactttcacctaaacctaagcttttaaaattctgaccaagtggtgaaaggtgccatctaaagtgctctctgttgctcgctgaggagctaagaactcctgcggctcaytcaggacacaggtgtcaggaaactaaaggagcagggctcctttgcagcccaggccctgtgccgcagctctgcccagctcagcggtgtagctcccagagtcatggactgctcgcatctgttctggccggctggtgcccacactggagagactggcaagtatcttgagtgtcatccccaatggccccaggaaggaaaatggactctgttcttcactttcattactgttgagctgctgaattctcttgcaaaaaccatcaacaggcatttactaagcaaatgcccacagggaacccagcctgaaaagggcccttccaatttcatatttgacaggcatgtgcagaggtaatgaaattattcagcagagcatcagattcactcagaggctaccaagccaagaaactgaaagcagaaacactggattctccctgtttgttgaacctttccctctaaaaccaacttattcagaaacacatcctttaaaaaaacaaaaggaaaaaccaaagcggtgaaacaatatcacttactggttggaagacatcactctgacatagtcattagtcttgcagagacctaacaccaggcagcttcacaaacacacagcaagtctgcag

SEQ ID NO: 694703 - DNA, 1369 bp, Homo sapiens
cattctagtaattttctttgtcttaaatctattttgtctgctattaataatgctccaccgacttttaaaaattcacattttcttggtttatcttttcctctcctttcactttcaacattccgcatccttatgttttagatatgtctcttgttaacaacaaatacttttgttctttccattctgacagcttttgtattttagttggaaaaacttaagtttaatatgacttcttatatctgttgtttagagctagcaggttaagttgtactttttctttgtctgttctttcattcttttcccttcttgccttcatttggattgatttttttaatcattctaatttttcctttaagttattttttatatttttaaaaatcactactctaagaattgtaatayggaaacaatgtatcaaagtctaaagttaaccaataatttttcccagaggtaataaaaaatgatttttaggctgggcgcagtggttcacacctgtaatcccagcactttaggaggccaaggcgggtggatcacttgagatcaggagttcgagaccagcctggccaatgtggtgaaaccctgtctctaaaaaaatacaaaaattagccaagtatggtggcaagtgcttataatctcagctactctggaggcagaggcaggataatcagttgaacctgagaggcagaggttgcaatgagctgaatttgtaccactgtactccagcctgggtgacagaatgagactctgtctcaaaaaaaaaaaaaaagatttttaacagccagtgtggcacacacatagatcaatcagaagcacaccggccaggtcatgcagggggatgcagggatgctcaccaccaggacacagccccgtgctcacatgcctctgggacggcacatgggctataccccatttgcctctgtgttagtcagctcaggctgccatcacataataccacagactgggcaacttaacaacccagataaatcttctcacagttctgaaggctagaagtttgagatcgaggtgccagatgattctgcgtctggtgagggctctcttcctggcttgcagatggcagccttctcactgtgacttcacatggagggcgagagagggagagacagagagagagagagagctccctggaggcccttcttctaaggcactaatcccatcctcctgacctgatccaccctcctgacctgatgtaaactactcacctcccaaaagctctgtctccaaataccaaatacttcaacatatgaatttatgggggttgggagggagttcagcccatagcaatctttttttgtctgacttacatgtttttttctcattatcctaacctcataagatagaattgtttcatgca

SEQ ID NO: 694704 - DNA, 607 bp, Homo sapiens
gtatttgacaccaggtttatttcttagtgaatttattcattcagcagagttttggaaatatttactagtgatctactaatgcaccagatgttgtactgagccctggttataaacaggaacagagtacagtttctgctttgggggttcatgagtcatggggtaagagatgtgaaagcaaagttattttataccttagacttcaatataagcctcccaaatatttgttcatggactatcaggtaaacatgactacttcctgtcctttcttttcttcctgactccttagcttgggtccctagtcttttgctcctccctctctctcccctgcccscttcaaggcaagaatttagttttacttgtttaaaaaatagtgtggactggggaagcaactataaaagtggagtctatattcctgtaaatttcggtcatctgctgaactggctgtcattcagggagaagcattgtggatataaagacatgaccattgtcagataaagaatgagtgaaggtcatggtttaaaatgcttatgatcgttccatttttaaatacctctttttaaaatcattttttacataactgaggctagtttctatttttaaaagctgc

SEQ ID NO: 694705 - DNA, 607 bp, Homo sapiens
gtatttgacaccaggtttatttcttagtgaatttattcattcagcagagttttggaaatatttactagtgatctactaatgcaccagatgttgtactgagccctggttataaacaggaacagagtacagtttctgctttgggggttcatgagtcatggggtaagagatgtgaaagcaaagttattttataccttagacttcaatataagcctcccaaatatttgttcatggactatcaggtaaacatgactacttcctgtcctttcttttcttcctgactccttagcttgggtccctagtcttttgctcctccctctctctcccctgcccccttcaaggcaagaatttagttttacttgtttaaaaaatagtgtggactggggaagcaactataaaagtggagtctatattcctgtaaatttcggtcatctgctgaactggctgtcattcagggagaarcattgtggatataaagacatgaccattgtcagataaagaatgagtgaaggtcatggtttaaaatgcttatgatcgttccatttttaaatacctctttttaaaatcattttttacataactgaggctagtttctatttttaaaagctgc

SEQ ID NO: 694706 - DNA, 542 bp, Homo sapiens
tgatcagactcaggttggattttggtggaggggaagactatttaagtggtcttgtgcacttctagcatgagatatataatgtctggttttctttctttctataatattagcagccattgatgaatgttgcctagatccagtaattcattaggcattgcaaaattgttatattstaattctgtcattccttctttgcagaaacttcctcatcattttctctattaaatatagcattaaaagttgattctggcacagatctgagcaaagatagtgtgacgttttcatactgtgaatgtgaaatagttggtcaataagtacttggattcaaaaatgcatcctttctcattttatgttaaggagaaaaaaagaaaaaaaaatgcaccctgagcggtgtaagagtaccccagacaaatcagcgctcaattctctacaatactgattcccatgctcacaatcctctttatcaacttccaccccaaagccattgtcttttgagacggagtctcactctgtcgcccaggctggagtgcagtggcgcggtc

SEQ ID NO: 694707 - DNA, 542 bp, Homo sapiens
tgatcagactcaggttggattttggtggaggggaagactatttaagtggtcttgtgcacttctagcatgagatatataatgtctggttttctttctttctataatattagcagccattgatgaatgttgcctagatccagtaattcattaggcattgcaaaattgttatattctaattctgtcattccttctttgcagaaacttcctcatcattttctctattaaatatagcattaaaagttgattctggcacagatctgagcaaagrtagtgtgacgttttcatactgtgaatgtgaaatagttggtcaataagtacttggattcaaaaatgcatcctttctcattttatgttaaggagaaaaaaagaaaaaaaaatgcaccctgagcggtgtaagagtaccccagacaaatcagcgctcaattctctacaatactgattcccatgctcacaatcctctttatcaacttccaccccaaagccattgtcttttgagacggagtctcactctgtcgcccaggctggagtgcagtggcgcggtc

SEQ ID NO: 694708 - DNA, 542 bp, Homo sapiens
tgatcagactcaggttggattttggtggaggggaagactatttaagtggtcttgtgcacttctagcatgagatatataatgtctggttttctttctttctataatattagcagccattgatgaatgttgcctagatccagtaattcattaggcattgcaaaattgttatattctaattctgtcattccttctttgcagaaacttcctcatcattttctctattaaatatagcattaaaagttgattctggcacagatctgagcaaagatagtgtgacgttttcatactgtgaatgtgaaatagttggtcaataagtacttggattcaaaaatgcatcctttctcattttatgttaaggagaaaaaaagaaaaaaaaatgcaccctgagcrgtgtaagagtaccccagacaaatcagcgctcaattctctacaatactgattcccatgctcacaatcctctttatcaacttccaccccaaagccattgtcttttgagacggagtctcactctgtcgcccaggctggagtgcagtggcgcggtc

SEQ ID NO: 694709 - DNA, 542 bp, Homo sapiens
tgatcagactcaggttggattttggtggaggggaagactatttaagtggtcttgtgcacttctagcatgagatatataatgtctggttttctttctttctataatattagcagccattgatgaatgttgcctagatccagtaattcattaggcattgcaaaattgttatattctaattctgtcattccttctttgcagaaacttcctcatcattttctctattaaatatagcattaaaagttgattctggcacagatctgagcaaagatagtgtgacgttttcatactgtgaatgtgaaatagttggtcaataagtacttggattcaaaaatgcatcctttctcattttatgttaaggagaaaaaaagaaaaaaaaatgcaccctgagcggtgtaagagtaccccagacaaatcagcgctcaatyctctacaatactgattcccatgctcacaatcctctttatcaacttccaccccaaagccattgtcttttgagacggagtctcactctgtcgcccaggctggagtgcagtggcgcggtc

SEQ ID NO: 694710 - DNA, 1401 bp, Homo sapiens
gatgaggtttaaaatgttaaagagtcttagatactatggtaagaaatttggacagtgtgctataactattaaggagatatggaaaaattttaagctgggtggaatctaaagggatttgtwttttagatagatcattctggccatagtataaagattagaagctgggagataagcttgaagcagatataataatccaggttcaaaatgtctgaatgactaaacaaggtggttctagtcagaagggagatgagagtctcttttgaggatagctggaggtagagccaataggacttaatgaacttacttcagacttctttggttgtggaatgggagattcttctggttggtggtggctcttgtggcccagctgtgaatatcccagattggctccctgctgtcctgtgcattgcaaggaaagtttacactgatgagaggagagggacagggaagtttttgtagtccccgtgtccattataatttaatcccatttggcagtttacataagagactcgaagcagaaaatacataaaattgtaagaacggtaccaaggtataaattatcaaaatagcaaactaatttaagtcatgaattattttatttacaattacccaacattatcactaaggtgaggctcaaaattttttttgtttttttttttttaaactgtgaacaacatgggtttgaaattatttttaaatatttacttatttatttatttatttttagagacaggatctcactatgttgcccaggctgatctcaaactcctaggctcaagtgatcctcctacctcagcctcccaaagtgctgggattataggcatgagccaccatacctggccaagctcaaaaaaaaaaaattttttttttttttttgagagacggagttttgctctcgttgcccaggctagagtgcaatggtgcaatctcagctcaccgcaacctccgcctcctgggttcaaatgatgctcctgcctcagcctcccaagtagctggtattccaggcatgtgccaccattcccggccaattttgtatttttaggagagacgggtttctccatgttggtcaggttggtcttgaactcctgacctcaggtgatccgcccacctcggcctcccaaagtgctgggattacaggcgtaatccactgcgccagcccaggctcaaaattttaaagaatcataagatactattcttattccagatagtttagtctttaaacctgaagaaacacacacacacacgcacacacacaccacacccccacatatgcgcacgcacacacacagttaccctactacctaaaggatctgtttacagacagtgtcgtggaggaaaggcatagcaacgtggtagtgctattgaatgtaatatggaaaggcagttttcagatgtaggtaa

SEQ ID NO: 694711 - DNA, 1401 bp, Homo sapiens
gatgaggtttaaaatgttaaagagtcttagatactatggtaagaaatttggacagtgtgctataactattaaggagatatggaaaaattttaagctgggtggaatctaaagggatttgtattttagatagatcattctggccatagtataaagattagaagctgggagataagcttgaagcagatataataatccaggttcaaaatgtctgaatgactaaacaaggtggttctagtcagaagggagatgagagtctcttttgaggatagctggaggtagagccaataggacttaatgaacttacttcagacttctttggttgtggaatgggagattcttctggttggtggtggctcttgtggcccagctgtgaatatcccagattggctccctgctgtcctgtgcattgcaaggaaagtttacactgatgagaggagagggacagggaagtttttgtagtccccgtgtccattataatttaatcccatttggcagtttacataagagactcgaagcagaaaatacataaaattgtaagaacggtaccaaggtataaattatcaaaatagcaaactaatttaagtcatgaattattttatttacaattacccaacattatcactaaggtgaggctcaaaattttttttgtttttttttttttaaactgtgaacaacatgggtttgaaattatttttaaatatttacttatttatttatttatttttagagacaggatctcactatgttgcccaggctgatctcaaactcctaggctcaagtgatcctcctacctcagcctcccaaagtgctgggattataggcatgagccaccatacctggccaagctcaaaaaaaaaaaawtttttttttttttttgagagacggagttttgctctcgttgcccaggctagagtgcaatggtgcaatctcagctcaccgcaacctccgcctcctgggttcaaatgatgctcctgcctcagcctcccaagtagctggtattccaggcatgtgccaccattcccggccaattttgtatttttaggagagacgggtttctccatgttggtcaggttggtcttgaactcctgacctcaggtgatccgcccacctcggcctcccaaagtgctgggattacaggcgtaatccactgcgccagcccaggctcaaaattttaaagaatcataagatactattcttattccagatagtttagtctttaaacctgaagaaacacacacacacacgcacacacacaccacacccccacatatgcgcacgcacacacacagttaccctactacctaaaggatctgtttacagacagtgtcgtggaggaaaggcatagcaacgtggtagtgctattgaatgtaatatggaaaggcagttttcagatgtaggtaa

SEQ ID NO: 694712 - DNA, 627 bp, Homo sapiens
gcactccagcttggcaacagagcaagactccgtctcaaaaaaataaaaaataaaatactatataaaattaaaaccttgtagttttgtgtttcaaatcttataattagagtggcaaataagccacaaccaatcctaggctattgtatccgagttttctagcagccaaagcaaaaaaaaggaaatagcgtaagtgtgtagttctaactatctgatgtaaaaagaaagaatatcagtgttgccaagcagattttccttcctactaagtaaaagtaccacacagatctttctacaacatcattggaaagcggaaaagtcttagctctaggggtcaagaaacccactgtttagctctaactgcccctgtttagctgtgtgagcttcgagcagtaattagtctaatcttyctgagccttagttttctcatcttctaaatgtctttaagatatgaatttgagtcatattggtatacctctctacttttccagtgttaatttcacagagtattcaaagagtaaggaaaattttcaggaacaaaatcaaaagcgggtaaaatattatctgtctcaggtgggaagatttttcttttcctccagaattcaaatacctggacatcttatgatgagaaaa

SEQ ID NO: 694713 - DNA, 627 bp, Homo sapiens
gcactccagcttggcaacagagcaagactccgtctcaaaaaaataaaaaataaaatactatataaaattaaaaccttgtagttttgtgtttcaaatcttataattagagtggcaaataagccacaaccaatcctaggctattgtatccgagttttctagcagccaaagcaaaaaaaaggaaatagcgtaagtgtgtagttctaactatctgatgtaaaaagaaagaatatcagtgttgccaagcagattttccttcctactaagtaaaagtaccacacagatctttctacaacatcattggaaagcggaaaagtcttagctctaggggtcaagaaacccactgtttagctctaactgcccctgtttagctgtgtgagcttcgagcagtaattagtctaatctttctgagccttagttttctcatctyctaaatgtctttaagatatgaatttgagtcatattggtatacctctctacttttccagtgttaatttcacagagtattcaaagagtaaggaaaattttcaggaacaaaatcaaaagcgggtaaaatattatctgtctcaggtgggaagatttttcttttcctccagaattcaaatacctggacatcttatgatgagaaaa

SEQ ID NO: 694714 - DNA, 1105 bp, Homo sapiens
taaattaagataatatgtcttaattatttagcatgataccaagcaaatagtaagggctctgtaaatgggtgcaaatttgcattgccgtgattactgtcttgttcttgaatgggtcataacttaaatactgtgcagtttagtacacagaagataggtcttctaataaagagcagaaaaaaatgagctgcctgagagtaagccataccttataagccatagtttttggtttgtattattctgcccatgtttatttcttggtttgttttctcgcctttagtaaagttgtataagcacagtaggtaagactgcaggctctgtagagcakatttgtaatcttaatcccctggaattacctggatagtccagctctatcctctgacttcccatcctttcatgtctaatcagcactgctagtgacaatagctaacatgtattgactgcttcctaagtactgagcaccattctaaagattttatagctgttaactgatttaaacctcgcagccctaggtaataggccccattattacctccatttgccctgatgaggaaactgaggcacagagaggttaaataacttgcccaaagatgacaccgttggtaaacggtgaagctgggattcagtcaggcaggctggtcacacaattttcactcttaaccacttcatcctaattccatttgggatgataagattgcattaagttatcacagcttttctgtggtgcagatagtaaagtgggaccagtatccttcccccagcaattcatgagtgctgatgatttgtgttgggaatcaagatgttgcatcccacctccagtcaccagggggtgccactcaggtaggtttatgaaaacattgaaaaccagagtgatggtattctcttgattaactataaatggcagtcattaagatgcaaggttttgagagtcaggttctttggtgcttatacccaaagaagaaagagccgtttttgtattaagtcatctaaaaagttctcatatgcttagcaagaaagctaaattaagctctgcactgggtaaaattataaacatgctctctgctccagatgagtaagtgtatataaatagaacagttggtacacatgg

SEQ ID NO: 694715 - DNA, 1105 bp, Homo sapiens
taaattaagataatatgtcttaattatttagcatgataccaagcaaatagtaagggctctgtaaatgggtgcaaatttgcattgccgtgattactgtcttgttcttgaatgggtcataacttaaatactgtgcagtttagtacacagaagataggtcttctaataaagagcagaaaaaaatgagctgcctgagagtaagccataccttataagccatagtttttggtttgtattattctgcccatgtttatttcttggtttgttttctcgcctttagtaaagttgtataagcacagtaggtaagactgcaggctctgtagagcatatttgtaatcttaatcccctggaattacctggatagtccagctctatcctctgacttcccatcctttcatgtctaatcagcactgctagtgacaatagctaacatgtattgactgcttcctaagtactgagcaccattctaaagattttatagctgttaactgatttaaacctcgcagccctaggtaataggccccattattacctccatttgccctgatgaggaaactgaggcacagagaggttaaataacttgcccaaagatgacaccgttggtaaacggtgaagctgggattcagtcaggcaggctggtcacacaattttcactcttaaccacttcatcctaattccatttgggatgataagattgcattaagttatcacagcttttctgtggtgcagatagtaaagtgggaccagtatccttcccccagcaattcatgagtgctgatgatttgtgttgggaatcaagatgttgcatcccacctccagtcaccagggggtgccactcagrtaggtttatgaaaacattgaaaaccagagtgatggtattctcttgattaactataaatggcagtcattaagatgcaaggttttgagagtcaggttctttggtgcttatacccaaagaagaaagagccgtttttgtattaagtcatctaaaaagttctcatatgcttagcaagaaagctaaattaagctctgcactgggtaaaattataaacatgctctctgctccagatgagtaagtgtatataaatagaacagttggtacacatgg

SEQ ID NO: 694716 - DNA, 651 bp, Homo sapiens
tctgtagctgattagctcaggcagcacctgagactaggccaagttttggcaaatgagacataagggggagttttctggaaaggcattccttgatctccaagagaaacgcactgtttcttcctgcctttaacttgtgtctgcatggacacttgaaactgtgaccagcatggggggtaaagcctgctgtgaaggagagcagaggcaagaagactgagggcagtggagccagagctctgatcaccctgctctggaacctttctgcctttgatgtcctgtttggggagataagaaatttatatagtgtttaaatttgttgagtcagcgttttctgtacctgcagtcaaaaacatgctgagtgattcaagaagttggtcagaacttyaaaaaattattattctacattttcccccaagtttttctgaggaaagagagtgcttggtaggcaggataaccctggaaagtggccatggggctgaggcgggttttggagaaatgcagacactgttgtctgatgtgagtttcacctgatgagggatcaggatcttctttcatataatttgggaaagcagatgttggtccctttagatctgttaactgacatttagcattcaaaactgtctcgtgattcacagaagtgttgtaagatattat

SEQ ID NO: 694717 - DNA, 1178 bp, Homo sapiens
ccagtcttttaatattaaaattaaatttattagatcctttccaccatggggatggcaaaaattcatccttgctggaataaaaacctcttatagtaatggatttgcactccctgccagaaaagcctccaccatcaccaccaattaagggctggcagaaagtgttacctattgacatggcatgtctaacaacattgtttttgcccaagtagctcatttaatggcaaaggtggttcaccaatgggggcatgataatagaatccactgggattactaaatacctcatcacctggaagctgatgatctatggtaaaatagcctgtggaagactcatctgaagttccaggttgggacaggataagatacatgtatgtattatatcagtggctgatatatggtgctgtgtcctttaagctagaatacatggattcaagaaccaagggttggaagtacaatttgtctctttcaccattactcccaggtgacttatttgtaaggtttgaaatcttaggctttgctggattagaggtcctggttcccaggaggcagagcacttctgccaggtaagagtgccacagaaatggactatctcttgctgactatctctttgggctcttcattccagtgattggactcctcattcctggatcagcaggcgaaagaaaattaatatagttgaaagtctagtctatccttacatatgtaaagagccattgtaactggaggcagagaggactatccagtgacttgactgatgcatctgctggtgttttcatgccaggtrataatggtgagtgggtggttatggcatctatgatgtgataaaggaaaagcaagccttgagaaaaaggtctgggttactctgccaggcaagaaaccttaaatcagatgagatgatggccaagggcaagagaaatctagcattggtaatggaagacagagatgatgcctttcaataaagtctggggaccagctgtagcaggggttgtagctagttccagaaaccctcctgcagagattgtggctggccagctccttaaaggggactctgagatagattgaacttaaggaagtgaaaagatagattttggagtagtgcaaaggatctactgcatcaagataacactgtgagcatccacttcaaaatcttcttgggtgccaatatcttactgcagtccttg

SEQ ID NO: 694718 - DNA, 597 bp, Homo sapiens
aaattccttgtgagcaagcctttttggaagaaactcaggcctagagaacaatcttattaactaagttgaaacaataaaataatataaagaattgaggttttaatatgcaagtctgctttcttactcataactaccgagacttaggaagagtaatgattttgtaaattaaaatatttgtttcaacttatctaaactctattatttattcaatttacatttgagagcaggtagtcatagtaagctgctatatcactaaaatgttcattctactatgtaaattgcacacattatcagagacttacaagctgtgaataagagggcttttaaaaaaacactttggagtagtatgaaattgtccaacattacttccatattgttgaataattgatgctattatgttctcaaggtaaataaatatgaaaaggagaaagttcttcaataataaggtaaatggaatttgtggcattatttctgatagtatttgtaatgtcagtttacaytttcaccatcagaggtcatgaaaggacagtttagagcagaaaatgtgagctttgttgaaaataaatttaagtttgaaatttaaactgaaacttattc

SEQ ID NO: 694719 - DNA, 611 bp, Homo sapiens
taacaaattctcagggacgggaaataatattcatgagttttctcctctaattctttcttttattaccttttagttgcacatattaacacatttattactgtcactgagttaatgcttgcattttgagaacactcaagtattacttgcattttatatttgaataaaacaagatactacaaaatcaaatgataccatgtaaatagaactaattcagtggcataaattactttgtttttctttttttgagatctcctcttgctctgtcrccaggctggagagcagtggcacgatctccgctccctgggttcaagcgattcccctgctcagccttccaagtagctgggactacgggtgtgcaccaccatccctgagtaattttttgtattttagtagagacggggtttcaccatgttggccaggatggtctcgatctcctgacctcgtgatccaccaacctcggcctcccaaagtgctgggattacagcgtgagccaccacgccaggcccaattactttgtttttctagctgacttatcttggctgtgtgtagttcacctttcatcctaatactgcattttcatatgtccaaagatagtggtttttgaaaaagca

SEQ ID NO: 694720 - DNA, 759 bp, Homo sapiens
gggtaataaaaatcattagccactttaagaaatggattaaggtagaaatccaaacctttgaatataaaatggaatggaatttktatccgttcctggaattaggacattttaggcttactatgctaatgagataaggacaaaaatggtgccaaaatggaaacaatgattaagtccaaaaaagtctttcatacctgaaaatataaaaacaagcatattaagcatgagtattggacatgtcaattgtgcacagggagtactgagagaaaggaagaaacaactttaaaaacaaaagacagcagaaaagcattaaatgaaaatataaagtattaaaatctactcatgatattcctacatattactatgcaaattatgcattcacatagtgacatgaatgaaaatgaagataatggcttgattaaaagactcaagcaatttttgtcttggatttctgttatttttttaatatgcttgccataaagaaagagaacgcacaaacacacatacacacactctcatacatatataacacagatatagatatgttatatctataacatatatcatatctctatatagaacatacatatctctttaatataatattaaatatattaaatatttacatttataaatatttatatttataaaataattttatttacaggtgatttacatagtaaccataccataaggagaatttaatacatgtagtatatatacagtatatatatacacatacatatacaaatgtatatgtgc

SEQ ID NO: 694721 - DNA, 1223 bp, Homo sapiens
actcaatagctacgaattgtacccaaagctgcaaaaaacaataagcaaattctattatgttgtttctttacttcttggattacttttctgagctaataaaagcacataaggatatttcacaagtgtgtttatgtttctatttaacaaaccttgaatttcatagcaggtatcaagcctcagccaaacccatgcagactgacagatcaacaaagacaacaggccctgaacaagtagctctcctgagaacagatgtgtaaacagaaacacaatgtatgaattascccagtgctctttcccaggtagactgagagaatctggacactacctgtggctgagccctggagccaccagaatttaatcagatacgtgattaagaaaagtctattttaatgctgaataagatttctatctttcagtttactacttaatacatattcaaaccaacatgttttctgcgaccatcaacatgtcttgacctcttttagggtatgaagtgctcaaaggcaagaactgtgtccaaatggcaccacgtctttccaccctgcacccaccccagggctaagtcttgtcctatcctcaaaacaacagcaatcaagtcaaaatcagaaattgcatagcagttgccagtcacaaccaaacaaccatttcttacctgtacctgctacagaaattactcatattttcagggctccctcatttcaagaatgattcacattttttttgtgactcagacacaccaccccattactgctctagctcataaggagtgtggagtgacagctttaagggatgtgttaagtacccccaagactaccttggagggagggcaggcagagagagggatgagggttcaccaggcccattcacagacggttgagggttctttctggtggcaatgtgcaatttgtcaaaacatgaatattgctgccatgttcaacgtctacttatcagcccatagattaatctatttattcttttaaaagtagcattttccccccgtattagctttgtttcttcttcacacaccacataagaagcttcagaaaggtcacctttcctgagtgataaatatgggcaaaaaagaaaactcctcaatttattttatttatttattttgagacagagtcttgctctgtcactcaggctggagtgcagtggtgcaatcataactcactgcaactttgaactcctaggctcaagcgatcctcccacctcagcctcct

SEQ ID NO: 694722 - DNA, 1223 bp, Homo sapiens
actcaatagctacgaattgtacccaaagctgcaaaaaacaataagcaaattctattatgttgtttctttacttcttggattacttttctgagctaataaaagcacataaggatatttcacaagtgtgtttatgtttctatttaacaaaccttgaatttcatagcaggtatcaagcctcagccaaacccatgcagactgacagatcaacaaagacaacaggccctgaacaagtagctctcctgagaacagatgtgtaaacagaaacacaatgtatgaattagcccagtgctctttcccaggtagactgagagaatctggacactacctgtggctgagccctggagccaccagaatttaatcagatacgtgattaagaaaagtctattttaatgctgaataagatttctatctttcagtttactacttaatacatattcaaaccaacatgttttctgcgaccatcaacatgtcttgacctcttttagggtatgaagtgctcaaaggcaagaactgtgtccaaatggcaccacgtctttccaccctgcacccaccccagggctaagtcttgtcctatcctcaaaacaacagcaatcaagtcaaaatcagaaattgcatagcagttgccagtcacaaccaaacaaccatttcttacctgtacctgctacagaaattactcatattttcagggctccctcatttcaagaatgattcacattttttttgtgactcagacacaccaccccattactgctctagctcataaggagtgtggagtgacagctttaagggatgtgttaagtacccccaagactaccttggagggagggcaggcagagagagggatgagggttcaccaggcccattcacagacggttgagggttctttctggtggcaatgtgcaatttgtcaaaacatgaatattgctgccatgttcaacgtctacttatcagcccatagattaatctatttattcttttaaaagtagcattttccccccgtattagctttgtttyttcttcacacaccacataagaagcttcagaaaggtcacctttcctgagtgataaatatgggcaaaaaagaaaactcctcaatttattttatttatttattttgagacagagtcttgctctgtcactcaggctggagtgcagtggtgcaatcataactcactgcaactttgaactcctaggctcaagcgatcctcccacctcagcctcct

SEQ ID NO: 694723 - DNA, 646 bp, Homo sapiens
ctggagaagcctttggacacacagtagaaccaaagatacagataacctggatccctgagtcatcaactgggagctaccctgagacgcctttggacacatagcagagtttgcctgagctcctgtgtgctaattcagtgagatttcagttttgcaggatagcataacctattgtgactaatataaccagagactaatatttttatataaaaaataaaagaatgtagcaaacaaggaaaatgagttatggttccyataaatagttatttaaaatctgtgattactatggcatattttagaacattcaaaccaaaactaaatcatatgaaaggaaaagtgtttaaggagtttgggctaacagatatctatcactaggctcttaacatcacttctctttagaaaggaaacattctgatacgtgattctttctagacaaggacagttggtgaaccacgcacctgaagtagcccaataggcgccttttaaatatttatcaaaaaaaactttgatatttttcttcaaaacattccttacactacctcctcctgtcctttaccaaataagtctgcctttgtatacagagaaatgtcctggttttagtctgaagagattatgaaaacagtgctgtattgttctcctgaaacttttg

SEQ ID NO: 694724 - DNA, 897 bp, Homo sapiens
gacgtttgtagacaattgtgtagtttgtattttataccaaagcatagcaacattgccgccttgtttccatcgtatcacaactgactttggacatgtttcccttactgtatgggccacattcatattttgttcactgagtaaacttagaatatatttaacagatatttgaatgcctgtgatataatggtgggcaaggaggtgctggccccatactctggggcagggggcacagggamgtaaactgacagttgcaatacgttgtacaggtgctctaggggaggggcacctaccctagctggggtggaggtagaggaaagtagcctggagaaagtgacactttagcctagacccacaggaagggtagaagtagagtatggaaacaaatattcctttcaggcagtgggactaacatgggtgaaggccgggatgtgagtgagagcactactcatttgaggaacaggtttgttgggtctgttgatagattgtgaagggggatcacaatctagagataagggggtctgttggtagattgtgaagggtgatcacaatctagagataaggctggggaattgagaggaattggtgatccagggccctcatagcattgtaatgctgaggactttggacttttatcctgagtgcagtgaggagctactcaagaactttgatcagggagtgatgtatatctttaatgtgaaagactattggtggttcttgagaatggcttgggtgtgtgggtatgactctgtgtgtctgtatgaatgtgatatacgtgtttccgtggaacgttgccaagtccagatttgccctgtggtggcgtgaaccagtgtaatgcctggggagaatagagcgaagtacatagaagtgaaagccattcaggaggtatcttttgccttt

SEQ ID NO: 694725 - DNA, 653 bp, Homo sapiens
ttgtccctatacttctcaaataagtctctaaatttgtcacaggtggtgaggtatatgtctaacatgattaggaccctagtacttgaacttggatgttgaaccgagtccccaagtcccagctgacagttatccttaggcattcttcctgccccatgaccttttattaacaaataatgattcaggtcaatagacaatsaggcactggaataaaataatgaaaagagagatacacagctcttgctctgatggagcatagtcttctaagaattattatagggaatgctgccaactcatcagcatttcctcaaataaatgtgtcttcctttttgaaaaataggtatatctacttagaatatctatgagcattaccatgtggcctgtcttctgtactgtttgtcacttataaaaatagcattaaaataggacttttatctacaatctactttcaaatggtatatccaagaaaaagaaaaaggtggcaaatcagccaccttttgggttatcaagttgaaaaatatatgaatgtttattgtgttcatcttgtctgtaggcttcaattttaagaaagaaggtcagggagaaaaacatcaagaaagaattatctcaccaagtgtaattatttaataccatcttaattaaaaataaattcctca

SEQ ID NO: 694726 - DNA, 1011 bp, Homo sapiens
cttcaaataatctctagattatttacaatacctaatacaatgtggatgctatgtgcatagttgttatattgtattttttttctccagacggagtcttgctctgtcacccagactgtagagcaatggtgcaatctcaggtcactgcaacctccgcctcctaggttcaagcgattctcctgcctcagcctcctgagtagctgggattacaggtgcataccaccacgcccagctaattttttgtatttttaggagagatggggtttcaccatgttagccaggctggtcttgaactcctgtcctcgtgatccgcccaccttggcctcccagcgtgctgggattacaggcgtgagcaactgtgcttggcctgtttttaattttttattttaattgttgtttckttaattttttttcagaatatttttgatccatgtttggttaaatccacgaatatggaactcatgattatggagggtcaactgcttatatttgatcatagggcacacaaatgacctcatccctttctacctttaaagatataagcccttaaggtctcacatccaggtaggttttctctctgtgtcagtctcgctgtgtcttcgtatctgtctctttctctcctttcttgtgctgggcaagacttttagttccctgagttttaattatcccatcgaactaatggctgaatattcagatgctggtaagagaattttttttcttgcctcgaggtctttccatttattatgcccactgcagaatactcttcttgctccatctctttctggtttagctcctagtcgtcgttcacagccccatttaaaattcccttcaatcaagaagtcttccctgagagttacattgagactgagattaaatccctctcttatacattcctctagcatctcttatttaagacattcactgttgtaaaaaagtttcaaacatattcaaatgtaaggagaacagtataatgaggacccactgaagcatactttctaactttccacagtctgg

SEQ ID NO: 694727 - DNA, 2171 bp, Homo sapiens
aaattatctgggcttggtggtgggcacctgtaatcccagctacttgggtggctgaggcaggagaatcgcttgaacctgggaggtggaggttgtagtgagctgagatcatgccactgcactccagcctgagcaacaagagtgagactctgtctcaaaaaaaaaaaaagaagaatttgaatgttccccaaacaaagatatgataaatgtttgaagtgatagatatctcaattagcctgatttgatcactacacattgcatgcatgtatcaaaatatcacatgtaccccataaatatgtattgttattatgcatgaattaaaaatgttttaaaaaaggaaaaatggttttattcaagaaataattagtttgtagaacagaaaggaaagctggtactttattgtatatgagggataaggagagtgagaagtcacagctgatgccgccttcctagttgttctaactatatgcagttgtgctctcctttgagattctaaacaataagaggaagaagagcaggaagataatgatgatgatgttcagtgtgaagtgtaggcacttgcatatgttattctaaaattsaaatgaaagatgtgggcaagaaataagaagttgataagcagataagcattgcctaggggaaaagtataaagtggaagtaaagcaagattagttctaatgtttgaggaactcttttattgaaagaccatatagaaaggaaaagccagcagacacagaatgaaaggtgatatttgtatttgtttgtttttgtttctttttttagacaaggtcttgctctgttgcccaggctgtagtgcagtggtgagatcatagctcactgcagcctcgaccttccaggctcaggtgatcctcccacctgagcctcccaaatagctgggaccacaggcatgcaccaccacacccacctaattttgtatctttagtagaagtggggtcttactatgttgcataggctggttttgaactcttggattcaagcaatccttctgtcctgacctcccaaagtgctgagattacaggtgtgagccattgtgcccagcctgaaagtgatatttgtaagaggaaaacctataggtgtggtgtgatctaaggtaagggagggtgttttgagaataagggagtgataaatgctattcctcagaatgaaatctcattgtaatggaagcaggtttgtttagtgttctctttgaaatgctaatgttatctgtctctgcttagactgatgatctagttactgcaggtgatagaaaataaaatacttgaggactggtgacttcacattgcaaagagtgcatggtgccaaatctattctagaataacatttatctcttgaatggtataatttaggatgtcttcgtttaattcactgctaatgttgtattagacgttaatgtgacttgtcagtgcattattgtactcacgttgaaaagaattctttctgacattaagtatgagcatctgaaagtctgaatgtgtttgaaatcatgcataaatacaagtattataccatcagttacttatataggaaattctcatccactctcccattcagcaaacatttcttaattgcctgatatatgccaaccattactaaatgctggggatgtaaaaaattatcttgaaacacagtttttgtaaaccaccacactcttggggaaaatatgtgtgtcctgtggaggaggaggtaagctaggtaagatagatcaggcctagattgcgaagtgatttagcacaaagcttaaaactacagtgtagagtaaacaaatcattgacgaggaaaagttctttttttatagaaaatttgtagctaataaatcaagattcagtaaaatataataattttgcttaaaataatgaattaatagatctaggccatagctggtaacataaatagagacaaaccattcttatgtacctcttgatgctagttacatgagatgacctaagaagttttctagcttaaaatgttaaatctgaaacagatcactactcttcactactctagatctaattattaaattataggaaatacatagagaataaatgaatatgttaatcataccatgggggtgcaatctgcaaaacccagataaacaacccattttcttcagtaacaactacaataataaaagaaaaaatgaaagaaagaaagga

SEQ ID NO: 694728 - DNA, 638 bp, Homo sapiens
tgaaagtgtaaaatgcacaccagaatttcaagatttcatacaaaaaatatggaagttaaccatttattatattgatttcatgttgaaataatattttggatatattggtttatataaagtacattattcaaattaatagcccaggcatggtgactcaagcctgtaatcccagcactttggaagaytgaggcaggaggattgcttgaggctaggatttcaaggctgcagtgagctatgatagcgccactgcacttgagcctaggtgacagaacaagaccctatctctaaaattaaattaaaaaaattaacctgtctcttcctacttttttaaggcagctactagaaaaaattaaattacatatcaagttttcatgtgtggctcactttatatttctgttggacagtgatttaaagagcttccttggaattcccatccgacaactactgcttactttttaccagcaagaatttagcccctggctaactaataatggcgactacagaatgtggccctctaagcctatggttactcgtaactgttcttaagggagcactggagaatggagacttggggagagcctcctttccctcaacccctgtaacaaccagtggattgattaggctttaatttgcttttg

SEQ ID NO: 694729 - DNA, 638 bp, Homo sapiens
tgaaagtgtaaaatgcacaccagaatttcaagatttcatacaaaaaatatggaagttaaccatttattatattgatttcatgttgaaataatattttggatatattggtttatataaagtacattattcaaattaatagcccaggcatggtgactcaagcctgtaatcccagcactttggaagattgaggcaggaggattgcttgaggctaggatttcaaggctgcagtgagctatgatagcrccactgcacttgagcctaggtgacagaacaagaccctatctctaaaattaaattaaaaaaattaacctgtctcttcctacttttttaaggcagctactagaaaaaattaaattacatatcaagttttcatgtgtggctcactttatatttctgttggacagtgatttaaagagcttccttggaattcccatccgacaactactgcttactttttaccagcaagaatttagcccctggctaactaataatggcgactacagaatgtggccctctaagcctatggttactcgtaactgttcttaagggagcactggagaatggagacttggggagagcctcctttccctcaacccctgtaacaaccagtggattgattaggctttaatttgcttttg

SEQ ID NO: 694730 - DNA, 638 bp, Homo sapiens
tgaaagtgtaaaatgcacaccagaatttcaagatttcatacaaaaaatatggaagttaaccatttattatattgatttcatgttgaaataatattttggatatattggtttatataaagtacattattcaaattaatagcccaggcatggtgactcaagcctgtaatcccagcactttggaagattgaggcaggaggattgcttgaggctaggatttcaaggctgcagtgagctatgatagcgccactgcacttgagcctaggtgacagaacaagaccctatctctaaaattaaattaaaaaaattaacctgtctcttcctacttttttaaggcagctactagaaaaaattaaattacatatcaagttttcatgtgtggctcactttatatttctgttggacagtgatttaaagagcttccttggaattcccatccgacaactwctgcttactttttaccagcaagaatttagcccctggctaactaataatggcgactacagaatgtggccctctaagcctatggttactcgtaactgttcttaagggagcactggagaatggagacttggggagagcctcctttccctcaacccctgtaacaaccagtggattgattaggctttaatttgcttttg

SEQ ID NO: 694731 - DNA, 638 bp, Homo sapiens
tgaaagtgtaaaatgcacaccagaatttcaagatttcatacaaaaaatatggaagttaaccatttattatattgatttcatgttgaaataatattttggatatattggtttatataaagtacattattcaaattaatagcccaggcatggtgactcaagcctgtaatcccagcactttggaagattgaggcaggaggattgcttgaggctaggatttcaaggctgcagtgagctatgatagcgccactgcacttgagcctaggtgacagaacaagaccctatctctaaaattaaattaaaaaaattaacctgtctcttcctacttttttaaggcagctactagaaaaaattaaattacatatcaagttttcatgtgtggctcactttatatttctgttggacagtgatttaaagagcttccttggaattcccatccgacaactactkcttactttttaccagcaagaatttagcccctggctaactaataatggcgactacagaatgtggccctctaagcctatggttactcgtaactgttcttaagggagcactggagaatggagacttggggagagcctcctttccctcaacccctgtaacaaccagtggattgattaggctttaatttgcttttg

SEQ ID NO: 694732 - DNA, 642 bp, Homo sapiens
tgaatttattttatgtattacctcctcctgggtaaataaaatgaaaaatwaaaaaaaaaaaaaaagaacctggtgtgcaaaggactctccaaagcagcaattcaccattgggcggaatttcagatattgatatggttaggctctgtgcccccacccaaatctcatcttgaattgtaatacttataatccgcacatgtcaagggagaaaccaggcggaggtaactgaataatgcgggtggtttcccccatgctgttctcatgatagtgagttctcacaagatctggtggttttataaggggcccttcctgcttcgctcggcacttctccttcctgccaccttgtgaagaaggtgccttgcttccccttcacctttcacaatgattgtacatttcctgaggccttcccagccatactgaactgtgagtcaataagccactttaaattacccagcctcgggtgtttccttatagcaatgtgagaatggactaatacaggcatcataatctaagatacgtagatgctcaggtgcaggggaaaatttctggacacctcaaatccatgttgtcagcatatatgttgcatttataattgaattggaactggtccattgagtactggttttaacacaactctatgcttga

SEQ ID NO: 694733 - DNA, 642 bp, Homo sapiens
tgaatttattttatgtattacctcctcctgggtaaataaaatgaaaaataaaaaaaaaaaaaaawgaacctggtgtgcaaaggactctccaaagcagcaattcaccattgggcggaatttcagatattgatatggttaggctctgtgcccccacccaaatctcatcttgaattgtaatacttataatccgcacatgtcaagggagaaaccaggcggaggtaactgaataatgcgggtggtttcccccatgctgttctcatgatagtgagttctcacaagatctggtggttttataaggggcccttcctgcttcgctcggcacttctccttcctgccaccttgtgaagaaggtgccttgcttccccttcacctttcacaatgattgtacatttcctgaggccttcccagccatactgaactgtgagtcaataagccactttaaattacccagcctcgggtgtttccttatagcaatgtgagaatggactaatacaggcatcataatctaagatacgtagatgctcaggtgcaggggaaaatttctggacacctcaaatccatgttgtcagcatatatgttgcatttataattgaattggaactggtccattgagtactggttttaacacaactctatgcttga

SEQ ID NO: 694734 - DNA, 642 bp, Homo sapiens
tgaatttattttatgtattacctcctcctgggtaaataaaatgaaaaataaaaaaaaaaaaaaaagaacctggtgtgcaaaggactctccaaagcagcaattcaccattgggcggaatttcagatattgatatggttaggctctgtgcccccacccaaatctcatcttgaattgtaatacttataatcckcacatgtcaagggagaaaccaggcggaggtaactgaataatgcgggtggtttcccccatgctgttctcatgatagtgagttctcacaagatctggtggttttataaggggcccttcctgcttcgctcggcacttctccttcctgccaccttgtgaagaaggtgccttgcttccccttcacctttcacaatgattgtacatttcctgaggccttcccagccatactgaactgtgagtcaataagccactttaaattacccagcctcgggtgtttccttatagcaatgtgagaatggactaatacaggcatcataatctaagatacgtagatgctcaggtgcaggggaaaatttctggacacctcaaatccatgttgtcagcatatatgttgcatttataattgaattggaactggtccattgagtactggttttaacacaactctatgcttga

SEQ ID NO: 694735 - DNA, 642 bp, Homo sapiens
tgaatttattttatgtattacctcctcctgggtaaataaaatgaaaaataaaaaaaaaaaaaaaagaacctggtgtgcaaaggactctccaaagcagcaattcaccattgggcggaatttcagatattgatatggttaggctctgtgcccccacccaaatctcatcttgaattgtaatacttataatccgcacatgtcaagggagaaaccaggcggaggtaactgaataatgcgggtggtttcccccatgctgttctcatgatagtgagttctcacaagatctggtggttttataaggggcccttcctgcttcgctcggcacttctccttcctgccaccttgtgaagaaggtgccttgcttccccttcacctttcacaatgattgtacatttcctgaggccttcccrgccatactgaactgtgagtcaataagccactttaaattacccagcctcgggtgtttccttatagcaatgtgagaatggactaatacaggcatcataatctaagatacgtagatgctcaggtgcaggggaaaatttctggacacctcaaatccatgttgtcagcatatatgttgcatttataattgaattggaactggtccattgagtactggttttaacacaactctatgcttga

SEQ ID NO: 694736 - DNA, 439 bp, Homo sapiens
aaggtcatccagaacatggaaagtatgagaaactgtttccagaagacatgaaactggtacaaggaaacagaacaactaaatgcaatggttaggatcctgggtcataaaaaggtcattaggtaaaaactagggaaatctaaataaagtatagtttttaatgaaaaataaatgtatcaatactgctygactgtgagaaagtaacatacaaattttctttactgtctttacaatttttacataaatctagaactattttaaaataaaattttcctaaaaaagaaagaaataaacaagaagcccttttgttggcaatgtaaacctcacagccgtgcttgggaatgacaaccttggagatataaatcactggaacacctcaatacagactggtgtaggctttcccttttggaagtctttaaagaaataagctatttgtctctag

SEQ ID NO: 694737 - DNA, 439 bp, Homo sapiens
aaggtcatccagaacatggaaagtatgagaaactgtttccagaagacatgaaactggtacaaggaaacagaacaactaaatgcaatggttaggatcctgggtcataaaaaggtcattaggtaaaaactagggaaatctaaataaagtatagtttttaatgaaaaataaatgtatcaatactgcttgactgtgagaaagtaacatacaaattttctttactgtctttacaatttttacataaatctagaactattttaaaataaaattttcctaaaaaagaaagaaataaacaagaagcccttttgttggcaatgtaaacctcacagccgtgcttgggaatgacaaccttggagatataaatcactggaacacctcaatacagactggtgtaggctttcccttttggaagtctttaaagaaataagctatttstctctag

SEQ ID NO: 694738 - DNA, 1496 bp, Homo sapiens
gtcaggcactattctaaacacttttcacatattaactaatcctttcaacaatcctctgctttagggactattattacacccattttgcaattgagaaaacagaggcatagaatagttacataagttgcctaatgtcacaaatctgatcaatggaactgatacatgacagaatgactctgtaacccaaactcataactactgttttgtggaaagggtactcagacaagactgatcacaagaaagagataagcaaaataaacgaaataatgtackaaaggaaaaaggactttgagctacagacatagtttctagaaatgaaagaatatcatgtgtcaataaataacctagacaaaactcacgcacttcttgagtaatataaaaggacaaaattggcacaaaggctagaatatgcaaataaccatcagaacttcaaagggaaatcaaagaccaccttcacttaaaatactttcattaagtgaagttattccagaaaatgaatgctgctcaacaattgctttctgaggctattataacctttatcccaaaacttagaactgtaaataaaactgtaagtccacttcactttgaacatgcatgaaaaaaccttaaaaaccttaaaaaaaagaaacaacatataaagtgtatataaatacaaaatacaaaatcaagctgaaagacaagaatgacaaatcttccaatgttaaaccaaagtaattcacattaatgaactaaagaaaaaaaacacatggttttcttaatagatatacagggacaaaacaatatgtttggtagatgatataattaccctgatagaaaaccaaaagaatctagaaagtattaaaacaaatgagacttctcagcaattttggcaaatgcatgaacttaggtaaagttggtacagttcaatgttagctagcattaaacaactaaaaatagttaaaaaaattataaataagatcgcacccacaaccaaaacgactatctaggaattaatataaaatagaatgcagaaaacctttatgcagaaaaattttaaataagaacattaaaaaatggaaagaatgacttaatagcattgagaatgtcaactctcccagaatgaaaatttcaaggtaattcccatcaaaattccagcagaaatttgaggaactcaaaagtgattataaaatttatataaaagtataaaggtctatagaaaataaaaaaataaaactaagaaaaaagactcctccacttataatcaagaaaaacaaaatgcagagaattcatacagaacctcaaggaacccagaatagccaaatcaatcttgaaaagaaaacctaagttggaggattcacacttcccaatttcaaaactcataataaagcaacagtaatcaagacagaatgctattggcataaggacaaatatatctaaggaatagaactgagaatccagaaataaacctgacatttatggtcagttgatttttgacaagagtgccaaaacaattcaat

SEQ ID NO: 694739 - DNA, 593 bp, Homo sapiens
aaaaaattagccaggcgtggtggcgggcgcctgtagtcccagctacttgggaggctgaggcaggagaatggcatgaacccgggaggtggagcttgcagtgagaggagatcacgccactgcactccagcctgggtgacagagtgagactccctctcaaaaaaaaacaaaaacaaacaaacaaaaaacacaaagctcctaaacaagtacactatatttaccaaaatttagttaatataaaatttataarcataaatttacatttagcaaattaatttgggggggggaaggcaggtgataaggtgggggaagtgcagaggtgagagagtaagggaggttgtcatttcctacagctgttttccaaaatgagtggtttttgtatcttggtcactgtagggaaataatgttgtgttttttaaattatggtaaaatatagataaaagttactattttaagtgtacagttccatggcattaaatacatccacattattgtgcaattatcaccagattttatttttcatcttccccaactgtaactctatacccactaaacaataacatcattttcttctcctgccagcctctggcaaccac

SEQ ID NO: 694740 - DNA, 1631 bp, Homo sapiens
ttaatttttaaattattgttattatttttagaaacaagagtcttgctctgttgcccaggctggagtgcagtggtgcaatcatggctcactgcagccttgacctccctggctcaattgatcctcccacctcagcatcccacatagctggggctacaggcatgtgctaccatgcccagctaatttttaactttttcataggcatgggatctctctatgttgcccacactggtctcaaactcgtgattcaagcaatcctcctgccccagcctcccaaagtgctgggattacaggcataagccaccatgcctggccagtatcttactgttaaggaattaaaatccaattaaaaaatatttagcctcatatacacacacacatacacatatgtgtgtatatatttatatatatttctaatatatagaagtttctatatatttctattatatctaagatacaatatacagttatcatgttatcccccaaataaaggtgatttccaagaccagaactggaaggtgggaattattctgtatgacccagctatttggatctgrattttttcagggagaaggaatcagatttagatgactggcaaggaaagatcatgcattttacagaaggaggtgtattataggggtggaactttggcttagttccaatcattttcagcagtatctagtatagccacctcttatcccagggcagcctcacaaagtcattgccatctgtgatatggtagcagggatatgagccctggaatcactcagacttcatttcagaatgctgaccccaccagttactagctgtgccctgaacagaacaaaagagaatactggttttattcatttgtaaaactggaaaaataattgtggagttgttttgagaattcatacatgaaaatagagtgcatggtacatacctgtaggccttccttgcccccatcatcccacacctccaccttccaaggtgcatgttcagtgtcccttacctgtgttcccacaatggttggttatcatagaagctgtcacattggtgtaattgttcaccttggcacattctattagtttgtgaattccttatctttgaatctctagcaacttagcagaggacctagttcatagtaggtaccaaagaagtataaatatgaatagaatgagtgcatgtcttgctgttttatttctcaggggaggaatgtgggcctatttcagcaggacaatagatagataccgtatatagtgtagtcagtaattacgaactagtctagtggctctgaaagtttttggtgttaggactcctttacagtcttaaaaatgattgtgggccccaaacaccctttgtttatgtggactgatattcagggtctttaggaatttaaaattaaaatatgaattttaaggtaatgataaacacattacatgttaacacattttcatgaaaaataacattcatgcctcccatttttttctaatgattttacagtcattagaaaatattttacagttttctaagccttttgcatgtctgacttaagatggagtttcctgtttgctgcattcagtctgttgtgataagtcattttgattaaagtatatgcaaaaaatcaagcctcacatagatatgtagtttgaaaa

SEQ ID NO: 694741 - DNA, 1631 bp, Homo sapiens
ttaatttttaaattattgttattatttttagaaacaagagtcttgctctgttgcccaggctggagtgcagtggtgcaatcatggctcactgcagccttgacctccctggctcaattgatcctcccacctcagcatcccacatagctggggctacaggcatgtgctaccatgcccagctaatttttaactttttcataggcatgggatctctctatgttgcccacactggtctcaaactcgtgattcaagcaatcctcctgccccagcctcccaaagtgctgggattacaggcataagccaccatgcctggccagtatcttactgttaaggaattaaaatccaattaaaaaatatttagcctcatatacacacacacatacacatatgtgtgtatatatttatatatatttctaatatatagaagtttctatatatttctattatatctaagatacaatatacagttatcatgttatcccccaaataaaggtgatttccaagaccagaactggaaggtgggaattattctgtatgacccagctatttggatctggattttttcagggagaaggaatcagatttagatgactggcaaggaaagatcatgcattttacagaaggaggtgtattataggggtggaactttggcttagttccaatcattttcagcagtatctagtatagccacctcttatcccagggcagcctcacaaagtcattgccatctgtgatatggtagcagggatatgagccctggaatcactcagacttcatttcagaatgctgaccccaccagttactagctgtgccctgaacagaacaaaagagaatactggttttattcatttgtaaaactggaaaaataattgtggagttgttttgagaattcatacatgaaaatagagtgcatggtacatacctgtaggccttccttgcccccatcatcccacacctccaccttccaaggtgcatgttcagtgtcccttacctgtgttcccacaatggttggttatcatagaagctgtcacattggtgtaattgttcaccttggcacattctattagtttgtgaattccttatctttgaatctctagcaacttagcagaggacctagttcatagtaggtaccaaagaagtataaatatgaatagaatgagtgcatgtcttgctrttttatttctcaggggaggaatgtgggcctatttcagcaggacaatagatagataccgtatatagtgtagtcagtaattacgaactagtctagtggctctgaaagtttttggtgttaggactcctttacagtcttaaaaatgattgtgggccccaaacaccctttgtttatgtggactgatattcagggtctttaggaatttaaaattaaaatatgaattttaaggtaatgataaacacattacatgttaacacattttcatgaaaaataacattcatgcctcccatttttttctaatgattttacagtcattagaaaatattttacagttttctaagccttttgcatgtctgacttaagatggagtttcctgtttgctgcattcagtctgttgtgataagtcattttgattaaagtatatgcaaaaaatcaagcctcacatagatatgtagtttgaaaa

SEQ ID NO: 694742 - DNA, 1511 bp, Homo sapiens
cttccttatccttcttccttttgcatgtgcaaacacaacagttcyacaaaaaactgtttaaccagctcccataaagtcaggcatctttaatacatcccttagatcctattatatctctttccaatggtctgtttctctgatcaaatctgacagatacataaacagaaccagttaccattatagagactgttttatgtgcaataaaatagaaagacttatgtattttacttgtagtaaattcacaccctccattacctcagcttatgtagtgtatgttctgcccttaaatgtttacagcacagcatcttttgtcttccttaaagtctctcttctgcccatttccttttacattcagattttttttcttgtagtgcactacttttcttttcccatgcttttgtccattgttctttgtcctattatcttcagagactgtgaataattctttccctttccctttattatggtgtttgttatcccaaagatacggaatttccagtgaccatgactcccctgagcactctctttcctaatagcatcaatttattttcccaagtttcttctactcttaccatctgatcctcatttatttttatgccctttcttctcaattatgccacacttctatccttgttaaaaaagatacattgagaccacagaaaagacctcaaatatatacaaagggatttaaacatcaatgattttataattggtttatagtcattttaaatgactgattttaaatattagtggaattttgcatttcacttaaagaaattttaacatgcgtctgtgtgtgtgtgtgtgtctgagtgagagagcgagacttgctggggtgcagtggcatgaatcttggctcactgcaatccctgccttgtggtctcaagtgatactcctgcctcagccttctgagtagctgggactacaggcatccaccaccacacctggctaatgttttgtacttttttgtaaagatgccgtttcaccatattgcccaggctggtctgaaactccagagctcaagtgatccacccacctcagcctctgaaagtgctgggattacaggcgtgagccaccgagcccagcctaactttttatttctaatgcattatctggcttataatctaaaattattagtgaatgcctttatattgtttttaaaagtacctacagtgtaccttctacacttagaaatcactgtattagaaagaagtttgcctatttaacatgagtaagtcaactgtggcacaattcatttataatatttagccattacgggtgtctgtaaattaagttcccagaatcgcttttgtatcattttcataagctctagtgttttctacattttgtagccagtttttactggtattggtagatgatctcttttattacatattgttctgaaatactattattctataaattatagtatactctagcaaaatgtattatgctatatatactatattatactattgtacactataccacaaattagttatgttataata

SEQ ID NO: 694743 - DNA, 1511 bp, Homo sapiens
cttccttatccttcttccttttgcatgtgcaaacacaacagttccacaaaaaactgtttaaccagctcccataaagtcaggcatctttaatacatcccttagatcctattatatctctttccaatggtctgtttctctgatcaaatctgacagatacataaacagaaccagttaccattatagagactgttttatgtgcaataaaatagaaagacttatgtattttacttgtagtaaattcacaccctccattacctcagcttatgtagtgtatgttctgcccttaaatgtttacagcacagcatcttttgtcttccttaaagtctctcttctgcccatttccttttacattcagattttttttcttgtagtgcactacttttcttttcccatgcttttgtccattgttctttgtcctattatcttcagagactgtgaataattctttccctttccctttattatggtgtttgttatcccaaagatacggaatttccagtgaccatgactcccctgagcactctctttcctaatagcatcaatttattttcccaagtttcttctactcttaccatctgatcctcatttatttttatgccctttcttctcaattatgccacacttctatccttgttaaaaaagatacattgagaccacagaaaagacctcaaatatatacaaagggatttaaacatcaatgattttataattggtttatagtcattttaaatgactgattttaaatattagtggaattttgcatttcacttaaagaaattttaacatgcgtctgtgtgtgtgtgtgtgtctgagtgagagagcgagacttgctggggtgcagtggcatgaatcttggctcactgcaatccctgccttgtggtctcaagtgatactcctgcctcagccttctgagtagctgggactacaggcatccaccaccacacctggctaatgttttgtacttttttgtaaagatgccgtttcaccatattgcccaggctggtctgaaactccagagctcaagtgatccacccacctcagcctctgaaagtgctgggattacaggcgtgagccaccgagcccagcctaactttttatttctaatgcattatctggcttataatctaaaattattagtgaatgcctttatattgtttttaaaagtacctacagtgtaccttctacacttagaaatcactgtattagaaagaagtttgcctatttaacatgagtaagtcaactgtggcacaattcatttataatatttagccattacrggtgtctgtaaattaagttcccagaatcgcttttgtatcattttcataagctctagtgttttctacattttgtagccagtttttactggtattggtagatgatctcttttattacatattgttctgaaatactattattctataaattatagtatactctagcaaaatgtattatgctatatatactatattatactattgtacactataccacaaattagttatgttataata

SEQ ID NO: 694744 - DNA, 1511 bp, Homo sapiens
cttccttatccttcttccttttgcatgtgcaaacacaacagttccacaaaaaactgtttaaccagctcccataaagtcaggcatctttaatacatcccttagatcctattatatctctttccaatggtctgtttctctgatcaaatctgacagatacataaacagaaccagttaccattatagagactgttttatgtgcaataaaatagaaagacttatgtattttacttgtagtaaattcacaccctccattacctcagcttatgtagtgtatgttctgcccttaaatgtttacagcacagcatcttttgtcttccttaaagtctctcttctgcccatttccttttacattcagattttttttcttgtagtgcactacttttcttttcccatgcttttgtccattgttctttgtcctattatcttcagagactgtgaataattctttccctttccctttattatggtgtttgttatcccaaagatacggaatttccagtgaccatgactcccctgagcactctctttcctaatagcatcaatttattttcccaagtttcttctactcttaccatctgatcctcatttatttttatgccctttcttctcaattatgccacacttctatccttgttaaaaaagatacattgagaccacagaaaagacctcaaatatatacaaagggatttaaacatcaatgattttataattggtttatagtcattttaaatgactgattttaaatattagtggaattttgcatttcacttaaagaaattttaacatgcgtctgtgtgtgtgtgtgtgtctgagtgagagagcgagacttgctggggtgcagtggcatgaatcttggctcactgcaatccctgccttgtggtctcaagtgatactcctgcctcagccttctgagtagctgggactacaggcatccaccaccacacctggctaatgttttgtacttttttgtaaagatgccgtttcaccatattgcccaggctggtctgaaactccagagctcaagtgatccacccacctcagcctctgaaagtgctgggattacaggcgtgagccaccgagcccagcctaactttttatttctaatgcattatctggcttataatctaaaattattagtgaatgcctttatattgtttttaaaagtacctacagtgtaccttctacacttagaaatcactgtattagaaagaagtttgcctatttaacatgagtaagtcaactgtggcacaattcatttataatatttagccattacgggtgtctgtaaattmagttcccagaatcgcttttgtatcattttcataagctctagtgttttctacattttgtagccagtttttactggtattggtagatgatctcttttattacatattgttctgaaatactattattctataaattatagtatactctagcaaaatgtattatgctatatatactatattatactattgtacactataccacaaattagttatgttataata

SEQ ID NO: 694745 - DNA, 1957 bp, Homo sapiens
tgaagaagcataatttaaacttcgaaaatacttataaatctaaatcaaaatattcagttatctttgtttaccaaatatttgaaagtataaattcatattattaaaatattttaaatgcatttatcaatgtttctgattatcaaaggtaaaatgaagtctttttaatcctattgataatgcaggacagatgatagcttttcattttggaataatctcttaggataattaaggaacaaagcccagagcctgagtaaatgggtcaactgtgaaaatctacccagttccatgaatgaccactttcttgtttttctgacaaggccattttcttcttctaatagtgaaaataacagattaagagctttattgtttttccaatttcctatctttcatataatgcttttctctaagtgaagggcagtagggttaaatatttagaatgaataaactagctccaagaaaagaaactggcaacttctgtgatgctgagtaattaaacagacctacagagcctgctggaattgtagaacataagcaaagattaatgaggcttgaaaatgtagagtcccatggtctccaagcaacgtgcaaggtgtctcacctcagctttgttcacgttgaacagctgcccattttcaaggcaagcaaaattgtatttgctcttgctttgattcagaaatagtttggtaaaatctatgacaaagtatttagcttttaaaagtatcctaaattaccttttttgttcccatccgtggtagcagactttgctttccgccctagacagcagattttccatgagtaggtgtgggtattctgagttcttttcctagcttccatcttaatctgggtggtcaatgaacagaatcttatacagagccccattcactagggtgtaacagtcaaaatagaaaacaggttatgtcttcattctcttctcccaccactaggaccaaagagaggtacactgcttctggtggtcagggagttttgaaggtttacaatatctttggtgaagaaaacaaagactgtcatttaaaaaaaaaagtttctctcaaatgagttctaaattcatggttgctgataatgccaaatagttattccaagaagacacagaaaaattggtttagtcttatttttagattaagggggcacaaaataactccatctgtatcgtcacaggggcttcatttatttaatgtatctttttttgtcatcggaagtgggggcctcttacagggacctctgaaatgttttagtccctttatatatatatacatttaaattaggatttttgtatgttcaaacttagtctagggttttggaattatctgtctctttcccataaatatttactaaactcaaccacacaaatgtaaagttatacaggcttttagtgctttcctaacgtggttaatactcatattgaaaataccataaattctgattaatggcagataccaacctatggaccacatagtacaaactcatgaagagtaattgttttctcatgttatttcatctaattttagtgtgtgttaagggtgccttcggagaggacttcacacccctacccctcgccattgtgtatagacatttgaaaattccttaactacattatctctgtgtgtgtgtgtgtgtgtgtgtgtctcccctcctctctttctctctgaaatcaagtacagatttacccagccaataagattgtatgtttcatgaaactgttagcagtcacatatagtctgttgatttattatgtattatgtacagtatacacttaatgatatacagcatgctcattttaaacgtgatcattctatggacatataggggcaagaatattgcttttgaactataaataatttctttatcaaacataagaagctaagcacwtgaaaataaatgtcctccaaataaaaagcctcttgaattactcgtgttacggaatgttgagacttcattc

SEQ ID NO: 694746 - DNA, 1744 bp, Homo sapiens
tggcacggtgagaccctcacactataagggatgggaactgagattctcaggagctttaaagtttagagccacaccgccgggcgcggtggctcatgcctgtaatcccagcattttgggaggccgaggcaggcaaatcacgagatcaggagatcgagaccatcctggccaacatggtgaaactccgtctctactaaaatacgaaaaattagccaggcgtggtggcttgcgcctatagtcccagctactcgcttgaacctggaggcggaggttgcagtgagccaagatggtgtcattgcactccagcctggtgacagagcaagactctgtctcaaaaacaaaacaaaacaaacaaaactttagaatcacacttggcatggtgaaactctcacactatgaggggtgggaattgagattctcaggggctttaaagtttagaataacacttggcatggtgagactctcacactatgagtgggagggaactgagattctcaggagctttgaagtttagaagcacacctggaatggtgagaccctcacactatgagggggtgggaaccaagattctttggggaacagcagctgctcagtccccacatacaagtttgttgagtgcaagatgaataaacacagagactttcaagttgccttgattgaacgggacaggtaaacacgtgggaactgcccacgtttttgactttgtctcttccctagctcttcccttgcccactatggagagtcaaatttgcaagctgtgaccatacccctgatgtgactgatctgtgacactcacagagctgccgctgggggtcatggataccatgcttctccatttgttctttgacacagtcttgccgggtaggcaacaactctgtgccgcacaggcccgaggtccaaggctagagagtggcagcactggaatccacatcccgctctgcctgatgctaaacttccactctcttatttcccatgccacgtggtgtgctcatatcgaggctcagtgcctggctattcctgtggcctttcacctaccttggccataatgaaaagcccatgcttctctccaacctgggttccaaaacagctgctgaaactaattaatttttttttttttgagacggagtctcactctgtctcccaggctggagtgcagtggcaccatcttgactcactgcaacctccaccccctgggttcaagtgattctcctgcctcagcctcccaagtagctgggattacaggcgcctaccaccgcrccctgttactttttgtatttttagtagagaaggggtttcaccgtctttgccaggctggtcttgaactcctgacctcatgatccacctgcctcggcctcccaaagtgctgagattacaggcctgagccaccgcacccggcctaattaattatttttataactgtcacagaacacctgattttcccccctcctccccactgttgtagggcagagaagaacaggtggggtggtcagggaataaaggaggaattcgaattcttagtccgaggaatcacagcacatttttttttttttttttttgtgacagggtctcgctctgtcacccaggctggcgtgcagtggcgcgatttcggctcactgcaagctccgcctcctgggttcatgccattctcctgccccagcctcccgagtagctgggactacaggtgcccgccaccatgcccagctaattttttgtattttttttagtagagacgggtttcaccgtgtta

SEQ ID NO: 694747 - DNA, 409 bp, Homo sapiens
  misc_feature 2, 3, 4, 5, 6, 7, 8, 9, 10, 11, 12, 13, 14, 15, 16, 17, 18,19, 20, 21, 22, 23, 24, 25, 26, 27, 28, 29, 30, 31, 32,33, 34, 35, 36, 37, 38, 39, 40, 41, 42, 43, 44, 45, 46,47, 48, 49, 50, 51, 52, 53, 54, 55, 56, 57, 58, 59, 60,61: n = A,T,C or G
  misc_feature 62, 63, 64, 65, 66, 67, 68, 69, 70, 71, 72, 73, 74, 75, 76,77, 78, 79, 80, 81, 82, 83, 84, 85, 86, 87, 88, 89, 90,91, 92, 93, 94, 95, 96, 97, 98, 99, 100, 101: n = A,T,C or G
gnnnnnnnnnnnnnnnnnnnnnnnnnnnnnnnnnnnnnnnnnnnnnnnnnnnnnnnnnnnnnnnnnnnnnnnnnnnnnnnnnnnnnnnnnnnnnnnnnnnncacttattacagcctgagcccctcctcacctgccttgtaaaaaacattgcatttattgaacatagattaagctacaggctgctccacatccatgaggccccgagtctgcccaggactttcctaaactgccttcaacttgacggttctgccagcctttccaggatggggtgactagccacccccagaatccaggccagcaacatttagtcagcattcagcttgtacattctgtcccctccttcctccctctgggagaacayatggtgagagctgctttctttggagcaaatccttaaggaaaaacagac

SEQ ID NO: 694748 - DNA, 643 bp, Homo sapiens
tcccgggttcacgccattctcctgcctcagcctcccaagtagctgggactacaggcgcccgccactacgcccggctaatgttttgtattttagtagagacggggtttcaccgttttagccgggatggtctcgatctcctgacctcgtgatccaccygcctcggcctcccaaagtgctgggattacaggcgtgagccaccgcgcccggccggaaaatggttttttaaagatttttaaaagacagtttatttccacaacttactggagatttatagactataagagctgaataaaaaaggataaatcatgtataaaaccttctaatgttactgatgaggtaaccagagcccaaagaggctaaggggcttggcgcttcctcagtcaccttgccagagcctgtgaaactgaaacaggttctttcctcctctcgcctccttttctttctttcttagagaccctgccccttacacacacacatgcgcgcgcgcacacacacaaagcaactcaaaaaaattgagagatttatttccccaaattagcctctgttctaacatttctaccagattaggtaggaaagacccaacagcttctctcccagaacattagagggcagtagcgagtcaggcccgccgcactataggatg

SEQ ID NO: 694749 - DNA, 643 bp, Homo sapiens
tcccgggttcacgccattctcctgcctcagcctcccaagtagctgggactacaggcgcccgccactacgcccggctaatgttttgtattttagtagagacggggtttcaccgttttagccgggatggtctcgatctcctgacctcgtgatccacctgcctcggcctcccaaagtgctgggattacaggcgtgagccaccgcgcccrgccggaaaatggttttttaaagatttttaaaagacagtttatttccacaacttactggagatttatagactataagagctgaataaaaaaggataaatcatgtataaaaccttctaatgttactgatgaggtaaccagagcccaaagaggctaaggggcttggcgcttcctcagtcaccttgccagagcctgtgaaactgaaacaggttctttcctcctctcgcctccttttctttctttcttagagaccctgccccttacacacacacatgcgcgcgcgcacacacacaaagcaactcaaaaaaattgagagatttatttccccaaattagcctctgttctaacatttctaccagattaggtaggaaagacccaacagcttctctcccagaacattagagggcagtagcgagtcaggcccgccgcactataggatg

SEQ ID NO: 694750 - DNA, 643 bp, Homo sapiens
tcccgggttcacgccattctcctgcctcagcctcccaagtagctgggactacaggcgcccgccactacgcccggctaatgttttgtattttagtagagacggggtttcaccgttttagccgggatggtctcgatctcctgacctcgtgatccacctgcctcggcctcccaaagtgctgggattacaggcgtgagccaccgcgcccggccggaaaatggttttttaaagatttttaaaagacagtttatttccacaacttactggagatttatagactataagagctgaataaaaaaggataaatcatgtataaaaccttctaatgttactgatgaggtaaccagagcccaaagaggctaaggggcttggcgcttcctcagtcaccttgccagagcctgtgaaactgaaacaggttctttcctcctctckcctccttttctttctttcttagagaccctgccccttacacacacacatgcgcgcgcgcacacacacaaagcaactcaaaaaaattgagagatttatttccccaaattagcctctgttctaacatttctaccagattaggtaggaaagacccaacagcttctctcccagaacattagagggcagtagcgagtcaggcccgccgcactataggatg

SEQ ID NO: 694751 - DNA, 1371 bp, Homo sapiens
tcaaaaccacttgagctttaccatccaacataatatcctttcgttatctcctcactatagttctagaactatcatttgcacattttatgttagatatgatggatcaaaattgtttaccagaacttaaatggtaaaaagaggccatattaattacatactgcattgacaatattgatgatgctttgtttcagatatactatatatcgatgttaactgcttttgaaatatttgaaaattagccaggtgggatggctcacatctgtaatcccaatactttgggaagccaagatggcaggatcgcttgagcgcaggagttggagaccaacctgggcaacacagtgacaccctgtctctatatttaaaaaaaaaawtgaaaattgatacttgtttttgaaatacttggctttatacatgtgtgtataataaaaaacaagtatctgctttgtgtagggcagcaccaaagtggtatgtgtacattttcctggaagaacggaacattggaggaaaaagtgtttggatgccgtgggacaagagacaggattgaatgggagagtggaagataggatgttgtctgttcctcagcccaggctcagagaccagtaattcactggagttactatttacatgaaggactttgggaggctccaggtacaagcacagatgtttcaggacttcagtgaaacatattaccctgatttatagacggagaagcttcccccttcctgggtgcctgcagcacagcttttaacactgggttgggatggaaggttctccagtgctgtgtgggcaccatgaggaactgaaagtttggaaacagcacctagataaaaaagctgaagtagacaccagctaaagtaatactaacgaggcatctcctaacagggcttcttggcagtggaaaggagcagcacagaaaaatctgactggggctgggcgcggtggctaacgcctgtaatcccagcagtttgggagtccaatgtgggcggatcacctgagatcaggagttcgagaccagtctaaccaacatggtgaaaccccatctctactaaaatacaattaaaaaaaaaaaatcagccggtcgtggtggcacgcacctgtagtcccagttactcgggaggctgaggcagggaaatcacttgaacctgggaggcagaggctgcagtgagccaagattgtgccactgcactccagcctggcaacagagcaagactccgtctcaaaaaaacaaacaacagcaacaaaaaaacaagaattagctgagcagggcggcgtgtgcctgtggtcccagctactagggggactgaggcaggaggatctcttgatcccaggaggtggagcttgcagtgagccgagatggacctactgcactcc

SEQ ID NO: 694752 - DNA, 1371 bp, Homo sapiens
tcaaaaccacttgagctttaccatccaacataatatcctttcgttatctcctcactatagttctagaactatcatttgcacattttatgttagatatgatggatcaaaattgtttaccagaacttaaatggtaaaaagaggccatattaattacatactgcattgacaatattgatgatgctttgtttcagatatactatatatcgatgttaactgcttttgaaatatttgaaaattagccaggtgggatggctcacatctgtaatcccaatactttgggaagccaagatggcaggatcgcttgagcgcaggagttggagaccaacctgggcaacacagtgacaccctgtctctatatttaaaaaaaaaaatgaaaattgatacttgtttttgaaatacttggctttatacatgtgtgtataataaaaaacaagtatctgctttgtgtagggcagcaccaaagtggtatgtgtacattttcctggaagaacggaacattggaggaaaaagtgtttggatgccgtgggacaagagacaggattgaatgggagagtggaagataggatgttgtctgttcctcagcccaggctcagagaccagtaattcactggagttactatttacatgaaggactttgggaggctccaggtacaagcacagatgtttcaggacttcagtgaaacatattaccctgatttatagacggagaagcttcccccttcctgggtgcctgcagcacagcttttaacactgggttgggatggaaggttctccagtgctgtgtgggcaccatgaggaactgaaagtttggaaacagcacctagataaaaaagctgaagtagacaccagctaaagtaatactaacgaggcatctcctaacagggcttcttggcagtggaaaggagcagcacagaaaaatctgactggggctgggcgcggtggctaacgcctgtaatcccagcagtttgggagtccaatgtgggcggatcacctgagatcaggagttcgagaccagtctaaccaacatggtgaaaccccatctctactaaaatacaattaaaaaaaaaaaatcagccggtcgtggtggcacgcacctgtagtcccagttactcgggaggctgaggcagggaaatcacttgaacctgggaggcagaggctgcagtgagccaagattgygccactgcactccagcctggcaacagagcaagactccgtctcaaaaaaacaaacaacagcaacaaaaaaacaagaattagctgagcagggcggcgtgtgcctgtggtcccagctactagggggactgaggcaggaggatctcttgatcccaggaggtggagcttgcagtgagccgagatggacctactgcactcc

SEQ ID NO: 694753 - DNA, 1781 bp, Homo sapiens
aataatgtacatgaagataaaattctaggctgtaattttcttccttcgacacactggaaattttactttttatcttactattaaaacatctgttatcggccaggtgcagtggctcacaccctgtaatcacagcactttgtgaggccgaggcaggcagatcacctgagttcaggagttcgaggctagcctggccaacatggcgaaaccccgtctctactaattaaaatacaaaaattctgggaatggtagtgggagcctgtaatcccagctacttgggaggctaaggctggagaactgcttgaacctgggaagcggagattgcagtgagccaacatcgtgccattgcactccagtctgggcgacaagagcagaactccatctgagaaaaaaaaaaaaatctattatctgatcaatgttcctttgtaggtgacctttctctgaaagatttctaagattgtttttgatgctcttatttgctctayaatgcatacaggtatagggaatttcttgttttctgtttaacagttaacaaatgaggtctttttttttttttaagtaagaaacaaggtatcgctctgttgctagactggagtgcagtgacgcgatctcggccacatgatccactagcctcagcctcccaaactgctgggattacaggcaccactgcgcccggcctcatttatttctttaattctaggaaacagtattttttttaatccagtgtattcgcttggtttttctagctttattactgctttgtttccaacatgctgttatatagtggtgacaaaacaaacaagatgctcaatctcatggaaattatgaggcagacagattagcaacagtgggatattttgcaggggagagggagaccatacattctaggtgaaatgtgagctaagaccaaattagcaagcagctatcatgcacgtatctgagtgaggaacacagctaaacgtcaattccaaacaataacgaattgatcaatgatgaatttaatctcagagttgctggatgcctctcttcaggtctgctcagacctcaattttccaatcttgtcccccaagaaaaagattaaacctgtcttgtgctgagtagtgtaatattccagtacggcttctcttgcgccctagtgctagtacgaagagaaatcaatgaaaaatgtagaaacaagtttgagtacaataggaacaggaaaaagcaaagcttcttgccacgccatgctcccaaatgtgcctgtgtctgattctcagcactaactactcatgtgagacatctcaacttgataaaacattaaaatggatttttgtctcacaccattcaaatacccagacagaataattttagtgttcagtggcacttccaaatcctaactcaagtacagtaataaatggtagagacttaagagaggcaagatatacatgtaactgatctggtctcacgagggattctcttacgatgtatttcatctacagtaagagaaatcatcttattaacattccccaaacttcattacttaacacacctatcatagtttttgctatgcagaattaatccatggtaatacggattatgaaagtgaatcaccctgagatggggttattaactaaaagggcaaagagaagctaatgaaatgctaatgtggatggtaaagtggtggatatatactgggcgcagtggctcatgcctgtaatcccagcactttgggaggccaaggtgggtggatcacctgaggtcaggagttcgagactagcctgaccaacatggagaaacctcatctc

SEQ ID NO: 694754 - DNA, 2123 bp, Homo sapiens
gagtatgaaaattattccaaccctgtttctcatgtggaagcttgggtgactgacccggagaaagctctggggccctactaccttccaggmagctctggtttcagcctaaatggcctggggctgtcagtgactctctccaggaagagcttcctggctgcccagagccctctctcccactcctgcgcatgactctgaggggtgtcagtcaccccatgcccagcagcccaggctcaccaagacggcctcttcccagggctcagagggatgaacaagcatcggtgtgtggaggagggggcgtctggagagggggggtcttgagattgcacctgccttgggataggttcctccttggtccaagggtgagttggggatgggaagtgtgttagtccatttgcattattataaggagatgcctgaggctgggtaatttataaagaaaagaggtttatttggctcaaggttctgcaggctgtacaagaagcatggcaccagcatctgcttctggggagggctcaggcagcttccactcatggtggaagagagagcaagagagagaggggaggcaacaggctcttaaccagttctcctgtgaacttataaagcgagagctcactcattatggtgaggacagcaccaagccattcatgagggatccacccccaaacacctcccactaggcccacctccaatattgaaggccacatttcaacatgagatttggaggggacagacatccaaaccatatcagggagaggcgcctgaactgactcctagctcatggagagctcatgtgttaaatgcccggtagcttcatgccacctgcactaccatgggctggcagctgctctgaggtctcttctgatgacaccgttggctgatgaccacaggcaagagccaaagttgggcagaaccaagcctctcagcagacagatgatcaaccgccatggggtagcacccttaaatcacttgagaggtagcggctggctgatggatggcctttaacccccagatactttagcggatatttcccaagaacaagtacattctctgacgtaaccacagtccagttgccaaatccagagagttcacagtgacactatgctactatggaataaactaccctgattagagaatcaggggcttcctggactgcatttagaactcgagtgttttgtgtctcccctcttgtagaacagccttttggggtgttttataacctgacattttttaagaattcaggccagattcttttatacagcactgtttttaaacaaatggtatcacattgcaaatcctgctccacaagttttttctcacttagctgtatatgtgtgaggtatttctgcatcagtaaataaatggccactgtgtccccttgaaactgcacctcagtgtataaataaatacagcactcaggactgtgactaaaccatcgtcacattgttcctgcccagatagattataggttgccacaatttgaaatgacatgcctgtgtatgtgcctctttgtcagaatttaaatagatacagcaaaatgatcagtttacatttccatcaacagaaagcacccctttccaacatggagaacagcatccatttttggctatttttcccacataatggttcataggcacctccgctgtggctgagttgggtcatttgactctgcagccaagattctgtgtctgcacctgatactgatcatgtgaacttcacacattattgttttcttatcactttctatatggtttctacattttgggtacaaatcctgtgctggatatgttgcaggtatgttgtcccagactgtttttatcattacttataatgtctggtacagctgagaagctttaacattatgacagattaaaatatatccatctttttgtctatattttatagttctttatgtgggtgtgtggatgtgttgcttttgagggcctttcctagtctttttatacacaggttattcaataatttctcccaatgcttttatgtatttttacttttagttctttaattttttgtttttttatttttgagacagggtctcactctgtcacccaggctggactgcagtggcgcaatcatggctcaccacagccttgaacgcccagctcaag

SEQ ID NO: 694755 - DNA, 2123 bp, Homo sapiens
gagtatgaaaattattccaaccctgtttctcatgtggaagcttgggtgactgacccggagaaagctctggggccctactaccttccaggcagctctggtttcagcctaaatggcctggggctgtcagtgactctctccaggaagagcttcctggctgcccagagccctctctcccactcctgcgcatgactctgaggggtgtcagtcaccccatgcccagcagcccaggctcaccaagacggcctcttcccagggctcagagggatgaacaagcatcggtgtgtggaggagggggcgtctggagagggggggtcttgagattgcacctgccttgggataggttcctccttggtccaagggtgagttggggatgggaagtgtgttagtccatttgcattattataaggagatgcctgaggctgggtaatttataaagaaaagaggtttatttggctcaaggttctgcaggctgtacaagaagcatggcaccagcatctgcttctggggagggctcaggcagcttccactcatggtggaagagagagcaagagagagaggggaggcaacaggctcttaaccagttctcctgtgaacttataaagygagagctcactcattatggtgaggacagcaccaagccattcatgagggatccacccccaaacacctcccactaggcccacctccaatattgaaggccacatttcaacatgagatttggaggggacagacatccaaaccatatcagggagaggcgcctgaactgactcctagctcatggagagctcatgtgttaaatgcccggtagcttcatgccacctgcactaccatgggctggcagctgctctgaggtctcttctgatgacaccgttggctgatgaccacaggcaagagccaaagttgggcagaaccaagcctctcagcagacagatgatcaaccgccatggggtagcacccttaaatcacttgagaggtagcggctggctgatggatggcctttaacccccagatactttagcggatatttcccaagaacaagtacattctctgacgtaaccacagtccagttgccaaatccagagagttcacagtgacactatgctactatggaataaactaccctgattagagaatcaggggcttcctggactgcatttagaactcgagtgttttgtgtctcccctcttgtagaacagccttttggggtgttttataacctgacattttttaagaattcaggccagattcttttatacagcactgtttttaaacaaatggtatcacattgcaaatcctgctccacaagttttttctcacttagctgtatatgtgtgaggtatttctgcatcagtaaataaatggccactgtgtccccttgaaactgcacctcagtgtataaataaatacagcactcaggactgtgactaaaccatcgtcacattgttcctgcccagatagattataggttgccacaatttgaaatgacatgcctgtgtatgtgcctctttgtcagaatttaaatagatacagcaaaatgatcagtttacatttccatcaacagaaagcacccctttccaacatggagaacagcatccatttttggctatttttcccacataatggttcataggcacctccgctgtggctgagttgggtcatttgactctgcagccaagattctgtgtctgcacctgatactgatcatgtgaacttcacacattattgttttcttatcactttctatatggtttctacattttgggtacaaatcctgtgctggatatgttgcaggtatgttgtcccagactgtttttatcattacttataatgtctggtacagctgagaagctttaacattatgacagattaaaatatatccatctttttgtctatattttatagttctttatgtgggtgtgtggatgtgttgcttttgagggcctttcctagtctttttatacacaggttattcaataatttctcccaatgcttttatgtatttttacttttagttctttaattttttgtttttttatttttgagacagggtctcactctgtcacccaggctggactgcagtggcgcaatcatggctcaccacagccttgaacgcccagctcaag

SEQ ID NO: 694756 - DNA, 2123 bp, Homo sapiens
gagtatgaaaattattccaaccctgtttctcatgtggaagcttgggtgactgacccggagaaagctctggggccctactaccttccaggcagctctggtttcagcctaaatggcctggggctgtcagtgactctctccaggaagagcttcctggctgcccagagccctctctcccactcctgcgcatgactctgaggggtgtcagtcaccccatgcccagcagcccaggctcaccaagacggcctcttcccagggctcagagggatgaacaagcatcggtgtgtggaggagggggcgtctggagagggggggtcttgagattgcacctgccttgggataggttcctccttggtccaagggtgagttggggatgggaagtgtgttagtccatttgcattattataaggagatgcctgaggctgggtaatttataaagaaaagaggtttatttggctcaaggttctgcaggctgtacaagaagcatggcaccagcatctgcttctggggagggctcaggcagcttccactcatggtggaagagagagcaagagagagaggggaggcaacaggctcttaaccagttctcctgtgaacttataaagcgagagctcactcattatggtgaggacagcaccaagccattcatgagggatccacccccaaacacctcccactaggcccacctccaatattgaaggccacatttcaacatgagatttggaggggacagacatccaaaccatatcagggagaggcgcctgaactgactcctagctcatggagagctcatgtgttaaatgcccggtagcttcatgccacctgcactaccatgggctggcagctgctctgaggtctcttctgatgacaccgttggctgatgaccacaggcaagagccaaagttgggcagaaccaagcctctcagcagacagatgatcaaccgcsatggggtagcacccttaaatcacttgagaggtagcggctggctgatggatggcctttaacccccagatactttagcggatatttcccaagaacaagtacattctctgacgtaaccacagtccagttgccaaatccagagagttcacagtgacactatgctactatggaataaactaccctgattagagaatcaggggcttcctggactgcatttagaactcgagtgttttgtgtctcccctcttgtagaacagccttttggggtgttttataacctgacattttttaagaattcaggccagattcttttatacagcactgtttttaaacaaatggtatcacattgcaaatcctgctccacaagttttttctcacttagctgtatatgtgtgaggtatttctgcatcagtaaataaatggccactgtgtccccttgaaactgcacctcagtgtataaataaatacagcactcaggactgtgactaaaccatcgtcacattgttcctgcccagatagattataggttgccacaatttgaaatgacatgcctgtgtatgtgcctctttgtcagaatttaaatagatacagcaaaatgatcagtttacatttccatcaacagaaagcacccctttccaacatggagaacagcatccatttttggctatttttcccacataatggttcataggcacctccgctgtggctgagttgggtcatttgactctgcagccaagattctgtgtctgcacctgatactgatcatgtgaacttcacacattattgttttcttatcactttctatatggtttctacattttgggtacaaatcctgtgctggatatgttgcaggtatgttgtcccagactgtttttatcattacttataatgtctggtacagctgagaagctttaacattatgacagattaaaatatatccatctttttgtctatattttatagttctttatgtgggtgtgtggatgtgttgcttttgagggcctttcctagtctttttatacacaggttattcaataatttctcccaatgcttttatgtatttttacttttagttctttaattttttgtttttttatttttgagacagggtctcactctgtcacccaggctggactgcagtggcgcaatcatggctcaccacagccttgaacgcccagctcaag

SEQ ID NO: 694757 - DNA, 2123 bp, Homo sapiens
gagtatgaaaattattccaaccctgtttctcatgtggaagcttgggtgactgacccggagaaagctctggggccctactaccttccaggcagctctggtttcagcctaaatggcctggggctgtcagtgactctctccaggaagagcttcctggctgcccagagccctctctcccactcctgcgcatgactctgaggggtgtcagtcaccccatgcccagcagcccaggctcaccaagacggcctcttcccagggctcagagggatgaacaagcatcggtgtgtggaggagggggcgtctggagagggggggtcttgagattgcacctgccttgggataggttcctccttggtccaagggtgagttggggatgggaagtgtgttagtccatttgcattattataaggagatgcctgaggctgggtaatttataaagaaaagaggtttatttggctcaaggttctgcaggctgtacaagaagcatggcaccagcatctgcttctggggagggctcaggcagcttccactcatggtggaagagagagcaagagagagaggggaggcaacaggctcttaaccagttctcctgtgaacttataaagcgagagctcactcattatggtgaggacagcaccaagccattcatgagggatccacccccaaacacctcccactaggcccacctccaatattgaaggccacatttcaacatgagatttggaggggacagacatccaaaccatatcagggagaggcgcctgaactgactcctagctcatggagagctcatgtgttaaatgcccggtagcttcatgccacctgcactaccatgggctggcagctgctctgaggtctcttctgatgacaccgttggctgatgaccacaggcaagagccaaagttgggcagaaccaagcctctcagcagacagatgatcaaccgccatggggtagcacccttaaatcacttgagaggtagcggctggctgatggatggcctttaacccccagatactttagcggatatttcccaagaacaagtacattctctgacgtaaccacagtccagttgccaaatccagagagttcacagtgacactatgctactatggaataaactaccctgattagagaatcaggggcttcctggactgcatttagaactcgagtgttttgtgtctcccctcttgtagaacagccttttggggtgttttataaccygacattttttaagaattcaggccagattcttttatacagcactgtttttaaacaaatggtatcacattgcaaatcctgctccacaagttttttctcacttagctgtatatgtgtgaggtatttctgcatcagtaaataaatggccactgtgtccccttgaaactgcacctcagtgtataaataaatacagcactcaggactgtgactaaaccatcgtcacattgttcctgcccagatagattataggttgccacaatttgaaatgacatgcctgtgtatgtgcctctttgtcagaatttaaatagatacagcaaaatgatcagtttacatttccatcaacagaaagcacccctttccaacatggagaacagcatccatttttggctatttttcccacataatggttcataggcacctccgctgtggctgagttgggtcatttgactctgcagccaagattctgtgtctgcacctgatactgatcatgtgaacttcacacattattgttttcttatcactttctatatggtttctacattttgggtacaaatcctgtgctggatatgttgcaggtatgttgtcccagactgtttttatcattacttataatgtctggtacagctgagaagctttaacattatgacagattaaaatatatccatctttttgtctatattttatagttctttatgtgggtgtgtggatgtgttgcttttgagggcctttcctagtctttttatacacaggttattcaataatttctcccaatgcttttatgtatttttacttttagttctttaattttttgtttttttatttttgagacagggtctcactctgtcacccaggctggactgcagtggcgcaatcatggctcaccacagccttgaacgcccagctcaag

SEQ ID NO: 694758 - DNA, 2123 bp, Homo sapiens
gagtatgaaaattattccaaccctgtttctcatgtggaagcttgggtgactgacccggagaaagctctggggccctactaccttccaggcagctctggtttcagcctaaatggcctggggctgtcagtgactctctccaggaagagcttcctggctgcccagagccctctctcccactcctgcgcatgactctgaggggtgtcagtcaccccatgcccagcagcccaggctcaccaagacggcctcttcccagggctcagagggatgaacaagcatcggtgtgtggaggagggggcgtctggagagggggggtcttgagattgcacctgccttgggataggttcctccttggtccaagggtgagttggggatgggaagtgtgttagtccatttgcattattataaggagatgcctgaggctgggtaatttataaagaaaagaggtttatttggctcaaggttctgcaggctgtacaagaagcatggcaccagcatctgcttctggggagggctcaggcagcttccactcatggtggaagagagagcaagagagagaggggaggcaacaggctcttaaccagttctcctgtgaacttataaagcgagagctcactcattatggtgaggacagcaccaagccattcatgagggatccacccccaaacacctcccactaggcccacctccaatattgaaggccacatttcaacatgagatttggaggggacagacatccaaaccatatcagggagaggcgcctgaactgactcctagctcatggagagctcatgtgttaaatgcccggtagcttcatgccacctgcactaccatgggctggcagctgctctgaggtctcttctgatgacaccgttggctgatgaccacaggcaagagccaaagttgggcagaaccaagcctctcagcagacagatgatcaaccgccatggggtagcacccttaaatcacttgagaggtagcggctggctgatggatggcctttaacccccagatactttagcggatatttcccaagaacaagtacattctctgacgtaaccacagtccagttgccaaatccagagagttcacagtgacactatgctactatggaataaactaccctgattagagaatcaggggcttcctggactgcatttagaactcgagtgttttgtgtctcccctcttgtagaacagccttttggggtgttttataacctgacattttttaagaattcaggccagattcttttatacagcactgtttttaaacaaatggtatcacattgcaaatcctgctccacaagttttttctcacttagctgtatatgtgtgaggtatttctgcatcagtaaataaatggccactgtgtccccttgaaactgcayctcagtgtataaataaatacagcactcaggactgtgactaaaccatcgtcacattgttcctgcccagatagattataggttgccacaatttgaaatgacatgcctgtgtatgtgcctctttgtcagaatttaaatagatacagcaaaatgatcagtttacatttccatcaacagaaagcacccctttccaacatggagaacagcatccatttttggctatttttcccacataatggttcataggcacctccgctgtggctgagttgggtcatttgactctgcagccaagattctgtgtctgcacctgatactgatcatgtgaacttcacacattattgttttcttatcactttctatatggtttctacattttgggtacaaatcctgtgctggatatgttgcaggtatgttgtcccagactgtttttatcattacttataatgtctggtacagctgagaagctttaacattatgacagattaaaatatatccatctttttgtctatattttatagttctttatgtgggtgtgtggatgtgttgcttttgagggcctttcctagtctttttatacacaggttattcaataatttctcccaatgcttttatgtatttttacttttagttctttaattttttgtttttttatttttgagacagggtctcactctgtcacccaggctggactgcagtggcgcaatcatggctcaccacagccttgaacgcccagctcaag

SEQ ID NO: 694759 - DNA, 1659 bp, Homo sapiens
  misc_feature 947, 948, 949, 950, 951, 952, 953, 954, 955, 956, 957, 958,959, 960, 961, 962, 963, 964, 965, 966, 967, 968, 969, 970,971, 972, 973, 974, 975, 976, 977, 978, 979, 980, 981, 982,983, 984, 985, 986, 987, 988, 989, 990, 991, 992, 993: n = A,T,C or G
  misc_feature 994, 995, 996, 997, 998, 999, 1000, 1001, 1002, 1003, 1004,1005, 1006, 1007, 1008, 1009, 1010, 1011, 1012, 1013, 1014,1015, 1016, 1017, 1018, 1019, 1020, 1021, 1022, 1023, 1024,1025, 1026, 1027, 1028, 1029, 1030, 1031, 1032, 1033: n = A,T,C or G
  misc_feature 1034, 1035, 1036, 1037, 1038, 1039, 1040, 1041, 1042, 1043,1044, 1045, 1046: n = A,T,C or G
ttgctagggttatatcaattgcattaatttttctagagaccagcttggactttcttaattttctctattgtcatgaattttctattttatctttttgctttcatcttatttacttcattttctgtattttacgtttaagttgcccatttttttctatattcttaaggggaaacttagttcgctaattttaaacagttctatttttccaagataatcattttagtctgtgaattttcttctaaacattgttttattcatatccaccaatttttaaatattgtgtcgttatttttagtgagttcaaaatatgtcttaattttcttatatttcttttctgatacacatgttatttagaagggtaataatatgacaaaatatgtaatttttctgggtttcttacttttttaaaagttttattatattagaataagaaaagaaatcataggattttgaattctaaaaattattgagatgaattcagtcatcattatatcactttctttgtgcaggttccatgtgtatttgaaagggatgttgctgttcatattcttttacagattttatatattcctaatgttttttatttaatatttaaatcagtgttaaaagaggagagttaatatcaacaacaataagtatagacttatctctcttctcttttgctatttttgcttcaggcatttaaagtttgcctcttctttttttttttttttttaagagaaaattctcactctgtcaccgaggctggagttcagtggtgcaatcatagctcactgtagcctcaaatcgtgggttcaagtgatccttccacctcaacctcccaaagtgctgggattacaggtgtgagccactgtgcttagactgaagcttgcctctttattattgggtagaatctttttaaagtttgaaagtacttctttttttgaaggttatttcatttaatattnnnnnnnnnnnnnnnnnnnnnnnnnnnnnnnnnnnnnnnnnnnnnnnnnnnnnnnnnnnnnnnnnnnnnnnnnnnnnnnnnnnnnnnnnnnnnnnnnnnnattatatatatgtttagtctaggtccatattttggctacttgtttgcttaaacttttgtaggtaaggtttctggtgtttatgtgaaaccatttgaacccctgccactttgagttaccatcatcctcattgaattcaggaagccaaattcaatagcaacatctcccactgtcatttttggcttaggtaatagccactatagacccgcaaaaattaagcaaaagaatgtcagtactcacctcactaatgtacttttaaagtcttgatgaaaaaagtgtctcctacaccatcgtgtgagacacagggagtaaatgagcaggtctaacataatatttcagtctagcatttcaacttcctttaaattggatacttgtctgtactagactaagcaaattttcgtattttctcttcaataattgtaggccacttttaagttcatgtttcagccaactaacaaagcatacttttaaagccartatcaatttatacaatcaattaagaatctctgcttagagtacccaagtcaacaaattcatcccatgataactacatttcttctacctttactctatgtccttagaattgttttccagacaccttctttagatttgtata

SEQ ID NO: 694760 - DNA, 590 bp, Homo sapiens
cactccagcctgggggatagagggagactctgcctccaaaaaaaaaaaaaaaagaagtgcagaagaacctagaatagcagaaggaacctagaatagcaaaaggaagaacaaaattagaggtcttacaccgcctgattttaagacttactataaaactaaagaagtcaagacagtgtgatattgacataaggagcaacaaacaggtcaatggaactgagaccaaaggagtagttccagggaccaagaggcggccttgttggccatctcagagcacgcaccacttggggaagaaacagttaccttcccagtcctatgctcccggagatgtgttgtgtgggccttctctgggcttgtctgatttccaagctgatcttgactgagcatagagcccttagaaagttgaacctcaaagaccacaaatgtatgctcaactgattttttacaaaagcatcaaagcaatctttcagaaaaaggaaattttttttgtcaactggtgctggaataattaaatatatacaagaaaaaaaaatcttygattccctacttcatactatacataaaaatcaattcaagatggctcatagatctaa

SEQ ID NO: 694761 - DNA, 580 bp, Homo sapiens
gcagtactccctgcagttgtacaatgtcccattctagaagccttttccaaagctcctctcagctagcacatcctatatcctagttgtgatggtggaggacaaatgttttatggcctccttgtgtggcatgtggggaaatggtgatacgccagcgagtttacaattttccctatagacccaaggaagtcattggtcaagctgggaacaggacacccggctagtgatgctgattcactctggatggaaacctggtatttgctaagcggacagctcctgtcagacttaatctcatgggggtcttctagacaccattgtcatggagacggatcctatttctgtcactcaagaggagaaatactatctggatgctccagaatgctctggctcagtactagagaactgggtctttcacagggaaataaggaaccagaaaaaaattcggaaatgtggtcctgactcacgggactctccctttccacrctcatctgtgtcaacacagtcagctccgagggatgtcagaagagttaaaacatttgttaaacctgtcactctcggccgggtgcggcggctcactcctgta

SEQ ID NO: 694762 - DNA, 2151 bp, Homo sapiens
ttttgaaattaaaaaataccaaaagacttcacacaacttctgaaggagaaaacaaaacaaacaaaaatctttcctttccctaaagctttgataaagcccctgagctccacagtctgtgggaagagagtgctaggcccagaagaaggtggggtggagtcacagaagcacagcagtgtatcaggggatccctaagcacgataataatccctttcatctgaggcttccctgggaaacggccaagtgagaggaggccaattcaggctaccggcattcttcacctacttattttccagctctcagaagaatctcactgctacacttacgtcatccacgctggccaaaacggtttatgatattgtcttcctccccttttctgcttcatctttgtgtgtgtgtgtgtgtgtgagacggagtcttgctctgtcgcccaggctgcagtgcagtggtgcaatctcggctcactgaaagctccgcctcccaggttcacgccattctcccgcctcagcctcctgagtaactaggactacaggcgcccaccaccacacccggctaattttttgtattttttagtagagacggggtttcaccatgttagccaggacggtctcgatctcctgacctcgtgatccacccgcctcggcctcccaaagtgctgggattacaggcgtgagccactgcgcctggccccacttcatcttctttcgtcattccaccaaatttagaatgccctccttttctccacttagccaaactctaataatccttccgaaatgctcaaatcctcctttttcaaatcctcaagtaaagccttaactcaccaaaccctaacatgacatgatctcaccatttttgtaataataacatcagtagctaacaataaatacatactatgagctaggtatagttctaaggtctttatatgaacacttaaataatcatctcaaaattctataaaataggtcctattacttccccattttacagactaaaaacaaaaacaaaactaaagaacagagatgttaagtaatttgtccaaatcaatcagcatcaagtttaaaaggttagtatttttgctaatccctagtcagcttcattcattaaagagcaaaaaactaaatcaaggaaatatgaaaacagtgccaggtgtacaaagcaactaaagacagtcctgaacactgaataacttttctatgtgagcctttaatctgccygaaagaaaaaaaaccttctaagaagctatttgcactctaatctcaaaaggaatgacctttattctcaagaagtcaccaatgttgggcccctcttatttaaatactgtttatgtgttgggggggtaccaaagttttcctccttgacagaggtaatgaattaattattatcaggagaaacgctttagaagataatatgctgacgtggtcatgtgaaatctgaataagaaatcacaatttacatagatgagcaaaggactgagggttcagaacaagcacccaaatgctatccttcattttcatacaaagggggaaaaatatatgtgtttacttcaaaataatgttccagaaatcataatttcaaaacctttaaattattaaaacacacatcagaattctaatacaaataaattagaaatgtaattttgaatagtctcttgagataactactctctctcaaaaatagctttgtacctaaataaactttcagtctatcattgagtagagctgaaaataggacaacgaattacggcatttaacaatctacattagataactcacaaattcacttatagtaaacagcttatactctttataagttttcagtaagttttaagagttcctatactcccaacagagacaaagacaaaaggtttccatttgccaaagtaaatcaaacaaaacatttctgaaatcactccgtgatataatacaaattatttatgaggcagaggctgagtaaacgattctagtaggcatccagtctgtccaacattagaagtctcaagattaccagaagtacactgggccacagagaaatagggaattttagcctaggtaggacccccaaatcaaaacagaagactatgcatcttaaaggaataacggcctcagtttgttcattgtgcttccacactgcatatccttgtcactagtagctccc

SEQ ID NO: 694763 - DNA, 662 bp, Homo sapiens
attgggctcaccaaggtgatccaggattttctccatatcttgaagtcagctgattagcaaccttgattccatctgtaatcttaattctcctttgccatgtaacctagcatacatacagattcaggggcattattctgcctcccaagagggacccaagcatcaggcacagtcagcytgccatgaatttccttcccatactgggccagtgaaggaaagagaggacagaaattagggcacactcaagtgagtccatcatgtttacacacaaactgggtagccttgttctgatatagacattattgagtctctagatgtgcactgccttaaaagaagttacccaaaaatgatttttccatttatattataaagaaaatgatttttaaaaatctttagttgaacataaatatctttgtagaccaggaacagcagatgccatacatgggcctccgtgcccctattccattttcgtggcaaacatcactaccaatcatagcattctttctgtccttttcaacacagcacccaggcactcaatactggccaactggggccagtatttattacaggtgcgctgactcatgtctgtaatcccagcactttgggaggccaagacaggaggatcacctgacgtcaggagttcaagactagcctggccaacatgg

SEQ ID NO: 694764 - DNA, 662 bp, Homo sapiens
attgggctcaccaaggtgatccaggattttctccatatcttgaagtcagctgattagcaaccttgattccatctgtaatcttaattctcctttgccatgtaacctagcatacatacagattcaggggcattattctgcctcccaagagggacccaagcatcaggcacagtcagcttgccatgaatttccttcccatactgggccagtgaaggaaagagaggacagaaattagggcacactcaagtgagtccatcatgtttacayacaaactgggtagccttgttctgatatagacattattgagtctctagatgtgcactgccttaaaagaagttacccaaaaatgatttttccatttatattataaagaaaatgatttttaaaaatctttagttgaacataaatatctttgtagaccaggaacagcagatgccatacatgggcctccgtgcccctattccattttcgtggcaaacatcactaccaatcatagcattctttctgtccttttcaacacagcacccaggcactcaatactggccaactggggccagtatttattacaggtgcgctgactcatgtctgtaatcccagcactttgggaggccaagacaggaggatcacctgacgtcaggagttcaagactagcctggccaacatgg

SEQ ID NO: 694765 - DNA, 662 bp, Homo sapiens
attgggctcaccaaggtgatccaggattttctccatatcttgaagtcagctgattagcaaccttgattccatctgtaatcttaattctcctttgccatgtaacctagcatacatacagattcaggggcattattctgcctcccaagagggacccaagcatcaggcacagtcagcttgccatgaatttccttcccatactgggccagtgaaggaaagagaggacagaaattagggcacactcaagtgagtccatcatgtttacacacaaactgggtagccttgttctgatatagacattattgagtctctagatgtgcactgccttaaaagaagttacccaaaaatgatttttccatttatattataaagaaaatgatttttaaaaatctttagttgaacataaatatctttgtagaccaggaacagcagatgccatacatgggcctccgtgcccctattccattttcrtggcaaacatcactaccaatcatagcattctttctgtccttttcaacacagcacccaggcactcaatactggccaactggggccagtatttattacaggtgcgctgactcatgtctgtaatcccagcactttgggaggccaagacaggaggatcacctgacgtcaggagttcaagactagcctggccaacatgg

SEQ ID NO: 694766 - DNA, 589 bp, Homo sapiens
tgtctttcctctgtctcctccaaagctaggtgaggagggggtccagagaagaaggtcctggtggcctcttttctctaagtatgttgtgcgtgacattttgagattcacagactcctttgagaatctgacgaacattatgaaccttctcgtaggtacacacacacacgcacgcacacagacacacacacaatcgtgcttgcagttttcagattgagatccatggatctcaagttacgaaattctgaccccagtcctgtctttggtgtgcctccccactgttggagctgcgaccatgggcatcaggaccttggagggctgcagtgtgggaagacgtgggtgtcggagcccagcaggcctgagtttgcgtctctggctctgtactgattckctgtgggactcagggcaactcattccttatttgtaagatggaataatagtacctgcctcacagcgaggattaaataagtgtgacacgtaaaacacttattccagcgtctgacaccaaaaataataacagtaatacccgcagggttggccctttgctggctctcttgtcttctcttctctatgcgacccccaacttctgtgt

SEQ ID NO: 694767 - DNA, 1687 bp, Homo sapiens
tgtgggcaggtacaacttggctgatccttctcttcatgcatttttcaatatacatgaagggaagtgttatttgtattgttaaatttacatgatctcctctttaattttatcagctgctaactagatccagaaatgatgacatttaaaggaaaaatggctaccatttccagaatactgcagtgtaatagaagaacctaattartttaacctcacagaactccataatggctagaattcatcattcccacagatagagctcagaggaattaacagcactgcacatccccatacactctacagattggctggccaaggtgagatttttctttatattccttcagtgcacatattgacaacgtcttcttgaagtatattaacaatacagattgtgtggctttaaaaggtgaaaatgaaaaaatcattattgcaaaatactttgatagagggaagacaaaaatctctttgttgagaaatgtgagaccaataatttaatttacctataaatatttgttcaagtttaaattgcaacagaaaaagacagaaaggtttaacctcaggaaaataggagatttgcaggcatctacagctagtcttagaaaatgccaatcttcatttcttttttcttccctgaatgatttgtaatattttccagaatctttgctaatatgagaaaatggaggctgagcatggtggcttattcctgtaatcccagcaatttgggagtctgaggagggaggatcacttgaggtcaggatttcaagacaaacctgagcaacataacaggacctctgtctctaacaaaaattaagaaaagaaaaaaaagctgggtaagttgttggtagttcaagctattagaaagtctgaggcaagaggatccctcgagttcaggaggtcaaagctgcagtgagctatgaccacagcactgcactccagcctgggtaacagagagggaccctgtttcacaagaaaaataaaagaaaaacaaaaacaaagaaaatggaaataggtggggttcctgtaactcacgaacaggtacaacaacagaataggggctatttgaaaaacatagttacatcaccacattaattttgctgctgtgctatttctgccacagtgactatttccctagctgttacttactgccccaattcattatcagtgaagagatcgaggatatctcctccagtcatttttcttcaaaagaaacaaatttatttacattgttaaaaaattgtatatttgttgctttatattctttctgagtataaacatgtatatgtgtttctctgatcaccatgaacaaagataatctcagaaaatttagtgtctgaaggaaccccaattctaagaccctatcagtaacttagctgcattagatgaaaaaaaaaaaatccttcttcaacagctttccaagctgacagtcatgaaattaaaattatttacttgggtctcataacaatcatagaaacagggaaaatgataactgcagagggataaccaaagaaataacattgctggtattatcgcaaaaggtcacacacttattcaataatgcccttctgtgtgcaaaccctgtgttaggggtgagaatcagcctttcctgcaggtaaataaataaataaataaatagaatccagcatttaaaaaacataactattgaagaagtagaggctcaaatttgtatgca

SEQ ID NO: 694768 - DNA, 1687 bp, Homo sapiens
tgtgggcaggtacaacttggctgatccttctcttcatgcatttttcaatatacatgaagggaagtgttatttgtattgttaaatttacatgatctcctctttaattttatcagctgctaactagatccagaaatgatgacatttaaaggaaaaatggctaccatttccagaatactgcagtgtaatagaagaacctaattaatttaacctcacagwactccataatggctagaattcatcattcccacagatagagctcagaggaattaacagcactgcacatccccatacactctacagattggctggccaaggtgagatttttctttatattccttcagtgcacatattgacaacgtcttcttgaagtatattaacaatacagattgtgtggctttaaaaggtgaaaatgaaaaaatcattattgcaaaatactttgatagagggaagacaaaaatctctttgttgagaaatgtgagaccaataatttaatttacctataaatatttgttcaagtttaaattgcaacagaaaaagacagaaaggtttaacctcaggaaaataggagatttgcaggcatctacagctagtcttagaaaatgccaatcttcatttcttttttcttccctgaatgatttgtaatattttccagaatctttgctaatatgagaaaatggaggctgagcatggtggcttattcctgtaatcccagcaatttgggagtctgaggagggaggatcacttgaggtcaggatttcaagacaaacctgagcaacataacaggacctctgtctctaacaaaaattaagaaaagaaaaaaaagctgggtaagttgttggtagttcaagctattagaaagtctgaggcaagaggatccctcgagttcaggaggtcaaagctgcagtgagctatgaccacagcactgcactccagcctgggtaacagagagggaccctgtttcacaagaaaaataaaagaaaaacaaaaacaaagaaaatggaaataggtggggttcctgtaactcacgaacaggtacaacaacagaataggggctatttgaaaaacatagttacatcaccacattaattttgctgctgtgctatttctgccacagtgactatttccctagctgttacttactgccccaattcattatcagtgaagagatcgaggatatctcctccagtcatttttcttcaaaagaaacaaatttatttacattgttaaaaaattgtatatttgttgctttatattctttctgagtataaacatgtatatgtgtttctctgatcaccatgaacaaagataatctcagaaaatttagtgtctgaaggaaccccaattctaagaccctatcagtaacttagctgcattagatgaaaaaaaaaaaatccttcttcaacagctttccaagctgacagtcatgaaattaaaattatttacttgggtctcataacaatcatagaaacagggaaaatgataactgcagagggataaccaaagaaataacattgctggtattatcgcaaaaggtcacacacttattcaataatgcccttctgtgtgcaaaccctgtgttaggggtgagaatcagcctttcctgcaggtaaataaataaataaataaatagaatccagcatttaaaaaacataactattgaagaagtagaggctcaaatttgtatgca

SEQ ID NO: 694769 - DNA, 1687 bp, Homo sapiens
tgtgggcaggtacaacttggctgatccttctcttcatgcatttttcaatatacatgaagggaagtgttatttgtattgttaaatttacatgatctcctctttaattttatcagctgctaactagatccagaaatgatgacatttaaaggaaaaatggctaccatttccagaatactgcagtgtaatagaagaacctaattaatttaacctcacagamctccataatggctagaattcatcattcccacagatagagctcagaggaattaacagcactgcacatccccatacactctacagattggctggccaaggtgagatttttctttatattccttcagtgcacatattgacaacgtcttcttgaagtatattaacaatacagattgtgtggctttaaaaggtgaaaatgaaaaaatcattattgcaaaatactttgatagagggaagacaaaaatctctttgttgagaaatgtgagaccaataatttaatttacctataaatatttgttcaagtttaaattgcaacagaaaaagacagaaaggtttaacctcaggaaaataggagatttgcaggcatctacagctagtcttagaaaatgccaatcttcatttcttttttcttccctgaatgatttgtaatattttccagaatctttgctaatatgagaaaatggaggctgagcatggtggcttattcctgtaatcccagcaatttgggagtctgaggagggaggatcacttgaggtcaggatttcaagacaaacctgagcaacataacaggacctctgtctctaacaaaaattaagaaaagaaaaaaaagctgggtaagttgttggtagttcaagctattagaaagtctgaggcaagaggatccctcgagttcaggaggtcaaagctgcagtgagctatgaccacagcactgcactccagcctgggtaacagagagggaccctgtttcacaagaaaaataaaagaaaaacaaaaacaaagaaaatggaaataggtggggttcctgtaactcacgaacaggtacaacaacagaataggggctatttgaaaaacatagttacatcaccacattaattttgctgctgtgctatttctgccacagtgactatttccctagctgttacttactgccccaattcattatcagtgaagagatcgaggatatctcctccagtcatttttcttcaaaagaaacaaatttatttacattgttaaaaaattgtatatttgttgctttatattctttctgagtataaacatgtatatgtgtttctctgatcaccatgaacaaagataatctcagaaaatttagtgtctgaaggaaccccaattctaagaccctatcagtaacttagctgcattagatgaaaaaaaaaaaatccttcttcaacagctttccaagctgacagtcatgaaattaaaattatttacttgggtctcataacaatcatagaaacagggaaaatgataactgcagagggataaccaaagaaataacattgctggtattatcgcaaaaggtcacacacttattcaataatgcccttctgtgtgcaaaccctgtgttaggggtgagaatcagcctttcctgcaggtaaataaataaataaataaatagaatccagcatttaaaaaacataactattgaagaagtagaggctcaaatttgtatgca

SEQ ID NO: 694770 - DNA, 1051 bp, Homo sapiens
catgcttcttgtggaaccaacaatggtggaattttctttcctttctctggtttgaacactgtatatttgtgatgcaggtggcccagcttcattctctgctgcattttttaattagtgtcgtttctgggtcgtgttgttggtgtcctggtgcttgttcttagatgctgtgctatgtgaacggcctgtgagggctcttgtgtttccttattggaatctgggtatattcttcaaagaaggttgttttttaaggatgttttggctgcatggaattgtttagttcttacttttctccaaaatgcatccataatttgccctgctctacagtgattgaaaacttgggtatataatcttgaactaagataaaatgggaaagaaaaattggacctttcttcattttttttattaaaaagttarcaagaagacaacccagggaaaatttttacatctttaatgtcagctattaggtaggataacagaatggaaatggactggaatgaattcaaattttgctttggtactacctagccaaatgatctcaaacaatcttctcaactgttaaggtaacaatttcttcttctgcaaaatggaggaattacactaataaaccacctgaaaagactttcttggctctaacattctatgcagatgtagcacaccaattttaaaggcttagaaatgcaactgctttagtccagtgggagatatggacatggctaatataaaaatcatcagaacttgtaaagtcattaggtgaaatctttcatttccttatataaaaacattctcatttccttctataaaacagattctcatgcctgtggcccccatgattgatgctattgtatgaggcaagcaaaagagaaactagcaggaaagaaaaaaatacttactctagatagtgagtatagagtagttctaagcactttgtgtacgtcatcttacaatcctcacaacagctcaaccataggcatttttatctcaattttatagttgaaatggaggcctagagaagtaaagcaagttgcttaaatttatatgactagtaattgtg

SEQ ID NO: 694771 - DNA, 1051 bp, Homo sapiens
catgcttcttgtggaaccaacaatggtggaattttctttcctttctctggtttgaacactgtatatttgtgatgcaggtggcccagcttcattctctgctgcattttttaattagtgtcgtttctgggtcgtgttgttggtgtcctggtgcttgttcttagatgctgtgctatgtgaacggcctgtgagggctcttgtgtttccttattggaatctgggtatattcttcaaagaaggttgttttttaaggatgttttggctgcatggaattgtttagttcttacttttctccaaaatgcatccataatttgccctgctctacagtgattgaaaacttgggtatataatcttgaactaagataaaatgggaaagaaaaattggacctttcttcattttttttattaaaaagttagcaagaagacaacccagggaaaatttttacatctttaatgtcagctattaggtaggataacagaatggaaatggactggaatgaattcaaattttgctttggtactacctagccaaatgayctcaaacaatcttctcaactgttaaggtaacaatttcttcttctgcaaaatggaggaattacactaataaaccacctgaaaagactttcttggctctaacattctatgcagatgtagcacaccaattttaaaggcttagaaatgcaactgctttagtccagtgggagatatggacatggctaatataaaaatcatcagaacttgtaaagtcattaggtgaaatctttcatttccttatataaaaacattctcatttccttctataaaacagattctcatgcctgtggcccccatgattgatgctattgtatgaggcaagcaaaagagaaactagcaggaaagaaaaaaatacttactctagatagtgagtatagagtagttctaagcactttgtgtacgtcatcttacaatcctcacaacagctcaaccataggcatttttatctcaattttatagttgaaatggaggcctagagaagtaaagcaagttgcttaaatttatatgactagtaattgtg

SEQ ID NO: 694772 - DNA, 2637 bp, Homo sapiens
ttatcttccagattggcaaactcctactgacagtactcttgtgttttgaatacataaaaataaaagtgatctactacactgggaaaacagaaaagaacttttaaaacatttaaagatagctgtggactaagagtcaaaacatctttttgtttaatatgatggatgtttatttttcttttgtgtttgtctctatacctgataccccttttagacatttttctaatctgtctgctgtctgctgtagatacaggaagcagaaagatcttatcacctgaaaatgcactttctgtatttcttctgagaaaatgtattagagttttcagaaataaactgcagaaatgttgggtataatgacatggaaaatgcccatctatcaaacctcaactgctgatttctcaaagaattttgaaacaatataataggaattttctctttctgccaaagtctataccactaaacatctcagaagagactttatgggcagtttctctgtagatgtattgtttgcatgcaagaacatcagtctctttaaatgttggtcagagagaacacaggttgtgaattaggtgtgccagcttgtccagaaacatggcaaagataaagaatcaaatgccaaatgttctcttctttgaaaacccactttgtaatattatgttttatatcagcatgtgagcattgaattttcatgtgcaaatagttagagtttcagttctctctcccacttttaaattacctacagaaaaatgtcatctttaagtaaaattgaaagtaaaaaactagaaaaagaaatttaaagacacaagaaaaatgttatatgagcctcaaaacataaatagttcctacatatcaataagaaaaatggagcactataacagatgtatcaaatgtacatacaaatcgcaattgaacaaatgccaagcccataaagaaaatgttgtacacatttaaaaactaaaatttatttgtatattttgttatcaaaatttattttttgaaattgttttaatgataatatagcatgtgagttctctaatacatttctgatagcgctataagtgggtacagtctttcttgaaaataatttgttgatatgtgtcacttgtcttcgaaacatatatattacttgacctagaaatctctcttctaggaatttgaggacattgtcagagatacatttgaagtttattccattaagatggatattaaaacaatacttatatgtttaagcacaagtcctaaatgttgaaaaattgattatgtaaacaatggtacattctttcaatggacttctaagcaactrttaaaattatttataagaatatttaaagcacataagaaattgtccaatatatcatgtagtgaaaatatctacataaaattatgaaatcagtataaattcctttttttgttaaaaatcgagtcagctaactagaaaattcatatattatttaatgtcattacctattattatgtatttttatatatgcatatggaaagaaccagaaataggtataagagaatgtatttattcttgtctggcagaagtttggtgatttttatttttatctgagttcacttatttggtagtttacaaatattatgtgtgtagtatctattacctgaatgatcatatgctggcaataaacattatttttaaatagaagtaatattccttccaggacatattttctaccctaagtttcccattccttctgactttcttcaatgcgaaaggcaaagacagcaacaccacaattttgtttgggatacctaaaggtgtctgccataacccatctccaagtttttgagggtgatcttggcttatcaacagcaagccatcagactgttacagggcaggggtccagatcaagaccccaagagagggttcttggatctcacacaagaaagaattcagggcaagtccacagggcaaagtgaaagcaagtttattaagaaagcaaagaaataaaagaatggccgttccatagacagagcagtcctgagggctgctggttgcccatttttatggttaattcttgatgatatgtgaaacaaggggtggattattcatgcctcccctgtttagaccatctagggtaacttcctgatgttgccatggcatttataaactgtcatggtgttgatgggagtgtagcagtgaggacaaccagaagtcactctcatcgccgttttggttttggcaggttttggccagctcctttactgcaacctgttttatcagcaaggtctttatgacttgtattttgtgctgacctcctatctcatgctgtaatttagaatgccttaactgtctgggaatgcagcccagtaggttttagcctcattttacccagttcctatttaagatggagttgctctggttcatatggctctgacaaaactatggatcaatagggaagtttagggaaaagaactgttctgatgagagcttaatgccttgttctatcttttaaagcttgaataaatatggccccactcctcccaaagctcgccagctagcttctctatcagaatcccttggtgttcatcttacttagaaagagacatgaggagtacctcaaggtgatacagatgcttgaggtacaggaaaccacatcgtgctttattagctaaaga

SEQ ID NO: 694773 - DNA, 2637 bp, Homo sapiens
ttatcttccagattggcaaactcctactgacagtactcttgtgttttgaatacataaaaataaaagtgatctactacactgggaaaacagaaaagaacttttaaaacatttaaagatagctgtggactaagagtcaaaacatctttttgtttaatatgatggatgtttatttttcttttgtgtttgtctctatacctgataccccttttagacatttttctaatctgtctgctgtctgctgtagatacaggaagcagaaagatcttatcacctgaaaatgcactttctgtatttcttctgagaaaatgtattagagttttcagaaataaactgcagaaatgttgggtataatgacatggaaaatgcccatctatcaaacctcaactgctgatttctcaaagaattttgaaacaatataataggaattttctctttctgccaaagtctataccactaaacatctcagaagagactttatgggcagtttctctgtagatgtattgtttgcatgcaagaacatcagtctctttaaatgttggtcagagagaacacaggttgtgaattaggtgtgccagcttgtccagaaacatggcaaagataaagaatcaaatgccaaatgttctcttctttgaaaacccactttgtaatattatgttttatatcagcatgtgagcattgaattttcatgtgcaaatagttagagtttcagttctctctcccacttttaaattacctacagaaaaatgtcatctttaagtaaaattgaaagtaaaaaactagaaaaagaaatttaaagacacaagaaaaatgttatatgagcctcaaaacataaatagttcctacatatcaataagaaaaatggagcactataacagatgtatcaaatgtacatacaaatcgcaattgaacaaatgccaagcccataaagaaaatgttgtacacatttaaaaactaaaatttatttgtatattttgttatcaaaatttattttttgaaattgttttaatgataatatagcatgtgagttctctaatacatttctgatagcgctataagtgggtacagtctttcttgaaaataatttgttgatatgtgtcacttgtcttcgaaacatatatattacttgacctagaaatctctcttctaggaatttgaggacattgtcagagatacatttgaagtttattccattaagatggatattaaaacaatacttatatgtttaagcacaagtcctaaatgttgaaaaattgattatgtaaacaatggtacattctttcaatggacttctaagcaactgttaaaattatttataagaatatttaaagcacataagaaattgtccaatatatcatgtagtgaaaatatctacataaaattatgaaatcagtataaattcctktttttgttaaaaatcgagtcagctaactagaaaattcatatattatttaatgtcattacctattattatgtatttttatatatgcatatggaaagaaccagaaataggtataagagaatgtatttattcttgtctggcagaagtttggtgatttttatttttatctgagttcacttatttggtagtttacaaatattatgtgtgtagtatctattacctgaatgatcatatgctggcaataaacattatttttaaatagaagtaatattccttccaggacatattttctaccctaagtttcccattccttctgactttcttcaatgcgaaaggcaaagacagcaacaccacaattttgtttgggatacctaaaggtgtctgccataacccatctccaagtttttgagggtgatcttggcttatcaacagcaagccatcagactgttacagggcaggggtccagatcaagaccccaagagagggttcttggatctcacacaagaaagaattcagggcaagtccacagggcaaagtgaaagcaagtttattaagaaagcaaagaaataaaagaatggccgttccatagacagagcagtcctgagggctgctggttgcccatttttatggttaattcttgatgatatgtgaaacaaggggtggattattcatgcctcccctgtttagaccatctagggtaacttcctgatgttgccatggcatttataaactgtcatggtgttgatgggagtgtagcagtgaggacaaccagaagtcactctcatcgccgttttggttttggcaggttttggccagctcctttactgcaacctgttttatcagcaaggtctttatgacttgtattttgtgctgacctcctatctcatgctgtaatttagaatgccttaactgtctgggaatgcagcccagtaggttttagcctcattttacccagttcctatttaagatggagttgctctggttcatatggctctgacaaaactatggatcaatagggaagtttagggaaaagaactgttctgatgagagcttaatgccttgttctatcttttaaagcttgaataaatatggccccactcctcccaaagctcgccagctagcttctctatcagaatcccttggtgttcatcttacttagaaagagacatgaggagtacctcaaggtgatacagatgcttgaggtacaggaaaccacatcgtgctttattagctaaaga

SEQ ID NO: 694774 - DNA, 573 bp, Homo sapiens
tctttctttctttcttttttttttttgagacggagtctcactctggcccaggctggagtgcagcggcgtgatcttggctcactgcatgcacctctgcctcccaggttcaagcgattcttctgcctcaggccccygagtagctgggactacaggtgcctaccaccatgcctggctaatttttgtatttttagtggagaggggtttcactgtgttagccaggatggtctcgaactcttgacctcgtgatctgcccacctcggcctcccagtaaatgttttaaacagcatctgaagacatctttttactgataatagaaaaactttgctttacattagacgttttttctcttaactgctctacttgttttcttgtttaacctgcttgcctatctacttaccatgcttacctatctacctgcttttcaaaatataaaaattgtttataagatagctaaattattttctccatacatttttcatacatttctttaaaaaattgtaatagcatatgaggtgggcctatgttttttaaataaataataacaaaagcaaaaaaccctgatggtatataatg

SEQ ID NO: 694775 - DNA, 573 bp, Homo sapiens
tctttctttctttcttttttttttttgagacggagtctcactctggcccaggctggagtgcagcggcgtgatcttggctcactgcatgcacctctgcctcccaggttcaagcgattcttctgcctcaggcccctgagtagctgggactacaggtgcctaccaccatgcctggctaatttttgtatttttagtggagaggggtttcactgtgttagccaggatggtctcgaactcttgacctcgtgayctgcccacctcggcctcccagtaaatgttttaaacagcatctgaagacatctttttactgataatagaaaaactttgctttacattagacgttttttctcttaactgctctacttgttttcttgtttaacctgcttgcctatctacttaccatgcttacctatctacctgcttttcaaaatataaaaattgtttataagatagctaaattattttctccatacatttttcatacatttctttaaaaaattgtaatagcatatgaggtgggcctatgttttttaaataaataataacaaaagcaaaaaaccctgatggtatataatg

SEQ ID NO: 694776 - DNA, 1991 bp, Homo sapiens
tccttggtttgtgacagcataaatccaatttctgcctccatcttcatggggctgtctttcctctgtgtatttttatctctgtgtcttttctcttcttttaggggcgccagtcacattagattagggctcacgctaatgatcttaaattgattaaatctgcaaagactgttgtttccaaataaggtcctgttcccaggtactggtagttaggacttcagcctattgtgtccctccttggtgggagggacacaattccacctataacattgagtaaagaccacgtaggctctctctgtattgtttttcacaaactgtacatgaacctaccattacctcagtaaaaaattcaattcaaaataaaaagcaagaagggcacagcaagggcaaccaaagtggttggtatgcagcacaggggccactttaagaatcaggtttaataatctgggatgtgtgtgtgcagtactgtgcaaagcaggtctagctgtatgtatgaggccaggacccagagcaaattataataacctggtccagtcaattaccctgtgggacccagaaaarataatcactatgacccttgccccacctccctaggactgatgtaccctatattgctgattcagggcatagtggataaattgatactttttgtgtgtgaatgaagaaagaaagcacaaagcctgacattcttcagatttgcttgggtttatccccatgagccactttttagtgtttttagtagagttagtttgaagatagggcaagatgttgttatagatgaaattaatgcatattcataggaaagttgaaatgattcaataaatctatgcaaaacccaaagtacagagccagacacatattgttcaataaatgtaagcaagtattatattatatgtgtaattcattaactgatttgaatatcaaatggatcattctcattcctccaaaatgcctgaggtcttttggggtaaaaatgaaattaaaccagatatatctccaaggtgataaatttgggataatgtagagataaaatctccaagctcttctggcttcaaattcaggcatagttaaataagtgatcatttgaatttgtacatgtaatcacccaaaagttaatatgatctggtgcaagctctttgcaacttctaggacttcgtaactaaatcagtcctccctgctacatagaaattgaagagcttgtaaacatctccctgttggagtcaggcaggagaccatctttcagctgtttaataagagttcagattagtgtcaacaaactgaccctactaagacagacaagaatttgatttgtattttttaaaacctcaataaatttactttcaccttttcagctatttaatgcctctatttgtgttcactcattatcaacaaagataaagtacttatttagattttttaaaaaaattatctcttttcaaatgaaaaccatttgtgaaagcacattgatgggaatgtacctaaacaaggatatacctcctaattagctctttttagttgctcacattgctgtaattaaagctcattgaggccaattcaaatgaagaactgtcttctttattttttaaagtatcatttcaaatgattttgaaactgacattatcctcattatcccttcttagaaatgagctttcatgattaaagaacagaaagtgagattagctcaatggttgatgaaggtttattattgttttctttccttttgttttgcttccgttttgtttttgaccgttatacttattatttggcctttgttttgcaccaaaactcttgtaatatgcatgtattcaagtcagactgaaaccatctttgcaaaaattataagtgagtaaattatgagagtgaaagagacctgacctaatcaatccattttgcttctaacctccaaactgtccttgtttattcctgggcaaaggctgaactaaccatgggaggaacttagtttatagtttaactttgaaactaagatgataaca

SEQ ID NO: 694777 - DNA, 1221 bp, Homo sapiens
  misc_feature 1218: n = A,T,C or G
tggtgttcttcgtaatgtacttaattgctcctcagctctccagtaccagctcatttcaccttcacaaaccttttaataatgatacacctgtgagttaaattttgtartataccctgagtttatatttaatgaccatcttatggatcaaacctaacttctaattgtagatttttcatggaggctctgtttcacaattatgctgtcttccttcatcacttcaaatcatagacactgttagaacacaatttatttttttttaattttatgagacacagtctcaatgtgtcgcctaggctggagtatagtgatgtgattatagctcactgcagtcttgaactcctgcctcagcctcttgaatagctgggactacaggcacgtgccagtttgcttgcctggaaattttatttttaatttttagtagagagaaggtcccaccatgttgcccaggctggtctcaaactcctgggctcaagtgttcctcctggcttggcctcccaaagccctgagattataggcgtgagccatggcacctggccctgaagcaccatttaaaggtcctcatcagcatcagaaagactccttcccttttcctgattcccatagtcctttctttccccgtgttctgtgtcatttatagtctgccccattttagagttacttctttttatctcagttccaataccaaactgtacacctcttaaaaacatttttgtgttcctctgtgttttggctttccctgtgtctagaccagaatcttacatattaaattagttcaatccagttttgctaagaatatgatttttaaaatatcaataatttagtaacaaacataatacgggtaagaaaatagcacctaaagcatcccaaattagagaaaaagaatatgatatggatattacaaatgcaaacttttgaatcagacaggtttgcaactaatttatggaaacttggtgaataaattcaaataatataagtcttagtttcttaagacctgtaatatggagttatttctgggacatgctttatagagttttttcagaatttaatgagattatgccctttaagcagctcagtgtggcaaatacccaataaatgttactattatttttcagctaaatgatctgtcacagtctttgtgtctctctgcctctcaacacatacacatgcacgcgcgtgcacacacacagacacccaccccagatagatatgtggccttancag

SEQ ID NO: 694778 - DNA, 1221 bp, Homo sapiens
  misc_feature 1218: n = A,T,C or G
tggtgttcttcgtaatgtacttaattgctcctcagctctccagtaccagctcatttcaccttcacaaaccttttaataatgatacacctgtgagttaaattttgtagtataccctgagtttatatttaatgaccatcttatggatcaaacctaacttctaattgtagatttttcatggaggctctgtttcacaattatgctgtcttccttcatcacttcaaatcatagacactgttagaacacaatttatttttttttaattttatgagacacagtctcaatgtgtcgcctaggctggagtatagtgatgtgattatagctcactgcagtcttgaactcctgcctcagcctcttgaatagctgggactacaggcacgtgccagtttgcttgcctggaaattttatttttaatttttagtagagagaaggtcccaccatgttgcccaggctggtctcaaactcctgggctcaagtgttcctcctggcttggcctcccaaagccctgagattataggcgtgagccatggcacctggccctgaagcaccatttaaaggtcctcatcagcatcagaaagactccttcccttttcctgattcccatagtcctttctttccccgtgttctgtgtcatttatagtctgccccattttagagttacttctttttatctcagttccaataccaaactgtacacctcttaaaaacatttttgtgttcctctgtgttttggctttccctgtgtctagaccagaatcttacatattaaattagttcaatccagttttgctaagaatatgatttttaaaatatcaataatttagtaacaaacataatacgggtaagaaaatagcacctaaagcatcccaaattagagaaaaagaatatgatatggatattacaaatgcaaacttttgaatcagacaggtttgcaactaatttatggaaacttggtgaataaattcaaataatataagtcttagtttcttaagacctgtaatatggagttatttctgggacatgctttatagagttttttcagaatttaatgagattatgccctttaagcagctcagtgtggcaaatacccaataaatgttactattatttttcagctaaatgatctgtcwcagtctttgtgtctctctgcctctcaacacatacacatgcacgcgcgtgcacacacacagacacccaccccagatagatatgtggccttancag

SEQ ID NO: 694779 - DNA, 594 bp, Homo sapiens
cccaaggattaaggacagctgaatttgacacctataaagcatcactcttgaattcttcctgaattcagtaaaatgagtcagttaattaactcatcgctagagttttttgccatatcagtatattcccagtggaacaatgaagattaacctgaaaaataagtcatggttatagctattgcatcctgaatggcacaaaacatcaaggaaatattctttcagtattcaaaagctattattcagcaatgaagttgctcatgccattgatgaacgagtaagggaagttccagcacggtagtgcagaagctgaaaggaggctcactttagtgaatgtaatttttatgagggtaaaaaatagtttawcagatcatatatcagatgaaatgataataaatttattgcgaaaagggttagcagattaggatgcaatcttatttgtcaaatcatgcttgaattataccctagcttgactatgcactacgaatttggcaaaaatcaaggaaaacattctatgagaatcagttggctgtgtggaatttataagagagtatgaatattcgatattttttgtaagttgtgacctcctgattgaaagca

SEQ ID NO: 694780 - DNA, 594 bp, Homo sapiens
cccaaggattaaggacagctgaatttgacacctataaagcatcactcttgaattcttcctgaattcagtaaaatgagtcagttaattaactcatcgctagagttttttgccatatcagtatattcccagtggaacaatgaagattaacctgaaaaataagtcatggttatagctattgcatcctgaatggcacaaaacatcaaggaaatattctttcagtattcaaaagctattattcagcaatgaagttgctcatgccattgatgaacgagtaagggaagttccagcacggtagtgcagaagctgaaaggaggctcactttagtgaatgtaatttttatgagggtaaaaaatagtttaacagatcatatatcagatgaaatgataataaatttattgcgaaaagggttagcagattaggatgcaatcttatttgtcaaatcatgcttgaattataccctagcttgactatgcactacgaatttggcaaaaatcaaggaaaacattctatgasaatcagttggctgtgtggaatttataagagagtatgaatattcgatattttttgtaagttgtgacctcctgattgaaagca

SEQ ID NO: 694781 - DNA, 631 bp, Homo sapiens
ttgaggtcaggaattcaagactagcctggccaacatggcaaaaccatgtctctactaaaaaatacaaaaattagccaagcatgatggtgcatgcctgtaatctcagcttctcaggaggctgaggcaggggaattgcttgaacctgggaggcagaggttacagtgggccaagatcatgccactgcactctagcctgggtgacagagcaagaccttgtctcaaaaaatgaatcatcctattttgtctattttgcagacaaattgtagtcctgagcaggatacccagggtttaagaataatattaagtgcaacaaaaaaattatgtaacaatctacataaaactctgtataagtagctgctttgaatattcctacgttttaatccccatatgtcttgaggaagtatattggcatgggtagaagcaggaagagattaggagaatggaaagaagaaattcttctaacacattagcaaaaagtgttaagtattggggaaaagatcaaagggcttatcgccatcagagaacgctgtcttggtgtgcctgaaaatcccccmtctaagacacaaagggaaacagggaagtcaaaacggataccagacagttcatgcaatgagacgagagtatttcagcat

SEQ ID NO: 694782 - DNA, 593 bp, Homo sapiens
taagaggattaagcaaattctacagcatataaatggacatatttggaagatttttttccccaagcaatttcagaaaacacacatgcatcatttgctaaaactctgcaggtgtattaatgagttcatctcacatgaatggacagtcactgagggaacttcatatgtaggcttgagttcaggtatatgaaatgcaggctaagttttaattagaatttatttacagctcgaagctgctcctktgtttttctgcctgaagtcagtaatgaaccattcctctttgcctagtcattagtattcagagctccatcagcctgcagttcaaaccctttcccttgtttttgtcagagaagatgatggagcaaggttgcttagaaacacttagccacactctcaacgggaattatcaatctgtgctgtatgttcacccccacacgcaggggagaaaattgagttttactgctgatgacgttaattgattgcaagttgttttagtgggagtgtgatgttgaaaaccagatttcctttcatttttatgcattagatgcagagaagctatacagtgacatgttcattccactgtaactaaaaatatc

SEQ ID NO: 694783 - DNA, 593 bp, Homo sapiens
taagaggattaagcaaattctacagcatataaatggacatatttggaagatttttttccccaagcaatttcagaaaacacacatgcatcatttgctaaaactctgcaggtgtattaatgagttcatctcacatgaatggacagtcactgagggaacttcatatgtaggcttgagttcaggtatatgaaatgcaggctaagttttaattagaatttatttacagctcgaagctgctcctttgtttttctgcctgaagtcagtaatgaaccattcctctttgcctagtcattagtattcagagctccatcagcctgcagttcaaaccctttcccttgtttttgtcagagaagatgatggagcaaggttgcttagaaacacttagccacactctcaacgggaattatcaatctgtgctgtatgttcacccccacacgcaggggagaaaattgagttttactgctgatgacgttaattgattgcaagttgttttagtgggagtgtgatgttgaaaacyagatttcctttcatttttatgcattagatgcagagaagctatacagtgacatgttcattccactgtaactaaaaatatc

SEQ ID NO: 694784 - DNA, 642 bp, Homo sapiens
tcctcatctgcaacaactacaaatgaaaaccatcaagactccaggactatgtgccgagacaagcctcttttctggcaaatgtcttgaccttatcaaaaaagctcagtaaatttcttggccttatcaaaaaagttctgtggttactagcataaaaataccttcctctggagaacccttctcttttcattatagtattgtctatcatgagattttgtgggtgctctctacctgatataacctgctcagtgcaactgaatcatagtcactgcatcatatcaaagttttgaactaggagtcagtcatctatcacagttcacatccatgtgagtagcttcaagagagttcaaaatccaggaagagcagagagaggaagatgaaaaacagacgtctctcctcctccaaacctggctctatagcattattctgactcccacaatatatatattcaaacacaggaagaagaaaacactccaaagccttttatcttcaaagatatatcttatggtacatatttaattttcattgataagcaaaagaagaaaaacttggccaggcacagtggctcatgcctataatcacagtacttttggatgctgcagtgggaagatcrcttgagcccaggagttcaagaccaggctgggc

SEQ ID NO: 694785 - DNA, 623 bp, Homo sapiens
tgaccctgtcatctctattataccatccacagcaatttgtttttatgtcgcagttattttctgagctgtcacaaaactgccttacaaagacagctcattatcagcccaaaggaaaagaatttgaaatgatgaagtgagtaaaggtcccgaagaggaggaggaggaggggacagaggagtctaagctgttggaatgtcagggaaatgagcaacmttgttctagggacggaataattaactgttgcttacaacatagccagcaagacttgattttatctagaaattatcagattagaaatggctctccatagacagagtgtggaggactgggtgaatagatagaaggcctgaatgtacgtccaagaaaacacgaggcatgacattttagagagtgggttgaagctcattagaagttagttatagaaagcccagcttaatgtctttgtgtagggaatagcggtgacttccaggtgggaaagttttatctgaacatgtatggaccataaagattacccacatgccaggctgtgtcagaaaatgctttgctatttttctatatagttttctctcatttccctcctccccaccccagggatctcatctagttttcttcactcttgaaat

SEQ ID NO: 694786 - DNA, 623 bp, Homo sapiens
tgaccctgtcatctctattataccatccacagcaatttgtttttatgtcgcagttattttctgagctgtcacaaaactgccttacaaagacagctcattatcagcccaaaggaaaagaatttgaaatgatgaagtgagtaaaggtcccgaagaggaggaggaggaggggacagaggagtctaagctgttggaatgtcagggaaatgagcaacawtgttctagggacggaataattaactgttgcttacaacatagccagcaagacttgattttatctagaaattatcagattagaaatggctctccatagacagagtgtggaggactgggtgaatagatagaaggcctgaatgtacgtccaagaaaacacgaggcatgacattttagagagtgggttgaagctcattagaagttagttatagaaagcccagcttaatgtctttgtgtagggaatagcggtgacttccaggtgggaaagttttatctgaacatgtatggaccataaagattacccacatgccaggctgtgtcagaaaatgctttgctatttttctatatagttttctctcatttccctcctccccaccccagggatctcatctagttttcttcactcttgaaat

SEQ ID NO: 694787 - DNA, 623 bp, Homo sapiens
tgaccctgtcatctctattataccatccacagcaatttgtttttatgtcgcagttattttctgagctgtcacaaaactgccttacaaagacagctcattatcagcccaaaggaaaagaatttgaaatgatgaagtgagtaaaggtcccgaagaggaggaggaggaggggacagaggagtctaagctgttggaatgtcagggaaatgagcaacattgttctagggacggaataattaactgttgcttacaacatagccagcaagacttgattttatctagaaattatcagaytagaaatggctctccatagacagagtgtggaggactgggtgaatagatagaaggcctgaatgtacgtccaagaaaacacgaggcatgacattttagagagtgggttgaagctcattagaagttagttatagaaagcccagcttaatgtctttgtgtagggaatagcggtgacttccaggtgggaaagttttatctgaacatgtatggaccataaagattacccacatgccaggctgtgtcagaaaatgctttgctatttttctatatagttttctctcatttccctcctccccaccccagggatctcatctagttttcttcactcttgaaat

SEQ ID NO: 694788 - DNA, 623 bp, Homo sapiens
tgaccctgtcatctctattataccatccacagcaatttgtttttatgtcgcagttattttctgagctgtcacaaaactgccttacaaagacagctcattatcagcccaaaggaaaagaatttgaaatgatgaagtgagtaaaggtcccgaagaggaggaggaggaggggacagaggagtctaagctgttggaatgtcagggaaatgagcaacattgttctagggacggaataattaactgttgcttacaacatagccagcaagacttgattttatctagaaattatcagattagaaatggctctccatagacagagtgtggaggactgggtgaatagatagaaggcctgaatgtacgtccaagaaaacaygaggcatgacattttagagagtgggttgaagctcattagaagttagttatagaaagcccagcttaatgtctttgtgtagggaatagcggtgacttccaggtgggaaagttttatctgaacatgtatggaccataaagattacccacatgccaggctgtgtcagaaaatgctttgctatttttctatatagttttctctcatttccctcctccccaccccagggatctcatctagttttcttcactcttgaaat

SEQ ID NO: 694789 - DNA, 623 bp, Homo sapiens
tgaccctgtcatctctattataccatccacagcaatttgtttttatgtcgcagttattttctgagctgtcacaaaactgccttacaaagacagctcattatcagcccaaaggaaaagaatttgaaatgatgaagtgagtaaaggtcccgaagaggaggaggaggaggggacagaggagtctaagctgttggaatgtcagggaaatgagcaacattgttctagggacggaataattaactgttgcttacaacatagccagcaagacttgattttatctagaaattatcagattagaaatggctctccatagacagagtgtggaggactgggtgaatagatagaaggcctgaatgtacgtccaagaaaacacgaggcatgacattttagagartgggttgaagctcattagaagttagttatagaaagcccagcttaatgtctttgtgtagggaatagcggtgacttccaggtgggaaagttttatctgaacatgtatggaccataaagattacccacatgccaggctgtgtcagaaaatgctttgctatttttctatatagttttctctcatttccctcctccccaccccagggatctcatctagttttcttcactcttgaaat

SEQ ID NO: 694790 - DNA, 602 bp, Homo sapiens
cttctggtttaaaaaaaattgttctgcatgttcatartcaagaaggatcaatttgatctgatctggtcacagaggacctcagaaattttgtattttaaagagaagttgggaagttaaaaatggcctgaatacaaatttgggactcagaagacatatttcatagaatccactctcttaaataaaggagggttatatgggaatcatgggaaataaagattagatggtaaagaactttgaaagccaaggacattatcccacaggcactgcagaccaatagaaggcttttgagcaagtaaatgatatagtgaaggcagtaggactgtcatcagtaggaccaactgatgacaaagtagaagaaggattgtgcaagaagcacactgaaggcatgaaattctgctagtgggggccatgccgtgctgggcaggaagagataattgcctactccacaggttaaggaaaaaagcgaagaataaaaagctaatgagaaacgtgttatgatccaccaaccaacttgttactaatgattagtggtgagctggtaacaagggataaatttttaattcaaagaggtttaacaacagttccatttaattttaaaaagt

SEQ ID NO: 694791 - DNA, 602 bp, Homo sapiens
cttctggtttaaaaaaaattgttctgcatgttcatagtcaagaaggatcaatttgatctgatctggtcacagaggacctcagaaattttgtattttaaagagaagttgggaagttaaaaatggcctgaatacaaatttgggactcagaagacatatttcatagaatccactctcttaaataaaggagggttatatgggaatcatgggaaataaagattagatggtaaagaactttgaaagccaaggacattatcccacaggcactgcagaccaatagaaggcttttgagcaagtaaatgatatagtgaaggcagtaggactgtcatcagtaggaccaactgatgacaaagtagaagaaggattgtgcaagaagcacactgaagrcatgaaattctgctagtgggggccatgccgtgctgggcaggaagagataattgcctactccacaggttaaggaaaaaagcgaagaataaaaagctaatgagaaacgtgttatgatccaccaaccaacttgttactaatgattagtggtgagctggtaacaagggataaatttttaattcaaagaggtttaacaacagttccatttaattttaaaaagt

SEQ ID NO: 694792 - DNA, 602 bp, Homo sapiens
cttctggtttaaaaaaaattgttctgcatgttcatagtcaagaaggatcaatttgatctgatctggtcacagaggacctcagaaattttgtattttaaagagaagttgggaagttaaaaatggcctgaatacaaatttgggactcagaagacatatttcatagaatccactctcttaaataaaggagggttatatgggaatcatgggaaataaagattagatggtaaagaactttgaaagccaaggacattatcccacaggcactgcagaccaatagaaggcttttgagcaagtaaatgatatagtgaaggcagtaggactgtcatcagtaggaccaactgatgacaaagtagaagaaggattgtgcaagaagcacactgaaggcatgaaattctgctagtgggggccatgccgtgctgggcaggaagagataattgcctactccacaggttaaggaaaaaagcgaagaataaaaagctaatgagaaacgtgttatgatccaccaaccaacttgttactaatgattagtggtgagctggtaacaagggataaatttttaaytcaaagaggtttaacaacagttccatttaattttaaaaagt

SEQ ID NO: 694793 - DNA, 1543 bp, Homo sapiens
tgatcctcaactcttccaagtctttgaaayagggtctcactcagctgcccaggctagaggtcagagatgtgatcgtggatcactgccacctccgccttctggcttcaagcgattcccctgtctcagcctccccagtagctgggattacaggcatgggccatcacgcccagctaatttttgtatttttagtagagacgaggttttgccatgttggccaggctggtcttgaactcctggcctcaagtgatcctctcaccttggactcccaaagtgctgggattacaggcatgagccaccaggcccggacacttccaagtctttatttattaaactagtggtacccagaacactcgccattgcccctgcttctcctgtatcacccgctgctcagatcggcttttcacatctccctgtcatcagcaagttctctttggtcacctttctcaaagtatatactgaaagctctctatcattactgtcagagctttggacaatctcttgctacactaacatggataatttcagtagcctccaaacagatcttgttgtctctactcttgcacagcttaatccatcttccacacagctacaggagcactttctccaaagcacagaaactgctcatcagatacccttcccacttgctaatatgaaccgtaactgcctagaggtgagtttgtttcagtcagcttttttcaattcactgggagaaaaattagctttaatacaaaaagctgtgcataatgctttagaataggcaaggaaagcagtctcttttaaaagcatctgtcagataaaatgcaccttagcaatggcataaagaaaacatcttgcctgtagaagaaatttatgaggcaagaaaaaaaagatgaaaggaggagcctattgcagaagtaaattagaaatctaggtaaaagaaaaatatcagggcagcacctcctaaattaaacttaattgaaagagattaagctgaattaaaattgattaggccaagcctggcatcattatgaattttaataataataataataatattcattgaacacctagttgatatagggtaagacactgtcccttcccctgagtttataatccaaattagggagggagagtgagttggctgaaaaagtaaaagcgaaatagacttcaaggaaatgagttctaatagcactgactccatttggagagtagtttagtgttgtaatgggagtaagtaacctcacagaatgttagattctttgtaattatttaagggaggaataaggttctggaactttagccaatactgtagttactggtgaggtaaaaaagtgtcagtctgggtggaaaaggaaacaaaaaataagggaaaacagtatgagatatggtaaacaaggaagaaaactgcattattactccatttaatggaaaataagcgttcaaaaaacatgtagtttcttgtagatctttgcagtatcttaattttctaatcattaattctatcatataattataccttgattttttattttattttactgctgaaaaagtcaatagcttattg

SEQ ID NO: 694794 - DNA, 1543 bp, Homo sapiens
tgatcctcaactcttccaagtctttgaaatagggtctcactcagctgcccaggctagaggtcagagatgtgatcgtggatcactgccacctccgccttctggcttcaagcgattcccctgtctcagcctccccagtagctgggattacaggcatgggccatcacgcccagctaatttttgtatttttagtagagacgaggttttgccatgttggccaggctggtcttgaactcctggcctcaagtgatcctctcaccttggactcccaaagtgctgggattacaggcatgagccaccaggcccggacacttccaagtctttatttattaaactagtggtacccagaacactcgccattgcccctgcttctcctgtatcacccgctgctcagatcggcttttcacatctccctgtcatcagcaagttctctttggtcacctttctcaaagtatatactgaaagctctctatcattactgtcagagctttggacaatctcttgctacactaacatggataatttcagtagcctccaaacagatcttgttgtctctactcttgcacagcttaatccatcttccacacagctacaggagcactttctccaaagcacagaaactgctcatcagatacccttcccacttgctaatatgaaccgtaactgcctagaggtgagtttgtttcagtcagcttttttcaattcactgggagaaaaattagctttaatacaaaaagctgtgcataatgctttagaataggcaaggaaagcagtctcttttaaaagcatctgtcagataaaatgcaccttagcaatggcataaagaaaacatcttgcctgtagaagaaatttatgaggcaagaaaaaaaagatgaaaggaggagcctattgcagaagtaaattagaaatctaggtaaaagaaaaatatcagggcagcacctcctaaattaaacttaattgaaagagattaagctgaattaaaattgattaggccaagcctggcatcattatgaattttaataataataataataatattcattgaacacctagttgatatagggtaagacactgtcccttcccctgagtttataatccaaattagggagggagagtgagttggctgaaaaagtaaaagcgaaatagacttcaaggaaatgagttctaatagcactgactccatttggagagtagtttagtgttgtaatgggagtaagtaacctcacagaatgttagattctttgtaattatttaagggaggaataaggttctggaactttagccaatactgtagttactggtgaggtraaaaagtgtcagtctgggtggaaaaggaaacaaaaaataagggaaaacagtatgagatatggtaaacaaggaagaaaactgcattattactccatttaatggaaaataagcgttcaaaaaacatgtagtttcttgtagatctttgcagtatcttaattttctaatcattaattctatcatataattataccttgattttttattttattttactgctgaaaaagtcaatagcttattg

SEQ ID NO: 694795 - DNA, 1543 bp, Homo sapiens
tgatcctcaactcttccaagtctttgaaatagggtctcactcagctgcccaggctagaggtcagagatgtgatcgtggatcactgccacctccgccttctggcttcaagcgattcccctgtctcagcctccccagtagctgggattacaggcatgggccatcacgcccagctaatttttgtatttttagtagagacgaggttttgccatgttggccaggctggtcttgaactcctggcctcaagtgatcctctcaccttggactcccaaagtgctgggattacaggcatgagccaccaggcccggacacttccaagtctttatttattaaactagtggtacccagaacactcgccattgcccctgcttctcctgtatcacccgctgctcagatcggcttttcacatctccctgtcatcagcaagttctctttggtcacctttctcaaagtatatactgaaagctctctatcattactgtcagagctttggacaatctcttgctacactaacatggataatttcagtagcctccaaacagatcttgttgtctctactcttgcacagcttaatccatcttccacacagctacaggagcactttctccaaagcacagaaactgctcatcagatacccttcccacttgctaatatgaaccgtaactgcctagaggtgagtttgtttcagtcagcttttttcaattcactgggagaaaaattagctttaatacaaaaagctgtgcataatgctttagaataggcaaggaaagcagtctcttttaaaagcatctgtcagataaaatgcaccttagcaatggcataaagaaaacatcttgcctgtagaagaaatttatgaggcaagaaaaaaaagatgaaaggaggagcctattgcagaagtaaattagaaatctaggtaaaagaaaaatatcagggcagcacctcctaaattaaacttaattgaaagagattaagctgaattaaaattgattaggccaagcctggcatcattatgaattttaataataataataataatattcattgaacacctagttgatatagggtaagacactgtcccttcccctgagtttataatccaaattagggagggagagtgagttggctgaaaaagtaaaagcgaaatagacttcaaggaaatgagttctaatagcactgactccatttggagagtagtttagtgttgtaatgggagtaagtaacctcacagaatgttagattctttgtaattatttaagggaggaataaggttctggaactttagccaatactgtagttactggtgaggtaaaaaagtgtcagtctgggtggaaaaggaaacaaaaaataagggaaaacagtatgagatatggtaaacaaggaagaaaactgcattattactccatttaatggaaaataagcgttcaaaaaacatgtagtttcttgtagmtctttgcagtatcttaattttctaatcattaattctatcatataattataccttgattttttattttattttactgctgaaaaagtcaatagcttattg

SEQ ID NO: 694796 - DNA, 1049 bp, Homo sapiens
aggctcactaccctttaagaggaggccgccatggagtctcccgggagaacaagaggcaggcttttctccagaggttgtttgcagggacccacagggaggagaggctggctccgggtctctctaaaggaatctcccctcccccagtgcggggccctggcatccaggagggcacagggccatgggcggccgcgagctcctgggcccgcccagctcctgcccctgtgcctgggaagcaggcagggctgggggcggggaacaaaggggcctgaaagtgcccatatatagtcactggggtgaacggcaagccatgctgcagagatgcctcccaagcccagggcyggccggccccagctcagccaccggggccccgagggcagcccggccctgggctgggggtggcctccctggtagtctgtgaaggggtagagcatcagcctccgcatagtcatgcctcaagaaatgtttgttgattgaaaataaaagtccccccagccctccatagtcaggcttgaggacatttcaggagctgatgttggaatctggaggctggaatccgggctgtgctgttggccagagctgcctggggtccctcatggagggcgttgggagctgggtgcctgctgagagaagacttgctagcaacccagcccccaccccacaaaatgctagtgcccccctctttacagggacacttcagatgctccctccccacccctactgtcctggggcttccgcccagtgggctggtgttttctggaggagttaccttctcactcctgggcactgcctagagtcagggggcagctgtgggccttccttggttcttctgcggcggtcttggagggagtcagcgttggccctgcctttggatcggagcagaaggaagttgtcccacatcttcctcctcccagggacccctgaggcataccctctggccagggcccccacccaggccctgggcatctgcctcgggggctgtgcccatctcccttctaccacccagctggtgtctgtgccaagaaaggggaagtaccatctttgctgaattc

SEQ ID NO: 694797 - DNA, 1049 bp, Homo sapiens
aggctcactaccctttaagaggaggccgccatggagtctcccgggagaacaagaggcaggcttttctccagaggttgtttgcagggacccacagggaggagaggctggctccgggtctctctaaaggaatctcccctcccccagtgcggggccctggcatccaggagggcacagggccatgggcggccgcgagctcctgggcccgcccagctcctgcccctgtgcctgggaagcaggcagggctgggggcggggaacaaaggggcctgaaagtgcccatatatagtcactggggtgaacggcaagccatgctgcagagatgcctcccaagcccagggccggccggccccagctcagccaccggggccccgagggcagcccggccctgggctgggggtggcctccctggtagtctgtgaaggggtagagcatcagcctccgcatagtcatgcctcaagaaatgtttgttgattgaaaataaaagtccccccagccctccatagtcaggcttgaggacatttcaggagctgatgttggaatctggaggctggaatccgggctgtgctgttggccagagctgcctggggtccctcatggagggcgttgggagctgggtgcctgctgagagaagacttgctagcaacccagcccccaccccacaaaatgctagtgcccccctctttacagggacacttcagatgctccctccccacccctactgtcctggggcttccgcccagtgggctggtgttttctggaggagttaccttctcactcctgggcactgcctagagtcagggggcagctgtgggccttccttggttcttctgcggcggtcttggagggagtcagcgttggccctgcctttggatcggagcagaaggaagttgtcccacatcttcctcctcccagggacccctgaggcatmccctctggccagggcccccacccaggccctgggcatctgcctcgggggctgtgcccatctcccttctaccacccagctggtgtctgtgccaagaaaggggaagtaccatctttgctgaattc

SEQ ID NO: 694798 - DNA, 646 bp, Homo sapiens
ggtactcaacagctcagtattttgacattttatatgctaaaataaaaatgaaaacaaaagcgaatacagaacgtgagatttttctcattaaaatttcttcctcgtgtgaagctttctgaggctgtatcttgatatttttgaacctttgccagctggaagaaaggacaaaacagctgttctaaactgccaagaaattggctggtgcatagaagagggaatttgtctttgttgtatattttgcctttgtcctgggagtgattattttgatcagcacttttggttgtacagatgtgagccaaatatctagcagagggtagctcctgattttagttaagtaattcactgctgagacttcagattatgatgtaaagtgttctgcttaatagtgataaaagctgacctgaaaagggtgttatatwcttttttttttttttttttttttttttttgagacagagtctcactctgtcacccaggctggagtgcaatgggacgatctcagctcactgcaagctctgcctcccggattcacgccattctcctgcctcagcctcccgagtagctgggaccacaggcacccgccaccacgtccagctaattttttgtatttttagtagagatggggtttcaccgtgttagccaggatg

SEQ ID NO: 694799 - DNA, 603 bp, Homo sapiens
acgtgcttccgtgctacattttttctactgtacggggagcatccatcactgtgtgggtaagtwtataacaggtccccaaacctcaactctccagctttcccctttctttctttcttttttttttttttgagatggagtttcactcttgtcacccaggctggagtccaatggcgtgatctcggcttgctgcaacctacacctccctggttcaagtgattctcctgcctcggcctcccaagtagctgagattacaggcacccgccaccacacccagctaatttttgtatttttagtagagacgggggtttctccatgttggccaggctggtctcgaactcctgacttcaggtgaaacgcccgcctcggcctcccaaagtgctgggattataggtgtgagccaccgcacctggccctggcttttccctgtcttggatgccacttcacactctgatgaaggctcttttcaacgttggccacgggcttcaagattcttcccccagctcaagctccttctaatttacttccatttggttcaggtattgcagactgttcagtgctctcagcctcacgacgggcagagcacccaccatcacagcccactgc

SEQ ID NO: 694800 - DNA, 603 bp, Homo sapiens
acgtgcttccgtgctacattttttctactgtacggggagcatccatcactgtgtgggtaagtttataacaggtccccaaacctcaactctccagctttcccctttctttctttcttttttttttttttgagatggagtttcactcttgtcacccaggctggagtccaatggcgtgatctcggcttgctgcaacctacacctccctggttcaagtgattctcctgcctcggcctcccaagtagctgagattacaggcacccgccaccacacccagctaatttttgtatttttagtagagacgggggtttctccatgttggccaggctggtctcgaactcctgacttcaggtgaaacgcccgcctcggcctcccaaagtgctgggattayaggtgtgagccaccgcacctggccctggcttttccctgtcttggatgccacttcacactctgatgaaggctcttttcaacgttggccacgggcttcaagattcttcccccagctcaagctccttctaatttacttccatttggttcaggtattgcagactgttcagtgctctcagcctcacgacgggcagagcacccaccatcacagcccactgc

SEQ ID NO: 694801 - DNA, 603 bp, Homo sapiens
acgtgcttccgtgctacattttttctactgtacggggagcatccatcactgtgtgggtaagtttataacaggtccccaaacctcaactctccagctttcccctttctttctttcttttttttttttttgagatggagtttcactcttgtcacccaggctggagtccaatggcgtgatctcggcttgctgcaacctacacctccctggttcaagtgattctcctgcctcggcctcccaagtagctgagattacaggcacccgccaccacacccagctaatttttgtatttttagtagagacgggggtttctccatgttggccaggctggtctcgaactcctgacttcaggtgaaacgcccgcctcggcctcccaaagtgctgggattataggtgtgagccaccgcacctggccctggcttttccctgtcttggatgccacttcacactctgatgaaggctcttttcaacgttggccacgggcttcaagattcttcccccagctcaagctscttctaatttacttccatttggttcaggtattgcagactgttcagtgctctcagcctcacgacgggcagagcacccaccatcacagcccactgc

SEQ ID NO: 694802 - DNA, 1960 bp, Homo sapiens
acatggctgatcttggtacagaaggaatccagctggaagtgatctgtgtgtagcatgtctcatagaaatacaaggagccttgtcttgtgaccctgtacctgtaaggcctcaaaggacctcactcataacagctaggatgactctatgaacccctatatgctggaaatagccccagcttaatttagtttaattcagttcacacttattaggttcctactaagaaaaataatttgcttgaacataattattttttgtgatttagtttatcctcattttaattggaagaaactggggattagagagggtaagtggcttatccaagttcatacractggttcttcctgccacatggcttcattttgataagaaatatgactttctcttctgtgataaaaataagatcttgtgccctggtgagttggacagtctgggagttctgcctgttctgattttttttcctggtgggatattggatgaaacattctaatactcaattctaaattcatggtaactttgggaaatgtatgtgcttgtgtacatgtgtgcgcatgtgtgtgtatgtgaaatagaatgtatgatagttgtcccagggtagatttcctgaaacaaactcatgtctattggggcactcatcataccttccctttactctgtgtctaatgctggtctcccttaggctcatcaattaggaaagcctatagctgttgccacataactgtctggaactctcaatgttgatatatcatttttatctgtttatagacaaatgaaaatttagccactttttttattacttaaattgaagacagctcaagcctgtctcaacaatgtgagaatgtcttctttttataatctcaagtccttatgatgcttatgcaaacctttttaaagaataaatataaaaggaatattgcccctgattatgtaaagctgatgtggcagacatggtagattgtcttgtttgacatctgtactatctcattctcgtctgctcttccatatagcgtttgtcaggaatccttgttttgaaggatcttgatatgttttggatacaaattttagtggcagcagtgctgaaggcaccattcactcttttgagtctagcagaagcaaagccacattaaagcccatagttcttagcagctttccaattcccagattgcagagagtgcagataagttactgtattcctgaagtggtttcctgattccctcatatatcagtcaagaatctccaaagaaacagaaaaaatagaagatatatatgttaaagaattggcttgagtgattttggggactggcaagtccaaaatttgtaggacaggccagctggctggaaactgagataggaagtgatatagtcttgggtgtgaaacctgtaggacaggctggcaggctggaagctcaggaaggatttacattaaaatgttgaggcaaaaagtaaaataaataaaatggtgaggtggaattctccattctctagaaaatcccaatttttgctcttaacaccttcaactgattagataatgtgtgcccacattatctttaaaagtaatgttctttaaagtcaactgattgtagatattaatcccatctacaaaatacctttatagcaatatctagattagtgtttgaccaaacaactgggcaccatagctgagccaaactgacacataaaattaaccgtcacatctagtttcctgactgtggcagagataacgatgaacttgatgggccacttaagcaggattcttctagaaatctgtcctggagtttcatcctagaatctgctatgacaaccagctcatctaagaaatttgtaagcatctaaccctctttctgcttaaaatagctagaatgatttgttatttgctactgaatctcatttatattttagcaaagtcttgatatcaaaacatgacggggaacatgagaaagaaactctgcagactaattatgct

SEQ ID NO: 694803 - DNA, 1541 bp, Homo sapiens
gaaggcagaagccagactgcagtggggtgagcaaatgtgagttcaggaagtggagatagtggaggctgatttggagaagtctggatgaggaggaacaaggagatgccttttttttttttttttaaggataaactatacttgaacattttttcccattaaacatacatgtattggggtacctgcccacagcctttttaatctgctgtggcacattgcctctactgagttgcatgatcttgtcttccctctgatcctacctcacagagaagagtagcccgttcacaatgacctatgtattgtgtgacctgtttgtattttcytgtaggaatttgaattaaaagacacagacaagtttccagtgagtcatggagagtaaataaaaaatccacgggctactctgggccatatgtgagaggaatttaagggaaagcctgctgcaggacaaaggtgggtgagcagatgtgtggaaagaagaagagaagtccctagagattacgtgagaaagaggtggcctcgatctgaatccacccctgcaccttctgagcactgtggccttgcagtaaccacctccccacttcctgttattcaaactggtttgaagggatttcactttctcccagatgaaaggaccctgactggagcagtcttgctcggacctcttcatcttcagcccctgtttgttcagatgtgttgtacagataaataccagagtgtgtgaagatgctgtcttaccaggttattcttttctctttttagagacaaggtcttgctctgtcacccaggctggagtgcagaggcgcgatcacagctcagtgcagccttgcactcccgggctcaagcaatcctcccacctccatctcccaagtagctgggactacaggtgtgtgccaccacacctggctaatttttcagtactttttgtagagactaggtctcactatgttgcccaggctgttctcgaactcctggactcaagcagtcctgcctcagcttcccaaagtgttgggattacaggtgtgagccaccctccctgacctccaccaagctattgttctcccgctcacagctgtctactacacaatgaagtataaaatcaacaagcctttcacagcctgccagaatatggcttcatcctactttccaaactttttcatggtattttctgttaactttacttctgccagactgactgtacctgtcgttcaacacactgtatatctacacccttagtcctggcttacatcattctgcttgtcagtgatctagaccctttgtattcaaagtgtgggtcaagcagcaggatgggcatcacctgggagcttgttaagaatgcagaatctcacagcccaccccagacctcctgagaatctgcttttcagtaagatccctggataattgaaattcaccttaaaacttgagaagcattggtctctgctgcctgtgcaaatatcccttctgctttaagtcctagcctaggggttgtttgtcccattatatttttttctgaccatatagtgatagtggttcgcttcaaccggaat

SEQ ID NO: 694804 - DNA, 1541 bp, Homo sapiens
gaaggcagaagccagactgcagtggggtgagcaaatgtgagttcaggaagtggagatagtggaggctgatttggagaagtctggatgaggaggaacaaggagatgccttttttttttttttttaaggataaactatacttgaacattttttcccattaaacatacatgtattggggtacctgcccacagcctttttaatctgctgtggcacattgcctctactgagttgcatgatcttgtcttccctctgatcctacctcacagagaagagtagcccgttcacaatgacctatgtattgtgtgacctgtttgtattttcttgtaggaatttgaattaaaagacacagacaagtttccagtgagtcatggagagtaaataaaaaatccacgggctactctgggccatatgtgagaggaatttaagggaaagcctgctgcaggacaaaggtgggtgagcagatgtgtggaaagaagaagagaagtccctagagattacgtgagaaagaggtggcctcgatctgaatccacccctgcaccttctgagcactgtggccttgcagtaaccacctccccacttcctgttattcaaactggtttgaagggatttcactttctcccagatgaaaggaccctgactggagcagtcttgctcggacctcttcatcttcagcccctgtttgttcagatgtgttgtacagataaataccagagtgtgtgaagatgctgtcttaccaggttattcttttctctttttagagacaaggtcttgctctgtcacccaggctggagtgcagaggcgcgatcacagctcagtgcagccttgcactcccgggctcaagcaatcctcccacctccatctcccaagtagctgggactacaggtgtgtgccaccacacctggctaatttttcagtactttttgtagagactaggtctcactatgttgcccaggctgttctcgaactcctggactcaagcagtcctgcctcagcttcccaaagtgttggkattacaggtgtgagccaccctccctgacctccaccaagctattgttctcccgctcacagctgtctactacacaatgaagtataaaatcaacaagcctttcacagcctgccagaatatggcttcatcctactttccaaactttttcatggtattttctgttaactttacttctgccagactgactgtacctgtcgttcaacacactgtatatctacacccttagtcctggcttacatcattctgcttgtcagtgatctagaccctttgtattcaaagtgtgggtcaagcagcaggatgggcatcacctgggagcttgttaagaatgcagaatctcacagcccaccccagacctcctgagaatctgcttttcagtaagatccctggataattgaaattcaccttaaaacttgagaagcattggtctctgctgcctgtgcaaatatcccttctgctttaagtcctagcctaggggttgtttgtcccattatatttttttctgaccatatagtgatagtggttcgcttcaaccggaat

SEQ ID NO: 694805 - DNA, 601 bp, Homo sapiens
  misc_feature 554: n = A,T,C or G
tgccaaaacttagtcacccaacacaacaatgcattatgcttcatgattcttctagacctttgggctrggctcagctgagtagtttcccttcgggtctcacctgggtttctcatgcatctatagtccttggcatttccactgggtccttggtgctgggcctccctcttcatgagatctttcctcattcagtagcctggccggggcttcctttccctgggggcagcggtgttgcaagagtgtgatggtggaagctgcaaggcatattgaggcttaggctttggaacgcctacaacaccgctctaccacattctattggtcaaagcaagcccagctcagatgcgaggggtgggaagcagatgcctctctgcgtggagaggagcacagcctcacaatggaccacaccattgtgtaacacttcatgtttgcttttcagtctagctattaagctggagtttggccaagaaaatacagtaaataacttattatagtaaataacattaaatactacataatggtcttgacccttctaaacataatctgggagtaaaaataanttaataataaataaaaataaaacaggccccagagagagctttctatt

SEQ ID NO: 694806 - DNA, 601 bp, Homo sapiens
  misc_feature 554: n = A,T,C or G
tgccaaaacttagtcacccaacacaacaatgcattatgcttcatgattcttctagacctttgggctgggctcagctgagtagtttcccttcgggtctcacctgggtttctcatgcatctatagtccttggcatttccactgggtccttggtgctgggcctccctcttcatgagatctttcctcattcagtagcctggccggggcttcctttccctgggggcagcggtgttgcaagagtgtgatggtggaagctgcaaggcatattgaggcttaggctttggaacgcctacaacacygctctaccacattctattggtcaaagcaagcccagctcagatgcgaggggtgggaagcagatgcctctctgcgtggagaggagcacagcctcacaatggaccacaccattgtgtaacacttcatgtttgcttttcagtctagctattaagctggagtttggccaagaaaatacagtaaataacttattatagtaaataacattaaatactacataatggtcttgacccttctaaacataatctgggagtaaaaataanttaataataaataaaaataaaacaggccccagagagagctttctatt

SEQ ID NO: 694807 - DNA, 1217 bp, Homo sapiens
  misc_feature 1129: n = A,T,C or G
cagcaagcgtgtgtgtgtgtgtgcatgtgtgtgtgtatttatgtgcacattctttcatttctttacattctttcttgatttaaggccaattgttttggaagacaaacctgacattttaaaaattagtatcattgctaactgtgggactgaaaaaatatgctttcagttcatacgaatccccatgactttcacatcttctatttagtctgttgggggatggaatatgaactctctggcctttctccatcattctggaagtgagagagatgggacattataatgtttttcatcaaagcatgggccctgtcagcatagctggtagtgtagtctccatttaatggggttactttaatctaggcattcacttataatgcccacttcatattatctgataatacttggatagagattgacacagaggttaagaactaagagttaacttttttttattaagtttcagagccctataagaataagcatcgcaaataaaaatgttggtagcttccggaaatttgcaattgcattcttaacccttctcccatccttgccaccaaccccaaagattctatgagatttagtctatgagatttcggcctttaataagctacatcttaaggaaagaatattttctcttattgtgaattatgtttaattaacctcgaacaacctttgtaaaaggctcatgatcttaaattcaaattttagaaacatgatacttagggatctctatttagataaagaggccatttatcattcaggattatgtactactgaaaacacagtatgcaaaatcaaagacagatgcatttcatttcaaataaacggaatatacagagctttaagttaaaaacaaatamattagaaataaaaaattgatataaaaggaaacaccagatttattcagagtcctagtgacataatttgttaaaaatttccatttaaatagggaaaattcaaaatatgcaattaggagtgatttaaaactaacactaaattaaattgaaaagattgtaacgggggagggaacagcaagttttttgcaacatgtttgtaaacttctactattaggtagtgatgttacagaacattaagggaaaattaggtctctaaaatcagccttctaaagttntaagctggaaaaacaactagtgtaaaatctcacactgatggggtaatatgtggcaacaaatttcaaaataactggatattctaggcct

SEQ ID NO: 694808 - DNA, 594 bp, Homo sapiens
agtttcattgtgaacttatacatttaaggattttaatgtgtttaatccactgcagttgttatttttattgttcaaacatttccatctttagacagaaggagacttcatgctggctcctggattcttttggcatgggcctaagattttttttatcgattccttgctttctgttatttcaaggtgttttagacctatttaacaatttgatgtcctagacaaagaattgaccattgagataatatttaagtataaatagtamtgagattttaaaatctagaatgagactactttagtaatctcaacatcggccgggcgcagtggctcacgcctgtaatcctaacatgttgggaggctgaggcgggcagatcacctgaggtcaggagttcaagaccagcctggccaacatggtgaaaccccatctctactaaaatacaaaaattagctgggcatgatggcgggtgcctgtaatcccagctacttgggaagctgagataggagaattgcttgaacctgggagatggtggttgcagtgagtcgagatcacaccactgcactccagcctgggcagctaagcgagactccgtctcaaaataa

SEQ ID NO: 694809 - DNA, 1444 bp, Homo sapiens
tcttgccaatcagaagattttatattttggccatgttttttaacgatttgctatttgatactagagttcatgttcagatatctgatattctggtatacccctctgagtgtgtgcgtgcacacacacacacaaacacacacacctcatcccacctagggcaaaccaattcacagacttgactgaaccagcaagattcagtcttttgaaaatttaaaccatgaagagatacaagcagtgagttgacagatgcaacattgtaacgggagcawcctaatgactataagtaccatccgtttacaacttgctcatcgcattgagcacctgcatgccttttccttcctgtcaccctgtgagagatgcactgtttttatccctgtgttgcaaatgaggagactgaagctcatgaagttgtgtctcttgctgagataacccaactggccagtgatggagatgggatcctaagcttccttgcctcatggctctaggtgccaaggtcatccaggctcccctttgggaagccacatgtgcaggttttctgggatcccatgagatctaaatcccagtcacccccacttcctctgccatctcgcttacctggttattttggtctccacttggcatcaaagactcctcagagctcttgtggagaatctgaagcctgctttgtctcaggaactaaaaactcttttacattcttctaattttatagacaaaaacataaaggcaaatttagaaaaggtttttatgaaatgaagacatctccataaggataattctcaagaggtttgacagaggaccaagttcaagagccctaatgtacaacatggtgtctatagttagtaacaacgcagggtatgcttgacaattgctgagacagtagattttaagtgttctcaccacaaacaaatagtaagtatgtgagggaatacatatgttaattagcgtaattgaaccattttacaatgggtacgtatttgaaaaactcatgtcgtacatcataaatgtgtacaattattatttgtcaataaaaatgtaaagaaagaaaaaaataaagaaaattcccaagatgagtgagaaggtgagtaactgttgctcatgcaatcaaattcaacaaagttggtggaaaaaggttatgaatgagaattgagtgttacggtacgtgcattctataaatagtgagactatggtacagtttttaacttgctagattactcaccacttttaggtttatgtcttcctcttttcatttgtgtcacttcccacatatgccctctaattttcttttaacacataatgacgttttgtagcattttaacttatggtagtaatatcttgtaattctttgacagaccctggaaatactgaagaaattgtgcctcagatttctgtgaattctaaaaatagtggagagtcaagtttgtaatactcttaaaatagtgaattg

SEQ ID NO: 694810 - DNA, 1780 bp, Homo sapiens
  misc_feature 1284, 1285, 1286, 1287, 1288, 1289, 1290, 1291, 1292, 1293,1294, 1295, 1296, 1297, 1298, 1299, 1300, 1301, 1302, 1303,1304, 1305, 1306, 1307, 1308, 1309, 1310, 1311, 1312, 1313,1314, 1315, 1316, 1317, 1318, 1319, 1320, 1321, 1322: n = A,T,C or G
  misc_feature 1323, 1324, 1325, 1326, 1327, 1328, 1329, 1330, 1331, 1332,1333, 1334, 1335, 1336, 1337, 1338, 1339, 1340, 1341, 1342,1343, 1344, 1345, 1346, 1347, 1348, 1349, 1350, 1351, 1352,1353, 1354, 1355, 1356, 1357, 1358, 1359, 1360, 1361: n = A,T,C or G
  misc_feature 1362, 1363, 1364, 1365, 1366, 1367, 1368, 1369, 1370, 1371,1372, 1373, 1374, 1375, 1376, 1377, 1378, 1379, 1380, 1381,1382, 1383: n = A,T,C or G
gggtttgttccagtaaccatccccaaataggcaagtctgttttctttgaaatagactttatcacttattttcaggcggaacttcatttcccacttcctatccccccgccacaccatgcacatacatctcaaactgggttcagatgggctctccatagccatctaaagcaaacacggaacacttcaggaaacatgttctcttttgtggaaaattaggaaatattctatttttcagcctaattaaatatatggtattagccctaaaatggaattagttttgaactacagtagaacaagaattgacttattcctactacctgccttagggacaataccatacattacaaacacttttaaaaaaatccaatctttcttccacattttaatactaactcagctgattctataaatgagaaaactggtaacactgtataatatttttgataaaggaacaaagaaatgaagtggaggccaagtaggttagtaacagtttttcaagtccatcttaagaaagagaaatcaaggtttggtggaagaatgaggctgtaccttatkcctaagaatgcccagaacaaatctcctacagctgagctcatggagttggtagatgagagtgtgaacctcctgagtggttctgtggtgccctgaagttagatgggaaaagagaagttaagtgatgatatggcagtcagtctcaggaaagctaacttgctgagttctgaaaatatatccactaggttggactatgctctgtcttttgagaggaacaagaataaagtgtattttctcatcttggcatgatttgtacttggtggttttccatttccagatgatagcaagttttcagaggctatcacagtgctgctttcctggattgaacgaggggaagtgaatcggcgctctgcaaaccagttctattccatggtgcagtcggccaacagccacgtccgccggctaatgaatgaaaaagccacccatgagcaagagatggaggaagccaaggagaattttaaaaatgccttaactgggattctcactcaatgtaagtaaaattttgggggccatctcttttgttgtgattttgccttttcttttttattaattttactttttcatttgggggtaagtagttcaataatttcccatttttactccatattgaatggcaaacttcataaccttttcatgttctgtggcaactggaggaagacggaccctgcctgagagtttacaatcaaggtgagcaacgggtagggagttcgaattcgctcaaaataaggctttnnnnnnnnnnnnnnnnnnnnnnnnnnnnnnnnnnnnnnnnnnnnnnnnnnnnnnnnnnnnnnnnnnnnnnnnnnnnnnnnnnnnnnnnnnnnnnnnnnnncctcgcagtttactctagaggatcccctggcatgtctttttgtttctttcattcttaggtataagaatcagtaattccttgagcactgcactgtcaaaaagaacttctgatcagttgagcagaagtttaattcaaatggaagctaagggttcaattctcaacaacaggtgaataatgagcaaatagtttttatggtctcaacaaatccctagccctcaactagaggggtatgtaagatagtgtggaatttttttccaattgtctgtcaggaagatgaatcatcatcatcatccaacagtgaatgattctaactttggaagcaaattgtactgagaataaatattttattccttcccactatactatccaaatgaactcagaacctgcatgtgtattg

SEQ ID NO: 694811 - DNA, 1431 bp, Homo sapiens
ggactcctatggagcactccacgctgggagctaacctcaccactgggaagcattaaggggtagtgtggcctgttggtcagaacatgaccatctggactcattctcagcagtgtgattgtacattacatcctccacttctccattccaactgacaatgccaccaatagctgagaaagtggaggccatgggaagctggtacctactaggatatcctattggctcctgtcctctctgcccagttactgaccacggcaccaagcttcagattctgtttaatactgtcctttacacaatggtgcctgggtcttttgaaatggatagggataattatgattcatatgcttcaagaaataaaccacggtactcacacaacctacatatttcatttctattttaaaaacacaaaatacttacatgctgttggtgttttgaaagcttttgccacttatgcttttttaaatataatggttcagaaacaaaattctgcctgctaatcagtctttatttccattcataaaaaattatgtctccataatacctaagaggtcaataactagatgttgaaacaaataatattaaagaaaaatatttattgtagaagtctgtggttgaggcagaagaaaggtgttattttcatctggggtatcaagaaaacaccatgaatggagaagaatatggtctgagtctcaaaggattaaaaaaaaaaaaaaaccaacctatgtgggaagagagacagagagaaagtgcgcaggcagctcaggcaggaaatggtaaactcaaatgtgtgaaatcgggagcgttggaggctgctgaaaggacatagctgcctctttactattttacatttaagtcaagttattcagattatattggtctctgtatgtatataatgacaatagtagytttattctctaaaaagttgctttgagaaaaatgtcaagggatttaaatgcatgcttccaaagtacaatgttttcctacataaagatgctggtttatcaactagaaaactaaagtgggcttctttataaaagatagactgaaaagattaggaaagtcttgacaatataaacatacatttactcaccaactcatgaaatactaaaactaggttttactgctcaaagaaagcataaaatagatcatttcagtagaaagaaaataaagcacattttttacaacatagaaagtaatctcagaattcattaaccaagagaccaaaaacaatacctaaaatattatatatgttaagggagctttaaataaagtcatggagagcagatttacaatgctttaattgaaccaggataggaatggcaggagtctgttcacaacctttcatggcagagaagagttatataacagccttgatattggccagctgcaaaaaaagtcaataacaatatgaagatgacaggacttttggaagaa

SEQ ID NO: 694812 - DNA, 1431 bp, Homo sapiens
ggactcctatggagcactccacgctgggagctaacctcaccactgggaagcattaaggggtagtgtggcctgttggtcagaacatgaccatctggactcattctcagcagtgtgattgtacattacatcctccacttctccattccaactgacaatgccaccaatagctgagaaagtggaggccatgggaagctggtacctactaggatatcctattggctcctgtcctctctgcccagttactgaccacggcaccaagcttcagattctgtttaatactgtcctttacacaatggtgcctgggtcttttgaaatggatagggataattatgattcatatgcttcaagaaataaaccacggtactcacacaacctacatatttcatttctattttaaaaacacaaaatacttacatgctgttggtgttttgaaagcttttgccacttatgcttttttaaatataatggttcagaaacaaaattctgcctgctaatcagtctttatttccattcataaaaaattatgtctccataatacctaagaggtcaataactagatgttgaaacaaataatattaaagaaaaatatttattgtagaagtctgtggttgaggcagaagaaaggtgttattttcatctggggtatcaagaaaacaccatgaatggagaagaatatggtctgagtctcaaaggattaaaaaaaaaaaaaaaccaacctatgtgggaagagagacagagagaaagtgcgcaggcagctcaggcaggaaatggtaaactcaaatgtgtgaaatcgggagcgttggaggctgctgaaaggacatagctgcctctttactattttacatttaagtcaagttattcagattatattggtctctgtatgtatataatgacaatagtagttttattctctaaaaagttgctttgagaaaaatgtcaagggatttaaatgcatgcttccaaagtacaatgttttcctacataaagatgctggtttatcaactagaaaactaaagtgggcttctttataaaagatagactraaaagattaggaaagtcttgacaatataaacatacatttactcaccaactcatgaaatactaaaactaggttttactgctcaaagaaagcataaaatagatcatttcagtagaaagaaaataaagcacattttttacaacatagaaagtaatctcagaattcattaaccaagagaccaaaaacaatacctaaaatattatatatgttaagggagctttaaataaagtcatggagagcagatttacaatgctttaattgaaccaggataggaatggcaggagtctgttcacaacctttcatggcagagaagagttatataacagccttgatattggccagctgcaaaaaaagtcaataacaatatgaagatgacaggacttttggaagaa

SEQ ID NO: 694813 - DNA, 1173 bp, Homo sapiens
ggacgaatcatctcctccatccattcccacaccataatgcccatggcaggtcctctgtgttgttccctaccagctccaaccgagaacatgtgaagagggccacaaggtaattgacctgtaagaggcaagatcttgttttttttttttttttgagatggagtcttgctgtgttgcccaggctggagtgcagtggcgtgatctcagctcactgcaacctctgcctcccaggttcaagtgactctccttcttcagcctccygagtagctgggactacaggcgtgtgccaccacgcccagctaattttttgtatttttagtagagatggggtttcactgtgttagccaggatggtcttgatctcctgagctcgtgatctgcccgcctcggcctcccaaagtgctggcatttacaggcgtgagccacagcacgcggccaagaccttggtttttagcatgaacgctcaggttttgatttacactcatcctttaggccggtggatttcaatgttggctccccactggaatcacctgggaagctttaacagttacaggtgcctgggtcccacgcccatagattccagcttcattagtctgcagtgttcatccaaatcccactgcttttcttagcagatccagtcccatgcagctgagccttccttctgcttaaacagctgcaaaggccagggctccctccaatttttgactctcctactctgaagctgttggcatcagctcttcaggaatttttttaggtggagggcccaagagaggactcttctgtatctcagggttagactgtccatacacacttactagtaaagcatggcctgaggcttgcagagttttgtttttttaaactgaaatgatgaattctggcctgtaatgtatgacacgtggctgagcagagctgacgaacttactgccaggtggggaagggagaatgtggcagcagtcacaccgtctgctcaaggagatcaacctgtgtgttgattgctgtgtaggccctggcaattgaccccttaggctgagggagctcctcttccagatgttttgcctgctaagttatgttttctcccatccttccctggttcactggctccctgcacaggcagacttagagggaattttccctgtttttgtttgtttgtttgtttgtgactgagtctcactctgtc

SEQ ID NO: 694814 - DNA, 1786 bp, Homo sapiens
caatctaattggggtggccatctgtcgtttttggcccatatcgttcaggtcacactgaatgcacccttggctccaagagtgacatgggacccaggcccatccaaacatcttgttctccagggcactgtgattggttcagggataggccgtgatccaagcagaccaattggaatcaatgaggctcagttgagaggtgttcaggtgccatcacctacattggatttggagatttaaggatacatgccaggaactgcagggacccaacataaggggagtgcctcctgaggataaaactttacatggaggaaggaagagcccagagatggagaaagattcttgggtatattatttaagtttctggatccacctgtgcctgatctacacttgacactgaagtttcatgagcaagtaaagtctccttctcacttatgccaatttaagaagatttctgtcatttgtcttttaaaaggtctttaataatccagagatttttaccctctcaattgatgaaaatgagttgtagttaagacagattctggaactgaatcctagttccatcactgacagtgtaacgagggaaggttatatgacctttccccagtcagcttccctacctataaaatgaaaataatgctaatacttatcacctcagagaggtttttgcagggttaagtaagttaatatgtgaaaaagtgcttaaaacagtatctggtatattttaattactacgtaagtgtgtccctgctgctgctgctgctgttgttattttgaaggcagaaagaaaatgcaggagagtaaatgacctatttcactcatgcagagatttagcagccaagctaaaattcaaatttaggtcttctcttttctctgcttgttgttctttctcaagagctaagcctatcgtcatctttatgatatatttgagtattaagctttcagaagtttccatccacatawttgaacatttctatcaaaagttttgaggtagaccaggaggccagaaaatagatttaagttactagcaataaccagatgctactgtaggattataggttatcacaacttgtaactaaaaattatgatttttattataataagtttaattacatttatttaattttaattaaaattaaaatacattttattattataatttctactttaacaagtaactatacctttcactgtgttttatttagcacctttcacagtgttgttgtcttttttaatataccttcctattaaaccagttgctctttgcagaatgcttgaatcatttggctcttggttagtaggctcccgttacctaaccaagcactgagtgaacgtatttactggggaggcagctggtctctcccaaatgtaaatcagatttcatcatgtctggcttggagagaacgtggcatatggcaaatgaagacacagctgcatagtgaaattttccatcacaagttagtctaatacctgaatgcagagtgaataaaacattttctaaacaagaatattatgttcaaattcataatcattgttaaatattaagagtcaggttatttcccttgaattatacaaaatttcactattcttgaaaaagtacatgttatcttatatttaatgtcatactattcacatccaggctgcctttcaacttctattatttaaaaatattttcagatatctacattgcctgttattaaaatgcaaactgttctttgagtagagaacctttgtgtaaggccttacaaagttctgatagagatgaagtgcacggaaggaatgacagtgtggt

SEQ ID NO: 694815 - DNA, 1731 bp, Homo sapiens
aggatcccactcctataataataaacccacttccacaaaaatggcattatcccctccagagccctcatggcctaatcacctcccattaggcttcacctcccaacactgctgcataggaaattaagtttccaatacttgcttttggggagacacattcaaaccataggaacggatgattatactttttggttagaaattctgccacataatgttttagaaacatttgcagaatgagaaacattctaaatgatttatggggcaaagttgtcatctcatcaagcacacattcctgtctcagagtttttgtttttactgttctctctacatggaatatttttctccatacaggtgttcattttcttcatgtcttttctcaaacatcatattgccagtccctgtgtaaaacacaaatctattcctataccctcccgtgaccctctctcctgcttgtttttctccatagccctcatctccatctgccacagtatatatttacttgtttttcacaaaatgcatatacaaattatataaataaattatatatcatatatatgcaataaattacatataataaatatataatataattagtatgtattatatatatactaaatatataactaacatacatgctaactaaaatataaggtataatagggcaggaaatttgtatgctttgttcattgctgaaatcccagtccctagaaaagtgtctggtacacagtatgtatcagtaaatatatgttaaatattctctattgaacaagaaaacaccagtagagaaactagctttgtttatgacaactctagaattcagacacaaaaattcagaagatgagaatgaatcttgcatgtggagcaagaaggaaagatgagtggcaccctggatatgcactgggaatctaaaggtgaattcatgttgagaaatttggtctgagacaagtgctgatacagggaaggaatgagcatgctcagaaacaggaaatgaagtcagcagaggcaacaggtcccattgagaagttctctcaatggatgtagtttcttatgatgctctgtgtgcaaggagaaggaagaattgaggtaaagcccttaaaaagcaaagagaaatagagaaaaaaacaggaagccaaagatctttctctgtagtctaggttatcacttacaaacttctattgctgactgattaagaaatgaaaggaattgtttttttcttttttttttttttttagatagattcttgctcttgttgaacaggctggagtgcagcggctcactgcaacctccactttccgggttcaagcgattctcctgcctcatcctccccaggagctgggattacaggcaccagcgagtacacccagctaatttttgtatttttagtagagacagggtttcaccatgttggccagtctggtctcaaactcctgacctcaggtgatccacctgccttgacctcccaaagtgctgggattacaggcatgagccaccatgcccagccaggaatttttttttttttaagagacrgagtcttgctctttcgcccaggcaggactgcagtggcgctatctcagctcactgcaagctctgcatcccgggttcatgccattctcctgcctcagcctcctgagtagctgggactacaggcacccgccactgcgcccggctaattttttgtatttttagtagagacggggtttcaccatgttagccaagatggtctcgatctcctga

SEQ ID NO: 694816 - DNA, 1731 bp, Homo sapiens
aggatcccactcctataataataaacccacttccacaaaaatggcattatcccctccagagccctcatggcctaatcacctcccattaggcttcacctcccaacactgctgcataggaaattaagtttccaatacttgcttttggggagacacattcaaaccataggaacggatgattatactttttggttagaaattctgccacataatgttttagaaacatttgcagaatgagaaacattctaaatgatttatggggcaaagttgtcatctcatcaagcacacattcctgtctcagagtttttgtttttactgttctctctacatggaatatttttctccatacaggtgttcattttcttcatgtcttttctcaaacatcatattgccagtccctgtgtaaaacacaaatctattcctataccctcccgtgaccctctctcctgcttgtttttctccatagccctcatctccatctgccacagtatatatttacttgtttttcacaaaatgcatatacaaattatataaataaattatatatcatatatatgcaataaattacatataataaatatataatataattagtatgtattatatatatactaaatatataactaacatacatgctaactaaaatataaggtataatagggcaggaaatttgtatgctttgttcattgctgaaatcccagtccctagaaaagtgtctggtacacagtatgtatcagtaaatatatgttaaatattctctattgaacaagaaaacaccagtagagaaactagctttgtttatgacaactctagaattcagacacaaaaattcagaagatgagaatgaatcttgcatgtggagcaagaaggaaagatgagtggcaccctggatatgcactgggaatctaaaggtgaattcatgttgagaaatttggtctgagacaagtgctgatacagggaaggaatgagcatgctcagaaacaggaaatgaagtcagcagaggcaacaggtcccattgagaagttctctcaatggatgtagtttcttatgatgctctgtgtgcaaggagaaggaagaattgaggtaaagcccttaaaaagcaaagagaaatagagaaaaaaacaggaagccaaagatctttctctgtagtctaggttatcacttacaaacttctattgctgactgattaagaaatgaaaggaattgtttttttcttttttttttttttttagatagattcttgctcttgttgaacaggctggagtgcagcggctcactgcaacctccactttccgggttcaagcgattctcctgcctcatcctccccaggagctgggattacaggcaccagcgagtacacccagctaatttttgtatttttagtagagacagggtttcaccatgttggccagtctggtctcaaactcctgacctcaggtgatccacctgccttgacctcccaaagtgctgggattacaggcatgagccaccatgcccagccaggaatttttttttttttaagagacggagtctygctctttcgcccaggcaggactgcagtggcgctatctcagctcactgcaagctctgcatcccgggttcatgccattctcctgcctcagcctcctgagtagctgggactacaggcacccgccactgcgcccggctaattttttgtatttttagtagagacggggtttcaccatgttagccaagatggtctcgatctcctga

SEQ ID NO: 694817 - DNA, 1731 bp, Homo sapiens
aggatcccactcctataataataaacccacttccacaaaaatggcattatcccctccagagccctcatggcctaatcacctcccattaggcttcacctcccaacactgctgcataggaaattaagtttccaatacttgcttttggggagacacattcaaaccataggaacggatgattatactttttggttagaaattctgccacataatgttttagaaacatttgcagaatgagaaacattctaaatgatttatggggcaaagttgtcatctcatcaagcacacattcctgtctcagagtttttgtttttactgttctctctacatggaatatttttctccatacaggtgttcattttcttcatgtcttttctcaaacatcatattgccagtccctgtgtaaaacacaaatctattcctataccctcccgtgaccctctctcctgcttgtttttctccatagccctcatctccatctgccacagtatatatttacttgtttttcacaaaatgcatatacaaattatataaataaattatatatcatatatatgcaataaattacatataataaatatataatataattagtatgtattatatatatactaaatatataactaacatacatgctaactaaaatataaggtataatagggcaggaaatttgtatgctttgttcattgctgaaatcccagtccctagaaaagtgtctggtacacagtatgtatcagtaaatatatgttaaatattctctattgaacaagaaaacaccagtagagaaactagctttgtttatgacaactctagaattcagacacaaaaattcagaagatgagaatgaatcttgcatgtggagcaagaaggaaagatgagtggcaccctggatatgcactgggaatctaaaggtgaattcatgttgagaaatttggtctgagacaagtgctgatacagggaaggaatgagcatgctcagaaacaggaaatgaagtcagcagaggcaacaggtcccattgagaagttctctcaatggatgtagtttcttatgatgctctgtgtgcaaggagaaggaagaattgaggtaaagcccttaaaaagcaaagagaaatagagaaaaaaacaggaagccaaagatctttctctgtagtctaggttatcacttacaaacttctattgctgactgattaagaaatgaaaggaattgtttttttcttttttttttttttttagatagattcttgctcttgttgaacaggctggagtgcagcggctcactgcaacctccactttccgggttcaagcgattctcctgcctcatcctccccaggagctgggattacaggcaccagcgagtacacccagctaatttttgtatttttagtagagacagggtttcaccatgttggccagtctggtctcaaactcctgacctcaggtgatccacctgccttgacctcccaaagtgctgggattacaggcatgagccaccatgcccagccaggaatttttttttttttaagagacggagtcttgctctttcgcccaggcaggactgcagtggcgctatctcagctcactgcaagctctgcatcccgggttcatgccattctcctgcctcagcctcctgagtagctgggactacaggcrcccgccactgcgcccggctaattttttgtatttttagtagagacggggtttcaccatgttagccaagatggtctcgatctcctga

SEQ ID NO: 694818 - DNA, 1483 bp, Homo sapiens
tctcctttttaggaaatatttttagcacaagtaagctgtactttctcccaacctgccccttgtcacctctacccctattctcctcattctgaataaatccagtctatacccacaagacaattgactcttttaattaatgggtagaaatgtattccccacctgtacaaatgctcgacagaggctgggtcattagacacctttggcattaaattccatgggtgggctctatgaacatttctctgattgggctgttagaaagcttctggggatcttgaggttcttaccctgttatatgatttagctacacagcaagtggactctgaggtgacgttcttttggaccaacatcgtcttcttggaccttagtggagtgggatatgctctagagaagcagcagcccatgcactgaagtattggggcacccggctgggagaagaatgggttttcctgtagcgtgcattctgggcaatctatcagggaaaaaaaaaggcagagtaaaatatccaaaaaagactcaaaaagaatctatgaggccagcacagtagctcacgcctgtaatcctagcactttgggaggccttagtgggtggattgcttgagctcaggagtttgagagcagcctgggcaacatggtgaaaccctgtctctacaaaaaatacaacaacaacaaaaattagccagacgtgatggtgcacacctgtagtcccagctgcttgagggtctggggcagaagaatcgcttgaagctgggaggtcgaggctacagtgagccgagatcatgccactgcactccagcctgggtgacaaagtgagaccctgactcaaaaaaataagaaaaaatgtggtggctcacgcctgtaatccgagcactttgggaggctgaggcaggtggatcaccagaggttaggaattcgagaccagcctggccaacatggtgaaaccccatctctactaaaaatacaaaaatttcgctgggcatggtggcaggtgcctgtaataccagctactcagaaggctgaggcagaagaatcactagaacccggaaggcggaggttgcagtaagctgagatcacacgattgcactccagcctgggtgatagaacgagactctgtctcaaaagaaaaggcaaggcaagacaaggcaaggcaacaaagaaaagaaactgtgaatgcttccttattatgggatagtgaatattatttttycatcaaaaatgaaaggaaactaagtaagtgctttttggttatatgttaatcttcatctataatatctatttaatatttatactgattaatgttcatgggaaataaaacttaaaaacaaacattttttacagatatgcatagaaaatctcagttgtagtctctcttcaagcatggattctctatcccaatgctaacagtatgcctagaggaaacacaaaacttgacagatgaaaacatcatgttcatctgaaaagagaattttgcacagaggaaaaatatt

SEQ ID NO: 694819 - DNA, 769 bp, Homo sapiens
tgttcatcaccatggatgaatctcaaaataattacactgtgaacgaagctaaacacaaaaagctaacagtatgattccayttatatggcattctggaagaggcaaaactatagaaagagatcaattagtggtttgggaatagggtgagaagattaactacaaaggtgcacaaaggaagttttctataccttgagtaagtggcagttacatgcttgtatatttttgttgatactcaaaacctatgtctgtgtctagaaatgatagattttactgtatgtagattatgtatcagtaggcctgactttaaaaaaataaaaatgaagatgagagggtattctaattagtggtaacagcaagataaaaaggcatgcaagtatgagagtgtggttttcacaagagactgcaagcagttcaatattagaagggtataacattcaaagcgagaagtggcaagccgtggagtcctgaacttttcacttgcatctatagcctccaccttaaactcatcacgtccaaaactaaagcctgcatccctgtctcccgcaacagtaccatcatggttgttgatgtcattttcctagtcaccaaaactctaaagcttgaagaccttcttgactgctccccttatctgtccaccaaatccatgatgcactcttgtaatgccatggtttttgtggttttgatggtagcagcagtagatgatgatgataatagtggttttctacttctcttttatatcattccttcttacttcattgttctcatatgg

SEQ ID NO: 694820 - DNA, 769 bp, Homo sapiens
tgttcatcaccatggatgaatctcaaaataattacactgtgaacgaagctaaacacaaaaagctaacagtatgattccatttatatggcattctggaagaggcaaaactatagaaagagatcaattagtggtttgggaatagggtgagaagattaactacaaaggtgcacaaaggaagttttctataccttgagtaagtggcagttacatgcttgtatatttttgttgatactcaaaacctatgtctgtgtctagaaatgatagattttactgtatgtagattatgtatcagtaggcctgactttaaaaaaataaaaatgaagatgagagggtattctaattagtggtaacagcaagataaaaaggcatgcaagtatgagagtgtggttttcacaagagactgcaagcagttcaatattagaagggtataacattcaaagcgagaagtggcaagccgtggagtcctgaacttttcacttgcatctatagcctccaccttaaactcatcacgtccaaaactaaagcctgcatccctgtctcccgcaacagtaccatcatggttgttgatgtcattttcctagtcaccaaaactctaaagcttgaagaccttcttgactgctccccttatctgtccaccaaatccatgatgcactcttgtaatgccatggtttttgtggttttgatggtagcagcagtagatgatgatgataatagtggttttctacttctsttttatatcattccttcttacttcattgttctcatatgg

SEQ ID NO: 694821 - DNA, 610 bp, Homo sapiens
agatttgaaagcactctactattcatcatctggtttgaggccttctcaacaaacctatgagactactcctatattgcagataaggctctacagtggatggggatttgcttaagatcacacagataagtagtaagttttcaatacatttttaaaataagggcatgaagacagagccagaaaactgatttagcaatcaagrggaaaaggaaggactctttttaatgaggaaataaaactaaagtcagaaaaagactgcttaaagtcagaatttgaccaggattacattcatacagaccacactgtctgctttgcctttgtgatactggtaggagatatgaaagggaagaatttattctatacaattcaaaaaatacatttttttataagcttaaaattaggaaactataccttcagctaccacttatttctgttttcgcaactattggagctgactgtgtgggtgagttaactgctgcataaaaagtggaattaaaattaaaaagctcttatgtatatttttatagaacagaaataattaaaattaactgtaactcaaaatccagttagtagagttggcatttaaattggctgtttaattagcaaaattcta

SEQ ID NO: 694822 - DNA, 664 bp, Homo sapiens
ttatgggaacacacaggatagagcaattaagctctgaaaaagtggaaggtgatagagaagaaagggggtaaaggagacactcagagaagacttcacgggagagggaacttctgagttggaccttgagaaatgagttggagtttgctagagagaagtgagaaaggggatcttccttcatagttcaaagctacctggagattttgttattcttatgcaattcagccagtccagcctaaattgtagaaattgaaaatttaaccctaagttcaggtgaaactgaaaaaaaaaatgggtgaaataggtttcttaaaaatcaaactgccatggaaactgctttacccaaaattttggtccacagtctttattagattatctattgaggcaaataaagtttagtcatgtgaataggtcccaattttgtcagaaatataattgagatccaacagycttttataaaccagtgagtctgtactgctacctcatgactagaattctacaatgaaagttatcagattcttatgtgcgtatatgtgtttaggtgtgtttacacatatgtccatacgttatgttatatgttgtatctacatggtaaaaatctggcatagtcaaccagaaatcccttaaggaattctattcagattggcttagataggtaagcactcat

SEQ ID NO: 694823 - DNA, 664 bp, Homo sapiens
ttatgggaacacacaggatagagcaattaagctctgaaaaagtggaaggtgatagagaagaaagggggtaaaggagacactcagagaagacttcacgggagagggaacttctgagttggaccttgagaaatgagttggagtttgctagagagaagtgagaaaggggatcttccttcatagttcaaagctacctggagattttgttattcttatgcaattcagccagtccagcctaaattgtagaaattgaaaatttaaccctaagttcaggtgaaactgaaaaaaaaaatgggtgaaataggtttcttaaaaatcaaactgccatggaaactgctttacccaaaattttggtccacagtctttattagattatctattgaggcaaataaagtttagtcatgtgaataggtcccaattttgtcagaaatataattgagatccaacagccttttataaaccagtgagtctgtactgctacctcatgactagaattctacaatgaaagttatcagattyttatgtgcgtatatgtgtttaggtgtgtttacacatatgtccatacgttatgttatatgttgtatctacatggtaaaaatctggcatagtcaaccagaaatcccttaaggaattctattcagattggcttagataggtaagcactcat

SEQ ID NO: 694824 - DNA, 664 bp, Homo sapiens
ttatgggaacacacaggatagagcaattaagctctgaaaaagtggaaggtgatagagaagaaagggggtaaaggagacactcagagaagacttcacgggagagggaacttctgagttggaccttgagaaatgagttggagtttgctagagagaagtgagaaaggggatcttccttcatagttcaaagctacctggagattttgttattcttatgcaattcagccagtccagcctaaattgtagaaattgaaaatttaaccctaagttcaggtgaaactgaaaaaaaaaatgggtgaaataggtttcttaaaaatcaaactgccatggaaactgctttacccaaaattttggtccacagtctttattagattatctattgaggcaaataaagtttagtcatgtgaataggtcccaattttgtcagaaatataattgagatccaacagccttttataaaccagtgagtctgtactgctacctcatgactagaattctacaatgaaagttatcagattcttatgtgcgtatatgtgtttaggtgtgtttacacatatgtccatacgttatgttatatgttgtatctacatggtaaaaatctggcatagtcaaccagaaatcccttaaggaattctattcagattggcttagatargtaagcactcat

SEQ ID NO: 694825 - DNA, 1937 bp, Homo sapiens
aatttaktgtagcctaagtgtacagtgtttataaagtctacagtagtgtacagtaatgtcctaggccttcaaattcactcaccactcactgactcacccagagcaacttcccatcttccattcatggtaggtgccctatacggacgtaacattttttatctaatttttactgcattgttaccatactttttctatgtttagacacacaaacacttaccattgtgtaacaactgcctacagtattcggtaaagtaacatgctgaaaaggtttgcagactagaagcaacaggtcataccatatagcctgggtgcataataggccatataccatctaggtttgtgccagtacactctgtgatgtttgcacaatgacaaaatcaccaaacaacgcttttctcaaaatgtatccccccatcattaaacgatgcatgattgtatttaaataaacaaaaacacaaaaacatatatgaaatggcttgttcccaagggtaaactacaggtttttggcttgcaggaaatgtttcttcctttgttgttctaccccatacctgtaagagtacctaggattattttgtacttggtacttaaacaatttatgttgactgacttacctcaaaattaggtcttcgacaaggttccagtggaagcattttcccaataatacgaacaatactcctagttgatccatagtctttattttcccaaatcagcaaaacctattttaaacataaagtatgaattaaaatgcactctgattaagcatatttatataagtatgaaaaaaggagatgtaaaaaagacaaaaaagacgcagtggcattttttttttaatacagggagtcctgtaaaataacatttatttttaaaaagaaatatagaatggcagagcctttcttcaaagaatagaactttgtgagtatttgtcttaaaaagagatggtagtaaacatatatacattccaggaagatcttttaaaaagcacaattcattttgttctatttctgataatgtccaataccttgggagaaactttgttcaaaaaaattgcatcccctcccccagctacaaatcccatctttttggcccaaccaaaaatagacaatttcaaattatcaagcaacgacgtaatatggagtatacttatgtaatttcctttaaaggagaaataaaaaagggaataaataaatcaggtcctagacaattcagagttatttacataaagtgaaatatatctgctggcagtcagctcttgaaaaggcattagaagtaataatgtgctactatagctcaaataatacttcatcctttagtgtgggcttcccaaattagtgtaaaccattgccacaggaaccactctcccccaccagccaaaagatgtgatataataaattggacatttttcctaagatcccaactgatataggtagccacctattagcatcctcattaaaacaaccaataaaccgccggtctcagctgttaaacaacagcaacaactaacaacagcaggctaaataaactgtgggttgtgcacctgcgttttgattgtgacccatcatgtgaggtcaggtgtaaaattttcccattgtggtgtcatgctggcactcaagacatttgggattttggagcatttcagatttcaggttttgagtgatgctcaaccgataatatttttaaattgctaagattattttacatttttttcacactcagtcttcaaaatcccttatataggttacacctatagaagatctcaattcagatattttgagtacttaaaagtgacatgtggccagtggctatcatactggattgcacagcctagaggatatagatcccagacctattactagtagaatatttggaggattgagcatttatatttaaagtgttctacagaccattcatctgcgtacccctgctaagaacaacaggca

SEQ ID NO: 694826 - DNA, 656 bp, Homo sapiens
taacatgtaaccagcaagggatacagaagatagtcagctcaaagacagcttttataaaggtgtggaatgtatgccaagcacactgcctttcacataatagattctcaataaatattttttggataaatggataaatggttagattagctaactaatcaaaaaaaaaaaaaaaaccccagaattctgaatatgtttgcaattcctttcaatgataatgcttatccccaagacactattaactttcctttttttatttttttgagacagggtctcactctatccaggctggagtgcagtggcatgatctcggcccaccgtgacctccgcctcccaggttcaagcaattytagtgcctcaaccccctgagtagttgggattacaggcatgtgccaccatgcctggctaattcttgttttttttttttttagtagagatgggatttcaccatgttgcccagtctggtctcgtactcctagcctcaagtgatccacccaccttagcctccctaagtgttgcatgagccactgtgcctggccctaactttcagttaccattaaaatcacattgatgtcttagttgaaatctggaagttcatgctttacttatttattaacctctttatggtttattttataccaacaattaaattcttttca

SEQ ID NO: 694827 - DNA, 641 bp, Homo sapiens
tggataaatcaaaaaatcacagcaaacacatgtcatcattggaagctatggaaataactatgagaagacataacccaaaaacatttaaagtatttatgtctgtggagctgtgaatactggcagggaagattggggcctttctgtactgatagatatttcttaaatccttgattatatgttaattttattaaaggaatacataaatttgaaattaaaaacaaggataagatgagcatccacctgagttgcccatgtctgaggaaatgcactgttgaagatgtcatccactgtatcaggaaatcaatatttcctatccaaatcaccaaatgctaaatccctcctaccgagtcctgtattagtctgttctcacactgctgtaaaaaactgcccracactgggtaattggaaaggaaagaggtttatttggctcacagttctgcatggaggcctcaggaaacttacagttatggcacaaggagaagcaaatatgtccttcttcacatggcatcaggagagaaaagtgccagcagaagaaatgccagacatgtacaaaaccaaagatctcatgagactcactcactatcataagaacagcacgggggaactgcccccacgatctaatcacctcccatgaggtctct

SEQ ID NO: 694828 - DNA, 641 bp, Homo sapiens
tggataaatcaaaaaatcacagcaaacacatgtcatcattggaagctatggaaataactatgagaagacataacccaaaaacatttaaagtatttatgtctgtggagctgtgaatactggcagggaagattggggcctttctgtactgatagatatttcttaaatccttgattatatgttaattttattaaaggaatacataaatttgaaattaaaaacaaggataagatgagcatccacctgagttgcccatgtctgaggaaatgcactgttgaagatgtcatccactgtatcaggaaatcaatatttcctatccaaatcaccaaatgctaaatccctcctaccgagtcctgtattagtctgttctcacactgctgtaaaaaactgcccaacactgggtaattggaaaggaaagaggtttatttggctcacagttctgcatggaggcctcaggaaacttacagttatggcacaaggagaagcaaatatktccttcttcacatggcatcaggagagaaaagtgccagcagaagaaatgccagacatgtacaaaaccaaagatctcatgagactcactcactatcataagaacagcacgggggaactgcccccacgatctaatcacctcccatgaggtctct

SEQ ID NO: 694829 - DNA, 1282 bp, Homo sapiens
tgttatgaaaaaaaacaccaggtatgagaaataacatatacattataaagtgttgaacaaatggttttttatttwaaaaaaaaactttattaaagagatagtttggggcattttttctttacattattttaaaatgacaatatccttctatgttagaaatacaacaattttggaaatcatttctaaatatctttagcaccccactattcttaatgtcatgttacatgaaatttacataatctagtttagaatcagcattactgggaaaaagacaatgttcctatataaattctactacatataatatatatatgctactgtttatgagaagggtcaataggataaagaaactttcaaaaaattatatacacatacacaaatacacaagaacattttatattcattattcaataatccttagaatgatgacaatgcttatatgtaaaaaataatttcactctagagcagattacaagtaaatttatctgccacatacgagaatctatttacttatgttatagcaacatctcttttctaaaataaaaacatggcaaatactcagcttgatcatctgcactatacaacagaatttactcggaatgaccttttgatcatttgcaaaaaattcaatttaatgttaatggatgaagatattatatcactgttggcaatatttataaaaatgtgcttatggctctggaagcaattcctaaaaagaggtagtaaatgttctgagacttcagaattgttagaaaaagttaagcttcagttggcgtttactgcatataagtatgttgacatatgttttcctgagcaaatggcttattctagatatatacgttggtatattcattgaaaattagatttattatgttataaaatgtgactaaaagcccatttaaagggcacatatctctcatcttttggttctaacgtgaagccaaatgaggacaggcgcatgattcagtttatacaataagaaaattgccccaaagtggatgaagcacacacatcagcagctcagccccactccgtacaatccaagtgcattcaacaagtgatatggtttggctgtgtccccacccaaatctcatcttgaattgtaactcccatgattcccacatgtctgtgggaggaacccggtgggaggtgatttaattatgggggtgggtctttcctgtgctgttctcctaatagtgaatgagtctcatgagatctgatggttttaaaaatgggggtttctctgcagaagctctctttttgcctcctgccatccacatac

SEQ ID NO: 694830 - DNA, 1282 bp, Homo sapiens
tgttatgaaaaaaaacaccaggtatgagaaataacatatacattataaagtgttgaacaaatggttttttattttaaaaaaaaactttattaaagagatagtttggggcattttttctttacattattttaaaatgacaatatccttctatgttagaaatacaacaattttggaaatcatttctaaatatmtttagcaccccactattcttaatgtcatgttacatgaaatttacataatctagtttagaatcagcattactgggaaaaagacaatgttcctatataaattctactacatataatatatatatgctactgtttatgagaagggtcaataggataaagaaactttcaaaaaattatatacacatacacaaatacacaagaacattttatattcattattcaataatccttagaatgatgacaatgcttatatgtaaaaaataatttcactctagagcagattacaagtaaatttatctgccacatacgagaatctatttacttatgttatagcaacatctcttttctaaaataaaaacatggcaaatactcagcttgatcatctgcactatacaacagaatttactcggaatgaccttttgatcatttgcaaaaaattcaatttaatgttaatggatgaagatattatatcactgttggcaatatttataaaaatgtgcttatggctctggaagcaattcctaaaaagaggtagtaaatgttctgagacttcagaattgttagaaaaagttaagcttcagttggcgtttactgcatataagtatgttgacatatgttttcctgagcaaatggcttattctagatatatacgttggtatattcattgaaaattagatttattatgttataaaatgtgactaaaagcccatttaaagggcacatatctctcatcttttggttctaacgtgaagccaaatgaggacaggcgcatgattcagtttatacaataagaaaattgccccaaagtggatgaagcacacacatcagcagctcagccccactccgtacaatccaagtgcattcaacaagtgatatggtttggctgtgtccccacccaaatctcatcttgaattgtaactcccatgattcccacatgtctgtgggaggaacccggtgggaggtgatttaattatgggggtgggtctttcctgtgctgttctcctaatagtgaatgagtctcatgagatctgatggttttaaaaatgggggtttctctgcagaagctctctttttgcctcctgccatccacatac

SEQ ID NO: 694831 - DNA, 564 bp, Homo sapiens
tatctattctttatacttatatgcatttttgaaaaattccataataaagaggtaagaaaatagcattagaataaagactttaatgcaattactcytcacagtaattcctagagccctaacataggtggaaaacacattctctgctccaaaagacagccttcccatcttcagtctccctgtttgcctaaaactgacacttggaaaagttttccgaataatatatcaggattagaaccaaaattgtaacagagcacctagagatacttcctgttgtgtttatttccagtctgactcactgctactgattctccccattggctttgtattccttaataagtactaaatacagatattatggtattttggtatctacagtttttaaacatgacctttaggaagccggagacactgtggtcaatgtttttcaaaaagtgagtccaagtttggatttcatttaagcttttataatgtattacttttctattctttaaatgtataaagtctatgggttgggaaaaatcatatatccacaccaagcctttttatagtatgttttctgtagtt

SEQ ID NO: 694832 - DNA, 881 bp, Homo sapiens
ctggcctacgtggcgaaaccccgtctctactaaaaatacaaaaattagctgggcgcagtggcacgtgcctgtaatccccgctactcaggaggctgaggcaagagaatcacctgaacccgggagacagaggttgcaataagctgagatcatgccactgcactccagcctgggcaacagagcaagactccatcttaaataaataaataaataaataaataaataaataaataaataaagtaagttggccagtataaagatcacaaaagttaaaaagtcaaaacaaaaatgcccaacatgcaggcacagaggttctttaagatctcatatgcaggctttgaagtaagcattaagaaaactatattgttggccaggcacagtggctcacgcctgtaatcccagcactttgggaggccgaggcaggtagatcacctgaggtcaggagttcgagaccagcctggccaacgttatgaaaccccgtctctacaaaaatgcaaaaattagccgggcgaggtggcatgcacctgtaatccyagctacttaggaggttgaggcaggagaatcgcttgaacccagtaggcagaggttgcggtgagctgagatcacaccactgcactccagcctgggcaacagagcgagactccatctcaaaaaaaaaggaaaaagaaaaaaaaaaagaaatattgttgataaggctaaatagtttcataaatagtacattttgtcaactactaaataactagatgagatggcagattatctatggtactcttaataatgtaaataattctgtgatacaatcagtggattttaaaaaagaaaaaatttatattaaatttgcagttcaataaagtaaaataattttataacaaaacaagattttg

SEQ ID NO: 694833 - DNA, 881 bp, Homo sapiens
ctggcctacgtggcgaaaccccgtctctactaaaaatacaaaaattagctgggcgcagtggcacgtgcctgtaatccccgctactcaggaggctgaggcaagagaatcacctgaacccgggagacagaggttgcaataagctgagatcatgccactgcactccagcctgggcaacagagcaagactccatcttaaataaataaataaataaataaataaataaataaataaataaagtaagttggccagtataaagatcacaaaagttaaaaagtcaaaacaaaaatgcccaacatgcaggcacagaggttctttaagatctcatatgcaggctttgaagtaagcattaagaaaactatattgttggccaggcacagtggctcacgcctgtaatcccagcactttgggaggccgaggcaggtagatcacctgaggtcaggagttcgagaccagcctggccaacgttatgaaaccccgtctctacaaaaatgcaaaaattagccgggcgaggtggcatgcacctgtaatcctagctacttaggaggttgaggcaggagaatcgcttgaacccagtaggcagaggttgcggtgagctgagatcacaccactgcactccagcctgggcaacagagcgagactccatctcaaaaaaaaaggaaaaagaaaaaaaaaaagaaatattgttgataaggctaaatagtttcataaatagtacattttgtcaactactaaataactagatgagatggcagattatctatggtaytcttaataatgtaaataattctgtgatacaatcagtggattttaaaaaagaaaaaatttatattaaatttgcagttcaataaagtaaaataattttataacaaaacaagattttg

SEQ ID NO: 694834 - DNA, 881 bp, Homo sapiens
ctggcctacgtggcgaaaccccgtctctactaaaaatacaaaaattagctgggcgcagtggcacgtgcctgtaatccccgctactcaggaggctgaggcaagagaatcacctgaacccgggagacagaggttgcaataagctgagatcatgccactgcactccagcctgggcaacagagcaagactccatcttaaataaataaataaataaataaataaataaataaataaataaagtaagttggccagtataaagatcacaaaagttaaaaagtcaaaacaaaaatgcccaacatgcaggcacagaggttctttaagatctcatatgcaggctttgaagtaagcattaagaaaactatattgttggccaggcacagtggctcacgcctgtaatcccagcactttgggaggccgaggcaggtagatcacctgaggtcaggagttcgagaccagcctggccaacgttatgaaaccccgtctctacaaaaatgcaaaaattagccgggcgaggtggcatgcacctgtaatcctagctacttaggaggttgaggcaggagaatcgcttgaacccagtaggcagaggttgcggtgagctgagatcacaccactgcactccagcctgggcaacagagcgagactccatctcaaaaaaaaaggaaaaagaaaaaaaaaaagaaatattgttgataaggctaaatagtttcataaatagtacattttgtcaactactaaataactagatgagatggcagattatctatggtactcttaataatgtaaataattctgtgatacaatcagtggattttaraaaagaaaaaatttatattaaatttgcagttcaataaagtaaaataattttataacaaaacaagattttg

SEQ ID NO: 694835 - DNA, 899 bp, Homo sapiens
tgccagcttcttatcaatggccatggcaagattttaaataatgacaatactgaggcgggcggatcatctgaggtcaggagttcaagaccagcctggccaacatggtgaaaccccatctctacaaaaattagccaggcatgatggcaggtgcctgtaatcccagctactcaggaggctgaggcagaagaatcatttgaacccaggaggcggaggttgcagtgagccgagatcatgccattgcactccagcctggatgacagagcgagactccgtctctaataataataataataataataataataataataataataaaatgataataatcaggatctgctctcaggcagcagttgggaccttaggaattacaaaatcttccaaattaggtcacatttgtgtaaaggaattagaaacatctttcccatttcatcaggcccagattagaacagcctctgcagagggtcctagtagatcagtcctcctgtcaggcccatgggtgtgatttcctttctcaaacagccactgaacttttcttatgattatggagtgtttattgggtgtgtgcaatgtgtcaggtgcagtctggaatttggaactgtcacatactggcagcatgacctctttaagaggcaggaacttgttatctctgycatccggtcccatgttggggaactatctatgaatcagccaagatgggttcccagccctccatccatctcccttcaaggcaaaatggtctaatgggaaaagtccatgatctagcatacctggctgctctacttccagcctatgttacttagagcaagaatcacctattttaaccttcagttttgtcagctgtaaaataagcatacaatacctggtctacctattgtgttgctaggaggaatcattca

SEQ ID NO: 694836 - DNA, 642 bp, Homo sapiens
acacaggacactggtggatcttcttatttggaatggcccttgatgctcatggcccattcctatatgtcttctcaatggtaaaaatccttctctgtgagtggatctgaattttcaggccagccaaaaaagttttggagctaagtttggcaaactcagtaatttaatgaagatagttgttattattttggttcaaaaaaataagactcagagcagtatatctagtcataagtttttgtataaaaaagagggaagctaagaatacacatttacatttgcttgtatgtagaaagaaactctaaaagaatgcagaagagcatagttacctgtgatgaggagaggggaaaagaacggggtcgatgggatgaagatggatggaggtggggcattktcactgaatatacccatgtatgtattttctgtttttaaaccatgtgagtctattatctattgaaaaaaattgaaatatgtttttaaaagttaggtgtttctataaagtattgagattgttatattttggaggttttatagcctgggtaacaccttgacctctctacctgtgaacttggaaccagctgagaaatagagataagaaattagctgtgtgattgatgaagttgattgggtaatgttattttagttgat

SEQ ID NO: 694837 - DNA, 630 bp, Homo sapiens
atattaaaatgcacggaggtacttccatcctagagctagggaaaggtgactttggttagcaggtgaaggaaggattctctgggttgcttactcttgagctggaactaaaaaatggatagaataaccaaaaatgcaaagttctaggaaaaagtgctccagacaagggaaagatcctgaggctggaattaggagcatccaaaaaatagagagtcagcatggccagagtgcagtgaacaaagacagggctgagaaataaaaccagaggcgggccaaggatagatcctgaggggcctgctgcaatagtggtgggaaggaagctgttggatggctttacataaaacagtgatctccttygatttccatctttaaaacatcactccataggcttacagtaggatgcaaaatatggctactattctctccaattcctgtgagctcacccctttgccatgtggtacagctgctcccccatcaagagaaggagtctatttctctatccacttggttctgagctggccttaggaaattcctttgatcaagagaaggcagcagaagttatttggggagctcaaaagccagatctcaagtacaacactgcacagcttccactcttagcctcctgctgccatg

SEQ ID NO: 694838 - DNA, 477 bp, Homo sapiens
tagaaatagacatttaataactttcagtatatgatgcatgacagcagaggacccgtgcatcattcatgcatgggctcagcaagtgtggaaaaaataatctacaattagaaycctagggaataccagcatctaattggatgcaaggcaagagaagccaactaagatgggaaaaaaggagaacccagaatgaaaagtattgccaaagcctcgaagaaggatgtttcagaagtttctctgccactggagagggtcaagagaattaaaaaaaaaaaccaaacaaacaaaaccccacaaagcacaaactctctcaaataatggattcccataaagcccacttggaattctgtgaaagggtgtcaccttggagagttataaaaatcaattggcctgcttccagaactcagtgcctagggttaataaactggaaagcagaggtgttttctaagacagacaattggttttgatgggcaccaaaaa

SEQ ID NO: 694839 - DNA, 1660 bp, Homo sapiens
aaatgcgattcagcaccctaccttttgcaaataaaatcaccagcatttattatattgatcttatatattgaattacacttgactggataataatagtaaaaaagattattgctaagaatttcttctgtgtgttgttcttactttataaaatcaatgtttccttagagttattgaattcattttgatttttttaaaaattctcaagtcaaataaatacagaaaggattatttcaagactttaatgcctaaagtttgagtattgaaaaggctaaataactatttccatgtactgagccttggagaagggaaatttgtttttggaatggggacatttatatttttgtactgaatttttgtactgtttcttgtatatagaatgagttatttttgttatcccaattaggattgtaaaacaagctacagttagctcttggatgactttgtggattattttccaccttacttacacagtttttgtaagatatgttctatatgttttaatactttaaaatataaagtgaacatagtatttttttctttaaacaggtaataaaaactttggatcccaagttaaatccagcatcagctgaaataatgctactaagaaagcagttggcagagaaagagagaagaattgagattctggaggtaaaacttttatatttactcatcttttagttattttgtagaatcctggtaattaactgctgtcatatatttgtcattaatgatcaagttttacaagaagttaaaaatgtcatgttttagcacccagtgtgtttattacaaagcatctcactggccgcccaatagatgctctgtgtgtagctcatataccctgtttatatgcagcgttgtagttgtagctcttcttgtcaataacaggcattatatggctatccctgactttctaatagagacctgctataatgtttcttttaaaattatgcaaatatgatttcatctgggggatataaacctgacctttaccgtttaaaaaagatactgtgttgattcagtcaatcacatttttcttgtcttcagccgtttctcacctgaacctaaacaaacttattaatagtggaatttctgggagaaggaagtactcacagaattccagtgaactcctgaactaaagtggaattcttagttattaatcatgcaaaattatattagtaatggcatgctctcatcaattagctgagtctttaaattttaaagatatttttgtgttagtggttatattatttttatgagccttaggtaagtatgtcactatggaatggctgtattcttagatttataattgagcacgttctggtttcctttgcaaagtgttttacaaagctactgtatttaatactgtagtgagatttgatgctattcttgaagtaaatatatacttccttttaataacatatgcataattgcagagccatattgaattckacatactggccttgaaattctcataaatggtactcagtttcttttttttttttcttttgatatggagtcttgctctgtcgcccaggctgggttgcagtggcgtaatctcagctcactgcaacctccgcctcccaggttcaagcaattctcttgcctcagcctccctagtagctgggattacaggtgcatgccaccacgcccaactaatttt

SEQ ID NO: 694840 - DNA, 1431 bp, Homo sapiens
gatcacaataaagctgttaaaaaacaaaataagattataagtaagaactgatgttaggtgtcctgttattcaaaagattcaatgcacttaatctatctaacatgtttctgaataaatctaactaaatatacaaagccttagctttcaaggaaagaaattgccagaattatatatagacatcgtctgtccctatgagttgcttgtttcagaaagctctatgaattgaaacttttttcttaagtcagaacaaataattaaacttataatattaacatgacagcatgaaataagagaaagcactttgtaaagcagaatgtaaacataacacctcaatgatgttagcagaaatcagatctaagttttttaaagaaggaaaaaatacgtatttcaaaatcttcaaaaatcaaagcctactgtaaaatcaactctttgattttatatttgttatatggcagacttagcttcatatatatcttaggcttagaacagcaggattagcttcatacataggtttgaatgctgaatagcacttaaaatgatatacagaatttaaaagttgactttatgtttgctacacagtaggcttagcttcataaatacgttaggcttagcacagtaggctcagcttcatacatacgtttgaatgctgaatagtatttaaaatgacatgtagaacaatacttctcaaaaggacacaaatgcaactataaaatctactcagattttgttacatcactactaaaattttatcctggaaaataaaagttgtaagtaaaagaaataaatactcacttgagtgataagcattttacaagaagtctttgaccaaaatgttctttgggtatatcaggaacactaagccgttctattggttcttcctacaaattgaaaagcaacaccaaaatgaatatgcttatcatattccaactctttatctttttmagaacttactttactaatctaacacttttagtcttcacaatagaacatagagaagaatgacctatttatccacagacagaagtcatttgattataacttactcattaagaatagtaaattcactagtataaaatgtattcatttataaaaattacagctgtttcagttgctttatcccctacattttgtaatactatatatcaatcacaatcccaaaagatcaattttaataatcatttgcttctttatatgcaaacatctatacctcatctggtgatggatgcaaagcaaaaagttctttgtgacggtttgatttcctttggtcatcattctgacggtctatttcttcatttggagttcgatcaagtaaattgggaagcaaagcatcaggaagtgaatttttcaagtcaaagatactacaggcccagctaccccttggggtatcatctattgacattgaacgtcttttaaggtcatcctgtcatgcaa

SEQ ID NO: 694841 - DNA, 1431 bp, Homo sapiens
gatcacaataaagctgttaaaaaacaaaataagattataagtaagaactgatgttaggtgtcctgttattcaaaagattcaatgcacttaatctatctaacatgtttctgaataaatctaactaaatatacaaagccttagctttcaaggaaagaaattgccagaattatatatagacatcgtctgtccctatgagttgcttgtttcagaaagctctatgaattgaaacttttttcttaagtcagaacaaataattaaacttataatattaacatgacagcatgaaataagagaaagcactttgtaaagcagaatgtaaacataacacctcaatgatgttagcagaaatcagatctaagttttttaaagaaggaaaaaatacgtatttcaaaatcttcaaaaatcaaagcctactgtaaaatcaactctttgattttatatttgttatatggcagacttagcttcatatatatcttaggcttagaacagcaggattagcttcatacataggtttgaatgctgaatagcacttaaaatgatatacagaatttaaaagttgactttatgtttgctacacagtaggcttagcttcataaatacgttaggcttagcacagtaggctcagcttcatacatacgtttgaatgctgaatagtatttaaaatgacatgtagaacaatacttctcaaaaggacacaaatgcaactataaaatctactcagattttgttacatcactactaaaattttatcctggaaaataaaagttgtaagtaaaagaaataaatactcacttgagtgataagcattttacaagaagtctttgaccaaaatgttctttgggtatatcaggaacactaagccgttctattggttcttcctacaaattgaaaagcaacaccaaaatgaatatgcttatcatattccaactctttatctttttaagaacttactttactaatctaacacttttagtcttcacaatagaacatagagaagaatgacctatttatccacagacagaagtcatttgattataacttactcattaagaatagtaaattcactagtataaaatgtattcatttataaaaattacagctgtttcagttgctttatcccctacattttgtaatactatatatcaatcayaatcccaaaagatcaattttaataatcatttgcttctttatatgcaaacatctatacctcatctggtgatggatgcaaagcaaaaagttctttgtgacggtttgatttcctttggtcatcattctgacggtctatttcttcatttggagttcgatcaagtaaattgggaagcaaagcatcaggaagtgaatttttcaagtcaaagatactacaggcccagctaccccttggggtatcatctattgacattgaacgtcttttaaggtcatcctgtcatgcaa

SEQ ID NO: 694842 - DNA, 634 bp, Homo sapiens
tgagaccagcctgggcaacatagcaagacccagtctctactttttaaaaaaattcaatctttttttcatgttaatgaggaacagtatttttaaacttttaataatattgcaaataacagaaagcaaaatattaaaatattcttttaaaaggcacttcaatcaaagtgttcttttaatcaragaccaggtcaatcttcctcaggggtgggaaaaaaacagaggaattagatgaaagtactctttgatttatctgaaaaggatttaagcatttttaatttccatatgcttttacagccttttgattcatttagttttaagtttttggcatagttgaaactttcattgtggctcctgatcagaggtatatgcctacattaataggataaaggaagatgtgttaaagaactaccacaccaattttctattttgaataatttttaagaaggcgaatgaggcttttttctttattcgacaacttttagaaagaaattttgcattttgttttatttttcaaaggtttaaaatagcaacttggatggaaagtttgaattatgtaataaacaatgccaggttttcagagcctgaagcaaaagccagctgctgggacctagggaagaagggacaacagtattcc

SEQ ID NO: 694843 - DNA, 612 bp, Homo sapiens
tgcactttactatgatttcttactaattctcattagatgcctttaaagtaaaagggatgacacagggtagatagtttttgtttgtttgttttttgaatgtgaaagtttcccaataccccaaatgcatatgccacttccataccrtgaataccccacacacaacaaattctaaccaagtcactgctattgatcaagggttacataaaacgacattagtagtagcgcttttggttttcattgtttttatttgcatttttcatgcttataatgttccagaaagcttgcaaaatgcttcacaaatagtatttagtttaataaattaaactgaactccaacttgggtaacagagcaagactgtatcaaaacaaaaacaaaacaaaacaaaaaagcacagggctaggcacaggggctcacgcctgtaatcctagcactttgggaggccgaggcaggcgaatcatctgaggtcgggagttcgagatcagcctgaccaacatggagaaaccccatctctactaataatacgaaattagctgggcatggtggcgcatgcctgtaatcccagctactagggaggctgagacaggagaatggcttgaacccgggaggtggagg

SEQ ID NO: 694844 - DNA, 599 bp, Homo sapiens
gacctggcttcaggaggtgaagcaaaagcaagtgtagccttgggtgctcttctcaaaacagtagctggagtgtcagagaccacagccccctgacagtagagcttggagtttctctgtctgctcatgccatatcccgccactcagcacrtgtttgctgaaaaattaaatgaacaagagcctgccaggttgtctcctgggactaaaagaaatgggacagaagcaccgacgtatctgtgcaaaaatggagcgtgtgcccctagggagtcagtgcagaccagctgttgggccgtctaccctcgcggatgctgtgggtcacaagaagtcggactcctggaccactgagccccgggctgctgcaggaggtctgaggtctggggaatgggaagctgagatcagcgtgcgtgtaaaagtgtgtcaggcttggagacagacaggaatgttccccacagaggcaaatgttctgcaaatgtgccaacactggaggtgtttcccgcgcggagcgaccaaagagaggaatcatttcgacagaagaggcagcactggaagtatccatggtggggaaggggggaaggccagggtccggcggggaggggttgagg

SEQ ID NO: 694845 - DNA, 601 bp, Homo sapiens
agaatgacacccagaaggaaggaagcgagaaaagaaggattaagcagaaagaaaggatcattatggctcttttccaggcttcctcatccccaatctttctctttagaggctcctgacctaccgaccaaaccatttaccagtgcatataaatctgtgtaagtatttgctcagacatggggcaaccacatacactgtacaaagattttcacttmaccaagttggaggactcacttgatcccaggagtggtagtgttaaatttgagacagctctcaagagatgtcctgagttgagggggttgggaccttgaacacctgcactgagcagtccttggatgcaatgtgtttgtaggggaaggataaggcagctctccttggacctaagacaattcctgagagggactctgatgtgtacagtcagctggcaaagcccccagtagctagagaactcagtgccttggttatgaaagaggacctgggtgaccgacagcaacattcagtcctgtcttgtgtcacttgcatccacttatgtaaaagttcaacacttcttggaattgcttctccaggattcaccttagtttattttcctggataatattttttt

SEQ ID NO: 694846 - DNA, 550 bp, Homo sapiens
taggcaatgcataaacaaacaagtaaatacgacttacaaacagttgacatatcctgtgaagaaacaaagtgtcaggaaacactggaaagggaagctagtccagctaagtcactcatgaaaggccctttgagaacaccatgttaatgcagagtactrtattgacatgaactagcaaagggtacaaaaaggaatgttccaacagagacagaaaagagctcagcatcttcaaacatcccattagtcagtatggcaagaactgtgatcaaaaggagagagtggcacgagatgagttaggcaggggccaggccagccaggacctcctgggccaagaaaaggtgcttaggttttactcgaagtgcaggaaggctaatcgggaaagtgagagggtgtaatttgtatttttatatccactctagctattggatggaaaatagattggaaaagacaccaggctattgcaatagccctgacaaaaatgatgggatggagtggaaacagtagagacagagaaaagcagaaaggatttagagagagagaagaagaagacagg

SEQ ID NO: 694847 - DNA, 606 bp, Homo sapiens
gtcacactaaagaccatttttataatactttgtaaaagatttcattttaatgagctataatctcgagtgtaagaaacaactatatcataattgttaggtttcttttttttgtttttgagacggagtcttgctctgttgcccaggctggagtgcagtggtgtgatctcagctcactgcaagctccacctgctgggttcatgccattctcctgcctcaacctcccaagtagctgggactacaggagcttgccaccaggcccrgctaatttttttgtatttttttagcagagacgggatttcatctgttagccaggatggtctcgatctcctgacctcatgatccgcctgcctcggcctcccaaagtgctgggattacaggtgtgagccactgctcccagccattgttaggttatttttaatcacgcatagaacctagcccaaaacctcacagaataggcttttgatagaatatggttgaatatattaagtatttgcattgttttaactattaggctgctgtctaaaaggggctatatcaaaacttatgatcattatcaaaaatccatcatattggtcttcaagtgaagatattgaaaaacacagttta

SEQ ID NO: 694848 - DNA, 606 bp, Homo sapiens
gtcacactaaagaccatttttataatactttgtaaaagatttcattttaatgagctataatctcgagtgtaagaaacaactatatcataattgttaggtttcttttttttgtttttgagacggagtcttgctctgttgcccaggctggagtgcagtggtgtgatctcagctcactgcaagctccacctgctgggttcatgccattctcctgcctcaacctcccaagtagctgggactacaggagcttgccaccaggcccggctaatttttttgtatttttttagcagagacgggatttcatctgtwagccaggatggtctcgatctcctgacctcatgatccgcctgcctcggcctcccaaagtgctgggattacaggtgtgagccactgctcccagccattgttaggttatttttaatcacgcatagaacctagcccaaaacctcacagaataggcttttgatagaatatggttgaatatattaagtatttgcattgttttaactattaggctgctgtctaaaaggggctatatcaaaacttatgatcattatcaaaaatccatcatattggtcttcaagtgaagatattgaaaaacacagttta

SEQ ID NO: 694849 - DNA, 610 bp, Homo sapiens
tgaggcaggaaaatcacttgaacctgggaggtggaggttgcagtgagctgaggtcacaccattgcactccagcctgggagacagagggagagtccatctcaaaaacaaaacaaaacaaaaaaacacagcaagaaaagtaaagaagaagaaagcaagtgaaaactatcaaacaattaatagcaaaaaatatctgaaagtaattgatcaaaratacatcacttaaattgtaatgacaaattgtttgcaatgatttttatctaacttgagaatatataataatgttactacttgaatatcctgaatatatttacacacactacctgaatatcctgaatatatatatatataaacacacaaagacacacatacatgtatatataaaattcataaatttatatatgaataaattatggtatatttgtaccatggaatgttacacagcaattaaaaagaataaattaccagtgacttgaagagattctgtgttgtttggtgagaaaaagcaagacacattgtattatgctttaaaaaatgccattttgtaaaacaaaccagtatataaaatattggtgtgagcatatgagatgaatgaaaaatatggaaacattca

SEQ ID NO: 694850 - DNA, 610 bp, Homo sapiens
tgaggcaggaaaatcacttgaacctgggaggtggaggttgcagtgagctgaggtcacaccattgcactccagcctgggagacagagggagagtccatctcaaaaacaaaacaaaacaaaaaaacacagcaagaaaagtaaagaagaagaaagcaagtgaaaactatcaaacaattaatagcaaaaaatatctgaaagtaattgatcaaaaayacatcacttaaattgtaatgacaaattgtttgcaatgatttttatctaacttgagaatatataataatgttactacttgaatatcctgaatatatttacacacactacctgaatatcctgaatatatatatatataaacacacaaagacacacatacatgtatatataaaattcataaatttatatatgaataaattatggtatatttgtaccatggaatgttacacagcaattaaaaagaataaattaccagtgacttgaagagattctgtgttgtttggtgagaaaaagcaagacacattgtattatgctttaaaaaatgccattttgtaaaacaaaccagtatataaaatattggtgtgagcatatgagatgaatgaaaaatatggaaacattca

SEQ ID NO: 694851 - DNA, 610 bp, Homo sapiens
tgaggcaggaaaatcacttgaacctgggaggtggaggttgcagtgagctgaggtcacaccattgcactccagcctgggagacagagggagagtccatctcaaaaacaaaacaaaacaaaaaaacacagcaagaaaagtaaagaagaagaaagcaagtgaaaactatcaaacaattaatagcaaaaaatatctgaaagtaattgatcaaaaatacatcacttaaattgtaatgacaaattgtttgcaawgatttttatctaacttgagaatatataataatgttactacttgaatatcctgaatatatttacacacactacctgaatatcctgaatatatatatatataaacacacaaagacacacatacatgtatatataaaattcataaatttatatatgaataaattatggtatatttgtaccatggaatgttacacagcaattaaaaagaataaattaccagtgacttgaagagattctgtgttgtttggtgagaaaaagcaagacacattgtattatgctttaaaaaatgccattttgtaaaacaaaccagtatataaaatattggtgtgagcatatgagatgaatgaaaaatatggaaacattca

SEQ ID NO: 694852 - DNA, 1437 bp, Homo sapiens
gcttgtgcatggagaaaaaccaaagtagagagaatcagctgggggacctcacatatatttgtcttccttttggtaccgtctgtgaaaccagcatccactggtgtttttgctgtttctgcgagtatacacttgcagacatttcagggaagtaaattattgactttgaaatactgtgaaaagttagaacttcaatgttgatttggatgtggaaagcaggtgaataaatagagggaactggtaaacacgttgggtaaagggtactttgacaatgacagaatcatgtccgtcttctgcttaaaactcttgaaaggtttttttttytcccccacatcttctttccttttattgaaaaacattttagaaaatgtcagttaataaaaagtagcaatgaatcaacagggatatactagtggaaaacacaatataaaactaaaaatgccattggcttcttcaattgattaagagcacaaaatgtaacagacagaaggtctgttttaaaccaattttctaaagcgatgtatttttaaaattctccccatcagctatgtacacactcacaaaaacaatgtgtgaaggaaacctgtcatacacaagaagttgtatcctgaattcttcagggaaacacatgttgaaataggaattaaaaagagtcagcaacaggttaattatatatatgtgcgtatatatatatacacacacatacacacacacacacatatatatacatatatatattttttctttttttatttttttgagatggagtctcgctctgtcacccaggctggagtgcagtggtgtgatctcggctgtgaaacctctgcctcccgggttcaagcgattctcctgcctcagcctcccaagtagcttggattacaggcacctgccaccacacccggctaatttttgtatttttagtagagacggggtttcaccatgttggccaggctggtctcgaactcctgacctcatgatctgcccacctcggcctcccaaagtgctgggattacaggcatgagccaccacgcctggcctaataatatttttaaattgagtcttcaagcactgcgtggcacaaagctatactatataaagtactgctaggttcaaaagaaaaaatctgtaccgcttttagcaaaagtgcttttccagaaaagcaaatcaaaacaatgtaatcagcagaccaaggaggttacagccagacatcagggctacaccttctcatatcttgctagaagatcctatttatccagaataaaatttcaggacaaaacagggacattttaaacatttcttactttacgcatttaaaattttctatattttcagcatgatccagcagaaagagggctgctgtgagaactggctattttattttctttctgtggtgagactgtcatggagcctggatattttaggctcttatgcatccctgac

SEQ ID NO: 694853 - DNA, 648 bp, Homo sapiens
cgtaaatgagataagaacttggaaaagaggcagaggtggatgtcaatgattatttcccaagggaatgaattaggaaatccaagaaaaaagtaaaatgccaataacagtaaattttcagataggttcgctttttatgaaatgaacaacatagtgttgycttactcctgtgtggtcattgccaccatgcaatctcacatttccatcatattcactgttgaacttggcctgcacttgaaatctgccctctcctgccccaacatttctccccttcctttacccaatttatgcattaaaaacattaaaccagaatctgaatggaaaataatttgcaattggtagcctttgacaaatcactaatggctggctagaaaacccacctgggaacaatttcagagataaagcagaaaaaaaaatgtggataaagatgacaagatatgtgtctttatatttaattcctggtgtagttttacctaacttgttaatgtgcccattttctaccagtggactacatgtccattcgtattaacaagcaccagtcttgctgctcaccagttactggtcttggaatcttaaaaatttaagatgaatacaattctcgtagatggataagatgaaggtagagatggctgccttagggtttccagctct

SEQ ID NO: 694854 - DNA, 648 bp, Homo sapiens
cgtaaatgagataagaacttggaaaagaggcagaggtggatgtcaatgattatttcccaagggaatgaattaggaaatccaagaaaaaagtaaaatgccaataacagtaaattttcagataggttcgctttttatgaaatgaacaacatagtgttgccttactcctgtgtggtcattgccaccatgcaatctcacatttccatcatattcactgttgaacttggcctgcacttgaaatctgccctctcctgccccaacatttctccccttcctttacccaatttatgcattaaaaacattaaaccagaatctgaatggaaaataatttgcaattggtagcctttgacaaatcactaatggctggctagaaaacccacctgggaacaatttcagagataaagcagaaaaaaaaatgtggataaagatgacaagatatgtgtctttatatttaattcctggtgtagttttacctaacttgttaatgtgcccattttctaccagtggactacatgtccattcgtattaacaagcaccagtcttgctgctcaccagttactggtcttggaatcttaaaaatttaagatgaatacaattctcrtagatggataagatgaaggtagagatggctgccttagggtttccagctct

SEQ ID NO: 694855 - DNA, 652 bp, Homo sapiens
aaattatgttctttttcttggcgaattttatttttacataaaatgaaaggcaaaggaattagaactatttttccaaaataaaactccttctgcccttgaacatggctttttgaaaaaaagaaaacaaaytaacaaatcaaaattaagcctaatgttacacatttacatctgtatggtgtacccacatataatttcatgaattttgttaagtttgcacactttcaaataacagtgaatagttacgtgcttattaaaaggtcattatttatacacatttaacttttcagttctttttgttttcttttatgacactttcatatatgcacattgcatcctaaccacaccagactttcaagagcctttgcctttgtttttcagatcttaaactaaatcttatctaacaccaccccatccaggaccattttgttttgtttttttgctactctttctgttgttaatgccttttcttctcatttgttgctaatcacagatacacggactttgtgaaactaaatgttattcatcattcatcatttatgatacttgctcataaaactacttctccaacatccttggattagcatagccccatttgtaataaaatctagtaacagctgctattttcttcagtagcatattttgcagtataaag
